United States Patent Application Publication US 2005/0228172 A9 - sequence listing, part 93

SEQ ID NO: 423512 - DNA, 634 bp, Homo sapiens
acaaaatggttggccaattacttgggaatgtctatctgttgttagtaagataatgacatagttttcagttatttgctatgtttttctcattcgttaattaggtcaagaaatactgagcactactatgtgctatgctctgttccaggttctggaaaattacaacagtgaacatgtagttatgaatattttgtttagtgcacctaacttgctgtttgcatttactgttctgttgatacatacattgatacttttacatccagtataatgagaatttttggttacatatacaattttgcctttgattaaaagtttggaaacagctacactcataaatctagagtttagtttattagttttctgaaaaggcagtctcctggtgaacacgcccactttttawaaagggacattatcctgccctattaacataacttcctgaagaaattatcctattattttcttcaataatattgactgctcaaatatggcagtgtcacagcatcaagagactagctctcccagtgttaggtaatatgtctaacaggcaattttgactatgaaaaaatatcttagtttcagattgactcattttcacatacagatttatagctacatagtatgaacctgtatagattca

SEQ ID NO: 423513 - DNA, 634 bp, Homo sapiens
acaaaatggttggccaattacttgggaatgtctatctgttgttagtaagataatgacatagttttcagttatttgctatgtttttctcattcgttaattaggtcaagaaatactgagcactactatgtgctatgctctgttccaggttctggaaaattacaacagtgaacatgtagttatgaatattttgtttagtgcacctaacttgctgtttgcatttactgttctgttgatacatacattgatacttttacatccagtataatgagaatttttggttacatatacaattttgcctttgattaaaagtttggaaacagctacactcataaatctagagtttagtttattagttttctgaaaaggcagtctcctggtgaacacgcccactttttataaagggacattatcctgccctattaacataacttcctgaagaaattatcctattattttcttcaataatrttgactgctcaaatatggcagtgtcacagcatcaagagactagctctcccagtgttaggtaatatgtctaacaggcaattttgactatgaaaaaatatcttagtttcagattgactcattttcacatacagatttatagctacatagtatgaacctgtatagattca

SEQ ID NO: 423514 - DNA, 554 bp, Homo sapiens
cagcataagaacatatatgttgggtgcttttgcaactaaaagcacctttcacttgtgttatcttatgggtcttcactgtgaaacaggcaggccaaaacattattctaataattattattttatggataggaaaattgagacccaggaggtttaaatggcatgttgctatcacacagctctagatggagagacagggaatgagcatyggatttctgcctccacacatagttgtcctttccccaccgaccatgagtcttctttggagtgggtcttcagagacaataggtacattttttttattctctgtggaaggtgaacaggttctttgagactccaggttcttctgtcaaccaggttacctcatgtgataccccactaatcgtggtgggattaacctgtctagtttcagcactaaagattttgtgtgtgcttacatttgagggttcatgtaccatacaggaaaagcacaatggaaatcactcaacagggtcgaacttcactttgaaattcagcttgatcttttagattaagaactccacaagtataacattcat

SEQ ID NO: 423515 - DNA, 554 bp, Homo sapiens
cagcataagaacatatatgttgggtgcttttgcaactaaaagcacctttcacttgtgttatcttatgggtcttcactgtgaaacaggcaggccaaaacattattctaataattattattttatggataggaaaattgagacccaggaggtttaaatggcatgttgctatcacacagctctagatggagagacagggaatgagcattggatttctgcctccacacatagttgtcctttccccaccgaccatgagtcttctttggagtgggtcttcagagacaakaggtacattttttttattctctgtggaaggtgaacaggttctttgagactccaggttcttctgtcaaccaggttacctcatgtgataccccactaatcgtggtgggattaacctgtctagtttcagcactaaagattttgtgtgtgcttacatttgagggttcatgtaccatacaggaaaagcacaatggaaatcactcaacagggtcgaacttcactttgaaattcagcttgatcttttagattaagaactccacaagtataacattcat

SEQ ID NO: 423516 - DNA, 575 bp, Homo sapiens
ctctctctctccactccttccctccccctaaccatctctctccgcttttctcctgtgattctaattagaaatatattaatccttctcactctaagtctcctcctcatcattactattcatattttctgccactttgtttctttgtgctgcatattgcataattttttcagatccatcttttaattcactgatgctcagtgcagctatatttaatcaattgttaaagtcatcatttaagtttttaacattatatattttgttctttttaaaatatgtttgattacgtctcgtagtttcttgttctctcctattttccatcttttattgatttaaactgattaaaaataactattgaacattctattttttatttttcccatctctgaagtctgattctactgtgtgttattcctgctagatctcactaatagtgacttattttcttatgttatttttataattttgactgtatacattcataagtcttggaactttttctatggaaatactttaaagcctargctgaaggtgaatttctccagagaggatttgcatttgcttataccagatgtcta

SEQ ID NO: 423517 - DNA, 591 bp, Homo sapiens
ccgaatacctctatgctaaatttaaaaggaatggcagagttacccatgggtaacagtttgattccaaacatgaacttatcttgtatctaaaacccaagctctttggggcttctattcagacacagacagaaggaaatacagcacaggactgaaagagggtgcaatcttagaaggagctcatgtttccagcttcttcccttgtttgttttagggaatccattaartaacacccccttttccccaattgagaaatacaacacagagctaggtgaaaaatcaaaatactagctttatcgctagtaaaatctagaaaggaggatatggctaatatgtgagcatcataggcttcctaatattttctgatttctgaaagaaatgtacccacaagcctcaggaagagctgagcagccacagacatctccatcataggaagaggctaagcttatcatgtggtacagaagaggccagagtgcacctcggggtagacagagctatagagtcagcatactcagcccctgttatggactgaattgtgcccccccccgcgattcatatattgaagttctaacccccaatatggctgtagttgga

SEQ ID NO: 423518 - DNA, 615 bp, Homo sapiens
agatccatagagatggaaagtagattagtggttgcctagagctgggggatggagggactgagggtgaaatctaaggaaagcaggattttttttttttttttttgagacgaagtctcacttttgtcccccaggctggagtgcaatggcrcgatctcggctcactggaacctctgcctcctgggttcaagcgattctcctgcgtcagcctcccaagtagctgggattacaggcacctgccaccaagcccagctaatttttgtatttttagtagagacagggtttcaccacgttggccaggctagtcttgaactcctgacctcaggtgatctgcctacctcggtcccccatagtgctgtgatacaggtgtgagccaccgcgcccggctgaccgagcaggatttttttgaagggtgtaatgaaaggattctaaaactgattgtggtaatggatgcacaattgtgactatactaaaaaccattgagttgtatactttaagtgggtaaattgtatggtgtgtgaattatatctcaataaagtactttttaaaaagcaataaaataatgtcttggctgtaatgtaaatgaaactaattcataataatataaaccataacatg

SEQ ID NO: 423519 - DNA, 615 bp, Homo sapiens
agatccatagagatggaaagtagattagtggttgcctagagctgggggatggagggactgagggtgaaatctaaggaaagcaggattttttttttttttttttgagacgaagtctcacttttgtcccccaggctggagtgcaatggcacgatctcggctcactggaacctctgcctcctgggttcaagcgattctcctgcgtcagcctcccaagtagctgggattacaggcacctgccaccaagcccagctaatttttgtatttttagtagagacagggtttcaccacgttggccaggctagtcttgaactcctgacctcaggtgatctgcctacctcggtcccccatagtgctgtgatacaggtgtgagccaccgcgcccggctgaccgagcaggatttttttgaagggtgtaatgaaaggattctaaaactgattgtggtaatggaygcacaattgtgactatactaaaaaccattgagttgtatactttaagtgggtaaattgtatggtgtgtgaattatatctcaataaagtactttttaaaaagcaataaaataatgtcttggctgtaatgtaaatgaaactaattcataataatataaaccataacatg

SEQ ID NO: 423520 - DNA, 564 bp, Homo sapiens
gtgcctcgctagaatttatttttaaaatatttataagatttagactttttacaaattcagacagacctcctcttaggcagcttgagttaatgcttgcttttatacaggatgaaaaaaatccaattgtttcacaaacacttcttcaatgcaagtatttgttaagagtgctggagcatctctatgcgtgtgtctatttacatatttatcactattttacatactactaaagttaatagaagataagtaaatgaacaggtaatttattcaaaacaaacactccatgtatatacasaccctgtctatagtggcaataattggtacagagaggctcgaacgtgatatctgtcattcttgaagatgatttgacattgcatatatgtgataattttaaagcttctgaaatatgcatataaatgcagaattagagaaccatatgaaaatttggtattttctccattgtaagctccactgacatccatattttccaggagaaaaacactatgatgaccttaaaatagtattcagtagttggccctgattttttatactttctagcaagagccc

SEQ ID NO: 423521 - DNA, 608 bp, Homo sapiens
aaaatgtcttctgctcaaatcttccatgaaatgtaattttgaaaccatgagcttggttcttactcaagcagaactcttagcgtatttactgggacttcagctgaattggaatggaattgtgagatcacattcctttggaaatataaacagtttgtttttacgtataaggaagccacataaaagtatctagaattttagctcagtagactggttggtgatttggtgatgaacattattcttttcaatattatggccattttatttatttttttaacaggcattttgtttttctttggtagggaaataagttctcttctagaccatctttcatctaggaagctcagttcattgtaaagccaagtaggagtaacaataaactgctagaacattttaccaatattgttaaactaatggcaaaggaaagggaagctacatgcaagattgtggttagtgtgttgataattttgtgtttgttgtgatctggagcataggtaagggtttctttacagatttactgtgaattttttttttttttttwacggagcagagagtttaataggcaagaaaaaagggggaagaaagaaagaagaagctcccctgtacagaga

SEQ ID NO: 423522 - DNA, 566 bp, Homo sapiens
attttccatcaaatcagagataagaaatagcaaggtctcctgattgtttcatatgtgaatgaacatrcccagggatgcacagggataataaactcagcaactgagtttaagaggaatggggcagaaaggaggccaggaaagaagtgttcacgcagagaaccttacagcctataggacgttaagtcatagaactagaaagcggtctgatgcagagtaaaaccttcataagctatgattccttccctttatccttctagtctatttcttttccagagctaatctctgtaacaattctagaatatcaagctcaaaggctgtaaatatcttgtgctgagagccaaggtcagacaaaaaggcatgtactcccaagtgactctttttcccctttgggctctgttagtctttgcaggaaaacttaactactgagtgactttacccataagtgaggtaaatgcctcagatctgttcttagcattaagagattgctggtgtattattttaggctggaagctgacagcaccagagaaacattccaatcacagctcaggaagaattcttgaaccaga

SEQ ID NO: 423523 - DNA, 566 bp, Homo sapiens
attttccatcaaatcagagataagaaatagcaaggtctcctgattgtttcatatgtgaatgaacatgcccagggatgcacagggataataaactcagcaactgagtttaagaggaatggggcagaaaggaggccaggaaagaagtgttcacgcagagaaccttacagcctataggacgttaagtcatagaactagaaagcggtctgatgcagagtaaaaccttcataagctatgattccttccctttatccttctagtctmtttcttttccagagctaatctctgtaacaattctagaatatcaagctcaaaggctgtaaatatcttgtgctgagagccaaggtcagacaaaaaggcatgtactcccaagtgactctttttcccctttgggctctgttagtctttgcaggaaaacttaactactgagtgactttacccataagtgaggtaaatgcctcagatctgttcttagcattaagagattgctggtgtattattttaggctggaagctgacagcaccagagaaacattccaatcacagctcaggaagaattcttgaaccaga

SEQ ID NO: 423524 - DNA, 584 bp, Homo sapiens
gtggtgatactaggaggaagggcctttgggaggcgattaggttatgaggacagaaccctcatgaatgggttagtgcctgtataagagagaacctagagagatcctttgcccccttccactgtgtgagttataataaaaagatgatagtctatggggsagtgaagcctcaccagacaatgaatctaccagtgccttgatcttagacttccagcctccagaactgtaagaaatacatttctgttgtttataagccacagtctatgatattttgttatggcagcccaaatagactaaggcaaatcctttgcccattttttaattgggttgtctttttgtcattgagatgtaagtgttctttatatagtctatatactacaccctcatctgacatatatgagtgattcttctggctgcaggaacaaaatctctggccattttttggtcaggatattctcaagagaaggttttggggggagcacatttaccacaggttaaaatccatattttagatgaacatctaagaatatcctatacttctttttgatacagtcgtttctgctacagaggcgctactaatatttatc

SEQ ID NO: 423525 - DNA, 320 bp, Homo sapiens
gatttactggatatgccagtgcatttgcaaactattcctagttgcattttctatgcccagaggttctagactcaactggctgggtcaccgatggccatttcatctgtgcgtagctatagggatttaaataggaggatttttgttaaatgaagacaattgaccractgtgcgtggaatcaatgtgcaggatgattcaccaggctttctgcctgttagagaagttaaatggttgagaattaataattatgcgattgtagttcacgacttcagcacaagtcattgttacagttctcaaatgttgagcagccccacgttattcc

SEQ ID NO: 423526 - DNA, 606 bp, Homo sapiens
gcatctttaacgatacaagaaaacgatctgtcttgtaacataatctatgtaaccttggtratgcccttgcaacacgcaaagcttccagtgttcctaagaaagacagaaattttacttagaacttgatatattaaatgttttcaggagcttctcggtcagaggataatggcagctgcgtgatataagtccgtacccatatcctcaacgaaacaaaaacaagccttcagcattacttagagagaatgccatgaactgaacattaaattacttaagtagaagaaagaaaagataccaaattccaactgagctccctccactattgccaaggacttaagtgaagtacagggttgtcacctctttataaatagaaagtccaacaccaagaactaaaaactgaacagaggtcaggtgccttattgatcaagggaagagatttgaaagaaaatgggacaagaggtgagaggcttgaaggagccttgtttctgggaaaaagtcagataaatacgaaaagaagataatgtccttcagaggcctgacaatgaagggaaagaaggaagtcagaagggaaaattacaaatcctgcagaaatgaaagagaagacagcca

SEQ ID NO: 423527 - DNA, 516 bp, Homo sapiens
aattataaattaatatgatatctgcaggtgtgtaatgagatgaatrtgacaagaacagaggttatatgaggccagagaaaattatgatgaaagaaatttattttttaaattatcttttccttcattttaatcttttccctttataattaaataacaggagtaatattgtcttctctatactattccagtactcctatgcaaagagctatcaatgatatttcctgccctactatctttatatttgagctctatgctcaataacctaatcaaaatataattaggatgctttccatttttggtttgacttttcctcaccaccaaagattaattcttatctccatttttttcaaaaaatgacagaaaagtgggggaaaattctaccaaatgactgtttcatctctgaggaattaaacaccagtaggaataagttttcagtgaattgattaatttatttaccaaatctaccaatcaatacagttgaaataattgaagtagctatgcaaatagcagtaaacc

SEQ ID NO: 423528 - DNA, 516 bp, Homo sapiens
aattataaattaatatgatatctgcaggtgtgtaatgagatgaatatgacaagaacagaggttatatgaggccagagaaaattatgatgaaagaaatttattttttaaattatcttttccttcattttaatcttttccctttataattaaataacaggagtaatattgtcttctctatactattccagtactcctatgcaaagagctatcaatgatatttcctgccctactatctttatatttgagctctatgctcaataacctaatcaaaatataattargatgctttccatttttggtttgacttttcctcaccaccaaagattaattcttatctccatttttttcaaaaaatgacagaaaagtgggggaaaattctaccaaatgactgtttcatctctgaggaattaaacaccagtaggaataagttttcagtgaattgattaatttatttaccaaatctaccaatcaatacagttgaaataattgaagtagctatgcaaatagcagtaaacc

SEQ ID NO: 423529 - DNA, 564 bp, Homo sapiens
cttttctgtggttggcatatgattctctcaacagctgtttaccatagctatgggtcactgatatgtcccatgtgacatttataaatgtcttgtgttgttcacaagacatttataaaattcagctgtggttcatgtatcactgatgtggtctacacatgtcttaaagaatttttttcttttctgtttttttcaaggagggactcatttggaattccttactctacaaagtttggggttttctgaaggtttgcaacattgaagagaacaaccctgtcatgctagcagaggagaaactacagtctttgatggcaggttgacaagggtactctgtccctggagtcattttattatctgacttctgtattctgccaaagacactgagaccacctacctgcacattggaaaatacagctgagatctgtctttgtgacccagacagatgccctctcaacttctctctgttctgaaggaaaacattgcagcccaggccagatgaaaacaagcactttyccccccactttttctgtgggaaagatgagttgaaaccaaagttaatatatttga

SEQ ID NO: 423530 - DNA, 610 bp, Homo sapiens
tagtcaaatgaattccaacaggataaataaaaaagaaaacctcatctaaatatatcagagtaaaattatgaaaaaaaaagcagtgaaaatatttcgatcctagttaagagacaattgtgtgcatacacttggtgaattgtaagatatctaaattatacctcaatgaaacttattttaaaaatctagctagaaataaaagaaactatataaatgaatgccagttagattggagccaacttaaaaaatagcaaaattaaaagtcagaagagagtgtaacaaaatccccaatatgctgagaaaaaaacaaatattagcagaaagttacaaaaacttcacaaataattcaaggatgaagatgaaaaaaataaatttttaggcaagcaaaatctaagacaacttcccactaacagaatctccttcacattcaaaagtcgtaagatgtaattcaagaagaaagacaatgatcccagatgtaaatatgtaaggaaaaataatgattaaaatgcaagcaaatatatatgtaaatctraaaatactgatttaccttataaaataataataataaatctttctggagttcagaaaacatgataaaaaacagaaatatgat

SEQ ID NO: 423531 - DNA, 684 bp, Homo sapiens
atttttctgggaactgtgtgatacacagaggatacaaggagggaaggcatgactttctcccttagcagataatacggatgcggaaaccaatagctatgacacaattctataaatctaattctggaaatgtgtttaaggtgcaataagagtaagaggtatatatctaagtcagattgggaagtgggtgtcaggagtaatttctttttagaatagaatggtagttgagtcctgaatgatgaaaaagatttaccaggcctggatggggtggaaagtgtggtgggctgttcccactcaccaccatgggatatgcaaaagcatgaatgtaggagtgggaatttgaagaatccatagtttgctaagattggaatattgtacatactttggggataccaggagttaagtggaagaattaggttaggggaggtgttcatgaaactttgatgccactctgtagaatttgtgatccatgaatttttgtcrccttcctggggaagccaacccaacattttatcaggagaatgatgcacagtttttatcttagaaagatcatttgggcagcgacattgaggaccattaagaagaaaagcgaggcaatacgagcgagaggacctcagggatgctattaagtagctacagaaattgggcttcaaaaaaagaggaactctaaagctctgacgggaaaat

SEQ ID NO: 423532 - DNA, 446 bp, Homo sapiens
tataagtgtttggtagctcctgctgagttcattctcattcgtgccaccttgtgaagaaggtgccttgcttctcctttgccttccaccgtgattgtaagtttcctgaggcctccccagccatgctgaactgtgagtcagttaaacctctttcctttataaattacycagtctcaggcagttctttatagcagtgtgaaaatggactaatatacttcatgtagctcttccttttctaattaagcttttttaaaaatggtaaataactaaaattttcctcatcccattaaatggttgaatatatactattttgtacttcagtagtatggattcttgttaaggatgacttatcatcattggtatttatgttcttagttttgtcttaccgattaacaatgaacttctataacataaacttcgtttttacttcaaaaaacttaaaacagaat

SEQ ID NO: 423533 - DNA, 595 bp, Homo sapiens
gtcataaatgacagaatttcyttctttttaaggctgaatagtatttcttttcccactcatccattgatggacactgagttcatttgcatatcttgggtattgtgaataatgttgccatgaccatggcagtacagacatcccttcaacatactgactcccattcctttgcatacatatgcagaaccaggattactggattacatggtagtttatttttagttttttgaagaacccccatactatttttcaaaatggctgtactaatttactaccaacagtgtacaaggctttctttttctctagatcctcccaatgcttgttgtctttcttttttttatgatagcctttctaacatatgtgagattatatctcaatgtggttttaacttgcatttccctaatgattagaggtgctgaacactttttatgtacctgtttgtcatttgtatgtcttctttggataaatgtctattcaggtcctttgcccattgtttaattggattatgtgttttcttgttattgagtagtttgaggtccttatatattttggatattagccccttatcagatatatgatttgcaaatattcttcccag

SEQ ID NO: 423534 - DNA, 595 bp, Homo sapiens
gtcataaatgacagaatttccttctttttaaggctgartagtatttcttttcccactcatccattgatggacactgagttcatttgcatatcttgggtattgtgaataatgttgccatgaccatggcagtacagacatcccttcaacatactgactcccattcctttgcatacatatgcagaaccaggattactggattacatggtagtttatttttagttttttgaagaacccccatactatttttcaaaatggctgtactaatttactaccaacagtgtacaaggctttctttttctctagatcctcccaatgcttgttgtctttcttttttttatgatagcctttctaacatatgtgagattatatctcaatgtggttttaacttgcatttccctaatgattagaggtgctgaacactttttatgtacctgtttgtcatttgtatgtcttctttggataaatgtctattcaggtcctttgcccattgtttaattggattatgtgttttcttgttattgagtagtttgaggtccttatatattttggatattagccccttatcagatatatgatttgcaaatattcttcccag

SEQ ID NO: 423535 - DNA, 591 bp, Homo sapiens
gtcaaactcatagtaatagagaatagaatgatggttaccgggagttggagggggtggtgagagaaatgggaagttattgctccaagtgcacaaagtytctgttatatacaatgaacaagccctggagatctactgtatagtgtagtgtctatagttacaagtactgtattatatacttaaaaatttggtaagaggatagatcttatgttaagtgttcttatcacaaataataaagagggtgagagaaaactttcggagacaatggataagtttattgcatagattgtggtgatgatttcacagatgtgtacttatctccaaactaaagttgtatacattcaatatgtgctgttattttttgtcagttatacctttaaaaagtggggtttttaagtgaccttctctagttgtgaagtacaccttcttccacttgacaacttgtctgccaagcccatatcctaatctttgttaacagatcctttacatctagattattgttattaagatatcattttctgttgatcaattttttactttggaggatatctttaagataatcattctcttttgagcaaatgtatcatcattgtt

SEQ ID NO: 423536 - DNA, 590 bp, Homo sapiens
gagcaatgcagcagttagaacacagggctccagcaacagagagatcagggtttgtgtcccagcttagtagcttggtggctttggacaagaatgttcttctaagtttttttccyctattaaaaaaccccatctatttcagaaaatcttgtgaatactaaacgaaagatcgtacagttcaagttcttaggaaatgtgtataataaatggtaactcctctttttcccacactacctccaagtttcttttctctctcccctttctctccttcagtcttttccttctctctctttacctacactaatttccctcttctaccatcaccactgtttatgctcaagcccaaaatgcccacaagcaaaatatcacaagccaaaataatgtttcaacaaaaaagagtcacagatccccaaagatcatgtgtccacagggaccatcagctatttcttacatttctggttaatgatccgtttacttctataaactatagttttctcaatttcccatgagcatttgtgatgctcaggcttaataggatctggctgaatgaacaccacacagagtgaatacttcaacttccctcaatctttgca

SEQ ID NO: 423537 - DNA, 348 bp, Homo sapiens
cttctctctctttacctacactaatttccctcttctaccatcaccactgtttatgctcaagcccaaaatgcccacaagcaaaatatcacaagccaaaataatgtttcaacaaaaaagagtcacagatccccaaagatcatgtgtccacagggaccatcagctatttcttacatttctggttaatgatccgtttacttctataamctatagttttctcaatttcccatgagcatttgtgatgctcaggcttaataggatctggctgaatgaacaccacacagagtgaatacttcaacttccctcaatctttgcagtttccaatgaaattgtatggcattatcagacttg

SEQ ID NO: 423538 - DNA, 625 bp, Homo sapiens
acatttctggttaatgatccgtttacttctataaactatagttttctcaatttcccatgagcatttgtgatgctcaggcttaataggatctggctgaatgaacaccacacagagtgaatacttcaacttccctcaatctttgcagtttccaatgaaattgtwtggcattatcagacttgagtgtaattctgttatctctcctgtatctcttgacttcttcatcccacacagagacttccctgtaaagattgagtggagtgtggaatgagactgagacattcacaacaatgcctgaacctcttagcaaccagaattccaatcgcaaactgaacatgacaatcctttaaaagtccacatgctttttcgcacgttgttgtccccttttagagtagcgcttttcaacttcctgtcctggcatcgagttgtttaaatcaatgaccataaagtgtattggttctaataattcttagagtactgagttgtgaatgagttagtttttataatatcaattaaaatgatttaaagtttattctagtggtagtatttctctcagtgctgtggtctgaatgtgtccttccaaaattcatatgctaaaatctaacctccaaggtgagtgtcgtaaaag

SEQ ID NO: 423539 - DNA, 625 bp, Homo sapiens
acatttctggttaatgatccgtttacttctataaactatagttttctcaatttcccatgagcatttgtgatgctcaggcttaataggatctggctgaatgaacaccacacagagtgaatacttcaacttccctcaatctttgcagtttccaatgaaattgtatggcattatcagacttgagtgtaattctgttatctctcctgtatctcttgacttcttcatcccacacagagacttccctgtaaagattgagtggagtgtggaatgagactgagacattcacaacaatgcctgaacctcttagcaaccagaattycaatcgcaaactgaacatgacaatcctttaaaagtccacatgctttttcgcacgttgttgtccccttttagagtagcgcttttcaacttcctgtcctggcatcgagttgtttaaatcaatgaccataaagtgtattggttctaataattcttagagtactgagttgtgaatgagttagtttttataatatcaattaaaatgatttaaagtttattctagtggtagtatttctctcagtgctgtggtctgaatgtgtccttccaaaattcatatgctaaaatctaacctccaaggtgagtgtcgtaaaag

SEQ ID NO: 423540 - DNA, 625 bp, Homo sapiens
acatttctggttaatgatccgtttacttctataaactatagttttctcaatttcccatgagcatttgtgatgctcaggcttaataggatctggctgaatgaacaccacacagagtgaatacttcaacttccctcaatctttgcagtttccaatgaaattgtatggcattatcagacttgagtgtaattctgttatctctcctgtatctcttgacttcttcatcccacacagagacttccctgtaaagattgagtggagtgtggaatgagactgagacattcacaacaatgcctgaacctcttagcaaccagaattccaatcgcaaactgaacatgacaatcctttaaaagtccacatgctttttmgcacgttgttgtccccttttagagtagcgcttttcaacttcctgtcctggcatcgagttgtttaaatcaatgaccataaagtgtattggttctaataattcttagagtactgagttgtgaatgagttagtttttataatatcaattaaaatgatttaaagtttattctagtggtagtatttctctcagtgctgtggtctgaatgtgtccttccaaaattcatatgctaaaatctaacctccaaggtgagtgtcgtaaaag

SEQ ID NO: 423541 - DNA, 610 bp, Homo sapiens
gtgaatcatcaaagcaccagagacaaactaattrgggtaagcacaattaagatctctgcacaaaatccattaacttccattggtcaaattaagttccatggccaagctcagtataaacagaaagtcttctatagtcagaagggaggaaaggaaatatgtgctgcacaattatccaaataccacaatggctaagtagtaactgatttaatgattaagcagcattcatatgacaaaaggctacttatccattaaaaatgtaattagaaaaaaatgactggcagagtagtattcttatgatctactttcaaggaaaaaagtaagttatcaaaagatacatacacagaaaattatagaaaggtttgggaatgaaatattaccagtagttacctttgaggaatgagatattggatggttttgattatttcccctctacacgcttttcaatgttttccaagtcagctgaacagattacatattatttttgttattttaaataattaattaataaaatgttcttccaactttagaaaaacataaactcttatttgaggcaatagcatcaccacattaatatggctagatgagaaaaaaagtgaaagtatgttgtgat

SEQ ID NO: 423542 - DNA, 610 bp, Homo sapiens
gtgaatcatcaaagcaccagagacaaactaattggrgtaagcacaattaagatctctgcacaaaatccattaacttccattggtcaaattaagttccatggccaagctcagtataaacagaaagtcttctatagtcagaagggaggaaaggaaatatgtgctgcacaattatccaaataccacaatggctaagtagtaactgatttaatgattaagcagcattcatatgacaaaaggctacttatccattaaaaatgtaattagaaaaaaatgactggcagagtagtattcttatgatctactttcaaggaaaaaagtaagttatcaaaagatacatacacagaaaattatagaaaggtttgggaatgaaatattaccagtagttacctttgaggaatgagatattggatggttttgattatttcccctctacacgcttttcaatgttttccaagtcagctgaacagattacatattatttttgttattttaaataattaattaataaaatgttcttccaactttagaaaaacataaactcttatttgaggcaatagcatcaccacattaatatggctagatgagaaaaaaagtgaaagtatgttgtgat

SEQ ID NO: 423543 - DNA, 610 bp, Homo sapiens
gtgaatcatcaaagcaccagagacaaactaattggggtaagcacaattaagatctctgcacaaaatccattaacttccattggtcaaattaagttccatggccaagctcagtataaacagaaagtcttctatagtcagaagggaggaaagkaaatatgtgctgcacaattatccaaataccacaatggctaagtagtaactgatttaatgattaagcagcattcatatgacaaaaggctacttatccattaaaaatgtaattagaaaaaaatgactggcagagtagtattcttatgatctactttcaaggaaaaaagtaagttatcaaaagatacatacacagaaaattatagaaaggtttgggaatgaaatattaccagtagttacctttgaggaatgagatattggatggttttgattatttcccctctacacgcttttcaatgttttccaagtcagctgaacagattacatattatttttgttattttaaataattaattaataaaatgttcttccaactttagaaaaacataaactcttatttgaggcaatagcatcaccacattaatatggctagatgagaaaaaaagtgaaagtatgttgtgat

SEQ ID NO: 423544 - DNA, 583 bp, Homo sapiens
ctatgtgaattaagtgtgctaactcccaccagaggcagaagagttatatatatatacattttatagttgtatataattgtatgttatagttatatatacttattgtaataattaatataatttcataattttaattataatacagttatatattgacatataattatatgtattttacatcttttaaaaaaatatatatgtatgcttgagtgcacaatttattgtgaggccttacatgtcatcaatcatgtaatttatattcaacctaaaggtagtaataaaagatgggaggtaatgaaccacagtgatggcccaggagcctattctagtgggtctggagtcctttggaagctggtcagttggggcatcactgcctctctagggcaaagcctcaagcggcagccacctaaagttgtgagaagtcctcagagttctcacaggcctccaaaggcatcttgaacaargctttgtcctggctgcttttataatccttcagagatgtgtctattttcaacatcttacgactttcccctttctactggttcatttcaggtcttgagtgatatcaggcaacagcaggaat

SEQ ID NO: 423545 - DNA, 593 bp, Homo sapiens
aattttgtgtctagcaaaactaagcttcataagtgaaggaaagataccatatttttcaaacaaacaaatgctgagagagtttgccactaccaagccagcactacaagaactgctaaaaggagctctaaaacttgaaacaaatccttgaagtacacaaaaatagaacctccttaaagcatgaatttcacaggacctataaaacaaaaacataatgggggaaaaaagatatccaggcaacaaatagcatgatgaatagaatagtaccacccatctcgatactaacattgaatacaaatggcytaaatgctccacttaaaataaacagaatggcagaaggaataagagttcaccaaccaagtatctgctgtcttcaggagactcacctaacacataaggactcacataaacttaagctaaaggggtggaaaaagatgcagatggactccaaaagtgagcagaagtagctactcttatatcagacaaaacaaactttaaagcaacagtggttaaaaaagataaagagggacattatataatgataaaaggactagtccaatatgtgatatttatcacattcctaaatatatatgcac

SEQ ID NO: 423546 - DNA, 559 bp, Homo sapiens
actacctgagactgggtaagttaggaaggaaagtggtttaatcggctcagttccacaggctcaacaggacgcatgactgggaggcctcaggaaagttaacaatcatgttggaaggtgaaagagaagcaagcacgtcttaccatggcagagccrgagagagagagtgagggcgcatgtgccacacactttcaaacaaccagatctcatgagaactcactaacactagatcagcaaggggggatgtccactcccatgattcaatcacctcccaccaggctcctccaccaacacgtggggattgtaattcaagatgagatttgggtggggacacagaaccaaaacatatcaattaacttgctgggaattttggaagttaggataaagtagaccttagaccttaaaataactctagaagagtttttggaagacctctgtaatagggtatatgacagactcagattgaaaggatcacttaaatcaagaaatgttaggggcataaataaattaatacagcacatagactgagtttattctttgagccctgttcttccactacttc

SEQ ID NO: 423547 - DNA, 559 bp, Homo sapiens
actacctgagactgggtaagttaggaaggaaagtggtttaatcggctcagttccacaggctcaacaggacgcatgactgggaggcctcaggaaagttaacaatcatgttggaaggtgaaagagaagcaagcacgtcttaccatggcagagccagagagagagagtgagggcgcatgtgccacacactttcaaacaaccagatctcrtgagaactcactaacactagatcagcaaggggggatgtccactcccatgattcaatcacctcccaccaggctcctccaccaacacgtggggattgtaattcaagatgagatttgggtggggacacagaaccaaaacatatcaattaacttgctgggaattttggaagttaggataaagtagaccttagaccttaaaataactctagaagagtttttggaagacctctgtaatagggtatatgacagactcagattgaaaggatcacttaaatcaagaaatgttaggggcataaataaattaatacagcacatagactgagtttattctttgagccctgttcttccactacttc

SEQ ID NO: 423548 - DNA, 521 bp, Homo sapiens
ccctttgtctttgcatattctagaacattatcttgctctagctcttgtcccatttcctaaaatctcacttgctcaattctccaaataagtcttgctaagaaaattcctttttaataaggtraggatgtctagcaaataaaataaatacagatatttgaagtcagactggttattttagtacattagaaagaaagtcagcatcagcttcattattgcattaattttaaacaatcttaatccaattctcattttatgaataggcctttggtaaaatgcacccatctaagccatttaatcatttggaactttaaaatatgtatttatccctactggaaaatattagctttccaaaatgccttagttttagagtttctcattttcatgaaaatagtaaaaattaacaaatatctatagatataaaatacaatccaatctcccacaactcccagatactgcagccatcactttctaagggctgcgtaaggaagcaaattcactgaatttacttcagacctgtcttt

SEQ ID NO: 423549 - DNA, 559 bp, Homo sapiens
aaaaattcatatggtcagggaaaatgggcctgaactagccaggagactgatattaagaaaaggacatcatttccttaaatgagggtcccagagtttgaagcagcaaattggatcttttaatccaactccaccctatataaaacactttcccaaacctgtttttaaaaagatggtttctgatttcttgtgtttttaatgcccttactttggttatcaagaaatatttcaggctgggtgcggtgcctcatgccagcgcttctggaggstgaggtaggcagatcacctgaggttaggagtttgagaccaggctgaccaatgtggtgaaatcccatctctactaaaaatacaaaaattagccggccatggtggtgcatgcctataatgccagctactcgggaggctgaggcaggagaatcacttgaagttgggaagcagaggttgcagtgagccaaaatcacaccactgcactccagcctgggcgacaagagtgaaactcggtctcaattaaaaaaaaagaaagaaagaaagaaaaggaatatttcaaatatgtgacaattaa

SEQ ID NO: 423550 - DNA, 590 bp, Homo sapiens
ctctgctcattacctggtctcaagagaccacagttttctatagagccacagmccctggcaggaggctaacaagaggggacaaatgtttttcttttcttttttttttttttaagtgtggttttccagaaaataaagatagttccattccaggaacaatcaagaatacagtaaaatctgaaataatttatatttacctttctgataaattattggtaataatattcaaaaggttaagaaaactacttattccttcttatgaaaaattgatatacaaaaacctttacataaaagagaaagaacttgaggggaaataacccatacgaaatggtaaaatatttgccttaatgattcctgttatgcttctccaatattctgtagatatctgttgatcattaaccacttgagcgggatgacagggcataaaaaagagagctagagctcgaatccactgccaattgaaaatagccactgactttgggtgcctgtgattgcaaatttttttaaaagtgatttctaatagtaagggacacgtcatttacttgataagctaaaatatcctttaaaccacaatgtatgtgaatgaggaaata

SEQ ID NO: 423551 - DNA, 631 bp, Homo sapiens
ataagctgactcttttgttgcaggtttctactcaaccatgagaaaactatcatgagtgaagcgaggagggcttgtctccatctagtggtcagtataataatattaaatattactattattctaaaatcaaaatatgtacatgttattttcttaattgtagtgagaaatgayactaatcataatagtactgttattttctaatcacgtatatcaaacttgacaagtaaataatccgatagaagatacataatcttgaagtagacatattgaaatacatagtttgagtacactgtcaaaagtctgtgaagctatttccctgctgcaaaaaagaaaaaagatgagaacacaggagagtaaggatggcctcaaaattttatattctgacatatttaaactttttacaaaatcacccaagagaaaaacgtttggcctatcaggggagaagatcttctataaactacggacttaatgtgtaagcaactcagaacaggggtccacccagaacaggaagaaataaaagtctttgttttcaattaggccatttatggcacaatcaaaactgtgcatagtttttcaatggaactcgtggagctagagagtagaaggacggttaccagaggaagggtagtca

SEQ ID NO: 423552 - DNA, 631 bp, Homo sapiens
ataagctgactcttttgttgcaggtttctactcaaccatgagaaaactatcatgagtgaagcgaggagggcttgtctccatctagtggtcagtataataatattaaatattactattattctaaaatcaaaatatgtacatgttattttcttaattgtagtgagaaatgatactaatcataatagtactgttattttctaatcacgtatatcaaacttgacaagtaaataatccgatagaagatacataatcttgaagtagacatattgaaatacatagtttgagtacactgtcaaaagtcygtgaagctatttccctgctgcaaaaaagaaaaaagatgagaacacaggagagtaaggatggcctcaaaattttatattctgacatatttaaactttttacaaaatcacccaagagaaaaacgtttggcctatcaggggagaagatcttctataaactacggacttaatgtgtaagcaactcagaacaggggtccacccagaacaggaagaaataaaagtctttgttttcaattaggccatttatggcacaatcaaaactgtgcatagtttttcaatggaactcgtggagctagagagtagaaggacggttaccagaggaagggtagtca

SEQ ID NO: 423553 - DNA, 575 bp, Homo sapiens
tgtgaagctatttccctgctgcaaaaaagaaaaaagatgagaacacaggagagtaaggatggcctcaaaattttatattctgacatatttaaactttttacaaaatcacccaagagaaaaacgtttggcctatcaggggagaagatcttctataaactacggacttaatgtgtaagcaactcagaacaggggtccacccagaacaggaagaaawaaaagtctttgttttcaattaggccatttatggcacaatcaaaactgtgcatagtttttcaatggaactcgtggagctagagagtagaaggacggttaccagaggaagggtagtcaggagctgagaaggaagtttgaaaggctaatgggtacaaaaaatagaaagaatgaataagacctagtatttgctagcacgactggatgaatatagtaaaaactaatttaattgtacattttaaaataactaaaagagtataattggattgtttgtacatagaggaaaaatgcttgaggtgatggatactccatttaccatgatgtgattatgatgcattgcatgcctgtatcaaaatatctcatgt

SEQ ID NO: 423554 - DNA, 575 bp, Homo sapiens
tgtgaagctatttccctgctgcaaaaaagaaaaaagatgagaacacaggagagtaaggatggcctcaaaattttatattctgacatatttaaactttttacaaaatcacccaagagaaaaacgtttggcctatcaggggagaagatcttctataaactacggacttaatgtgtaagcaactcagaacaggggtccacccagaacaggaagaaataaaagtctttgttttcaattaggccatttatggcacaatcaaaactgtgcatagtttttcaatggaactcgtggagctagagagtagaaggayggttaccagaggaagggtagtcaggagctgagaaggaagtttgaaaggctaatgggtacaaaaaatagaaagaatgaataagacctagtatttgctagcacgactggatgaatatagtaaaaactaatttaattgtacattttaaaataactaaaagagtataattggattgtttgtacatagaggaaaaatgcttgaggtgatggatactccatttaccatgatgtgattatgatgcattgcatgcctgtatcaaaatatctcatgt

SEQ ID NO: 423555 - DNA, 590 bp, Homo sapiens
tggctcacaactgtgatcccggcaatttgagaggccaaggcaggaggatcgcttgagcccaggagtttgagaccaycctgggtaacatagtgagacccgctctccacaaaaaaaaaacaaaaattagccaagtggggtggcagcatatgtctgtagtctcagctacttgagaggctgaggtgggaggatcacctgagcccaggaggtggacattgcagtgagccaagattgtgccagtgtactccaacctggacaatagagcaagaccctgtctcaaaaaaaaaaaaagtagaaaaatcactctggaacctatcacgtaaccaaaagccacctgtaccccaaaaactattgaaaaaataataatttaaaaaaagaaaaatcaccctgtttgcagcgtggaaaatggattcagctgcctccatctagttctccagcctgtcttttaaatatttttcaccacaattaatatacattcactgtaacaaatataaatgggacaggaatatgtaacataaaaaactctcaccctccaattctaatcttcaaaagtaatcactatactataaagcagttttgacacacacagtttc

SEQ ID NO: 423556 - DNA, 534 bp, Homo sapiens
attaaacaatatactgcagtgtcactattcctgtgctttggggccatttttaagtaaataagtaaggattccttgaacacaagcactgggatgccgtgacagtcgatctgatcacccagatggccacggagtgactaacgtgcagggacagcgggggtccgcaggacaaagggatgattcatgtccccggcaggatgaagcagaaggatgcaagatttcatcaagatactcacaagggtacacaatttaaaacttatgaattktttatttctggaattttccattgcatattttcagactgtggttgaccatgggtaattgacatctcagaaagcaaaaccatggataaagggggactaccctgcatctcacttcacctccacaaaacccctagacatgtgttactattacagctggggaaacggaggctcagagaattatttgtccaggacttgtaaattacttaagggcaaggagggtttgcacctccttgggcctcagcttccccatctgtaaaagggagatgacacagtt

SEQ ID NO: 423557 - DNA, 534 bp, Homo sapiens
attaaacaatatactgcagtgtcactattcctgtgctttggggccatttttaagtaaataagtaaggattccttgaacacaagcactgggatgccgtgacagtcgatctgatcacccagatggccacggagtgactaacgtgcagggacagcgggggtccgcaggacaaagggatgattcatgtccccggcaggatgaagcagaaggatgcaagatttcatcaagatactcacaagggtacacaatttaaaacttatgaattttttatttctggaattttccattgcatattttcagactgtggttgaccrtgggtaattgacatctcagaaagcaaaaccatggataaagggggactaccctgcatctcacttcacctccacaaaacccctagacatgtgttactattacagctggggaaacggaggctcagagaattatttgtccaggacttgtaaattacttaagggcaaggagggtttgcacctccttgggcctcagcttccccatctgtaaaagggagatgacacagtt

SEQ ID NO: 423558 - DNA, 311 bp, Homo sapiens
tgttttattccattcaagagaatggagagtgggcaccttgtaaatttcacttagtccccaggaaccaatgttctgccccgaagaaaagaactcactgggggtaaaaatggccacaatgttaacagcttctcccatccagaggtagagtttgtcgaccctttggatcttggcttggtcatgtgayttgctttgggtggccaatgggacttcagcaaacctaatacaagcaaaggattgaaaaatgcttctgcattaaagtttgccttctcctgctgctgctggaaacccttctaccaccatgagagcaagca

SEQ ID NO: 423559 - DNA, 197 bp, Homo sapiens
tcactcttttaaaataatggttttgttcctgatttttatctgaagcaaaaggttattaaagtaaaaaatttggaaaataaagatataaaacaggtagattaaaactgcactacacagagataatgactgttatttacacacacacactacaaatttgagwtctaattatataaactcatgactagtataaaatacag

SEQ ID NO: 423560 - DNA, 606 bp, Homo sapiens
ggtttgctgtgcaccggaggtgtgcctagaacaggcctggcacaacttagcataccaaaatgcgtgctgaacacacaaggatcactcaccctggaccggcactctgagcagggcgtctgagcctttgattcctattttctgcttctagggatgcgtgctgctgctttaacttccccactgccttcccctgtccacagagaggggcggacatgcgggaccaaagaccgtgtttctgactctggtctcaaaggtcatccctcgtttcttcctccagcracgttcagcgagccctggctaggggccaggtactgtgctgggacaggcactggtgccacagcagcgaggaaaacagacaaaaatccctgcccttctggatatggatatttggggccctgtgaaagaccaagcaaagatgcactgatttttcttctatgccaaaagaaagcctgaatgtattcattcaaacccacgtttccatcttttgagtactttctacatgccaagccctgtgctggacccgagtctagcccctcttctctggagcagctcttgcctcttggcaacaccgcatgtatagaaaatggtagcatctagacagtgtcctgg

SEQ ID NO: 423561 - DNA, 577 bp, Homo sapiens
gaggatctgtgtcttcgtcttccagcacctggtggctgccagcattcctcagcttgtggctgaatccatccagtctgcctctgtcattacttgtcctcccctctatgtgcatcaaatctctgtctgtctcttatgaggacacttgtgatggcctttagggcccaccttgataagcctagattatccccttatctcaaaaagattcttaacttaatcacatctgcaaagagcctttttctccaaagtcacattcacaggttctagggattaggacccaatatctttaggtggccactatttagccyaatagagcatctgagctctcaggatttagtgtttaaacatccatgaatcagccctgaacaaaaccttcaggacccaatagtccagtctccccagcccagtggttagttcccagcctcctctttcttctccgttcagatgccagcacaagactgagcacaggagtcaatcctgactcagcctctcctcccctaggcaggagtaaaccaagggtatttcacccttttaaaaaaatggacccctttctccttcctaaaggcaacgcctgctgttc

SEQ ID NO: 423562 - DNA, 665 bp, Homo sapiens
tgttttcctttgcattcttaaattcctgatgccatgaatttatttcatttttctatatggaatttactggccatttgggcttcctttcctcttctttacagcacagattttacacattttctccccagccttggcattttcttttttttaaaccttatttccccttccccttgatctattatctatttaaaacatgatgctggttatgtggttatgagtcccttctgctttaaaggttggataaatggatgtacggcatcagctcaacagctgaattagttttcaggtcatcccacccagctgtgctagtcttttttttttttttttttcttaagacagggtctcactcccatggcccaggctggagtgcagtggcatgatcacagctcactgcagcctcaacctccctgggctcaagtgatcctcccacctgagcatcctgagtagctgggactgaaagtatgtgtcaccacgcccggctaacttttgtatctttgtagagacgaggtttcaccatgttgctcaggcwggtcttgaactcctgggctcaagcgattctgcccacctcagcctcccaaagtgctgggattacaggtgtgagccacagtgcccagcctagctattctattcttgccactggaaaaccctcacagaagaagtgtggg

SEQ ID NO: 423563 - DNA, 626 bp, Homo sapiens
ttgtggcctcagtttccatgtccttgagatttcagcagggacagcgccaggatccttaactaggagacacgttgtagacatacctagggggaggcctgggcatccgtcttaaagctgcatttatttgcaaaataagctcagtgtttttatttgtaggataagctaagtagattatgtaaaatctccacgtctcccatccatattgccagtgttgtgtggttctgggtatgattgcaccctgaaaaaaagtgttctatgccgaggaatgaaaattaaaacccacaaatctaacctctcgagtgcacgcacgcacggtagtcacttagcgcctcccatgagccagagctttcatttcccatccaactctggaagtgctgcttttcttgttatccccacttgcagatgcagaaacggaagctctgagggatggcytcgcccagcacacacctttgcagaatttgctttcaaagccaggtctctactaccatctccagcacgctgctgagcctctatgtgcattagaaagtaaaatcacagatgaatttctcagccatctcaacgcgccccatctcaacgcgccccatctcacattcattatcatttgctttgaaggatttttttctttt

SEQ ID NO: 423564 - DNA, 493 bp, Homo sapiens
acaacatttcacccagcaggattaagctatttccatttgtgcgttcagtagatgtattgaacctacctgtgacccaacccgmtcccctctggcctccaaagatttgggccagtaaagacaaagacctggccgacctgtgtagactgaagaatcccagcctccggctcagtgtccacaggccaggcttagggaagagtttgtgtgtgaagtgacagaccataggactgagccacaatctaggctcggagtctttgaagctaatgaccaagctaatgatacacaaacccgggagttgaagaggacccccgaccaaaactctaaattagcctaacctcaaactgtgtcaaactcagccaaaaaaatgttatgagcttggtttgttgtttcctcccaccctctctgcctccttcccttccctaaaatacaggatgggtaggaaagaatcttgctttgcaagaaataacaaacacaatcacgatgtttatgaagactt

SEQ ID NO: 423565 - DNA, 572 bp, Homo sapiens
caaactcctctcttttttgcaatttacttaaaagttgaacctagtcttttactgtttcttattattactaaacaaaaatattgttcaaaagagaaaatcaaattctacctttrcattggtctattattaatacaaagctaattttactaaaattctataaacaaatttatccattcttagactgaccacataagataagatttccacaactcttttataaactcttacaagtttttttcattctctctctttcctcaactttctatatccattcaggtatatctataattcttttttattcctttaacaaaagcaacctttaaatcacctttaaactagacaaagattacttttctttgaagaaaaaacacattcacttgtctttcttataaactttcttaccaaaaacatcctacttttcttatgcagtctgtgtacagaattgtttctcttatatccagtaattttaattacatatattaactataattttaactttcagtaacccaaatttctagagtaaaacatatgagttaagtaattttaatgttatatatatcaggtgcagagcc

SEQ ID NO: 423566 - DNA, 480 bp, Homo sapiens
ataattattccaatagcgactcaatccaataaccctctttatggaaagcccaggaggaattgctcaggtttagaataagtttttaccatataagcaaagagggtgcmaagaatggcagtgaaatggaatagctagggctaggagggggaggagacacaagacaaagacaaatagagaagtgcttgtttccagatttgtttcatttttagaagcttctgggttttttctaatttagtctttgaattaatttggcattgttatcttttagagacactagtttagattcctagagtcttttagatgccttaagataccaaattaaagcagacatcctatttaggctatttggtcttttcttttagcccttctaactgtggaagaaaatgcattgtggaaattcaaaagatcaccaggttggccattgtaattccaaatcactttcagttatatttgtccatcaagaaagacattcacaagatg

SEQ ID NO: 423567 - DNA, 480 bp, Homo sapiens
ataattattccaatagcgactcaatccaataaccctctttatggaaagcccaggaggaattgctcaggtttagaataagtttttaccatataagcaaagagggtgccaagaatggcagtgaaatggaatagctagggctaggarggggaggagacacaagacaaagacaaatagagaagtgcttgtttccagatttgtttcatttttagaagcttctgggttttttctaatttagtctttgaattaatttggcattgttatcttttagagacactagtttagattcctagagtcttttagatgccttaagataccaaattaaagcagacatcctatttaggctatttggtcttttcttttagcccttctaactgtggaagaaaatgcattgtggaaattcaaaagatcaccaggttggccattgtaattccaaatcactttcagttatatttgtccatcaagaaagacattcacaagatg

SEQ ID NO: 423568 - DNA, 623 bp, Homo sapiens
gtagaattaaatttaatgaaccattctttctggaaatcaactgtattttggtttcactgcctatcgaatatagcattttagctggtttctcaaggttaagatttccaacttctcaccaaaaacctacaggtatctcaaacaagtgatgatctcaggaatgtgaataattggcaggaaaaggagacagatgtggcaggttacagaaagaaccaaaagaagatccaagttgttaaccattgttgtcaacacactactgtaatttttttctaaatttaaaaaaccttatattgtaaagaaacaagtaaycattctgaaacctaagaacaaaaatcaaaagaccttaaaacaatcttgagaaaatctgtcacaaggcaaaattttattttttcaagttacaaaaataggagcatgtcaaaaatacagtctagtccttatacgagtagttccagccatttaaaagttatacagagtttggaaaaagcagtttatatacaagtcttaaaacacaacaatcatgaacaatgcacaccgttcaatgtagttattgctagttatatgcagcttttagttaccattgttcttctctgtaagggaaaggacagcatttggacattctgattgtt

SEQ ID NO: 423569 - DNA, 625 bp, Homo sapiens
ggattacaggcatgagccaccaacccgggccatacagttaatttctttttcttattttactttactgacttgatcctccagtataatgttgaatagaaacagtgactgaaggcatccatgtcatgtttccgatttgaacaaaatgcttccaccatttccctatgaagaataaactttgctgttggtcttgttttgtttttgtctttagtagataatctttaccacattaagaaagttattttttccagtttgctaagactttttatcatgagtatgtactgaactttatgaaacatttcttcctgctcttattgaattcatcatgatttatttttctttcagtcagtttttagcatgaataacattttatagatttcctatcattaaactacycttgaattgctgggataactcaatttgcttatggtatattatcttttttatcaactgctacactcagtttgctaatatctatgtttacaatgtttgcctttatactcatgaggaagaatgacttataattgtccttctcattcagccttaatttggttttgacatcaaagttatacctacctcatagaatgagttggagtagattctcccctttttctattctctggaagac

SEQ ID NO: 423570 - DNA, 640 bp, Homo sapiens
agcacataatattactgaaagaggaaagtatttgtagtcacaatacttgaatttaagccccagctacttcctgggcaacttaatctctctgtgctacatttttcttacttccaaaatgagaattcaattaatgagataatgaaagctaaggtgccatgagaatataatgtattattatcattataagagtaaaatcattactgaagttgatttcagtggtaaatttgtaatgtttcagcttaagcaaaaagacatgtatttgaycttctgcaaaagcaaaagacttcgcaataatttattgtatatttcaaaatcactaagagagtggaattggaaggcttataacccctaaaacatgataaatatttaaggtgatggttaacctaattaccctgatttgataattacacattgtatgcttgtgtcaaaatatcagctactcctcacagatatgcacatctattatatatccataaaaataaaaaaataaccaaaaggtaaatctaagcaaaaaaaaaaagcaaacacacttgaataatgtatactggtatgatggagtttttgttagatagttgggagtatcagttagaatgctgcatataacagaaaacccaatcagtagtcgttgaaataagtaggc

SEQ ID NO: 423571 - DNA, 615 bp, Homo sapiens
acttggtaaatgacagagctccttgaagccagcagtgtctgatcaccaaagcccaggctcttaaacctaacgcctgtgctctcctctcctcctaactcatcccaaggtctgctggatccatgcttttctgtgactcactgcctttgcttagattgttcaaagaggatctggctttatctctatgtattttgcccagttatctcatagtccataaaaggattttgtggttctatagctgagcccttgctcaggttgggtaagtcacaaagctcaacatttctaaaagatagcctgatccatgggtgaraacaaagatgggtctgcttttcccaccacacataagccctgtgctaactgctgcctgttaggtagagctcaggggcaacataacaggcacctaaccttcctacatgcccaggttccagcactgcacctggcatgcatagtcaggcaatgtgcagagggcttaagagtttgagggttcagtgggcctggactccaatcctgactctctcacttgcctgctgggagttgtcagacaagttaatacattggcatttagtcatttgccaaatatttattgagcatatacatacgccagataccagggataca

SEQ ID NO: 423572 - DNA, 564 bp, Homo sapiens
tgccattttgaaattcttaatacttttatctttgaatttgttttgtaagtaaagaccaatagcacagtagtgcatgccctgagcagtcttggctcatgccccgtcctgccccctgcctcctcttatctcccagggatgggttcttggctacctcctcccctaacgccacccagagatcactgctgccctgtgcccgcagtggaagaattgaggttgggccagcacatcctacacacttagctgcaagtcaggactctgatgcctatgaaggtctacactcacccctcaagtatgccagagcctgaggcagtataacattaactaggaaattagacacatcatgaaagtttgagagagaccatcctagaaaggaaaaagcttttttcctgttctttgtaaaaaagacttttaagtatttattttgcaytgggctctacgaattatgtacccagccctgatgtcaatgttttgtgcctaaaaagtgagattttttttttgtatctcaaaaatctcaactatgagtatcactaaagataaaaagagcaggtcctcctaacattggtt

SEQ ID NO: 423573 - DNA, 647 bp, Homo sapiens
tcaactatgagtatcactaaagataaaaagagcaggtcctcctaacattggttgatgtataactacaccagaatggttccagtgtgaaccctgggcctcccagttgggggattcccagtttcaatgagtctcttctgagccacactctgtctactggatttgaatgctggcatcaggcatccagccagcaatgatttctgatgaaataaaacagtttcagataggactagatgtttccaagggaatccatgagaagatttccaggttcgatgtttttgatgtawgaatagaggcaccagaattcagagggattctggggttttgtaacctcaagttaaagcaaaaccatctcaagtggggtttgagaccctgaaaatggcttccaggaacgaggaggatttccttctctggggaattttaagaggaatattctggctcacctggaaggacacagttttgaccagaggcaacaaggtggggagacccagacagactctctaagcccctcccatcttgtgagtctctgattttcagttttttagacgccgaggtcattgccagctatgagaagagccaagtctagaccttgccctttgaagtaagcactgctacttgcttcacacagctcctcattcccaaagcatttt

SEQ ID NO: 423574 - DNA, 588 bp, Homo sapiens
ccctagtcctgtattatcttggtcaaggagatcccccagttctaaagagtcctatggagatttcataggactcctcatattggccaaaaaatagctatgttgataccatgtgcaaactttcttgtagctcaaccactgttgcttcctaaatggtgacagctcattacagtcatctgctattacactaaaatgctgttgggatttcatctcactctttattcccactggatatttggcaggagagctaaggttttgtctagtaaagcactcttaacaaaaaaatagagaaaggacaagaagagagaagcatcacaattccatatcttgatttgaggatgtgccattgagatgttaatgtcttacataataagaggttttatggcttaaattcaagagttgggaatgcagcagctgttatcccagtcaggtctacagttttcccagatttcacaatgaacaataggagcaattgttgtaaagcacagtctcttcattcagcatggmaatgtcagggaagtaatatacctttctatactcagttttagggaactgggttttggaattgaggagctgcctgcagcccagcct

SEQ ID NO: 423575 - DNA, 588 bp, Homo sapiens
ccctagtcctgtattatcttggtcaaggagatcccccagttctaaagagtcctatggagatttcataggactcctcatattggccaaaaaatagctatgttgataccatgtgcaaactttcttgtagctcaaccactgttgcttcctaaatggtgacagctcattacagtcatctgctattacactaaaatgctgttgggatttcatctcactctttattcccactggatatttggcaggagagctaaggttttgtctagtaaagcactcttaacaaaaaaatagagaaaggacaagaagagagaagcatcacaattccatatcttgatttgaggatgtgccattgagatgttaatgtcttacataataagaggttttatggcttaaattcaagagttgggaatgcagcagctgttatcccagtcaggtctacagttttcccagatttcacaatgaacaataggagcaattgttgtaaagcacagtctcttcattcagcatggcaatgtcagggaagtaatmtacctttctatactcagttttagggaactgggttttggaattgaggagctgcctgcagcccagcct

SEQ ID NO: 423576 - DNA, 624 bp, Homo sapiens
gaattgcttgttagtggcagtgcagggagggggaacccacacatatctgatgtcagaagtgttgcattgagtagtgtgtgtgagtggaaagaaacagttttgttttttcctcagaaatgagcattaaggaattttgggggtgatggaaatgtctccagcccatcagaatccatcagaaaactacttacgcaatttatcaagaatgccaatttcttcctatgaggagatttgtatataataactcacaaaaaaggtttaatmccagataaggtttgggatattttttcttccaaatatgcatgcactaaaaaagagggatttaaaaaaaaaacaaacattttaaatgttatctgttgtgattatttgtcagtgatggggttgtaaaggaattttattttcttccttgtctgcagattaacatttttctggtatatggatgtcctgcttttggagttctaataataagaaataaaagtttttacctttatttaaataaagaattcccattttgcattataaaatgtttgatgatgagaaatgaagtaagaagtatgaatgtgctggtgtgggagcctgtggaagagaggaccatgtcatctcaactgtcctgagctgagcagtgaa

SEQ ID NO: 423577 - DNA, 551 bp, Homo sapiens
gcagaggtatagattgcttctcacaggaggggaccctggtgttgctttctctacaacttcacctggtgtaccccagtttctgactttggggtgttgggtcacttcctgaaagcaggcagtgcagactctccagcccccaacccttcggtggagttttcagaactscctgtgctttcttccttctgtgtcatgctggtggtgctgccctgtccctgtttcccagaagagccctcacaatctctgcaggacctgagctggttagagagcctccttcctctaatcagcctccagccacagctccacaccaggtgccctgatgctgctgcaggcccagggacaagaaggttggctggctgtccccacgtctctctcaccctctagagtgtgtgtgtgcaggggggagggggttaatcttcaaatagatacaaacattttcctgtagccaaaacttaacccatgtttctttaggcattatagcaaccttagaactctggaaaccaatcctttttgttgtttgttttgacaaataaaggagatagaatgtgggatat

SEQ ID NO: 423578 - DNA, 561 bp, Homo sapiens
ctacagcctgttccttcctctggaagcttcgtcccagaggggcacccgccagatgccagctggagctctcctgtatgaggtgtctgtcgacccctgcttggtggtgtctcccagtcaggaggcatggaggccagggatccacttgaggaggcagtctgtcccttagcagagctcaagcactgtgctgggggatccactgttctcttcagagctggcaggcaggaacatttaagtctcctgaagctgcgcccacagctgccccttctcccaggtgctctgtcccagggagatgggagttttatctataagcccctgactggggctgctgcctttctttcagagatgccctgcccagagaggaggaatctagagaggcagtttggctacagcagctttgcagagctgcggtggaccctgcccagttcaaacttcctggtggctttgtttacactgtgaggggaaaaccgcctactcaagcctcagcaatggcggacgcccctccccsctccaagctcaagcatcccaggtcgacttcagactgctgtgctggcagtgagaatt

SEQ ID NO: 423579 - DNA, 592 bp, Homo sapiens
gaagatatcctctacctcttaagcattactggattttccaaggccaggaaagatcattttaggagtaactctttggatctccatcataatagcgacagtaaaggttaaaggaattgttttgaatttttttcttttaggcttctgacactctgttgacaaagaaatccccatgrcaattcaaggcaaagaaactcccacccacaaagtttttctgcattgccacttgtggtttcagggcttcagtaactgcaccatgtaaaggagaaaccactggactcactttctctcccagctttccacaactggtcataatgaaccaccttgggcttggctgatggtcttctggaagctgagtgtgccgccttggagggaagcccttgccagttttagatttaatccttcctgtggccaaacactttagagacagaagcatgggggaaaaaaaaaagattgcctggtcaatttggtcagcctgtgagtttctgatcatagacatctggctaataccttgcggacttgaatgcaaattaagtgctggggaggggtggtgtgttccttaagaattcttaaggccccagaacaaatattaatg

SEQ ID NO: 423580 - DNA, 527 bp, Homo sapiens
cttagatttggttatgacaccctataaggatggagttctgttttacctgatgcagaatctgctttgaattagaagatatatggtgctgtctcccccatagtcagaatatgttggtttataaaaaagaatagaattaagtgtggctcctttgacaatcacatctagtaacccacttaaagaatttttgcattttgtctcagcaatttttagttctgatgatttagaggaatttgtccctagggggttaatatcagaggacagcaattgcttcattaaactggaagatgagacttctacctgaatacttaggttctttattttattgaaccaacagacacaagggattacttgactgtctggttggtgttaatgattctgatttccaagaaaaaattgggttgctgctacccygtgggtcaaaggatggctatgttagcaacccaggggattcttagggtggttctttgtacttccacattcagttgtaaagtttaagggaaaggtactaaactaaaagacggcaggat

SEQ ID NO: 423581 - DNA, 608 bp, Homo sapiens
acagctctcagcagagaggagacccaaagtgggtagctcctacctgcaggaaggtaatcccaatgtgtgtctgagtcctgctgagtctaggggttattataggtgcagaatggaggaagtgcatgctgattggtccatgagtgggaggaagtgcatgctgattggttcaagggtaggtccaaaaaaccagtcaccatcaactggctgaaaggcatcaaggaaattcttactcccagtcagggactccacctggaactggcagcttggcctccaggcttcaggccatccctggtttgaaggttgggcctcaccagggacccaccccttcccacctaggtacctgtctgcctcctgccaccatcactattgttaaatctcagggtggaaggcatgaggggtgggcaatgggaagtgtaaatttgtgaattatcactttggctaagtgaatgacttagtttacagtaatctgtcatcctattttatgatatcaagtgttttgaacctttgatattwgacaaacttttcaaaatcaaagcttcaagttctaaatttagtctttttgaccttaaactaaccttttagatattaatgtccctgaaagtccaaga

SEQ ID NO: 423582 - DNA, 561 bp, Homo sapiens
aatgcttgacacaagcattatggtaaagtcataagtcaaaggggaaataatacaatcttctcaacaactattgctgaaactattgggtacccttatgcaaaaaaacaaaaacttcaatccttatytcatgccacatataaaaattatttgagatgtatcatgacctaaatgtaagagctacaactatcaaacttctagaagaaaacatccggaaaaaatattttttacctacggcttggtaagacatctttaaaatgacaaaaaaaaaaaagcacaaatgcaaaaggaccatttaaaaaaataagtacattaaaaaaaaaaagaattggatttcattaaagttacacacttttgtttctccaagaacactgttaagaaaatgaaagaggaagccaagccaatgagaagtatttggaaaacatatatctaaaaattatttttacctagaatgcataaagccatgctataacccagcaataagagagacaacctagaaaaataaacaaaagatttgtaaaaactcttcaccaagtaagaaacgcagatggtaggtaattaaac

SEQ ID NO: 423583 - DNA, 619 bp, Homo sapiens
caaaactgggtcacaaatattttaatgtttttttctctcatagctaggttgtaatatgtaatacttagaatgtattaatggttatttttccccccacaatggaaaaaagtcattgtggacttggagaaatggaagccaacctaaagagatatgcagagaaagagtgaaacagaggacatggcagcatgtgataattataaatccagtgatttctaagattcagaatcatcccaggcattctttacttagtcactcacgctttccttgaatttcatgagcctatacaatcttctgcttaagttagaattctgtcacttaaaaatatcgaataccagtgttaaacacagattaaaaaaaaaaacaaaatatataggcctgctttaactacagtgctaagaatcaattacaaataaatcaaaatgctttcaaatttggaatatacaaaagatatttttcctattaagcaatggattggtagatacttaaaataaatgattaaaaattactaaaaacaattctatcaatgcytttttaatttgatggtaaaatgtcaatgaaacagaaaggggttttaaacccaaatgcatttattgggaattgtttcaaatatttaagaaat

SEQ ID NO: 423584 - DNA, 517 bp, Homo sapiens
aagttgaaacaggttctatgtaataaaatgtaagaagaagaatccaaaattgatgtttatagtcagtgaaaatttcaataaaggcaaaaaggtcaaatgtaagttgtgtctttaaaatatttgtcatcaataataaaacaataatagctatggaatattacagtttgcccagacccatctcctaatccttacagagatcctagaagcaactattagactttacatataaagttggacattgatatggtttggctgtgtccccacccaaatctcaaattgtagttcccataattcccacccattatgggagggacctgttgggaggtaattgaatcatggggttttataacggagaattccccgtacacaagctctcttaactgccacyatccatgtaaaacaacatgactttgctcctccttgctttccaccatgattgtgaggccttcccggccatgtggaactatgagtcaattaaacctctttcttttataaattacccagtcttgggtatgtc

SEQ ID NO: 423585 - DNA, 558 bp, Homo sapiens
ctttctgtgataccagaccatgcttagctgtactaaacctaccactgagaacactggagaagggcccaaagtcaactgctagtcccaacttctagtttagcagcactcttactttgtccctgcaaggaagtttccccacctaggaatcaccatgagttacaagagcctggcaaatttcaagactgcaggaatggaaaatatacaagcttgtaagttcaagcttatgtctgaatcacctaccccaatagatggtagttgagatgacggctagagagcaaaatggtaatatatatgtaaagatgacaacaatgggattgaattagatgacagcaaggcatagaggataggartagtaaactacttgttttggtttgagtaattcaaggcatgatagtgtcatttactgacatttacagatttacaatctgagcagatttgagaacataaatcaatagttctgtttctatttctgaagtttgagacatgagacaatcaacttgaaacgctaaactggcaacaagatatgtgagttggtaaataagaagttgaagctgcaga

SEQ ID NO: 423586 - DNA, 518 bp, Homo sapiens
aagacaatgattatttagtggatgtgtatcaagtaaaagccrttccacatgactcacacagacaggtttcactttattatgaaataaggctataagaaaaactgactattattctccctattttaaaaaatataaagatgcttgaaaaggataatactttcatttgtaattattatatttatgtagcacttaatatatatatgtccatatatgtactatgtccatatgtatgaatacttaagtgtatacaattattcatgtatgtacccacacatttaatcctcacaacatctctgagataggtgtgtatattatctctattttataaaagagaaagctggggcatagacaggttaaaagatttgtctaggatcatatagctagtaaatagggcgaccaggtttaatccttcaaaaagctgctccagagaacttgctcttaaacactatatattacttaatttcttaaagaactgcatcttaatttaacctcaggcatcaaaaaaagattctggaaaa

SEQ ID NO: 423587 - DNA, 624 bp, Homo sapiens
ttttttatgctaactttgcttcacttaagtctggcttctgccaagtttctttgtctctctcctgtcaggttatcccttttccctctccaattaataactaatctgttggaaaatacttagaatcagtgcatgtagmcttttcccatcaaattttcacccaatagttcaactatccattgatttttgcctgaaacatttattaacatggtattggaaaagaatgatttttataactgcatcattccacttatatttattatttagtatttctctgtaagaaagggatttctctgtaaatctctgtaaggaagaggtttttccttctcctgtgttatgtatatatgtgtatatgtatatacatgtgtgtattcacatttatatatgtatgtacatatgtatgcatttggtgtaagtatagatttatgtagtattctttcagtttgagatgtttcattaaaattgaatttctaacacaattatatacagagcaaatttaaatccatatgatgtagtgtataaatcgcaatattaatgtgttgcaccatgtgcatcttacccactcttgaattcatagagctaaagtattacatagtatgcatgcaatatatatttattggccatatg

SEQ ID NO: 423588 - DNA, 624 bp, Homo sapiens
ttttttatgctaactttgcttcacttaagtctggcttctgccaagtttctttgtctctctcctgtcaggttatcccttttccctctccaattaataactaatctgttggaaaatacttagaatcagtgcatgtagccttttcccatcaaattttcacccaatagttcaactatccattgatttttgcctgaaacatttattaacatggtattggaaaagaatgatttttataactgcatcattccacttatatttattatttagtatttctctgtaagaaagggatttctctgtaaatctctgtaaggaagaggtttttccttctcctgtgttatgtatatatgtgtatatgtatatacatgtgtgtattcacatttatatatgtatgtacatatgtatgcatttggtgtaagtatagatttatgtaktattctttcagtttgagatgtttcattaaaattgaatttctaacacaattatatacagagcaaatttaaatccatatgatgtagtgtataaatcgcaatattaatgtgttgcaccatgtgcatcttacccactcttgaattcatagagctaaagtattacatagtatgcatgcaatatatatttattggccatatg

SEQ ID NO: 423589 - DNA, 624 bp, Homo sapiens
ttttttatgctaactttgcttcacttaagtctggcttctgccaagtttctttgtctctctcctgtcaggttatcccttttccctctccaattaataactaatctgttggaaaatacttagaatcagtgcatgtagccttttcccatcaaattttcacccaatagttcaactatccattgatttttgcctgaaacatttattaacatggtattggaaaagaatgatttttataactgcatcattccacttatatttattatttagtatttctctgtaagaaagggatttctctgtaaatctctgtaaggaagaggtttttccttctcctgtgttatgtatatatgtgtatatgtatatacatgtgtgtattcacatttatatatgtatgtacatatgtatgcatttggtgtaagtatagatttatgtagtattctttcagtttgagatgtttcattaaaattgaatttctaacacaattatatacasagcaaatttaaatccatatgatgtagtgtataaatcgcaatattaatgtgttgcaccatgtgcatcttacccactcttgaattcatagagctaaagtattacatagtatgcatgcaatatatatttattggccatatg

SEQ ID NO: 423590 - DNA, 624 bp, Homo sapiens
ttttttatgctaactttgcttcacttaagtctggcttctgccaagtttctttgtctctctcctgtcaggttatcccttttccctctccaattaataactaatctgttggaaaatacttagaatcagtgcatgtagccttttcccatcaaattttcacccaatagttcaactatccattgatttttgcctgaaacatttattaacatggtattggaaaagaatgatttttataactgcatcattccacttatatttattatttagtatttctctgtaagaaagggatttctctgtaaatctctgtaaggaagaggtttttccttctcctgtgttatgtatatatgtgtatatgtatatacatgtgtgtattcacatttatatatgtatgtacatatgtatgcatttggtgtaagtatagatttatgtagtattctttcagtttgagatgtttcattaaaattgaatttctaacacaattatatacagagcaaatttaaatccatatgatgtagtgtataaatygcaatattaatgtgttgcaccatgtgcatcttacccactcttgaattcatagagctaaagtattacatagtatgcatgcaatatatatttattggccatatg

SEQ ID NO: 423591 - DNA, 398 bp, Homo sapiens
tgaggattagaacaaaccacatcctgaaatgtggagagacagataaattcagagagaaacagctgagatctacttacctggaacaaaagccactgtagccacaaactggtaagaagacttaaacagtattttttttaatgtaataaaattaaaataacaaaatttatcattttgaccacttaaagtatacagctcagcggcacgaagtacattcacactgccatgcaactttcaccaccaagtatctccagaatgttttcatctccccaagttgaaacactgtaccccttaaacaatagcttcccaattgccccttgctcagcccctggccgccactaccctactttctgtmcctttgagttgacctctctatgtgtctcacataagtggaatcatat

SEQ ID NO: 423592 - DNA, 580 bp, Homo sapiens
ttctgggtggtgaaaatgttataaaattaggtagtggcaatggttacaccaytgtggaaatacacatagaaacactgaattgtatattttaaaagggtgaattttatggtgcatggactatactacagtaaagctattagttaaaaaaaattcttaaaggaagatacaaaactattataatgaaaatatactgtaatttccatgtataaatatctttgaacctaccaaatcataattagaattaatcaaatagactatcatgtttgccagatcaatataaaataaatataaaataaaacaatttattttacttactacagcaacaatcagaaagaaaatataatttaaataaatatgacatgatagtaacaaatatagagtacctaacaatgaatctaatcagaaatttgcaaaaatattataatttaaaatgataaaacatttaacaatatcgagaagtcttataaaaatggagaaatatatcattttcttaggagaaaactctagcataaaccaaaaataaaattctaaggcccccaacaatctgaatggaccccccttcttagccaagggaattcca

SEQ ID NO: 423593 - DNA, 612 bp, Homo sapiens
ggaatcatgaaggacacaggttgaggcaagtagagtgggcgtttgtggggaaggtgcttcggaggtctgataggttgaagatttcctccttgtcttacatgactgtaagtagtcggtgaggtattatcaagtyaggagtggagtctcctctggaagttgtctcagctcttagtaggctgagtgggacccagtgagcagtttagggagcaatggacatgaaatgaaatattcagagcaagttctctgtttcttagtactctggccactggaatggaaaggtgtgtccgacacaaaccttatgagcttgcacggataccctgtattacctctttctttcacaagttgccatgagttcaccaccagcactgtgccagccccagggctgggatgtgacctcttcctcagccacctccttgctgaggctcacccaggtagctaaagtcaccagctacgtagagctgaaattctgaagcttcctacctaagtggcatcacatagcacccttcttgtccaaaagtcgtttctacaaaatataataaatatgaaatgtgtatttggagttaagcttaaatttatggtctgccatttcctagataacaggatttcaagcat

SEQ ID NO: 423594 - DNA, 477 bp, Homo sapiens
cactttactctaaatttattatgaatattccaaactgcacgtgtgtgcttaccaaagcctaattatctggaatccctgtaatcacctgcttctactcttaaaaatatccagcattattaagtaatattttagatattcataaaggcaaggagaacaatatacttatcgagaaatatagcggaagaggtattctgaaagaatctattactaaaaacataaggttgagccacatgaaaatgctgtctttgtagtttaaaaatasacaattttatataggtcaatttaaaaggactaggttttcaataaaacgtattgtattagtccagtctcacactgctatgaagaaatactgagactgggtaatttacgaaagaaagaagtttaactgactcacagttctgtatggctggggaggcttcaggaaacttacaattgtgacagaaggggaagcaacacatccttcttcacatggtggca

SEQ ID NO: 423595 - DNA, 567 bp, Homo sapiens
ctgggcaacagactgagactccatctcaaaaacaacaacaacaaaaaaagcttggcgcagtggctcatgcctgtaatcccagcactttcacaggtcaaggcrggcggctcacctgaggtcaggagtttaagaccagactagccaacatggtgaaacttatctctactaaaaatacaaaaattagctgggcatggtggcgggcacctgtaatcccagctacccaagaggctgagacgagataacagcctgaacctgggaggcggaggttgcagtgagccgagatcgcgccattgcactccagcctgggcaacaagagcaaaattctgtctcaaaaaaaaaaagaattcatacagcttataagttgcagaactagagaaagagtcaaaccttttctgagattccagaccctgcactcttaattaccaaacaacactgtctcatctttggatccttcacctgtccatcctgtaagtaacctcctgtaagtaaccagatcctatgctttcttctcttccacatttattcaacagtaactacacacctactgtatgccagacataaaagaat

SEQ ID NO: 423596 - DNA, 567 bp, Homo sapiens
ctgggcaacagactgagactccatctcaaaaacaacaacaacaaaaaaagcttggcgcagtggctcatgcctgtaatcccagcactttcacaggtcaaggcgggcggctcacctgaggtcaggagtttaagaccagactagccaacatggtgaaacttatctctactaaaaatacaaaaattagctgggcatggtggcgggcacctgtaatcccagctacccaagaggytgagacgagataacagcctgaacctgggaggcggaggttgcagtgagccgagatcgcgccattgcactccagcctgggcaacaagagcaaaattctgtctcaaaaaaaaaaagaattcatacagcttataagttgcagaactagagaaagagtcaaaccttttctgagattccagaccctgcactcttaattaccaaacaacactgtctcatctttggatccttcacctgtccatcctgtaagtaacctcctgtaagtaaccagatcctatgctttcttctcttccacatttattcaacagtaactacacacctactgtatgccagacataaaagaat

SEQ ID NO: 423597 - DNA, 567 bp, Homo sapiens
ctgggcaacagactgagactccatctcaaaaacaacaacaacaaaaaaagcttggcgcagtggctcatgcctgtaatcccagcactttcacaggtcaaggcgggcggctcacctgaggtcaggagtttaagaccagactagccaacatggtgaaacttatctctactaaaaatacaaaaattagctgggcatggtggcgggcacctgtaatcccagctacccaagaggctgagacgagataacagcctgaacctgggaggcggaggttgcagtgagccgagatsgcgccattgcactccagcctgggcaacaagagcaaaattctgtctcaaaaaaaaaaagaattcatacagcttataagttgcagaactagagaaagagtcaaaccttttctgagattccagaccctgcactcttaattaccaaacaacactgtctcatctttggatccttcacctgtccatcctgtaagtaacctcctgtaagtaaccagatcctatgctttcttctcttccacatttattcaacagtaactacacacctactgtatgccagacataaaagaat

SEQ ID NO: 423598 - DNA, 492 bp, Homo sapiens
tcatcgtgcctggccggaaggcttagaaattttgccagtcgcttttaaacacaggcatttttgaaaattaagacatataaacctacagttaaataacwtatattgaaaacaacggaatacatattcaacacgtcactttctaattattttactacacttttttttatatgtgcttttgagattatttaccaccgctgtatcagtacagcaaatactatctctttctcttcccaaatggtggtgttcagtttcctcaggttgatagattgaaaatccctcccaatgcgagtgtttacaccacaggaatcagcaaacactacaaatcaggggtttggggtttggagagcccattgataagcattaagcagcacacttcattaattaatgtatagtaagtgcttaaatattagcaataataatattaaatgtgcaaggaaatttcatatttgtgaagaaaaggaaacaggctggacgcagtggctcacgcctgta

SEQ ID NO: 423599 - DNA, 431 bp, Homo sapiens
tagtctccaaaattatatctatcactaaaattgacttgcacaacagagtctgataatagggtcagaattatggaataggaagaacataaattgcaagagaagatatcaaatggctttttgctttgcctcagtttttcttctccagtctcatttgtctcttatgaatactgagtcctaggtttgaatcattttcccattacttgttagctgctaaatataagcaagtaaaacgagtaatctaatcctgttttcttacctatgaaatgcttatttctagtttttattgtgagcatattcatgcatgggtatgaaagcacttctcaagtgctagcttagtaattataaggatgakgcttttctgatctgactctggtagaactatatatctagaccttacattttccacttcttgaaagttgtactctttgcct

SEQ ID NO: 423600 - DNA, 682 bp, Homo sapiens
gcaccctgttgagacgcccctgttgaaccatcatccattttgagtcctgattggtaggagaacaacttttagaattaagctatcttttttagatttcatgtcctaccatttggaaaagttattcactttctctgtctcaatgttctcatcatcaaaatggcaaaattataattcttacctcataaaattgtgggaawtttttaaaaaaacttcatgtataatgtttgatacagcgcttgacataaaattaacactcactttatataaactgtaagtattgttgattttattatgtttttatcccttccaccctctttgcaaagaaaactctaaatgcagaggttcatctctagggctttggattcttaaagatacggctcaaactatggctcaaattatgctatagtctgaatgtttgtttctgcctcaaatttatatgttgatatcctaacccccaaggcctcaccatgtaatacatcaccatcaccttgggttgttggtaaaggtgatgatgatgtgttagatggtacggcctttgggatgtgatttgctaggtcatgtgggcaaacccctcatgactgagattagagcccttataataagaggattgagagataccacttaccccttttgcccccatgtgagtttatagtgaaaagactgccatctatgaatcaggatt

SEQ ID NO: 423601 - DNA, 540 bp, Homo sapiens
aggagaagtcagggaggggaaatggacacaactaggaaagatgctgcaggaggagaagtcagggaggggaaatggacacaactaaagggaaggatgctgcaggaggagaagtcagggaggggaaatggacacaactacaggcactggggtatgggctccctcctgctcccctgaccatctctactgactaggccaggccacaggctggggagaagcccacaaaagacacccactctatcagccgcacctgtccaacagcccacctctgtctgtgactgctgcctccgagggctgcttgagkcctgaccctcccacggtgctcaggaggggagggaaattggccaggctgacccatgggccttgcctcactgggccaccatcagagacactttttccaatcaggcacaactggactcgcctgcctgaatcctggggtatgggaaggggtagaacacagagaacacaaaggcaataagaaggggctgtgatggaaacaggcctggtccaacaggtattccagatgcaagataagaattaaga

SEQ ID NO: 423602 - DNA, 470 bp, Homo sapiens
tacacatacctacatatactcaccactacaccttacacataacccacatgacatatacaggtacacacacctacatacactcacctctctaccctacacatatacctacctacatacacacacacacagaaccttaaagaacagtcattttgttactccacatttctagtgatgaaatttgaattcagatccacatggctctgtccatgtggtttaagcccaaaagctatataagaatacactaaaatgtccccattcacactgtccscagtcatcttaaagaacagttagtcattttgttatcctagatttctagtgatgaaatttgaattctacagagttgaagggtggggtgatggggagaagttatgaagagcttaggtcaggtccccttcatggacatttagggccctgcccttgacaggacatgacagccccttcctcctcccaggtgattgattgattgattg

SEQ ID NO: 423603 - DNA, 348 bp, Homo sapiens
gcttaggctggagtgcagtggcatgatcccggctcactgcaacctccacctcccaggctcaagcgattctcctgcctcagcttcccgagtagctgggattaaggcacgaaccaccatgcccagctaatttttctattttaaatagagttggggttttgctatattggccagactggtctcaaactcctgacctcaggtgatccaccygcctcggactcccaaggtgttgggattacaggcgtagccactatgcccagcctatatatgaaaaattgtctgaatagatgatctgttcatgtagtttaagcccaaaagctgtccacgtggatacaatacactgaaatgttc

SEQ ID NO: 423604 - DNA, 649 bp, Homo sapiens
acagtgtagatgggatcatgcgactagtcctagctgatgaaatgtgagcataagtgacatttgtctctttagagctgaggccaggtgaaattctcgagcctttctgtccttcacagttgtggcaaaggtgaggtctcatgtcccaggtggtgcaatggtgccactccaacatggtggagcctccatcagcctggatccctgagtgaatgcgtggagcagagtgccccaccaacttctatgggataggtatataagaaaaaagtaaccatttgtgtgtgaagtcactgaaatgtagaggttatttgatactgaagcataacctaacctaatatttatccatgtagttgtgggtagttgtggtttgtggaagtcaatgtctcccagtgaggtatacctctgggtattcacactgttttgtaggtgcctccccktgaacatttctggcttgtgactcttttagccaatagaatgggacagaagtaaccctgtgcccattccagacctaagccttaaaaaggtatagtaacttctactgcttttgtattcttagagaccttaagccaccatgtaagaagtttgattactctgagaccatcatgctgtgagaagtcttgtggagaggtcacacgcaggataaccaaggcccact

SEQ ID NO: 423605 - DNA, 649 bp, Homo sapiens
acagtgtagatgggatcatgcgactagtcctagctgatgaaatgtgagcataagtgacatttgtctctttagagctgaggccaggtgaaattctcgagcctttctgtccttcacagttgtggcaaaggtgaggtctcatgtcccaggtggtgcaatggtgccactccaacatggtggagcctccatcagcctggatccctgagtgaatgcgtggagcagagtgccccaccaacttctatgggataggtatataagaaaaaagtaaccatttgtgtgtgaagtcactgaaatgtagaggttatttgatactgaagcataacctaacctaatatttatccatgtagttgtgggtagttgtggtttgtggaagtcaatgtctcccagtgaggtatacctctgggtattcacactgttttgtaggtgcctccccttgaacatttctggcttgtgactcttttagccaatagaatgggacagaagtaaccytgtgcccattccagacctaagccttaaaaaggtatagtaacttctactgcttttgtattcttagagaccttaagccaccatgtaagaagtttgattactctgagaccatcatgctgtgagaagtcttgtggagaggtcacacgcaggataaccaaggcccact

SEQ ID NO: 423606 - DNA, 636 bp, Homo sapiens
tccagagccttttggatttgggaattgtggatgaggggctggggacctatacacaatatacatatatatttttaatctgcttgaatggaaacacagtgttgggcacattgtttttgcactcaatttatcttagtggctttccacatcagtacatagaaatcctgccctttcctttttactgctgcattggacttcaacacacgggtgaacatttaggatgtctctagttttctgttattacaaacacacatagttttacaagcagctaacaacatggggagggggcagaggaggaatggaatcattctttttttttttttattggagayggagtctcactctgttgctcaggctggagtgtagtggtgcgaacttggctcactgcagcctccacctcccaggctcaagcaattctcctgcctcagcctcccgagtagctgggattacaggtgtctgctatcacacccagctaaagtttttatatttttagtagaaatggagtttcaccatgttggacaggctggtctcgaactcctgacctcaggtgatccacccgcctcagcctcccaaagtgctgggattacaggcatgagccactgtacccagccagggatcttcattcctaatgtttgttta

SEQ ID NO: 423607 - DNA, 562 bp, Homo sapiens
gctttctccactctctccatcctcctaacatctgtagctcattagctataagtggcagattatattttccaaaaacaagcactgcaatatctcccatccaacatgcaacgtaatgttaacactccatccatcatttatrctctctcctcttaaatcaggtatcttccaaggctgggtcataaaaggtgatatggtttccacccagtcctctaggaatgcttattcttggaacccaattaccatgccacaaggaaggggagaaaccacatggagagaccatgtgtaggtgtctggcggagagccccagccagggcccctttcagccagcaccagtcctcaaatgggagcaagggagtgagtgagtgaggcttccgtgattccaccctaggctttgaattcccctgctgatgccaagtggagcagaaacaagctgtctctaccaagccttgccccaagtatttatgagcaaaagaagtgatggttgttatctaagcctccaagtttgaggtgggatcattcacaacaatagataactatatgacaccactttttactgtgctta

SEQ ID NO: 423608 - DNA, 562 bp, Homo sapiens
gctttctccactctctccatcctcctaacatctgtagctcattagctataagtggcagattatattttccaaaaacaagcactgcaatatctcccatccaacatgcaacgtaatgttaacactccatccatcatttatactctctcctcttaaatcaggtatcttccaaggctgggtcataaaaggtgatatggtttccacccagtcctctaggaatgcttattcttggaacccaattaccatgccacaaggaaggggagaaaccacatggagagaccatgtgtaggtgtctggcggagagccccagccagggcccctttcagccagcaccagtcctcaaatgggagcaagggagtgagtgaktgaggcttccgtgattccaccctaggctttgaattcccctgctgatgccaagtggagcagaaacaagctgtctctaccaagccttgccccaagtatttatgagcaaaagaagtgatggttgttatctaagcctccaagtttgaggtgggatcattcacaacaatagataactatatgacaccactttttactgtgctta

SEQ ID NO: 423609 - DNA, 562 bp, Homo sapiens
gctttctccactctctccatcctcctaacatctgtagctcattagctataagtggcagattatattttccaaaaacaagcactgcaatatctcccatccaacatgcaacgtaatgttaacactccatccatcatttatactctctcctcttaaatcaggtatcttccaaggctgggtcataaaaggtgatatggtttccacccagtcctctaggaatgcttattcttggaacccaattaccatgccacaaggaaggggagaaaccacatggagagaccatgtgtaggtgtctggcggagagccccagccagggcccctttcagccagcaccagtcctcaaatgggagcaagggagtgagtgagtgaggcttccgtgattccaccctagsctttgaattcccctgctgatgccaagtggagcagaaacaagctgtctctaccaagccttgccccaagtatttatgagcaaaagaagtgatggttgttatctaagcctccaagtttgaggtgggatcattcacaacaatagataactatatgacaccactttttactgtgctta

SEQ ID NO: 423610 - DNA, 599 bp, Homo sapiens
ctctatatgcttcacactttccttatctgtaaactgggggtaatagcagtataaggttgtgaggattaaaggagagaatccatgagtgcatgtaacccaatactttgcacatagtaagttctcaatgaatgttagatattattgttagtgaagggatattttaaaatacatttgtgaaagcataactcctttaatcaccttggcccccggggctccccagcccagaatcaacaggttccctgtattaaaagaggaacagataccagtttgaaagacaaagtcattgctttccctcaactaacaagtttcctttatctggcagctgggtggrgtgggagctccttgtaaacaataaccttcaaagccaggctttgaggcaaagggaattgtcctacagtgtttgaagtttctgttcccttaacaagtcggcctgaaggacttggccactgaggttactgtaagccttgctggagagaactcagtatctggcatagagcagtgtgtctctaactttctgggagagaactaaaatacatggattcctgggtctctcctcaaatctacttaatcagactctccagggtaggcacagggaatga

SEQ ID NO: 423611 - DNA, 619 bp, Homo sapiens
gaaaatgccaaaataaacacagacagaggctcttctaagcttcctaagcaactttgaatttttttcatcaatttgtataatatactctctgcaagctttaatagagacaggacacaaaacattgtctttactcattctcatttatgtccatcagattgcgttaccttgcctggtaatgtactagaatttcctctgaattttagacaaggtgatcgtgaaatgtggtacagtctcaggtggtttagcaaacaaccttccacatcagtgcaattatctcagcctttaaaccatcagctctggattataaatttgatctgccagcttatgaacttgagtcaaagacaaagaacattatgccttgctttgaaaggggattagaagcaaaaatgaactcaagtgttamaaaaagtactaatataataatgatacgcataatatattatcagtacctctctaagcaacaggatatactaacatgtatacaacagcaatgttactatttgctaggaattctctctctctctctctctctctctctctctctctctctcattctctctgtttatctcttacctttcttttctttggtccactatatccttttaaactatgtttgccc

SEQ ID NO: 423612 - DNA, 422 bp, Homo sapiens
atagtcaccattctgttgcaggtctaggagcaagatttgcttagttgaaccagaggttattgtcccttgatgacagtctcactgctattaatttcacatwtgcctgatgcataatagcattatacttaattaataatgggtgatagaccttttatgagtcccttatgcaagatacacacttcctggtatcatgatacttgagaagtgagtttattactggtgagaagatgagtgtggattatggttctggaaatagaatgggttgaagtagccttcaaaaagattaaatggctcagtactggcttaatgggcagtgtactataatcagtgggggggcttgtcttccattttaacgtagaatgctgtatagcatatttgtgtggctgtattatgattaagccacattcctgtgaatcatcagc

SEQ ID NO: 423613 - DNA, 330 bp, Homo sapiens
agtgcttccctgcggcctggcccctggcatctcaactctgttttagttgtataggacaagaatgaccccatttgtatgatcaactttcacagtctcttctctgttacagatacaggccgatyttcagtctatccttaatgaaaagtcttacaaacagagcatttttcttaagccttccatgtacccatgtcctcaccactaaaagcctcattatgatctgcaccattattttattctgtctttccttctttagaagtgtgttaagaatggagaagagaagaaaaagaagggaagaaattctgtctcattacaactctccatcttgaggga

SEQ ID NO: 423614 - DNA, 583 bp, Homo sapiens
ggagatgtttatcacaattatcataacaaattattaggagttgaagaccaatgatacttgcaggagggtggtattggtggtggcagcatgggggctgtgcatgcaggtgcttggacctccagcttcatgacaggagggaggagtgatattcttatggtgatatctagccagggtagatgattcccagatgaacaaaaaatgttctccagagtgtttaaatcaaggactgttatggtatgtgagggtagtgtcagaagcggggggtaaacagaaaggaagaaagagttttaacaaagttttgctttggtctacacatacccttcacagtgttcaagaaatgtatataaagaacttgagttaattttaaaatgacattttactgttgcactatattttctcattatactgctgagactgaaccatgtggttcttggcttaaaaaaagccagtatcttctctaagtatgagacaatcattcattaccaaacsacactcctctgtttaaaatcatagctcaagatctcctctctgctttgaaatttaattgtcaacaatcctcccatccctgactcaccctggcctt

SEQ ID NO: 423615 - DNA, 288 bp, Homo sapiens
gtgtgtgtgcaaggggcagaattattatatatgatagagggggcaaaaatcgtataaaaattgtggggrattttaatattttaggtttctaaagagatagatatcaagtttttgggtttgtggaaatgttgatgctaagaaattgatgctgacacttcaattatgaaaactaggattttaatgggaatttgggactttacagttttaacacaatccatagatcagcagtacagtagtacagaaaactggctctccagaatgattattgcagttttgatgatactttga

SEQ ID NO: 423616 - DNA, 437 bp, Homo sapiens
tttacagcatatcttttcttatccccacccacagcccagcaatcaattagcaaatttgggccctaattggtctagttattctctccctgtctactgctgtcactctgattcaagacaccatcatttatcctctaggactctggtctgatatacatatatccagtggaaatcactgttcattaggtcaaatgtccatcccaggtgtggctgggcagtatctacaggggtctgtgatgggcaggcacagtgacttatatttctaaggtaaaagctagttcatttaggttctagggcatgaactgtaatttcccaatctgtgacawctccccttcctcttacagtctccctgggcaatatctattctttggtccttctttcatgcaatactttaaaatgtaaatataaaagacaatgttgtttatcacagtttttaatag

SEQ ID NO: 423617 - DNA, 585 bp, Homo sapiens
caaagtacagtttgtttgttttttcaaaataagcaaaatgttttatttataggatccttttgctctctgtttactctattaaaaaagaaaagcagctgggtacagtgccatgtgcttttagtcccagctactattcaggaggctgaggtggtaggactgcttgagcccaggagttttaggccagcccgggcaacacagcaagacccttgtctctaaagaaatatatacaagaagttttttaaagagacaaatagacagtttggattataygctttgtgcaggaaaaactgtttcactagggactaaaaaaacctatcctattaaaacacaaccataaaaatgaaatgtagatttgttctccttttcagtactatcaaacaataacttacttagaaagaattcctcgaagtcagttttctccacacagctagtatacatgcgcagggccgcaatcttaatcttctagacaaagagaataaaaccaaactcaagacatgaccaagtggatgttctacttccattagacatgggtcacaaaatcttatatttcttcaactagaaggaagggtccaaaccactctctag

SEQ ID NO: 423618 - DNA, 535 bp, Homo sapiens
aacctgctagtgtccttagcttactgcaaagagcaaatgtaattcctctctagagaatgttaacatttccagggcctcaaattactctgtttttcatatataatgcctagtactcaatttaaaaatacatgtaaataaatacatgacgagatatgatgaagaaattattgaaaaaaatgaggatgatgtggtttggcactgtgtccctgcccaaatcccatctttaattgtaatctccacgtgttgaaggagggacttggtgggaggtaattggatcatgggggtggtttcctccatgctatccgtgatagtgagggagttgtcatgagatctgatggttttaaaagtggcagttttgtccagygcaatggatcacacctgtaatcccagcacttagggaggctgaggtgggtggatcacttcagatcaggagttcaaaaccagctggcccacatggcaaaaccccatctctactaaaaatacaaaaaaaattagctgagtatagtggcacacacctgtaatctcagctactcag

SEQ ID NO: 423619 - DNA, 535 bp, Homo sapiens
aacctgctagtgtccttagcttactgcaaagagcaaatgtaattcctctctagagaatgttaacatttccagggcctcaaattactctgtttttcatatataatgcctagtactcaatttaaaaatacatgtaaataaatacatgacgagatatgatgaagaaattattgaaaaaaatgaggatgatgtggtttggcactgtgtccctgcccaaatcccatctttaattgtaatctccacgtgttgaaggagggacttggtgggaggtaattggatcatgggggtggtttcctccatgctatccgtgatagtgagggagttgtcatgagatctgatggttttaaaagtggcagttttgtccagcgcaatggatcacacctgtaatcccagcacttagggrggctgaggtgggtggatcacttcagatcaggagttcaaaaccagctggcccacatggcaaaaccccatctctactaaaaatacaaaaaaaattagctgagtatagtggcacacacctgtaatctcagctactcag

SEQ ID NO: 423620 - DNA, 570 bp, Homo sapiens
tactttatcagaaagtgttgaacgtctcatgtaatgtattgaatatggtacrttatgttgaaattgtgattgttttacagtattgtaaagtcgaaaaattgtaagacaaaccatcattaagtcaaggactatccgtatatttaaattcttttatacagacacacacacatgcatacatacacacggagaaagaggggaagagagtgacagaaagataaacagtgagacagaaagaaagaccagaaattaccagtgtgagaaattaataaaggagaggacatcgctacagtttctatagacatcaaaacaagtataaaagatttatagtggccccagctagtgggatacggcaattaaaagaagttaaatttgtaaatattgaaaaggaaaggtaaatgctaatttggagatggcatggttatgtacaaatgtcaacaattatctacaaacaattagaaataaaagccagtttggtaaggtgactggatttataacaaatgcacaaaaagcaaaaatcaattgtatacctgttacactttttgtttgataaagtagaaataattcatcaca

SEQ ID NO: 423621 - DNA, 570 bp, Homo sapiens
tactttatcagaaagtgttgaacgtctcatgtaatgtattgaatatggtacattatgttgaaattgtgattgttttrcagtattgtaaagtcgaaaaattgtaagacaaaccatcattaagtcaaggactatccgtatatttaaattcttttatacagacacacacacatgcatacatacacacggagaaagaggggaagagagtgacagaaagataaacagtgagacagaaagaaagaccagaaattaccagtgtgagaaattaataaaggagaggacatcgctacagtttctatagacatcaaaacaagtataaaagatttatagtggccccagctagtgggatacggcaattaaaagaagttaaatttgtaaatattgaaaaggaaaggtaaatgctaatttggagatggcatggttatgtacaaatgtcaacaattatctacaaacaattagaaataaaagccagtttggtaaggtgactggatttataacaaatgcacaaaaagcaaaaatcaattgtatacctgttacactttttgtttgataaagtagaaataattcatcaca

SEQ ID NO: 423622 - DNA, 570 bp, Homo sapiens
tactttatcagaaagtgttgaacgtctcatgtaatgtattgaatatggtacattatgttgaaattgtgattgttttacartattgtaaagtcgaaaaattgtaagacaaaccatcattaagtcaaggactatccgtatatttaaattcttttatacagacacacacacatgcatacatacacacggagaaagaggggaagagagtgacagaaagataaacagtgagacagaaagaaagaccagaaattaccagtgtgagaaattaataaaggagaggacatcgctacagtttctatagacatcaaaacaagtataaaagatttatagtggccccagctagtgggatacggcaattaaaagaagttaaatttgtaaatattgaaaaggaaaggtaaatgctaatttggagatggcatggttatgtacaaatgtcaacaattatctacaaacaattagaaataaaagccagtttggtaaggtgactggatttataacaaatgcacaaaaagcaaaaatcaattgtatacctgttacactttttgtttgataaagtagaaataattcatcaca

SEQ ID NO: 423623 - DNA, 570 bp, Homo sapiens
tactttatcagaaagtgttgaacgtctcatgtaatgtattgaatatggtacattatgttgaaattgtgattgttttacagtattgtaaagtcgaaaaattgtaagwcaaaccatcattaagtcaaggactatccgtatatttaaattcttttatacagacacacacacatgcatacatacacacggagaaagaggggaagagagtgacagaaagataaacagtgagacagaaagaaagaccagaaattaccagtgtgagaaattaataaaggagaggacatcgctacagtttctatagacatcaaaacaagtataaaagatttatagtggccccagctagtgggatacggcaattaaaagaagttaaatttgtaaatattgaaaaggaaaggtaaatgctaatttggagatggcatggttatgtacaaatgtcaacaattatctacaaacaattagaaataaaagccagtttggtaaggtgactggatttataacaaatgcacaaaaagcaaaaatcaattgtatacctgttacactttttgtttgataaagtagaaataattcatcaca

SEQ ID NO: 423624 - DNA, 336 bp, Homo sapiens
cacacaacacacacaaacacaactaatgccttgagagctgaggccatagctgacayatatttcaacaccagagtctagcacagaatctagcactaaaagtctcccccagagtgtttactataaataaagtagtgataagactgtagcttaaatccatgactctgctcttaaatccatgactcttaaatccaactctgctgccacacttccaagcaagagttaggtccgtcattgaagctatgtagttgtgatttatgcagaagctttgtaaagaaaaccagagcttgggtagtgggtagcagtaatctcttctcaatttcccctatgaagagataa

SEQ ID NO: 423625 - DNA, 336 bp, Homo sapiens
cacacaacacacacaaacacaactaatgccttgagagctgaggccatagctgacacatatttcaacaccagagtctagcamagaatctagcactaaaagtctcccccagagtgtttactataaataaagtagtgataagactgtagcttaaatccatgactctgctcttaaatccatgactcttaaatccaactctgctgccacacttccaagcaagagttaggtccgtcattgaagctatgtagttgtgatttatgcagaagctttgtaaagaaaaccagagcttgggtagtgggtagcagtaatctcttctcaatttcccctatgaagagataa

SEQ ID NO: 423626 - DNA, 336 bp, Homo sapiens
cacacaacacacacaaacacaactaatgccttgagagctgaggccatagctgacacatatttcaacaccagagtctagcacagaatctagcactaaaagtctcccccagagtgtttactataaataaagtagtgatragactgtagcttaaatccatgactctgctcttaaatccatgactcttaaatccaactctgctgccacacttccaagcaagagttaggtccgtcattgaagctatgtagttgtgatttatgcagaagctttgtaaagaaaaccagagcttgggtagtgggtagcagtaatctcttctcaatttcccctatgaagagataa

SEQ ID NO: 423627 - DNA, 526 bp, Homo sapiens
atttcttcactctatgagaactctagatctgaatccttgttatgagtcaggagtccactctagtttactctsttgtcagtaactagacttgaaatgttttgatattaattgatgtagtaatacgattggttagagaaatagcaaagagcgagcgtccccatcctatgaccatatcagcaccagaagagaaaaacacatctacacagtttttcccttggcataggccctggtattctgttagggaacaggttataaaggaaatacaaagggtctttgtacttactttcagaatgtattttctttaacatgaaaagaatccaaggccttattgcttctaattgctttttgtatatctactaccatcccttgctaaattattgatacttttcctcaaatctcggcatgatgtcctacattccaaattttcaatagctgagaatttcaccttttcagtaccttcatgtttatcttagtaaaaatttgagaaagactgtaatagagttatttaatcagattttttatctac

SEQ ID NO: 423628 - DNA, 526 bp, Homo sapiens
atttcttcactctatgagaactctagatctgaatccttgttatgagtcaggagtccactctagtttactctgttgtcagtaactagacttgaaatgttttratattaattgatgtagtaatacgattggttagagaaatagcaaagagcgagcgtccccatcctatgaccatatcagcaccagaagagaaaaacacatctacacagtttttcccttggcataggccctggtattctgttagggaacaggttataaaggaaatacaaagggtctttgtacttactttcagaatgtattttctttaacatgaaaagaatccaaggccttattgcttctaattgctttttgtatatctactaccatcccttgctaaattattgatacttttcctcaaatctcggcatgatgtcctacattccaaattttcaatagctgagaatttcaccttttcagtaccttcatgtttatcttagtaaaaatttgagaaagactgtaatagagttatttaatcagattttttatctac

SEQ ID NO: 423629 - DNA, 526 bp, Homo sapiens
atttcttcactctatgagaactctagatctgaatccttgttatgagtcaggagtccactctagtttactctgttgtcagtaactagacttgaaatgttttgatattaattgatgtagtaatacgattggttagagaaatagcaaagagcgagcgtccccatcctatgaccatatcagcaccagaagagaaaaacacatctacacagtttttcccttggcataggccctggtattctgttagggaacaggttataaaggaaatacaaagggtctttgtacttactttcagaatgtattttctttaacatgaaaagaatccaaggccttattgcttctaattgctttttgtrtatctactaccatcccttgctaaattattgatacttttcctcaaatctcggcatgatgtcctacattccaaattttcaatagctgagaatttcaccttttcagtaccttcatgtttatcttagtaaaaatttgagaaagactgtaatagagttatttaatcagattttttatctac

SEQ ID NO: 423630 - DNA, 591 bp, Homo sapiens
ttacccagtctaaggtaatttattacagcagtccaaatggactcaaacaggttgtaaacagttgaaaaatgagtatctgtattgaatcgcatattttagccaaagtttgcttgtaggaatacagcctatgaccaaagaattaatagctgactctcatttgaatggccaagatttgctctctatttccagtattttatttttttgcytgtatgttggatataggcaaatttttacacaacaaaccagaaaagttcaatagtctttcattctctgctttcactaacttcttttaagtatatttcaacaattatcttaataatgtcaccagtatattaagcataccattataaacactctatttctatttattcaaaacttgaattgagctagtcgctaataacattttttaattagcattgcaaccatattcacctaccatatttttccctctcctttgatttctgggtcattactcactttcacaatttgtgtgtgactcaccattctatacccacttttgccttaccgtaaaatatttttcgatttaatacatttacattttttctccttttgcttttagaattgtattac

SEQ ID NO: 423631 - DNA, 365 bp, Homo sapiens
aaacactactcgtgttctgtagctaattgataattgttaaaataaacttaacaattgataacaaattatagaaaatgattattttaaggttctttatacttgtaatatttgtaaataatatgagttatcacytctttctgtagctaattgtatggggagcacatgcagttagtagcatgtttcttaacacatttctcatatcaagaataacaaatacaatgcagtggggagtggagaaaagaaattaaatgtggctacatctgtaagtaacaattgcagccactttgtcaagggtaaaacaatcgtccatgagctatacagattttgtcaccagaataactgaatcaagaggttccaactcatta

SEQ ID NO: 423632 - DNA, 365 bp, Homo sapiens
aaacactactcgtgttctgtagctaattgataattgttaaaataaacttaacaattgataacaaattatagaaaatgattattttaaggttctttatacttgtaatatttgtaaataatatgagttatcacctmtttctgtagctaattgtatggggagcacatgcagttagtagcatgtttcttaacacatttctcatatcaagaataacaaatacaatgcagtggggagtggagaaaagaaattaaatgtggctacatctgtaagtaacaattgcagccactttgtcaagggtaaaacaatcgtccatgagctatacagattttgtcaccagaataactgaatcaagaggttccaactcatta

SEQ ID NO: 423633 - DNA, 365 bp, Homo sapiens
aaacactactcgtgttctgtagctaattgataattgttaaaataaacttaacaattgataacaaattatagaaaatgattattttaaggttctttatacttgtaatatttgtaaataatatgagttatcacctctttctgtagctaattgtatggggagcacatgcagttagtrgcatgtttcttaacacatttctcatatcaagaataacaaatacaatgcagtggggagtggagaaaagaaattaaatgtggctacatctgtaagtaacaattgcagccactttgtcaagggtaaaacaatcgtccatgagctatacagattttgtcaccagaataactgaatcaagaggttccaactcatta

SEQ ID NO: 423634 - DNA, 554 bp, Homo sapiens
gaataaacaataacaggacatctttccaatttcctaaaactcatcaaagaattcttactcattctaatccatcttyctttatgatgagaccaaaccactcactgtggtcaacggcattaaaaaataaaaagtggggaatttccagaggttaaaaaatgtggacaaaactatttgaaatattcatgtacttatgaactgattcattaaaaaattttcactattaatatttgttaaatgcctacacatcattagggaccataagtataacagggaacaaaacagaaaaattttctggccacatgaaatctatattctagaggacagaagaaatggtctgataagaatcaggaaagaacaagatacgtccagattaaatcataacctttttgcagaataagagtgaaatcactgtaagctatgttgatatttgaccaggctacttgaacacttttagataagtgctttaaagctattggtggcttttgaacaaggaactactgtggtcattgaatttcatgaaagagtgcaatagaagtggaaaatgtacatataaa

SEQ ID NO: 423635 - DNA, 475 bp, Homo sapiens
atttctacaaacatatgctttcatgaaattttatttctcatgttacctttatgattaccttgttgtatgctgactatattaataaagttagagattctatgaagttttaagagattttctctcttttgttttttttttttctttaagttctgggacagaacatgtacagaacatgcaggtttgttacrtaggtacacatttgccgtggtggtttgctgctcctatcaacctatgatctaggttttaagctgcacatgcattaggtatttattctaatgctctccctcctcttgctccacaccccacaacaggccctggtgtgtgatcttcccctccatgtgtctatgtgttctcattgttcaactcccatttatgaatgagaaaatgcagtgtttggttttctgttcctgtgttagtttgctgagaatggtggcttccaacttcatccatgtccctgcaaaagacgtgaactcat

SEQ ID NO: 423636 - DNA, 475 bp, Homo sapiens
atttctacaaacatatgctttcatgaaattttatttctcatgttacctttatgattaccttgttgtatgctgactatattaataaagttagagattctatgaagttttaagagattttctctcttttgttttttttttttctttaagttctgggacagaacatgtacagaacatgcaggtttgttacgtaggtacacatttgccrtggtggtttgctgctcctatcaacctatgatctaggttttaagctgcacatgcattaggtatttattctaatgctctccctcctcttgctccacaccccacaacaggccctggtgtgtgatcttcccctccatgtgtctatgtgttctcattgttcaactcccatttatgaatgagaaaatgcagtgtttggttttctgttcctgtgttagtttgctgagaatggtggcttccaacttcatccatgtccctgcaaaagacgtgaactcat

SEQ ID NO: 423637 - DNA, 419 bp, Homo sapiens
gatcactgcaacctgtgtctcccaggttcaagtgattctcctgcctcagcctccagagtagctgggattacaggcttgtgccaccatgcccagctaatttttgtatttttagtagagacgaggtttcaccacgtttgccaggctggtctcgaactcctgacttcaaatgatctgcctgcctcagcctcccaaagtgctgggattacaggcatgagccactgtgactggcctatccagcagtatttactgagtatstactatgcactaggcaccggttgccaagaattcatgaataaatggaacaggcataatccctgaactcaaggaccacacatttcagagagtgaaacagacaaaaaaataagtaagcaagttagcaaatagatacatgcaattttgagacctgttgtgaagtgggt

SEQ ID NO: 423638 - DNA, 467 bp, Homo sapiens
gttactgcagttataatggagtgaggacatgggtggcctgggagttctgaggttccggggagayttacttgtcactgtataacttttggtgccttttgtgttttgaaccatgtacatgtatttcctattcaaaaaacataaaactattaaaatcagaggaaagcaacaacaataataacaacaaagaataggtctagggaagtgggaacttgatgcctccaattgctaccctgaaggcaatgacctgcctcctcttgcccatgtgtaccctcctccacatctggcatctccattctctagaggctcagagaggggtgtggctggcctgatgtcacccagcatttaagactagcaaaattctggggcttagctgtccagactttcagtgttgtctttcttttctgatcctcaatgaccccatctactcattgacctctccatgtttttggcagaactttgcatatgct

SEQ ID NO: 423639 - DNA, 467 bp, Homo sapiens
gttactgcagttataatggagtgaggacatgggtggcctgggagttctgaggttccggggagacttacttgtcactgtataacttttggtgccttttgwgttttgaaccatgtacatgtatttcctattcaaaaaacataaaactattaaaatcagaggaaagcaacaacaataataacaacaaagaataggtctagggaagtgggaacttgatgcctccaattgctaccctgaaggcaatgacctgcctcctcttgcccatgtgtaccctcctccacatctggcatctccattctctagaggctcagagaggggtgtggctggcctgatgtcacccagcatttaagactagcaaaattctggggcttagctgtccagactttcagtgttgtctttcttttctgatcctcaatgaccccatctactcattgacctctccatgtttttggcagaactttgcatatgct

SEQ ID NO: 423640 - DNA, 528 bp, Homo sapiens
caggttcttctgcatagtcccagttttaaatttttgacctgatattcatgaacacagtgctactggtcagacctttgtccaggtttaagcttcagaacataatgtcttcatgcagtgggaggcctggttagggttatgactctgccctggggcatctgccccttctgacctgaaggtaaacttggcatctactacttacctctacacttgaacagccaaggatgggctgagcacagaggctcacatctgtaactccagcactttgggaggccaaggcaggaggattgcttaaggccagcagttcaagaccagcctgtgcaatatagtgaaacctcatctctgtaaaaacwaaaaaaaccgaggatggtgggtgacagggagcagttcaacatgggaaactgagagctggaaggacccttagaccagccccccattaacagatgagactctaccctgagattatagcctaaggtaatgcattgagcttttctagagatttgaaaataatcaatcctaaaacccccaagc

SEQ ID NO: 423641 - DNA, 528 bp, Homo sapiens
caggttcttctgcatagtcccagttttaaatttttgacctgatattcatgaacacagtgctactggtcagacctttgtccaggtttaagcttcagaacataatgtcttcatgcagtgggaggcctggttagggttatgactctgccctggggcatctgccccttctgacctgaaggtaaacttggcatctactacttacctctacacttgaacagccaaggatgggctgagcacagaggctcacatctgtaactccagcactttgggaggccaaggcaggaggattgcttaaggccagcagttcaagaccagcctgtgcaatatagtgaaacctcatctctgtaaaaactaaaaaaaccgargatggtgggtgacagggagcagttcaacatgggaaactgagagctggaaggacccttagaccagccccccattaacagatgagactctaccctgagattatagcctaaggtaatgcattgagcttttctagagatttgaaaataatcaatcctaaaacccccaagc

SEQ ID NO: 423642 - DNA, 476 bp, Homo sapiens
ctttacaaaaattaaaacatttataaaatatactaactatgattgttttaaaaagtaatgkttttttatggtaaggaaataaattgaagctttgtgttggaaaatgcagaaaacaaatcggcattctttataaatagatcttactgctggtttagaaattaccttatgtgctttatagatgatggaaaatgaaatcagctgcagttagcagtgtgcatgcatcgtatttgctttgtcactttcagaaaggttatggaatattggcaggtcaggattctcaaaatgataagttctaagaaaaggctaaatgaaaaagaattttaaaagcaagcctagttgtttaatatatacatggacgagttatggggaaatcctggactgggagctagcagatctatgttctgacttttactaagtcattggctgctacagcaggccaagcagacataactgccaaggctgcctgggagttgggt

SEQ ID NO: 423643 - DNA, 481 bp, Homo sapiens
ttggggcctatagtaaaacaaacaaacaaacacaaaaatcaaatattacacgatgaaaactaaaaacaagctatcagtgaaaatgttttgtgatgtgtggattcttctcacagagttaaactttttttatttagcattttggaaacactctttttgtagaatctttggagggacatttcggagccctttgaggcatacagtgaaaaactgaatatcccatgatagaaactagaaataaggtatcagtgaawatggtttgtgatgtgttgattcatctcctagagttaaatctttgattcaacaggttgaaaacacttttattgtagaatctatgaagagcattttcaaagacctttgaggcccataatgaaaaatcaattatcctgtgataaaaactagaaagaagatatctgtccaaatgctttgcaatgtttggattcatctcacatagttaaaccactgttttaattcagcaatttgg

SEQ ID NO: 423644 - DNA, 481 bp, Homo sapiens
ttggggcctatagtaaaacaaacaaacaaacacaaaaatcaaatattacacgatgaaaactaaaaacaagctatcagtgaaaatgttttgtgatgtgtggattcttctcacagagttaaactttttttatttagcattttggaaacactctttttgtagaatctttggagggacatttcggagccctttgaggcatacagtgaaaaactgaatatcccatgatagaaactagaaataaggtatcagtgaatatggtttgtgatgtgttgattcatctcctagagttaaatctttgattcaacaggttgaaaacacttttattgtagaatctatgaagagcattttcaaagacctttgaggcccataatgaaaaatcaattatcctgtgataaaaactagaaagaagatatctgtccaaatgctttgcaatgtttggattcatctcacakagttaaaccactgttttaattcagcaatttgg

SEQ ID NO: 423645 - DNA, 587 bp, Homo sapiens
gaaaaactgaatatctcacgacaaaaagtaaaaacaagctacttgtgaaaatgctttgtgatgtgttgattcatctcatagtgttaagcctttatttttatacagcattttggaaacactcttttagtagaatctaagcggggacaattctgagcccattgaggtctattgtaaaatatctaatattccgtgatcaaaactagaaacaagctatctgtgaaaatgcttgcaatgtgtggattcacctcaaagagttagttttgttttggttcagcaggttagaaacattctttttgtggaatctacaaagggcatttctgagcccactgaagactacagtgaaaagccgaatattccatgataaaaactagaaaaaaaaaactgtgaaaatgytttgcgatatttgaatttatctcacaacattaaatatttgttttgattcaactgtttggaaactccttttttttttttgtacaatctatgaggatgtatttcaaagcccattgaggcttatagtgaaaaaccgaatattctgagataaaaactatatgaagctgtctctgaaaatgatttacgatgggtgattt

SEQ ID NO: 423646 - DNA, 597 bp, Homo sapiens
tgttcttgtgaatttagtgcatagcaaagtattattgtttttagtgctgagtctcttttcccctaaaacctggatatgctgtattctttaagcaaatttcaagaaagaagtgaaaaatctcataggaagaaagaaaggaaaatcactctttgaatatacactaaaacctgaatgtgcaaatggtaccaatgaatgtactagggaaaatgcacaatacacttaagttgtttaatttgaataaaatataataaaagagcaatttaaaagctgtagatagtgtatagataaaccaaaagggataattctgtatgtaccctgcaactgttaccttctctaggcctgaagggatgaagggaagtattagttatcgaaacttggagacaaaaatgccgtgtggagataaccaccttcaagacagtgatccakgacattggtgagagataaaagcatatggcttagagaaggaagttatagaaagaagattactagtggagacaagacaaggcagtggggaaggaaaatgttgaaaacaaagagcagagaagaggacaatagtatgtatgatgaggccagtcaggcactggggacagggaagtg

SEQ ID NO: 423647 - DNA, 520 bp, Homo sapiens
gcagcggcagcaccagctcctttctgggtcttctgtttcacgatccttaaattagaacagcagcaccatcttctccctgggtctccagctccacgaaactcaagctagaatagctgcaccggctcctctgggatcttcagctccacgaccctaagacatcagtggcagcaccggctcctcccctggrctccagctccaggaccctcaaacttgaacagaaacaccagctcctccccaggcctccagctccttgaccctcataaacaatcccttctcatgaaatgtagcagtcaggaaaactgtagaggaagtaaataaataaatgttttcctttcaaattgatgtttcttttctgttcacgcaagtcagaaaacttttctgctttccatcaaccttgcaacctacttgcattcatttgtaagatggaaatccatcatttgaaataacctttaaaaacttagtagttcttttttactatgatcttatctcacagctctagaaacgatctttcactttgcct

SEQ ID NO: 423648 - DNA, 520 bp, Homo sapiens
gcagcggcagcaccagctcctttctgggtcttctgtttcacgatccttaaattagaacagcagcaccatcttctccctgggtctccagctccacgaaactcaagctagaatagctgcaccggctcctctgggatcttcagctccacgaccctaagacatcagtggcagcaccggctcctcccctggactccagctccaggaccctcaaacttgaacagaaacaccagctcctccccaggcctccagctccttgaccctcataaacaatcccttctyatgaaatgtagcagtcaggaaaactgtagaggaagtaaataaataaatgttttcctttcaaattgatgtttcttttctgttcacgcaagtcagaaaacttttctgctttccatcaaccttgcaacctacttgcattcatttgtaagatggaaatccatcatttgaaataacctttaaaaacttagtagttcttttttactatgatcttatctcacagctctagaaacgatctttcactttgcct

SEQ ID NO: 423649 - DNA, 520 bp, Homo sapiens
gcagcggcagcaccagctcctttctgggtcttctgtttcacgatccttaaattagaacagcagcaccatcttctccctgggtctccagctccacgaaactcaagctagaatagctgcaccggctcctctgggatcttcagctccacgaccctaagacatcagtggcagcaccggctcctcccctggactccagctccaggaccctcaaacttgaacagaaacaccagctcctccccaggcctccagctccttgaccctcataaacaatcccttctcatgaaatgtagcagtcaggaaaactgtagaggaagtaaataaataaatgttttcctttcaaattgatgtttcttttctgttcacgcaagtcagaaaacttttctrctttccatcaaccttgcaacctacttgcattcatttgtaagatggaaatccatcatttgaaataacctttaaaaacttagtagttcttttttactatgatcttatctcacagctctagaaacgatctttcactttgcct

SEQ ID NO: 423650 - DNA, 469 bp, Homo sapiens
tctctgtacagatctagtatgtttgaaatacttcaaattttaaaaacaataacaaacattataaaggagcaattttctattacctagaaaatctagatccacaaaaggagatgtaaaaaaagcaattttgcatcatcattagtaagagcaaaaaattgcgaccaactccataaatccatcaaaaggaaaatagctacacaaaatgcagtatattcataggacagaatcccatcttgcagttaaaatgaatgatctagctgcatatgtaaacacacaaatgcccttgtggggtgggaaagaaagcatgtttcacaaaaacataggcaatataggaccatttctttcaagcacctgtgcacatacaagtgcatgtacacacacacacacatacacacayacaccctgaatctaatcttaaggaaacatcagacaaacccaaattaagggacatgcttcaaaataatgggcc

SEQ ID NO: 423651 - DNA, 512 bp, Homo sapiens
aattacaaaactagatagtaatagaacaaaaaaggaaaatgataaactaagctcacttctacatagatacaaaactcctaaacaaagtattaacaaactaaaatctggcaaaatgatgatatactatgaccaaatctgacttttgccaagaaakgcaaagatagtttaacattggaaaattaatcactacattaacaagtgaagagggaggaggaccatgtggccacatgaacaaatgagcatcactcagtagccacacatggtaaatgccctcaagaaactaggacagaaaaaaaacgtgctcaaacctattaaaaaaggatttattgaaacaaaataaacttatagcagtcaccatctggatggtgaaacaatagaagcattgtctctaaaattaggacagtctgttcgcgccacttctgttggcattatactaaagtactcgacagtgcagtaagacaagaaaaggaaataaaaggcatagcggttgtcatgccagaagcaaaactgtc

SEQ ID NO: 423652 - DNA, 538 bp, Homo sapiens
aatggatgacaggaccctctatggctgaaagactctaaagttcttagttcttagctgtgacaggacagagaaccgacatgtcccacctgcagccacacccatccccttattattactagatcttatcaaaagctgacttgaagaggaaaaaaggccaaaagacttcttttcttcacctaaccgccgatgccctccttttggttttatggttccaacctgacagctactctgggctacaaagagccccttcttgacagatgactgccagctgcaggctagatcagactggtctctggagattgcacagatcrtgaacttgtgccctatgtttcacctttttgcatttacagcctaattataatacatttaaatgttaaatcttcaccccagagtgaacacaggtcatccgcttttggatattcttcatatgtaagcccagtgcgtgtctctaacgagtttcctccatgaattttcataggcttctcctgtatgctacagaatacgtatatcctacctctccacctagcataaataccta

SEQ ID NO: 423653 - DNA, 583 bp, Homo sapiens
aaatccttccatgaagaaatagaatccasctcttctctatctcttcaatttaggcctagatgtgtgacttgcattttttttcatgtagcaaacaagccaaacagcagcttgaaaaatgctttctacttggacataccctcttgctacagggaacccttccaccatcatgtgaagaagcctggtctagcctgctggaggatgagagatcacatggaatgaggccacaatcgttccagccaaagccccagtaatagaattaagatcatccaagaccatggcatcccgcctgagaagttcagatgagaagggccacctgaacaaccaacagaatcttaaaaagtaaaaaatgagtgttgccactatgcatctattagaatggcagaaatcgaagacactgacaacaacaaatgctggtgaggatgtggagcaacaggaactctcactcactgaagatggaaatgcaaaatagtgcagctactttggaaaacagctactttggctgtttcttacaacactaaatatgctattattatatgatccagaagttttgctccttagcacttacccaaaaaagttgaaaact

SEQ ID NO: 423654 - DNA, 504 bp, Homo sapiens
gcttattaacagagggagctggcaacggcttcaaatcagcacaatatcctgaattgttaagaattccatcaaggccgttaattagctactaaccataagcctcttgtctttgaatrtgcttcctaatccaacatgaaaatgaccttaaattacagactgatcctgaagttgaactgctatacctgattcactttattcataatctctttcccattcgtaggacaacccagggagataaagtgatttaccctggaccagtggtgggacagctgtgcccaccatgtgctcatgccgctgcagagagcacaggaacaattagagaagctgtgtctatacattttcaaacatttctctggtttcaatgaaacaatatttcaaggggtagacttcctcaaattctccatttgtgactatatgggtcaacaaatgggaggtattaggctgaaataagtgtgcttttctttaatagtaaaaacagtgacagaggaatagaaaggtgtgtta

SEQ ID NO: 423655 - DNA, 504 bp, Homo sapiens
gcttattaacagagggagctggcaacggcttcaaatcagcacaatatcctgaattgttaagaattccatcaaggccgttaattagctactaaccataagcctcttgtctttgaatatgcttcctaatccaacatgaaaatgaccttaaaytacagactgatcctgaagttgaactgctatacctgattcactttattcataatctctttcccattcgtaggacaacccagggagataaagtgatttaccctggaccagtggtgggacagctgtgcccaccatgtgctcatgccgctgcagagagcacaggaacaattagagaagctgtgtctatacattttcaaacatttctctggtttcaatgaaacaatatttcaaggggtagacttcctcaaattctccatttgtgactatatgggtcaacaaatgggaggtattaggctgaaataagtgtgcttttctttaatagtaaaaacagtgacagaggaatagaaaggtgtgtta

SEQ ID NO: 423656 - DNA, 546 bp, Homo sapiens
ctcctccttcatgaaatgagtgttgttgtacaaagagccctggattggtcaaaagattggattacgaattccagcctctaactggctatgtagttgcataacaacactttgcttctttttttttttttttttttttttgagacagtgtctcactcttgcccacgctagagtgcagtggtgcaataaggctcactgcagcctcgacctccctgggctcaggtgatcctcccgcctcagcctccccaagagctgggactacaggtgcacaccaccacacctggctcctttttatattttttgtagaracagggttttgccatgttgcccaggctggtctcaaactccaggcctcaagcgatccgcctgcctccacctcccaaagtgctgggattgtgggtgggagccactgcaatccttggtgctcagctcacttggcttcttgtgtctgcctttctccggctataaaatgggggtcatactcacatcatctggctatgcctctggctacaagcggagaatgcctgactagcagtagggtgagcaact

SEQ ID NO: 423657 - DNA, 485 bp, Homo sapiens
actgttgtcaggtaacgaccacaaggtttctctttttctctagcatctaaacaagcactgacctcaagatcagcaacactaaacaattgcaacttacgccttatgctgactaactgccccctgttccacaagccacatcttcagctttaatgggacagaaactgatttcattaacttcctcctgataagagactgacagccgtaaacaggttctggccagtttatagaggctgcacactgagtgccttcacggccctgcttcaccttttgacctatagagcctaactagaatgcatttaaacaatgtctccttcccaaagagaacacaggccacacgtaacacacgtttgttcmtgcatacatcagaacccctttcatgaatattcatagctcctcctgtaacccattgaatatatctacttggccaacccattcatgaattcctgtctcatctttccctccctcaaagtgcctactaacggcct

SEQ ID NO: 423658 - DNA, 537 bp, Homo sapiens
tgcactgctctattgtcctgtggccgaataacacatgcaaattacattgattctctgggaagaaaatggctgtgtgggtctgggcaaagttattacattttyaaactcaaccagtttagaaaaaataattgtgcatacacaaagacatgctaggggctcaaatgagccctgcaattaaatcaattcattgcctcaaatctgcactggatattaggttggtgcaaaagtaatggcaggaagaaaagctagggaagaaacttaagaaaattgcaaggaagagaaaatatatttactattcatcaaatggaagtggatcgttaaaaagatcttcaccctctcttcatgttgaacaggctgactaggaggagaaaagggaagggttggtcctgctgtctgagcagtggcagaggcagaggaggtggaaggaaggcaggtgaggcaggcacactgagtgtaacttgtgttgaaaaatatccttgtataagtggacccatgcagtgacttaatatattccataaggttctggggcaaaaatga

SEQ ID NO: 423659 - DNA, 556 bp, Homo sapiens
tgtcagaaaaagaatgagagacgaccattacatgcaccacctgtgccaaacagagttaacacagcaaacccggccaccatcctttggaaggcaagaaaaagtccctatgaggttgacccttggctagagtctgggaactcagatttcatgagggtcctacccaccgttaactggtaagagtggcttctgtgcctaaaatacctatacaaagaatagtgtttgtgatgaacacctgagctccttctgggagtctggaattttggtacctgccaggctgaggttgccacatgatctgcctccaataaaaatcccaggccccaartctctagtgagcttccctggtggacaacatctcacaagtgcggtcacaactcattgacgggggaattaggtatcctgtgtgatgcagtgggagagactcttggaagcttgtgcctggtttccgccttcacctatgagcctcttcctttgctgatttcagttgttatcttttcatcataagtcacagccaggaggatgaccgtatgctgaggcctggtgaggcttcctactgaac

SEQ ID NO: 423660 - DNA, 575 bp, Homo sapiens
gggcaagtgacaaatgctcctaatatgggcttrtttttcctacctgcagtgccttggccagcaccactacctaaaggtttagagtatgtctcatttatcttcatgagatctcatataccattgccttggatcagaggaccctttttacaataccactttacctagaagctactggtttgacagaatgttggaatggtctcttaaaggcacagctaaggcgctagcttgggattgtgtgggattgagacaatgtacttcaagatgaggaacatgctttgaatcaagggctggaagtaggagtgacccctctcactaatactctcagtgattgacttgggaaatttgcacctcacttctggacaagaggtcctgggtctggtggaggggagagatggttctatcatgggacccagtaaaggtttcattaaatcttaaaactactgctgccacctggtcatttttgactccaaaagctcataaggagttattgcactggcagatggagatagggttgctgctatgtgattggatgagattgggggtgctcagggtggtatggccataaactgctagat

SEQ ID NO: 423661 - DNA, 566 bp, Homo sapiens
ggaaacaatgacatggattttgtatattactggggaaacataatttggaacaattttatgcaaagcaatttgactctgtctatagcttcatatttattaatttagtagtwcctagaaatccccaggaattctagagaaattgtgcagtaacttataatgagggttaaaatatttcccaatgaagtaatataattaaatggtacattataagtaaaaaaatgtaaaaacagtctatattatagctattctataatatattacagctattctataatatattacatataattattatataatgtaatgctatatgctcttatgttcaaatatgaatagaaaaattttataaggataaatagcacaatgggtaaatgataaaatttcacagctaaaattgtggccttaagatgctctgattccaatacgttaaagtagagagcttttaaaaagaatttatgatatgataatgattttataacattggaaacattcaaacatttttctttgggctctaattgtatctgactccccatttatatgttttcttctttattctaataaattga

SEQ ID NO: 423662 - DNA, 467 bp, Homo sapiens
gcttttttactttataaacttctaaaatttctaaactttttgactcttttataacaattcttaccttaaaacacaaactcattgtacagatgtacaaaataggttctttgtatctttataagcttttttcyatttttcgatgtttaagctttttttttttttttttttttttttagcctagccctacatggggtcaggattatcaatatcactgtcttcctcctctatatcttgtcccactggaaggtcttcagggacaagaacatgcatggagctgtcatctcttacgacaacaatgccttctggaatatctcctgaagaacctgcctgaggctgttttacagttaacgttttctacaagtagaaggagtacattctaaaataatgattaaaagtacagtattgtaaatactaagccattaacatcattgttttttattgtcatcaagtatgacataactgtacat

SEQ ID NO: 423663 - DNA, 467 bp, Homo sapiens
gcttttttactttataaacttctaaaatttctaaactttttgactcttttataacaattcttaccttaaaacacaaactcattgtacagatgtacaaaataggttctttgtatctttataagcttttttctatttttcgatgtttaagctttttttttttttttttttttttttagcctagccctacatggggtcaggattatcaatatcactgtcttcctcctctatatcttgtcccactggaaggtcttcagggacaagaacatgcatggagctgtcatctcttacgacaacaatgccttctggaatatctcctgaagracctgcctgaggctgttttacagttaacgttttctacaagtagaaggagtacattctaaaataatgattaaaagtacagtattgtaaatactaagccattaacatcattgttttttattgtcatcaagtatgacataactgtacat

SEQ ID NO: 423664 - DNA, 582 bp, Homo sapiens
cagagaagactagaattgtagggtcttaccctttatgggtctcctccctcaacatataaggcaattgcttggctattcagcaagtgtcatctaggcctaaagtctaggttcttggctttgaaatactgctttgttgcactagggcaatgaattcttatctatattttgctgcagggcctagaagttttctacttctgggtgtttttgtggacaacctgtcaaaggatggccatacaaattcatatttggggtataasagttctttaccatatccttgctagcatcaggaattcttactacctgttcatcttttaaattttcatcatggaaatgatatttcattacttagattagcatttctttattatcagtgaagctgaacattttttctacaggcttatcattcttcatttttgttaattgctcatatttgttgtccatttatctcaagacagagtgaacttacaggtttttaaaaaatcatttctatgaccttttaatatatcaaagctttaaatctttcatcatagttaacgtgaatatttttccagtttattgtcttttagtttgagtgtggtttca

SEQ ID NO: 423665 - DNA, 529 bp, Homo sapiens
tattattgtgctgtctttgcccagaaattctctggcacaaatcatagtcaggacactaagaaacaacattattaaatcacttaaaacattttgaatatgcttttaattccctgtgtatttattgaatatattgtacagtacataaaccaaaaaattcctttaaaacctgagcaaatgcaatattgtgactggcattttgcatcaggtttcattacatgccaagagaggctcagayactaattttatgctatatgtttttatttgtccaaaattaatataggtgaaaaagtattacaagtcttaagatgagaaaagaggattggaaaagtagaaacagtagagaaatggaatagaaaatcagttaactctgcaaaggtacacagaattctatgattagcttgaaaagtttacgaatggagcaaaatggggggaatagccacatatttccaataaaatatattgtttatttgtaatatttactatcacttacagctttatgggtgaggtgttttatacaatgccagtcata

SEQ ID NO: 423666 - DNA, 561 bp, Homo sapiens
attattaacgacaagtatctacagaagcccatccatgctaaattgactttcataaatgttatctagaccaaatgagatatatattgctcagagaataagagaaagtctgtttttgatggaaaacatttgttattctcctattactccaaactatggcaaccctaggggaggatcttttctttcattcccttccccaacccaacaaaatataagcaaacatcaggaatgctctgctccttaatcccatacacttttaaaacagtcctcacattagaaaatgatgtgagaaataaacacagattttttttttttctattgagatggagtctcactctgtcacctaggctggagcgcagtggcacaatctcggctcaccacaacctcaggttcaagcgattctcctgcctcagcytccctattagctgggattacaagcgcccgccaccatgtccggctaatttttgtattttccagtagagacgggtttttgccatgttggccaggctgatctcagaagcctgacctcaggtgatctacttgctttgcctcccaaagtgctgg

SEQ ID NO: 423667 - DNA, 397 bp, Homo sapiens
gagtctaggccaggcatggtggctcatgcctgtaatcccagcactttgggaggccaaggtgggtggatcacctgaggtcaggagtttgagaccagcctgaccaacatggtgaaactctgcctttactaaatacaaaaaattagccaggcatggtggcacatgcctgtaatttcagctacttgggaggytgaggcaggagaatcacttgaacccaggaggcggaggttgcagtgagccaagattgcgccactgcactccagcctgagtgataagagggagagtccatctcaaaaaaaaaaaaaaaaaaaaaagatactgagtctgagattacaggaaacggaatgaacaccacccttcaccaggaggaagccacagaagccgtcttggtcttgaatca

SEQ ID NO: 423668 - DNA, 397 bp, Homo sapiens
gagtctaggccaggcatggtggctcatgcctgtaatcccagcactttgggaggccaaggtgggtggatcacctgaggtcaggagtttgagaccagcctgaccaacatggtgaaactctgcctttactaaatacaaaaaattagccaggcatggtggcacatgcctgtaatttcagctacttgggaggctgaggcaggagaatcmcttgaacccaggaggcggaggttgcagtgagccaagattgcgccactgcactccagcctgagtgataagagggagagtccatctcaaaaaaaaaaaaaaaaaaaaaagatactgagtctgagattacaggaaacggaatgaacaccacccttcaccaggaggaagccacagaagccgtcttggtcttgaatca

SEQ ID NO: 423669 - DNA, 580 bp, Homo sapiens
tgagccctcctatgtgtctgcacatggctgaaggggaaagcagcatttkggggcctcttatcagagcattaattaatcccattctcaggggtacagccctcatgacctgaccacctcccaaaggccccacattctaataccatctaccttggtgattatgttcaacatatgaattttggggctggggaggacaaatattcagaccacagaaatggccaaaaccaaacacctaatacagtgttgagaaatattatattcacaagatctcaaagtatcattccatggattactcatcacaaaggagaaacgatacctttatggtggaaacatctggcagactccagattttcttcctaaacctgatgatcctccattattccatcaaggctgaaaccctgaagccatcattggcatctttctctcccaccttatagctaatccatcaggaaatactgttggctgtaccctgaaaaagtatccgcaatcctttcatctctcatccagtctactgtgtccaccacggccccagccaccaccagcccttgcctggtttggccactggcctcctcaatcgtctccc

SEQ ID NO: 423670 - DNA, 580 bp, Homo sapiens
tgagccctcctatgtgtctgcacatggctgaaggggaaagcagcattttggggcctcttatcagagcattaattaatcccattctcaggggtacagccctcatgacctgaccacctcccaaaggccccacattctaataccatctaccttggtgattatgttcaacatatgaattttggggctggggaggacaaatatkcagaccacagaaatggccaaaaccaaacacctaatacagtgttgagaaatattatattcacaagatctcaaagtatcattccatggattactcatcacaaaggagaaacgatacctttatggtggaaacatctggcagactccagattttcttcctaaacctgatgatcctccattattccatcaaggctgaaaccctgaagccatcattggcatctttctctcccaccttatagctaatccatcaggaaatactgttggctgtaccctgaaaaagtatccgcaatcctttcatctctcatccagtctactgtgtccaccacggccccagccaccaccagcccttgcctggtttggccactggcctcctcaatcgtctccc

SEQ ID NO: 423671 - DNA, 535 bp, Homo sapiens
tgatccaccaaggagaaccaaacaagtagatcacccttgaaaacaataacaagaaattaagacagtgtggcattggtataaggataggcaaattgaygggcagaacctaagagagagtccggaagccaccgccatttgtgcagtcacctgatctataacaaagacaagtctgagatgtggggctggggggctggtggggtgtggtcttttccattgctgagtcgactggatatccaaatggaaaaaagaaagcagccttacccctgcctcacaccacatacaaaaataaatttcagatggcctggagatctaaatgcaaaagggaacacaatcatgcttttagaggaaaacacaaaaaaaacttcatgacctcagcttaagcaaagatttcttaaacaaaacacaaatcattaaccctgcatttgtgggaggccaaggtgggcaaatcacttgagcccaggagtttgagaccagccagggcaacatgccaaaaccctgtctccacaaaaattacaacaattatccagctgtggtg

SEQ ID NO: 423672 - DNA, 535 bp, Homo sapiens
tgatccaccaaggagaaccaaacaagtagatcacccttgaaaacaataacaagaaattaagacagtgtggcattggtataaggataggcaaattgacgggcagaacctaagagagagtccggaagccaccgccatytgtgcagtcacctgatctataacaaagacaagtctgagatgtggggctggggggctggtggggtgtggtcttttccattgctgagtcgactggatatccaaatggaaaaaagaaagcagccttacccctgcctcacaccacatacaaaaataaatttcagatggcctggagatctaaatgcaaaagggaacacaatcatgcttttagaggaaaacacaaaaaaaacttcatgacctcagcttaagcaaagatttcttaaacaaaacacaaatcattaaccctgcatttgtgggaggccaaggtgggcaaatcacttgagcccaggagtttgagaccagccagggcaacatgccaaaaccctgtctccacaaaaattacaacaattatccagctgtggtg

SEQ ID NO: 423673 - DNA, 535 bp, Homo sapiens
tgatccaccaaggagaaccaaacaagtagatcacccttgaaaacaataacaagaaattaagacagtgtggcattggtataaggataggcaaattgacgggcagaacctaagagagagtccggaagccaccgccatttgtgcagtcacctgatctataacaaagacaagtctgagatgtggggctggggggctggtgggrtgtggtcttttccattgctgagtcgactggatatccaaatggaaaaaagaaagcagccttacccctgcctcacaccacatacaaaaataaatttcagatggcctggagatctaaatgcaaaagggaacacaatcatgcttttagaggaaaacacaaaaaaaacttcatgacctcagcttaagcaaagatttcttaaacaaaacacaaatcattaaccctgcatttgtgggaggccaaggtgggcaaatcacttgagcccaggagtttgagaccagccagggcaacatgccaaaaccctgtctccacaaaaattacaacaattatccagctgtggtg

SEQ ID NO: 423674 - DNA, 535 bp, Homo sapiens
tgatccaccaaggagaaccaaacaagtagatcacccttgaaaacaataacaagaaattaagacagtgtggcattggtataaggataggcaaattgacgggcagaacctaagagagagtccggaagccaccgccatttgtgcagtcacctgatctataacaaagacaagtctgagatgtggggctggggggctggtggggtgtggtcttttccattgctgagtcgactggatatccaaatggaaaaaagaaagcagccttacccctgcctcacaccacatacaaaaataaatttcagatggcctggagatctaaatgcaaaagggaacacaatmatgcttttagaggaaaacacaaaaaaaacttcatgacctcagcttaagcaaagatttcttaaacaaaacacaaatcattaaccctgcatttgtgggaggccaaggtgggcaaatcacttgagcccaggagtttgagaccagccagggcaacatgccaaaaccctgtctccacaaaaattacaacaattatccagctgtggtg

SEQ ID NO: 423675 - DNA, 549 bp, Homo sapiens
ggggttaaggcttcaatatatcttttttattaattaatttatttatttgagacagagtcttactctgtcacccaggctggaatgcaatggtgcaatcacagctcacttcagccttggactcctgggctcaagagatcctcccatctcagcctcctgagcagctgggacgacaggtgcatgtcaccatgcctggctaatttattttatttttttagatttgggggtcttactatgttgcccaggctggtcttaaactcctgctgggattacaggtgtgagccactgtgcccagcctcctgcgacatatcttttggggggacactattccactcataacagtgtgtttgtctataacacaccttatactccaataaaagtgtgtttgaattcacaataaaaatagctgatrtgcattaaacattggcaacgacctggcctctgctccatgcactatacatgccttgcttcctcctcactcaaagtgctctggatccttggaaaggaggcctagacgtgggtgcagtggagagaaagggagaggggcctgca

SEQ ID NO: 423676 - DNA, 556 bp, Homo sapiens
aggagacgctgtcctccgcccgtcacagcaggggacatgtcagctgtacctcccaggtgatgctacatccagtcatgggggaaggactgtcgccagctgctcctgcgtaagtcccccctcccctttgtaactggtggtcctaggagcgtgaatatcctgttccccaacagcccttaactcaatggctttggcacccgagttagttgcctgtggctgctgtaacagattaccacaaacaacacaggtgtgttctcttccagctctgtagaccggaagtctaaaatgggtcacaccgggccgagatyggtgtcggcagggctgcattccttctgcctgtgttcctgggtacatgtgtggccctttcctccgtttccaaaccccatccctccaagctccgcgtccatcactgcatcccctcctcaggctctgaccctcctgcctccctcttaaaaggaccctgaagatcaccagagcccacctggataatccagggtggcctccccgtctccaggtccctcacttagccacatttgcaaagcccctcttgccatacaag

SEQ ID NO: 423677 - DNA, 556 bp, Homo sapiens
aggagacgctgtcctccgcccgtcacagcaggggacatgtcagctgtacctcccaggtgatgctacatccagtcatgggggaaggactgtcgccagctgctcctgcgtaagtcccccctcccctttgtaactggtggtcctaggagcgtgaatatcctgttccccaacagcccttaactcaatggctttggcacccgagttagttgcctgtggctgctgtaacagattaccacaaacaacacaggtgtgttctcttccagctctgtagaccggaagtctaaaatgggtcacaccgggccgagatcggtgtcggcagggctgcattccttctrcctgtgttcctgggtacatgtgtggccctttcctccgtttccaaaccccatccctccaagctccgcgtccatcactgcatcccctcctcaggctctgaccctcctgcctccctcttaaaaggaccctgaagatcaccagagcccacctggataatccagggtggcctccccgtctccaggtccctcacttagccacatttgcaaagcccctcttgccatacaag

SEQ ID NO: 423678 - DNA, 556 bp, Homo sapiens
aggagacgctgtcctccgcccgtcacagcaggggacatgtcagctgtacctcccaggtgatgctacatccagtcatgggggaaggactgtcgccagctgctcctgcgtaagtcccccctcccctttgtaactggtggtcctaggagcgtgaatatcctgttccccaacagcccttaactcaatggctttggcacccgagttagttgcctgtggctgctgtaacagattaccacaaacaacacaggtgtgttctcttccagctctgtagaccggaagtctaaaatgggtcacaccgggccgagatcggtgtcggcagggctgcattccttctgcctgtgttcctgggtacatgtgtggccctttcctccgtttccaaaccccatccctccaagctccgcgtccatcactgcatcccctcctcaggctctgaccctcctgcctccctcttaaaaggaccctgaagatcaccagrgcccacctggataatccagggtggcctccccgtctccaggtccctcacttagccacatttgcaaagcccctcttgccatacaag

SEQ ID NO: 423679 - DNA, 556 bp, Homo sapiens
aggagacgctgtcctccgcccgtcacagcaggggacatgtcagctgtacctcccaggtgatgctacatccagtcatgggggaaggactgtcgccagctgctcctgcgtaagtcccccctcccctttgtaactggtggtcctaggagcgtgaatatcctgttccccaacagcccttaactcaatggctttggcacccgagttagttgcctgtggctgctgtaacagattaccacaaacaacacaggtgtgttctcttccagctctgtagaccggaagtctaaaatgggtcacaccgggccgagatcggtgtcggcagggctgcattccttctgcctgtgttcctgggtacatgtgtggccctttcctccgtttccaaaccccatccctccaagctccgcgtccatcactgcatcccctcctcaggctctgaccctcctgcctccctcttaaaaggaccctgaagatcaccagagcccacctggataatccagggtggcctccccrtctccaggtccctcacttagccacatttgcaaagcccctcttgccatacaag

SEQ ID NO: 423680 - DNA, 339 bp, Homo sapiens
tgacctctgattgtcctcacggctcattatatgccaattagaatgcattwgctgctaaaagacacccccaccagcaccatgacagcttacagatgccatggcaatgtctggaggttaccttataaggtctcaaaagggaggggaggagacctcagatcctcttcatccctttactttcctgataaacttgctctcactttactccgtgaactcgctccaaagtctttctcgcatgagatcaaagagacctctcttggggtctggatcagagcccccccttttccagtaacaccagcactttgtgggaaagacagaggcgggaggattgagtgaggccag

SEQ ID NO: 423681 - DNA, 339 bp, Homo sapiens
tgacctctgattgtcctcacggctcattatatgccaattagaatgcattagctgctaaaagacacccccaccagcaccatgacagyttacagatgccatggcaatgtctggaggttaccttataaggtctcaaaagggaggggaggagacctcagatcctcttcatccctttactttcctgataaacttgctctcactttactccgtgaactcgctccaaagtctttctcgcatgagatcaaagagacctctcttggggtctggatcagagcccccccttttccagtaacaccagcactttgtgggaaagacagaggcgggaggattgagtgaggccag

SEQ ID NO: 423682 - DNA, 339 bp, Homo sapiens
tgacctctgattgtcctcacggctcattatatgccaattagaatgcattagctgctaaaagacacccccaccagcaccatgacagcttacagatgccatggcaatgtctggaggttaccttataaggtctcaaaagggmggggaggagacctcagatcctcttcatccctttactttcctgataaacttgctctcactttactccgtgaactcgctccaaagtctttctcgcatgagatcaaagagacctctcttggggtctggatcagagcccccccttttccagtaacaccagcactttgtgggaaagacagaggcgggaggattgagtgaggccag

SEQ ID NO: 423683 - DNA, 526 bp, Homo sapiens
tctatttgtgggatcatttcatttatttttctcttccccaactagaatgcaggagaacaaggcccatagcccacatactttctttctagcattgattaaacactagttaaacaccagtgtttaatgcaatactttcactttgttggaataatttawgaattattaagagaggagaagaaaggagtggtaagttatttgaaaaagatagctgcaattattattctccatgtatccatgccccttgcacctcctcccatcaagagataggatgtatttgccaacccccttgtgatgtcctttcctcaatggaatgcagcagaggcaataatggcgtagtggcattggtgctatttactcatctaggccagaagagatcctgtgaacttctgctgtcagtgttgaatgattatgaccaaggatagcctaatgggggatgcacaaccacagagagacgcccaagcctagaccatcctagactagtcagcctcctaccaaccttctggctgacctctgacacataagcaaa

SEQ ID NO: 423684 - DNA, 592 bp, Homo sapiens
cataacacagccctgggagcccagagaggactatagtaaaagtagtatttattaaatgtgagttatgagccaggaactgtgcaaggtgctttagagacattagttcctccagaggaatttcagaagccacaactaggttagtgtaaaaacagtttttttaagggtttgagtagattcttgtttaaactaacacaagcctaaatccagattaataaatatacttttaaaaaatgtcaacrcagccatggagttaccgtcttactgacacactcttcattgcctctttccttcttcacaaggctgtgatttccttggagcatggcctcttaaaggcaagtgatttatctgcatctacttatccctatacctagaggaatacctggtttagagtaggtcctcattggttcctgctgaattattgtattttaatcccaacataagtgaatgttttgcatgctccctggaacataatagaaactcttaatatataatatactaaattgaatttatccacaatacaacgagtctaaaaacagctatactatagagtgggtgccaaaatacaagtggactaaccttaaggacagtgcct

SEQ ID NO: 423685 - DNA, 297 bp, Homo sapiens
agatgcctgattcagacatccccatttgtaaccttagagcaatagttctcagccaggggtgattttkttccaagggtatgtttggccatgtgtggagacagttttggctaccataactggagatggaggcatactaatagcatctagtgggtagagaccagggatgatgctaaagaacctacaatgaacagagtggacccccatgacaaagatctgcccatcccaaatgtcaacagtggtgagattgagaaaccctatcttaaagagtcaactccacatgacttgaaacaaccgcag

SEQ ID NO: 423686 - DNA, 585 bp, Homo sapiens
agagcttacagtctcttaatatttttaataacctttatatttatacatttatatattgtaaacttatatttataagttataaattartatttgttatgaatttatatctatatattatacatttataaatatatattttttgatttacattcatttatattatcttcactacagtaactacattcattaaatataaactttgacatcctatcagccctcagaggtctgcttggagtattggagaagacactaggtattttgtctgctttttaatcagtgaatggtctccaaattaatatctatgtatatgtatatatttatattaaataagagtcatttgggggatgggcatcctatgcataatatttgaggatcttcatctctttttccttcaaagaatcttcagcaaatgtgcaaaaacagattgagcaacccatgatcctgtaggtttccagttttgtcttcactctctgaacagggaaggaaaagacttgaggcaagtctctagatttcaatcatccaggaagcaattctgggtgataataagagagactggcaaaaaagggggaaagaggggaaattact

SEQ ID NO: 423687 - DNA, 623 bp, Homo sapiens
acttagtagtttttgctttgggtctctggtgcagtcacaatgaatggggctggaattatctgaaaggcttcttaactgtctgatgccttgtctgaggggactgaagtgactgaaatgtctgggtgctcgtggggcatctttctctctcagcagcctttccctgtggctagcttggctcccctaaagcatggccagtccagcatagtcagacttctcccatgatggttgcttttccctagagtgagagttccaatggacccagatgagtctctgaagtctctctctctctctctttctttctctttctttctttccttctctctctttctttctttccttctctctctctctttctttccttctctctttttctctctttctttctttctttccttctctctctctctttctctctttctttctttttctttctttctttttgacagagtctcactctgtccccartggcgtgatctcggctcactgtaacctctgcctcctgggttcaggcaattctcccgcctcagcctctcaggtagctggaactaaaggtgcacaccaccatgcccagctaatttttgtatttttagtagagacagggtttcaccaatttggccaggatg

SEQ ID NO: 423688 - DNA, 533 bp, Homo sapiens
tcccccactcataaaaaatggatctgaaactactttggcccatttgagttcttaataaatatatctgtgtattctgtccttgctcgtaccygcctctttatctttctatattactctttagtgcacttctgcagggtccaaatgtacctacgattcccattttctatcttccctaggtcctgtttatgtaagtggtaggcagaataatggactctcaaagatgtctacaccctaatccccagaaactgaatatgtcaacttacgtgacaaaagagacactgcagatatgattaagttaagaatcttaagatggggtggattattttggcttattcaggtgggcccaacctaatcacaaaaccctaaagacagaattttcttggctgcctttaaagaaaaatgctctgttgttggcttgaaagagtgaggaagtggccacaagccaaggaatgtgggcagcctcaagtagctggaaaaggcaaggaaagagattctcctggacagcctggagaaggaatgtagccccaatgata

SEQ ID NO: 423689 - DNA, 594 bp, Homo sapiens
gatcaagggatctgagggctgatgagggaaaaaatatgaccatgagaggcagtaacatacaagtttttttggtggcacttgcccaggatcacatgacaggggaagtgcctcatagcactagactatcagaggcttatagggaaggggccatcacccagaagagaaggagggacagggaactacctgaagaggggatatcagagaggggcttacgtgtctaagttgtgtcactcagcagcacagcggtgagcctctgggacagaaaaccaaaaggcaataatgggttgggggtccttgtaaytactaggccccattttatcaaggtgtgagcaattgcatgagttttcttgggtcatgcaaagcaggtaggctctaaatagcttttaaaaatctacttgtttgggctttaaaaaataattagatgtgtaaaactcttgggtttggcactgtcaggcttttgaactcatttatatgacagagtgggaccacattcgaggagataactctgttgtggtatgttccagccacattttaaggaagaaaataatatttcaaactccaagtgctgggctctcttcattgtagcccagccaa

SEQ ID NO: 423690 - DNA, 636 bp, Homo sapiens
tggtctctctacaccacccttcctccttcttcctttctttacttctctctgtctgcctttctttcttctcttaacaaatatcaactgaacaaatgttgtacactaagtactttgctaaggacagaatatacagtggtgaaaaaaatcaggtgatttatattcacctggaccttacaggttaatgaccagtggtaggcataggttgaagctgtattttaaagtttatcaccctggagcaaaggtgagaatccatagaagaccaacgaagaagagaaagagcctagatctctgatggcacattttttagtactggagcccggctacagaactcagatttcctaaggatgtgcccgcaccttcagtgcaaaaatacagaggcctaggcattgcttcatgcatcctcattacctttgagtaacaatgtcactttgggttggagtgaccttgtacctgagaccccattccaacagaacctttcagctctccacctcccttggccacaaccccgactacatagacatgccagctgaggraaagcctgccagtcagaggaatctgcccttcagcatgcctagggttagggagccagaacatttgacccaggaaagagatccacccaagaccttaccagtgtag

SEQ ID NO: 423691 - DNA, 563 bp, Homo sapiens
tatggaactgacatatttttgtcactccttagaatgatttgaagtttcatattttaacctattaataaaactttccttaagattcatttgaaattactttaatatttaaaatacaactccactaatgtgttttagagcctcatggtctttttatttattttattttctgaaacaaaaataaataactatcctttaaaaagtctctattttctgaaactgtggaaccaagaccaaaccgaacactgaaataggctccacatcaggcacaaattaatatttttattgaatttttgggataatgtgcagaacatacatattggcattttgtaacttctgttagctataaaaataacagcacatccctacctttcttttctgacttgtttagtctgagacaaaccagagaagaaaaggaataaatttagcccttggcccactattaggtgggttctgagattaatcttgtacttaatcttttaatcttagaccygtactcctgtgctcatgaaaggtgagattaatacatgtactaatattactactactgtatcaacacagaaata

SEQ ID NO: 423692 - DNA, 557 bp, Homo sapiens
gcaatatcactgtactttttgctttaaaagatgataaaattctcactactaaccttcttgtcatctcatttctccaaccctctatttttgttaaatatattattctttgaataatgccaaagtttatagcattaaattgtgtgccataacgctaatttttaagattattttgctttagttcaggtttaagttgactcattactaatcaccttgtatttattttgaattcagtaccctttgttttcaattcrtatttgtctcatgattgccttgattttgtcattgatattttccaaaggagaccaatggatgttctattttttgagttattttgtatttgaaatgtatatatgttgcttttatacattaattgtgatattctttggtctggaaatgtgtcagtaaatgtttaacaactagctctctgaaggaacaaaaagaccagattttagcactggcagttttcctgagacaaatgatttcatcatggctgattccaagctatcaacatggtgccactgaaagtaaacggaaagagatgcttgggagcacactat

SEQ ID NO: 423693 - DNA, 557 bp, Homo sapiens
gcaatatcactgtactttttgctttaaaagatgataaaattctcactactaaccttcttgtcatctcatttctccaaccctctatttttgttaaatatattattctttgaataatgccaaagtttatagcattaaattgtgtgccataacgctaatttttaagattattttgctttagttcaggtttaagttgactcattactaatcaccttgtatttattttgaattcagtaccctttgttttcaattcatatttgtctcatgattgccttgattttgtcattgatattttccaaaggagaccaatgkatgttctattttttgagttattttgtatttgaaatgtatatatgttgcttttatacattaattgtgatattctttggtctggaaatgtgtcagtaaatgtttaacaactagctctctgaaggaacaaaaagaccagattttagcactggcagttttcctgagacaaatgatttcatcatggctgattccaagctatcaacatggtgccactgaaagtaaacggaaagagatgcttgggagcacactat

SEQ ID NO: 423694 - DNA, 567 bp, Homo sapiens
tttggtgccccccgaaacatatttttattaaaaaaaaacattaattcagcatttattttcaagatgagataaatgcttcrtgagcaaagggtggagatgggagattactggttccttcagtaatgcagtcttctcttgttatcaagaagttcagctctgaactcaaacttgcatatcatggtctgaacaaaagcttcgcagttaacacaacctaacttccttaaaaaatatttagtggctttctgtctctactcagtcatacgtgacaaggatgccaatgaagatactcctcagcccaactcagagtgctgcatgcaggggtctgatgaacccgttggcagtccatctggtttactcctcagcttgtttcacttccccattgacctcttatcaaagttatgaggaattaaaaatcagaactatctgaattttaactgctttttgtccctctgttgaggactagaagacaatggctaaaaaacagacatcaaaaagaagaagaaaaaaaaacctgggctctaaacaacctgaagaattcatccctgaataatatattttcaccaggat

SEQ ID NO: 423695 - DNA, 567 bp, Homo sapiens
tttggtgccccccgaaacatatttttattaaaaaaaaacattaattcagcatttattttcaagatgagataaatgcttcatgagcaaagggtggagaygggagattactggttccttcagtaatgcagtcttctcttgttatcaagaagttcagctctgaactcaaacttgcatatcatggtctgaacaaaagcttcgcagttaacacaacctaacttccttaaaaaatatttagtggctttctgtctctactcagtcatacgtgacaaggatgccaatgaagatactcctcagcccaactcagagtgctgcatgcaggggtctgatgaacccgttggcagtccatctggtttactcctcagcttgtttcacttccccattgacctcttatcaaagttatgaggaattaaaaatcagaactatctgaattttaactgctttttgtccctctgttgaggactagaagacaatggctaaaaaacagacatcaaaaagaagaagaaaaaaaaacctgggctctaaacaacctgaagaattcatccctgaataatatattttcaccaggat

SEQ ID NO: 423696 - DNA, 567 bp, Homo sapiens
tttggtgccccccgaaacatatttttattaaaaaaaaacattaattcagcatttattttcaagatgagataaatgcttcatgagcaaagggtggagatgggagattactggttccttcagtaatgcagtcttctcttgttatcaagaagttcagctctgaactcaaacttgcatatcatggtctgaacaaaagcttcgcagttaacacaacctaacttccttaaaaaatatttagtggctttctgtctctactcagtcatacgtgacaaggatgccaatgaagatactcctcagcccaactcagagtgctgcatgcaggggtctgatgaacccgttggcagtccatctggtttactcctcagcttgtttcacttccccattgacctcttatcaaagttatgaggaattaaaaatcagaactatctgaattttaactgctttttgtccctctgttgaggactagaagacaatggctaaaaaacagacatcaaaaagaagaagaaaaaaaaasctgggctctaaacaacctgaagaattcatccctgaataatatattttcaccaggat

SEQ ID NO: 423697 - DNA, 553 bp, Homo sapiens
gaaattctgatccccagttttctatcctaaaagtaccaacaggcatmatgggggctgcactccttgctgtcctgggccatggtaactgatatttctacagggattttctgtctgatggttggaggaacctctctggatcctttgttcagtccctggtccctccctggctctctttgggtgtcttcaagtggtcgattcctcatgctcagccacactgggcagggtgggggacatcaccatggagctcatgccgaaatgcagacgttatttggaaaaataatcccaggttcatgaaaaagcaaatctagggcttatttgcttgagagcattttgatctgccctcttctccaccacaagcttttcctatgagaggctttatttccaaaacgacactcaaaagcctctttcatgtagcatggtagtgaccgcatgacatctttctgcatctctgacatcagaaccgagcagctactgtgggtttaatggccctcctaacctcacaagggacctgccaacaattttgagcaattttttcatctcatctagatgggat

SEQ ID NO: 423698 - DNA, 604 bp, Homo sapiens
aattattttattctcctccctcccatcaaaaagtggcatctaattacccttctcttgataaggagccagctcagcaattcccttacagcaaatatgagacataagtgaccttgcatggctcccaggctaggtcagaaaaagcattatggctttctccttggtttgctctctctctttttcttgggacattgatctttggagctggtagccaccatgaagcaagcccagctacctgaaggcaccgtgctgragagaccatacatggagagagatgctcagggagcctcagatgttctctccccaactgtttgaatgtttccagctgggaagccagactcagaatatgtactatgcatatgatttcagcctgcaatcctcaagccaccccaatcgatgccaactagagcagagatgagctttcccgtggatccataggatctgtgatcatgagaatggttgttttatgctaccacatgttggagtaactttttaagcaactgacattactggagcatagatacatagataaaatccagccactctcagacaaggcaatgtgggtgcttctcaaggcccctaaacaaggaagtgcctccagctcctc

SEQ ID NO: 423699 - DNA, 524 bp, Homo sapiens
agagtgaactcaggctcactggaggaatgagcatggggctgttaagggctaacctgtggagagctcaaagtctatggagaaggagaaaaccaagatattatggctgggtcatttctagagtatcctttagtgagctggtaaaagtgtttagtgatagttctctgcttgtcatcaaactagtgctataattcacaccctttgaggttgagtttctgatcagaaagagctgaaaaaggaaaaatatatttcagggagcatggttcaacacattttcactctcattcttggagtctgtgtygacttttgagaaggtcattcacaacacaccatgctttgggctaaactggggaatagagtatctgaaaataaacttaacattccaaccatgctaaattattttccaaccctggagcatacaggtgagttcagatgagttcagttgtgtattagcccatttgtgttgctataaaagaaatacctgaggctgggtaatttacaaagaaagtaagtttatttggctgtca

SEQ ID NO: 423700 - DNA, 541 bp, Homo sapiens
acatatattttgtcatttattcctactgaggtatgtttattcagaaacagttgggcacaagtgaatgcaagtaataactccctaaatatatatatatctttccctgaagtcccagtttcccatttcatcccatcaagagtgttaatgcaacactttctcttacttcaggcattgtaaatctattcatctgattcacgtttcttttggattgttcctttctccacctttattgaattctatttttcttcctatttatctaggggcatagtttattcatttttcctgagtttagcccacctgactatggctttatagcctgtttgtgaattggttttagtaataattattatattttaatattayttggattcataaaacattaattttcaacttacagtagtcactaagtccaatcaaaatccatcagaattcagatagaaaggaaaccacattccaagctctatagtaagacttgacatgatcctgctcatctttatgtcagtccagaaagaaatgcattattacttccatgtttcagctg

SEQ ID NO: 423701 - DNA, 581 bp, Homo sapiens
aatgcattattacttccatgtttcagctgagaaatctgaggctcagatcagggaagtaccttttctatgttccaggataggcatgaagcagaccaagaatattcttatcatttttcctgatgatgaaactgtgatgtaagttacatatagagaaagaaattccaatatttttctaaaagacacttatttttgtacattgttattgaaggtgacagaaaagggtgttgagttgaacagaataaaatccaccttyagagtaactatgcaacttatttcaagagtaggtgaatatttcttggtcctattctcctgggttctaagtagttcttcccaggaaaacataagagagattacgtttaagtagttagtgcttccttgtaaatgtatagtccttaatgctggtgctctgtttctaccacagcctgaaaaatataaaataactctagtggctttgctccatctcataagcatccttatcaccaagtaccaggagtaagaatgagcagtgtagatgtggaggaaaaacatttgttttcatgatcttagtcccccagttctactgaaaaggccttgggtatttt

SEQ ID NO: 423702 - DNA, 527 bp, Homo sapiens
tctgttgagtgatttgtgaaacatttaactatcacattcattgaacaagtataaacacagagtagtaataagtgacaaggattctataaggagatgtatattagcacaggtaggagcaaatttgaagtaatttcgaggaaaatgtaaatcagtcactgagaagaaaataccctcagctgggagttgtggctcmctcctgtaatcccagaactttgggaggctgaggcgggcagaccacgaggacaagagattgagaccctcttggccaacatggtgaaaccctgtctctgctaaaaataatttttaaaaaaaattagccaggcatggtggggcacgcctatagtcccagctactcgggagactgaggcaggagaatcgcttgaacccaggaggcggaggttgcagtgagctgagattgcgccactgcactccagcctggcgacacagcgagactccatctcaaaaaaaaaaaaaaaaaaaagaaaaagaaaaaagaaaagaaaataatctcagcctgcagaagtgag

SEQ ID NO: 423703 - DNA, 499 bp, Homo sapiens
ttgagttacatgggtgtatgcatttctcagaacctgttgaatggtacaattttgtggtgggaattttaccatgtaaaatggcatctaagaataaaagacccatgaaytgtgaatgaactctacttaatgagatgcaggcaggagtgctgaggggtgaaatggcctggtctctgcagtttactttgaagttcccacaagcacacgtggacatgccctgctcttaaaaaaataagatggtataattcttccaactttcctgaatgcttgaaaacttccatagcagcatgctgggtttaaaaacactacatagactcaaaataatttaagtaaagtggggaagggagagagagtacattgggcagagaccacattgcttctggaacattatccagggagtggcatccggggtctctctgcttccaacctcactctgaccagtccctgctgccccacagaacactggcctccttataatgcatattccaaatgagacttcatg

SEQ ID NO: 423704 - DNA, 499 bp, Homo sapiens
ttgagttacatgggtgtatgcatttctcagaacctgttgaatggtacaattttgtggtgggaattttaccatgtaaaatggcatctaagaataaaagacccatgaattgtgaatgaactctacttaatgagatgcaggcaggagtgctgaggggtgaaatggcctggtctctgcagtttactttgaagttcccacaagcacacgtggacatgccctgctcttaaaaaaataagatggtataattcttccaactttcctgaatgcttgaaaacttccatagcagcatgctgggtttaaaaacactacatagactcaaaataatttaagtaaagtggggaagggagagagagtacattgggcagagaccacattgcttctggaacattatccagggagtggcatccggggtctctctgcttccaacctcactctgaccagtcccygctgccccacagaacactggcctccttataatgcatattccaaatgagacttcatg

SEQ ID NO: 423705 - DNA, 522 bp, Homo sapiens
aattcagtcattgtctaaagcaattataatttcaaaaacataaagtgtgtgcttctcggggcccttccccagccccagtcaactttctcttagccctggtgacattccgtactttgaaacatctggccagcggtggaraggctggacaggggctctgaaagcgttgagaaggctcccccaatgccttcagtctctttttgcaagacagacatcaccttttaaatcctgaaagagttctaggttctttagagcccttccttgtgcccattcacccaacagccaggtgcaaattattgcagattcttcgctgcttctcctctgcccccagtgagcacttcaactctgggtatctccggcctcccagtcctgtcttttctccaaattccagcagacggacagttttttgtattgaaatgttactgtaatttacataatgaggtaatttacataaatgcaaatgattcattacataggcagtctagcagctgctctaaaagaaatactttatttttacctttcgtc

SEQ ID NO: 423706 - DNA, 596 bp, Homo sapiens
gtggccggggttacatcgttggctgcaacaggcagaaccaagaggaactgtgggaagaaccgagattccaggctcagtgtttttagggaggagagaaggaaaatggtctggaagcagccatgayttgctgtggggagggaggaacttctcacctccagacgcagccgtaggaagagatgcagccgccaccgcctgaggactgaggggtcagtgtccccaggggagtgggggcctgcttaaagcaagatggggaaggcccagaacagatgaagggcccacaggggtgtggagttggagcttcgtgaaagagggttggctgctgggatgtgcttgtgagtcctgccatttgttttagttatttttctacaaccagcagcttctggcttcctttcttcctgatgttgatgttctcacctcccacaatctgagacgagaggtggattttgcaggctcagagaggatcagcaccctgcccgaggcccatagtcagcagcccttccccgggtcccctgggttcccctaccaaccccccaaaggctgctgcctcctcctggtgccctctgaacctgttctgtgccctgcaggtgttcggcgtc

SEQ ID NO: 423707 - DNA, 596 bp, Homo sapiens
gtggccggggttacatcgttggctgcaacaggcagaaccaagaggaactgtgggaagaaccgagattccaggctcagtgtttttagggaggagagaaggaaaatggtctggaagcagccatgatttgctgtggggagggaggaacttctcacctccagacgcagccgtaggaagagatgcagccgccaccgcctgagkactgaggggtcagtgtccccaggggagtgggggcctgcttaaagcaagatggggaaggcccagaacagatgaagggcccacaggggtgtggagttggagcttcgtgaaagagggttggctgctgggatgtgcttgtgagtcctgccatttgttttagttatttttctacaaccagcagcttctggcttcctttcttcctgatgttgatgttctcacctcccacaatctgagacgagaggtggattttgcaggctcagagaggatcagcaccctgcccgaggcccatagtcagcagcccttccccgggtcccctgggttcccctaccaaccccccaaaggctgctgcctcctcctggtgccctctgaacctgttctgtgccctgcaggtgttcggcgtc

SEQ ID NO: 423708 - DNA, 558 bp, Homo sapiens
acagcactggccttggctgggtgacatggctcatgcctgtaaccctagcacttttggaggctgaggcaggtggactgcttgagctcaggagtttgagactagcctgggcaacatagcgagaccttgtctctatttttaaaaataaaacaaaaactaaacagtagtggcctttagggcaagtgggttgtgggcccctagcaaagagatgaggagaatgacttttcaccattcacccttttatttttttgacttgtgtactacaagtagtacttgttcaacaatgaatatattccctaattcaaaaaagaatggaatgaaaaatatcatcacacgtaacaagaatgttttatgaaaattaaacatataaaactggatcccatacacatattaatgttatactataaaatgttatatttatatttatttatatacatgtgttatatttatatttatatatagttacagtgttatctaacactataaatgtgttaaagaggttatgatagaaaatgtttcttamtgaaggttgcaaagaagtttgaaagcaataaaccaaga

SEQ ID NO: 423709 - DNA, 598 bp, Homo sapiens
gggtgcacttaggggtaggctgcttggagtgcacacagctgtggagacatgcgtgcctcaacccagtaacaggggtccaaggacctggggggagcctgacagtgtctgcaccctcagccccagtagcatgtggcactgctgtgcaggtgttccagctcacaggtgtggggccagggttctgggtcctcaagccaggccctgctggtggatacagctgcacacaccacttagccatattctggctgaacacctgcttggaggccaccctgggaagagctggtaggaggagcaggcagggcaagttgatgcagagcaggagcggcatcccaccctgcagggagggagagagagagcaggtcagggtgagctgggccaacccatagcttggaagttatmggcctgggaaggtggagtggcccccagcaaggaaaggcctggagaacaactcatgagccagacatgaggagcgagaagcccaaagcccagcctcagggtgcctgtgggctcagcactgagcctcaaaacaagacttgggaagcaccaggctgtgaggttcacctggagtcctgagtcctggctggtggacgcagacagcaca

SEQ ID NO: 423710 - DNA, 595 bp, Homo sapiens
aaagttggcaatgcaggtggttttctcagttggttcttcttgagttgaatattcagtagtttctggagttgctgagtgaaatttcacctaatttagaatttccayagctcatgctctgaaacctcagtaatcgggacatgcaacttttagaaaaccagaattattttgcttaaaaaatgttttgctttctggtcaatttacaggtgttaactagtggtccctagttgttttaaaatagaaaagaaggaaatagtgctctctccatccccacgtgtccctacccagtcatgcaaggtacctctccagtctggttaccatagcctctcaggcaaaaggaggcaaagcctgaggcaccagagaagtctgtaaggagcaaggccaaactgtccaggcagtgaggacagagattgaccttggatatgggaatgcttccttcttagcaatcaaagccaaagggtatttcccacctcagttgaacaccatgttgcacgtcctgggaaagacagcctcatacaggagctcatgagatctgctctatcaggttggcggttctagttgtcccataaatacaaagattggtatagtgtgcacgaag

SEQ ID NO: 423711 - DNA, 579 bp, Homo sapiens
tgtctcaaaaaaaaaaaagaaagtattacagcaatagcccaagagttgtagcctactggcctggcctgcaaatttcacacttgccagctcctaaaatcacataagcaattccttgaaataaataagcaaataaagtaggatatatagcatatataatgtatatgattttatatacatatacatacaacctacatatgatgctatacctgggcacctcagactagccctgggggcctgcctggagctctgctccccactttgctggcttggctttgctcattctttaaatctcaaccaaagctctccctgactgttctacctaagtagattttacatctgttatttgctgtcacttcaatttgttcttttcctttgaagcatgtctaactacttttttattgttgrtctccccaaggctttaataatcaatgagacatatttattttgctcaccacttagaaccttgcctggcttacagtaggtgttcaataaatatttaacgaatgaataaattaacctatcaaatgcctaaagcttttatttcctaaaaaggaaatgcataaatacatttaaattttt

SEQ ID NO: 423712 - DNA, 579 bp, Homo sapiens
tgtctcaaaaaaaaaaaagaaagtattacagcaatagcccaagagttgtagcctactggcctggcctgcaaatttcacacttgccagctcctaaaatcacataagcaattccttgaaataaataagcaaataaagtaggatatatagcatatataatgtatatgattttatatacatatacatacaacctacatatgatgctatacctgggcacctcagactagccctgggggcctgcctggagctctgctccccactttgctggcttggctttgctcattctttaaatctcaaccaaagctctccctgactgttctacctaagtagattttacatctgttatttgctgtcacttcaatttgttcttttcctttgaagcatgtctaactacttttttattgttggtctccccaaggctttaataatcartgagacatatttattttgctcaccacttagaaccttgcctggcttacagtaggtgttcaataaatatttaacgaatgaataaattaacctatcaaatgcctaaagcttttatttcctaaaaaggaaatgcataaatacatttaaattttt

SEQ ID NO: 423713 - DNA, 509 bp, Homo sapiens
cactcatttaattgtgaaaacagaaccatttgaggtaggtataacttcactaactcacaaccctggatctttatagcacccaccaagatgaaagtaagtatcgctaaatagccaacagagacatgtctctagggaagacatacattaaggaccagagtcccccaaacctgcgtttcggtccagctttgctcagatagagataacaaactcactgttattatcataggtcaggctttagtcccagcctggtctagtctccttctctggtgaatgagrctgaactcacaagagcacccagtttgccttctctattgccagagccaccataggccattaaatgacgacttcctgaattaccttaaaataggagaggcatccccaggccacatggaaccatccagttggcacaggagggaagagaggattacaaatacagaggaacacaagcatgaatactcccagcccccaccaccaaaatcaccttcttacctccttccctatctacagca

SEQ ID NO: 423714 - DNA, 577 bp, Homo sapiens
atcaagtaccactaagtacctggaaaaaattaagagtgccaactttatgaagaaaattataaaactttattgaaaaatacttttaaagtcctaaataaatggagagatatgtcttattcatggattaggggactcagtagagtgaagagattaactccctcaacttgatctacagattcaatgcaatctcagtaacaaattccaagaaatattgtgtgtgtgtgtgtgtgtgtgtgtgtgtttaaaacttcaaagctgattctaaaatatttatggaactttaaagtgccaaaaccagtagtcttgataaacaaggaagggagctgtgtttytagataccaagacttactataaagctgtagtaataagataataaaggtattagtttggggacagacaacaaaacctgtggaacagaagagaaactccaaaatagacccaggtatacagggacacttgttagatgacaaatcagaaagggaagggtggattgtttcatttatagaaaacggaatatctgttttataaaagaaaagaaattggacccctttctcacactatatacacacgcatcaac

SEQ ID NO: 423715 - DNA, 628 bp, Homo sapiens
atttgagcagatcattggtgtgaaaatcccacaacacttggagcttagctaagtaraaaagtggccgggtgcagtggctcatgcctgtaatcccagcactttgggaggccaaggcaggtggaccactggagatcaagagtttgagaccaacctggccaacatggtgaaaccccatcactactaaaaatacaaaaattagctgggcatggtgacgggtgcctgtaatctcagctacttggaaggctgacgcaggagaatagcttggaggcggaggttgctgtgagccgagattgcgccactgcactccagcctgggcggcagtgagtgagactccatctcaaaaaaaaaaagaaaaagaaaaaagaaaagtgaccaacctttagaatgcctgcttatgtggagtttgtggtcctggcagggacaatttatttctcccattctatccagtagctggctggaatgtgaacatggtgataaaataccctacactatctcagagggagtcctctgtaacttttcagtccaatgcatagattcatttcaaacctactgtgtcagacattgtactgaatgctggagctacaggatgagtaagacagtcacctgcttggaaggtgtccacagcctt

SEQ ID NO: 423716 - DNA, 628 bp, Homo sapiens
atttgagcagatcattggtgtgaaaatcccacaacacttggagcttagctaagtaaaaaagtggccgggtgcagtggctcatgcctgtaatcccagcaytttgggaggccaaggcaggtggaccactggagatcaagagtttgagaccaacctggccaacatggtgaaaccccatcactactaaaaatacaaaaattagctgggcatggtgacgggtgcctgtaatctcagctacttggaaggctgacgcaggagaatagcttggaggcggaggttgctgtgagccgagattgcgccactgcactccagcctgggcggcagtgagtgagactccatctcaaaaaaaaaaagaaaaagaaaaaagaaaagtgaccaacctttagaatgcctgcttatgtggagtttgtggtcctggcagggacaatttatttctcccattctatccagtagctggctggaatgtgaacatggtgataaaataccctacactatctcagagggagtcctctgtaacttttcagtccaatgcatagattcatttcaaacctactgtgtcagacattgtactgaatgctggagctacaggatgagtaagacagtcacctgcttggaaggtgtccacagcctt

SEQ ID NO: 423717 - DNA, 628 bp, Homo sapiens
atttgagcagatcattggtgtgaaaatcccacaacacttggagcttagctaagtaaaaaagtggccgggtgcagtggctcatgcctgtaatcccagcactttgggaggccaaggcaggtggaccactggagatcaagagtttgagaccaacctggccaacatggtgaaaccccatcactactaaaaatacaaaaattagctgggcatggtgrcgggtgcctgtaatctcagctacttggaaggctgacgcaggagaatagcttggaggcggaggttgctgtgagccgagattgcgccactgcactccagcctgggcggcagtgagtgagactccatctcaaaaaaaaaaagaaaaagaaaaaagaaaagtgaccaacctttagaatgcctgcttatgtggagtttgtggtcctggcagggacaatttatttctcccattctatccagtagctggctggaatgtgaacatggtgataaaataccctacactatctcagagggagtcctctgtaacttttcagtccaatgcatagattcatttcaaacctactgtgtcagacattgtactgaatgctggagctacaggatgagtaagacagtcacctgcttggaaggtgtccacagcctt

SEQ ID NO: 423718 - DNA, 552 bp, Homo sapiens
taattttattttctgccataatagaagatagtttataatgaaaaagkttatttgcatgttcacacttaattttattcctgcagcacacttaaacactacatatgtaaactgtaaagtaagttaatttataacgctgacttacacaaaaaaaatctacctttgagaaaccctgaaacatttagtctaaaatgagacattccaagagttcaagcaaaatatataatttcaaagcccaaatttattttaacatatatctcttcagttaaagttttaacatattttaaacgtaaatttacaaggatgaacataaaaacccacggggtattagaaatgtcacattttcaaatgtccttattttaaaactccgtaatttaaaataaattccttttaaaaacagcaacataaataaatatgcatgaacatatacataattgtagaaagtactagcttaaaaaataagcgatgaaagaaatttgaaccttgacagaataattacatatttcagtttgatgtaaaactaaaatacaaaccagcaacagcttccttaccgct

SEQ ID NO: 423719 - DNA, 607 bp, Homo sapiens
gttttaggggaggcagggcctcaggtcctcttcccttattctgatcagtggcccttttgatgctttacataatggaatttcaaataaattggggaacagtgcatktgtcccaaattccattttgcatactgtgcttggtcatatatgacacatcttaatgcagttaatatggctaaacattctatattgaagaaaactaattatacagagttttcaggttgtaaaacatactttcttcatatggaaactgaatcagtcacttattttatcatttccaatgctaagatcccaaatgtactattacataccttgtttacaggactgagaaggcagtgtgacacagtggatgtggcagttgactagatatcaaaggacttacgttcaaatcctagctctcgtccctcactggatatgagatcttggccaagtcatttaccttttgatggttaaactttctgaatctgcctctctaaactcacaaggttttaatggggataagtggtggaaatcaaatgacagaatatatactttgaaaacctcgaaaaagtcacataattacaaacatttatcatagtatatctgatatgttctctcaattatgcatgca

SEQ ID NO: 423720 - DNA, 555 bp, Homo sapiens
cttagtgaagcatttgcacagggcatcaactgctaatatttacatgcatgtgattacctgtgcatctgcagatgtacgaggctgamccgtatcatggcttacggatccctttttcacttgccccctgccaggtggtgggggaattacaccagaatacgacccttgattttcagaatctgaagaatatgaggctgcatggcgagattcctgttcattctttgaagcaacaaatcttggcagaggaaggtcctttactgttaaccacaaaataatcattacttcaaaataaaaaaggacatatatattgaaaactaaaataagacatgaattagatattagaatttttgtaaaaatggatacagaaacaagaggcacaaaatgtctatcaccacaaaatttggaccaccatctcccttacattatttagggagactcttatctagaaagaagtaataaaaccaaattgtccttctaatgagtgataacaatggctacatcaaatgtctacgtatgtttggccctatacttgccactgaatatttatttcacctcgta

SEQ ID NO: 423721 - DNA, 594 bp, Homo sapiens
ctgtgaaaaaaagagtccttgcccgcatgaaggatatgatctagcagaggaggcagacagctgactcagaaattaaaagaaagcatggggagagctacaattggggacgtacaggatgctctggggacacccagtctagagggctgaaggaggtttccccaaggaaaagatatttatgctaagaataggtagcatcactgtaggtggggacaggacacagagtcaatgaaaataattttatttaataccctagtgtcatgattcttaagaaaagtaatttggaacaggcataaagtgytaaatgtggcccaccttcccacattctgccacctccacttccaggatctcatcactgctcaccagggttagggcgcctgctttctgaccagttttcctgctcttctctggtcctgttcctttttgatcacttgccacacagctgtgggggtaatcttcataaacgtatgctgattatgtgactcccctctttcaatctctttgccctaaaaaccaaatataaactttcacgcagtttccttttcaggcccaggccctccagacatgtatgcaactctcgtctgccttctatgtttc

SEQ ID NO: 423722 - DNA, 567 bp, Homo sapiens
atgtatacatatgtaacaaatctgcatgttgtgcacatgtaccctagaacttaaagtataattwaaaaaatcgttatgtaataacaatattgttattgtatatggaaatacagtctaaattgttaaatgcacatatcgcttttaatggctgacgcttcttttccccttgagactgaatctgggtcattttctggctttttccaccttgccttcagaagacttttttttgaggcacttgatacagaaaaagttttgagagagcttttttctctccctaagatttaagaacatttctgaccattttactcatattgtttttaagtccaagctatagttcacctttgtttatgttaacttaagaaattttttaagactaatgtttttccagttgcagcctctctcccaccaaccccaaaccttacacattacttcccactctagaattcagtctgtagattccagtttacttaaatgtgtcttttaatggcatgttggaaagagctcaggattcaggagctggattcttgggtcaaatctattagtaattccactagtaaatgtttatta

SEQ ID NO: 423723 - DNA, 567 bp, Homo sapiens
atgtatacatatgtaacaaatctgcatgttgtgcacatgtaccctagaacttaaagtataattaaaaaaatcgttatgtaataacaatattgttattgtatatggaaatacagtctaaattgttaaatgcacatatygcttttaatggctgacgcttcttttccccttgagactgaatctgggtcattttctggctttttccaccttgccttcagaagacttttttttgaggcacttgatacagaaaaagttttgagagagcttttttctctccctaagatttaagaacatttctgaccattttactcatattgtttttaagtccaagctatagttcacctttgtttatgttaacttaagaaattttttaagactaatgtttttccagttgcagcctctctcccaccaaccccaaaccttacacattacttcccactctagaattcagtctgtagattccagtttacttaaatgtgtcttttaatggcatgttggaaagagctcaggattcaggagctggattcttgggtcaaatctattagtaattccactagtaaatgtttatta

SEQ ID NO: 423724 - DNA, 573 bp, Homo sapiens
catttagtagaatgcctaacacacagaagaaggctccaaataagctggttgattggatatacgtatttcaaaatagaacaaaaacaagaagctcttttctacccaaagaaggggaaggattctcccaatgctgattaaaaaaaaaaaatgatcatgtaacttgaatcaagggatctagcctggagagctgcccaatccaattgtgctaraaatatgctctatttaggtaaggttattagcattttaaatgaagctgcctatataattatctagtctaaactctcatggaatgagctatatgcaataagcaactttggctacagagaggcaaacaagaatattggcaatgccataccaaatggtgaacagagaaagagccctcagctctaatgtgacaggtaagccagaaggctcccttagctcctccatggttgtgtaacccttttacaagatcactgtagcctgtgatggcagtaggaggcactgccaaactgagggccccgaatctcccacgggtaacttctatcatcactaagaaaattgagggttttttttagtctgggcttctgaacc

SEQ ID NO: 423725 - DNA, 512 bp, Homo sapiens
catatatatttacacatacatgtatactattgggtacatatatatttactgcatatatattttggtgcatatatatttatatatttaatttttatatcatcttgctgaattgacccatttatcattatatactgaccttctttatctctttttatagtctttgtcttgagatctattttgtctgacataagtatagctattcctgctttgttttggttttcatttgcatagaatatctttttccatccctttattttcagtctatgtgtgtctttataggtgaagtgtgtttcttgtargtaacatataattgagtcttgttttttcatccattcacccactctatgtcttttgattggagagtttagtccatttacatttaatgttattattgataagtaagaacttaactcctgccattttgttttttgttttccagttattttgagctcttctcttccttcttacctttcttcctgtcttccttttagtgaaggtgatttcctctgatg

SEQ ID NO: 423726 - DNA, 580 bp, Homo sapiens
ttttttcttccctgaaatctctagcaactaatttgtgcctcttttatctccagatcttgttctattttaactatgtcatttcagtaggttcttacctactctagcagaaggtgtggtctttgggagtgggtctctgtctgatgcatctttgttctactataatactgtttcttcatttatttagtcatggtagaggcataataaatgttgaatgaatgaatgaatattactatttcattttgctcccaaatcttagtagaattaattatgtttttgaactagctttatctatattgcacctagaatcaatgtaaacggaatttgcagttttgcaatctgggtacaaggtaccatatgaattgtgtttaatggtaatgtctgtctttttctttctttactacaacagacttttcccttttgtagtttttgagtagcagcaagaatttcaagtattaatgataactatatttgatataattatcttttatagcttgtattkttattaaacaacaaaaatcccattttgttatttaaaatgatgattataaacaacaatcaattgtgaactgacagtttgtct

SEQ ID NO: 423727 - DNA, 516 bp, Homo sapiens
gaccgttgtggccatgtaccaatgtatgcacatttgaagaagtaggtacttattccaatcttctcagactggctttgtctgagaaagtctttcaacagtcagctttgtccagagattctggtcagggtgcctggcatggttccaaaacctggagctgctaaggcttgtgcagtgttggggtgtacttgaagcctggaagcactggggctgacagtgctggagcaagcctgaagcccaggttcactgcaggcaatatggcactggggtggactggaagcctggggctgctgagacctgtctgcctctagggctgtccagaacccagggtcattgaagtcagcctggtggtggtgcaaactgaagattgtttctcctgcactggcctgaaacctaggcctttgtgttcaccactgagccatggtggtttggaggctcagtagaaaagtaccagcctggggtctgcagccatggarcccttcttggtgctgctgttggggtccaagaaaaagccctgtg

SEQ ID NO: 423728 - DNA, 519 bp, Homo sapiens
aaccaataggtaaacaatcacttttatcctgtgatggaagatgaggagtaatttacctttaaaagcacactgctgggcacatacaaattactaaaaatgtatgcatgcagttgagttgcatcagtgatgtatgttatcctgaaaccatggatgtgacagaatatgtatgcagtggttcttattaaattgatatgaaaagacaaacaaaaacttcataaaattttgtcctatttatgtttaagaaaactatatatatataattttatttttaatacaatgcatttataagtgtttataaaaattctgtataaaaagcatcatataaactcacaaattaggggcaaattrggatatataactatcctaattgatagcaaatttatagaaaatcatgaaaaatgtaaaatatgtaggtttgaaaaggaactaaagctaacatgagaaaaagaattccaaagaaatgaaaattattttggcaatgtaggtattcctattcactgcctacgcattctatacaat

SEQ ID NO: 423729 - DNA, 538 bp, Homo sapiens
tcactgcccccggcagctccgggtcttcgcctttctccccgccgccctgctcgcccccgggctgcccttcggccgccaggtacactgtttcttccggatagactagcaagcccttgcccaggagctgcacacagcagtcttcctggatccccggggacagttggggcgcaggctgcgcctgcaggaaggtgtcttccagctccgggaccttggccatcctcctggccgccggacacctccgcgcgcgccgctcggccggttccccagcggagccccagcccggggcggggcggggcggggctgggaccsggggccgcaggggcggggaaggaggccgcaggctccggggtgccctggctcagcgcagaaaggacgccgcgcacaggtacagcccaggccgcccgggagccgcggtgggccgcggtgggactgcgtttctccacctgtctgcggtcccggcagatgctcccgcgaaactcactttctcacctgcgcctgtcacgccctgggcgcccacagcttccccctccttcccgtt

SEQ ID NO: 423730 - DNA, 538 bp, Homo sapiens
tcactgcccccggcagctccgggtcttcgcctttctccccgccgccctgctcgcccccgggctgcccttcggccgccaggtacactgtttcttccggatagactagcaagcccttgcccaggagctgcacacagcagtcttcctggatccccggggacagttggggcgcaggctgcgcctgcaggaaggtgtcttccagctccgggaccttggccatcctcctggccgccggacacctccgcgcgcgccgctcggccggttccccagcggagccccagcccggggcggggcggggcggggctgggacccggggccgcaggggcggggaaggaggccgcaggctccggggtgccctggctcagcgsagaaaggacgccgcgcacaggtacagcccaggccgcccgggagccgcggtgggccgcggtgggactgcgtttctccacctgtctgcggtcccggcagatgctcccgcgaaactcactttctcacctgcgcctgtcacgccctgggcgcccacagcttccccctccttcccgtt

SEQ ID NO: 423731 - DNA, 567 bp, Homo sapiens
agaatgatcttttaaaatagtgatttgtaagatgtttattttttatatactctttaagaaatttttgtaagctatcaactgtctcccagggggaaaaatgcccatgaatacgctaatgtaaaaatttctgcttacrgtttaacagactgtaagtaaaaaaacctgaaaaagtttattctgttttaaggaaaaaaataaaaacacatgatgtctgaaagaagattctttgaagttcccaaattacagggtcttcatgactggaggcacaagagtaaaggggaaaggaaaaggaatttggagtcaggtacatttgcactcattctctttgtgcttctgggcatttaacctttctgtgcctgtttccttctctcaaaattggaaaaaaatagtacatatctatagtagattttgtgggtgttctgctcagatccccttggatttcttccacattttctgagcacccctcaccctgtttttgcctcctttggtttccaataccagccccaagaccaccacctgagagctcctgggacttttctttggaggaactgcccttagctaccagac

SEQ ID NO: 423732 - DNA, 553 bp, Homo sapiens
agtccatatttttaagaattttatataaataaaataactatgataagtattctttattgyatgacttctttcactcagtataattatttcaagatttattcatattgtgtgtatgaagagttcacttttttgtgtggagaagtatccattcacctgttgatggacatttgggtagttttttgttttgttttgttttgttttttgttttttgtttttgagatggagtctaaccttgtcgcccagactggagtgcagtggcaagatcttggttcactgcaacctccgcctcccaggttcaagtgattctcctgcctcagcctcctgagtagctgggactacaggcgcatgccaccacacacaggcggatcacgaggtcaggagttcgagaccagcttggctaacacggtgaaaccctgtctctactaaaaatacaaaaacatttgggtagtttttaatttttggcaaataaattagcaatttttaacaaataaaactgctatagatatttgtgtcatacaagccttcatatggtcataagttttcatttctcttg

SEQ ID NO: 423733 - DNA, 598 bp, Homo sapiens
gaacacaaactaaagttcagatcctactgaagaaagaagttcctgagaaagaggcttgttgtggtacagtagaagacccatttcccctaaagaaatggtaaactgaaaattgactggccccagaagaaactgaaggtcaatttcagatactctcagatcataaatttgaattatttgaatggctgctatttattcctatccaactaccaaagagaaagttaaatcccttctgggggaagaacacattaccctaggcctcaattatttctaaaataaaattttcttatacaataactggcattccaccaaaataaatctggataccacaaggaaataagaaagtataattttaaaaaccrcaagaacaaaggcaactgaaacaattcacagaagatgcagaaagagagttaccagacacttaaaattaccatgtttaatatacttaataagtaaaatgcaagattggtaacatttattctataaaaaagaaataagcaaaaattctagaaataaaaaatgcaatcagtgaaattaagaatttaatacagctgaagatagaattagtgaactagaaggtaaaccacaagagacacagctg

SEQ ID NO: 423734 - DNA, 553 bp, Homo sapiens
agtccatatttttaagaattttatataaataaaataactatgataagtattctttattgcatgacttctttcactcagtataattatttcaagatttattcatattgtgtgtatgaagagttcacttttttgtgtggagaagtatccattcacctgttgatggacatttgggtagttttttgttttgttttgttttgttttttgttttttgtttttgagatggagtctmaccttgtcgcccagactggagtgcagtggcaagatcttggttcactgcaacctccgcctcccaggttcaagtgattctcctgcctcagcctcctgagtagctgggactacaggcgcatgccaccacacacaggcggatcacgaggtcaggagttcgagaccagcttggctaacacggtgaaaccctgtctctactaaaaatacaaaaacatttgggtagtttttaatttttggcaaataaattagcaatttttaacaaataaaactgctatagatatttgtgtcatacaagccttcatatggtcataagttttcatttctcttg

SEQ ID NO: 423735 - DNA, 563 bp, Homo sapiens
ttttcaaaatttattcctaatatgtagagatttcattaattttgcctcaagtatagtattccattggatgaacacttactcattttgaaaatccatccgttgatggtcatttaagatgttctaattttttgctttgagaaataatgctacagtgaacatcctatcatctgtctccttgagcaaaagtacaatcatttatttaggatgtacacttgggtttcgtgacttacaaaggcatcttccagttctccccaatcaatcaatcaatcaattactgcattaatcaatatttgctgagagcgtagtctatgaaaataaataactagacattagttcttagaacccccttgtgtttcaaccctgccgttgattcaaaataaaatcaaatctaaagacaaaaagtaagtagacaaaatttatgtgcatatataacacaactttcttccccaaggagtttttagattggtaattatgccatggcaagtccagcctcygttaagtttctatactttgtgttgtgcaattctagtcccattagatgacaatgattgttgtctagactg

SEQ ID NO: 423736 - DNA, 582 bp, Homo sapiens
ccaatgccttgggcagctccacccctgtggctctgcagggtacagccctcacagctgctttcatgggatggcattgagtgcctgcagcttttctaggcacatggtgcaagctgctggtggatctaccattctgggatctggaggatggtggcccttttctcacaggtacacgaggcagtgtcccagtggggactctgtgtaggggctccaaccccacatttcttctccttattgccttagtagaggttctccatgagggttctgtctctgcagcagacttccacctggacatccaggcatttccctacatcttctaaaatctaggtggaggctcccaaactcttgctttttctgcacttgcaggcccaacaccatatrgaagtcaccaaggcttggagcttgcactttctgaagcaacagcctgagctgttccttggcccctcatagccacagctggagctggagcagctgggacacagagcaccatgtgccaaggctgcacagagcagtagggccatgggcctggcccacaaaaccagtttttcctcctaaggcctccaggcctgtgaggggagggggtac

SEQ ID NO: 423737 - DNA, 682 bp, Homo sapiens
attagttcattatcacactgctataaagaactacctgagtctaggtaattcatgaagaaaagaggtttaattgactcacagttctgcaggtttaacaggacgcatgactgggagaaatttctaagcctcaggaaacttacaatcatggcaaaggggaagcaaggcacatcttrccatggcatagaaggagagagagagcaaggagggaactaccacacacttttaaaccatcagatcttgtaagaactctcgttcttgtaagatccaatcacctcctaccaggtctctcccatgacacgtggggattacaatttgacacaagatttgggtggggacacagaaccaaaccatatcactttccaactcattttatgacatcagcataacccacctgtcaaaaactgacaaagacattacaagaaaagcaaattacagaatatcacttataagcatagatgcaaaatatctcaacaaaatagattcaacaatatattaaaaagataatacattatgcaaagggggttattccaggaaagcaagaataccataattttctaaaattaatcaatataatgtattacattaatacaataaagaaaaatcagcacctcaataaacatagaaaaggcatttgacataattcaccacccactcatgtaaaagcactcagcagactagaaaa

SEQ ID NO: 423738 - DNA, 559 bp, Homo sapiens
aatcacctcctaccaggtctctcccatgacacgtggggattacaatttgacacaagatttgggtggggacacagaaccaaaccatatcactttccaactcattttatgacatcagcataacccacctgtcaaaaactgacaaagacattacaagaaaagcaaattacagaatatcacttataagcatagatgcaaaatatctcaacaaaatagattcaacaatatattaaaaagataatacattatgcaaagggggttattccaggaaagcaagaataccataattttctaaaattaatcaatataatgtattacattaatacaataaagaaaaatcagcacctcaataaacatagaaaaggcatttgacataattcaccacccactcatgtaaaagcactcagcagactagaaaaagaaggaaacttaattgggctctgtgtcaggctgttcttgcactgctataaagamataccagagacagggtaatttataaagaaattaggtttaattggctcaaggttctgcaggcttcacaggaagcatggtgctggcatct

SEQ ID NO: 423739 - DNA, 532 bp, Homo sapiens
ttaaattttatcccttgaaaatatgttgtaaaaatacacgtatatttaccaaaatatattacaagaatattcataggatgatttttttagtatcccaatctaggaacaatccaaatatcagccaatagtagaatggataaattaatgtgatatatttttacaatggaattctatacagccctgaaaaaaattaattacagtttatatgacaaaatggataagcctcataagcatattgctaagcaaaagaaaccaaaygctgtatgagtctatttatatgtaatttaaatccagataaaactctatgtgataaaagtcagaagagtagctatccttactggaaggtaatgactggcagtaggcttagggagtcttctagagtgatggcaatattctgtatcttgatgtcagtgtaggtatacatatgcttaatttgtaaaaattaatcaagatgttgtgctgttacctgtacatatatcacaccacaataaaaatagttaaatacatccccagttcagcataacatagtaaa

SEQ ID NO: 423740 - DNA, 582 bp, Homo sapiens
agttgaattaggggctggaaataaagtttatgagaaacagttataattaagccataaaaacttggtaatgctgcctggttatctagttcttaaggtattagagattgtcttagagctctcttatatttcagattttctgatatgaaaaaccaggatgaagaaaaactggaaactacctctctgcagactctgttaactrtaactttagcatattgaaaagacatgttgggaagcttttgtaagttgtctgtgtgtatgaggttttctatggccattctatagtctgtgtatcacggtttgtccttgatatatttaagatactgtctaggagtgaaaaagatcaggaagatcagtctaggctttgtgaaatttccttgagctttatcatatgccactaagtggtatcttattatgggatataaagctttgctgtttcaaacaggtaatacaattaagccaattcttttattaaatttgtattccttccagtctcttaaaactttccttgaggatgaaccttttcatagtgataaaatattaaatacatgttcacatatttaccttgcatggtgatttataacc

SEQ ID NO: 423741 - DNA, 511 bp, Homo sapiens
acaaatgcatcattcttaacttatgaattacttttgctctatttaaaagagccatgattagtcggcagtttaaaatgtgttgagtttgtggtttcacaatattaagtatcacacaggcttacttctcacaaccttaatttgtaccaattagattcacatggcaaataaatgtttaattgcattcaagttttttaaatttccaatcacagagaagttgcaaagatagtgcagaatatttccatatactctccatccagcttcttatcatcttctgtaactattgtatattacccaaattatgaaattaacattggtacaatactattaactacagacataattcaaatttcaccagctttcccactaatgtgctttttctatcatagcattcacttytgggtctcacgttgcatttagttgttgtctacttagctcccttcaatctatgaaagttcctcaatctgtccttctcagaagattcattttttatatggtgactcaaatgctctcg

SEQ ID NO: 423742 - DNA, 578 bp, Homo sapiens
accatgaggaggagaaaccaggttcatttaaagatatttaaagtcaggatgtttatactagactaaaaaaaacagatcacttaaagggagaagtgtgttttaaaagtatttcttggacaaactgaatgacagtccaaaaagctttggtctgatggaaatktgtgtgcatgagccccaggtcttttcttatactcactcacggagctgcctcccctccccttttgggagccttgtcaagtgttaagcattacaaacaattaatgcaaattaaactgtttttctctaaataatggcattcatattcaatccagaaaaaaaaaaaaaaacaagacaatccttactctcctctgaaattttttcaacttgaacttgaactaaaggcagaaaatatattgtactttattcctcctttctcctatcctgtgatgaggaagtactggacagaggataaaaatatgcactctcttattcaagttgtctcattacttcttggtctgcttaggggcttctggacttagtttatctataaatagcttttgctttacttttctgcaaagctgagaatctgatagtggcaa

SEQ ID NO: 423743 - DNA, 578 bp, Homo sapiens
accatgaggaggagaaaccaggttcatttaaagatatttaaagtcaggatgtttatactagactaaaaaaaacagatcacttaaagggagaagtgtgttttaaaagtatttcttggacaaactgaatgacagtccaaaaagctttggtctgatggaaatttgtgtgcatgagccccaggtcttttcttatactcactcacggagctgcctcccctccccttttgggagccttgtcaagtgttaagcattacaaacaattaatgcaaattaaactgtttttctctaaataatggcattcatattcaatccagaaaaaaaaaaaaaaacaagacaatccttactctcctytgaaattttttcaacttgaacttgaactaaaggcagaaaatatattgtactttattcctcctttctcctatcctgtgatgaggaagtactggacagaggataaaaatatgcactctcttattcaagttgtctcattacttcttggtctgcttaggggcttctggacttagtttatctataaatagcttttgctttacttttctgcaaagctgagaatctgatagtggcaa

SEQ ID NO: 423744 - DNA, 553 bp, Homo sapiens
tggctagcagctacaatattttacaacatagtaatagatattaattctctgtcatacagtgcctctcaatttacaatggggttacatcccaataaaaccattacaattggaaaatattgtaagtcaaaaatgcgtttaatatacccaacttactgaacattataacttagcctagcctaccttaaacgtgcttggaacatttaccttaggttacagtagggcaaaatcatctaacacaaagcttattttataatgaagtgttaaatarctcataatttattaaatactgtattgaaagtgagaagtggaatggttgtatgggtactcgaagtacagtttctactgaatgcgcatccctttcacaccatcacaaagtcgaaaaattgtaagtcaaaccattttaagccagggaccaactgtatataatttgtaaatacccagttatgctttacatatttcacatatatttgcttctgtgtcctttttttataattaacatttctctatatcattaaaagagccttttaataaataatattcagccacacaaaag

SEQ ID NO: 423745 - DNA, 553 bp, Homo sapiens
tggctagcagctacaatattttacaacatagtaatagatattaattctctgtcatacagtgcctctcaatttacaatggggttacatcccaataaaaccattacaattggaaaatattgtaagtcaaaaatgcgtttaatatacccaacttactgaacattataacttagcctagcctaccttaaacgtgcttggaacatttaccttaggttacagtagggcaaaatcatctaacacaaagcttattttataatgaagtgttaaataactcataatttattaaatactgtattgaaagtgagaagtggaatggttgtatgggtactcgaagtacmgtttctactgaatgcgcatccctttcacaccatcacaaagtcgaaaaattgtaagtcaaaccattttaagccagggaccaactgtatataatttgtaaatacccagttatgctttacatatttcacatatatttgcttctgtgtcctttttttataattaacatttctctatatcattaaaagagccttttaataaataatattcagccacacaaaag

SEQ ID NO: 423746 - DNA, 553 bp, Homo sapiens
tggctagcagctacaatattttacaacatagtaatagatattaattctctgtcatacagtgcctctcaatttacaatggggttacatcccaataaaaccattacaattggaaaatattgtaagtcaaaaatgcgtttaatatacccaacttactgaacattataacttagcctagcctaccttaaacgtgcttggaacatttaccttaggttacagtagggcaaaatcatctaacacaaagcttattttataatgaagtgttaaataactcataatttattaaatactgtattgaaagtgagaagtggaatggttgtatgggtactcgaagtacagtttctactgaatgcgcatccctttcacaccatcacaaagtcgaaaaattgtaagtcaaaccattttaagccagggaccaactgtatataatttrtaaatacccagttatgctttacatatttcacatatatttgcttctgtgtcctttttttataattaacatttctctatatcattaaaagagccttttaataaataatattcagccacacaaaag

SEQ ID NO: 423747 - DNA, 577 bp, Homo sapiens
ctgatgcataattcccctttagtggcttcccattacagaattcttaacctaatgagactacamacaatccagcctctacctattatattactctctacctcattctacactatagctaagcagaattttttttattttttctacaacatgatacacctcttgcttgccttcacatatgccagtagttgacatttggcaatgtcagagacgtttttggttgtcacgacaagggggtgggggtctgctactggaatgtaatgggtagaggccagagatgctgtgatactactaagcatcctacaatatacttgatatcttccataaacattattatctgaaccacaatttccatagtatggaggctgagaaaccctggcctatgctattccatctgtcttaaccactcttcttccctcttcccctactccactcctcctccaaactaccactatattctgagttatttccttaatatcacttcctgtgtaaaatgtccttaactccctaaacctagttactcccatgacaccctctagaatttcttataattacttgttcaagatatgctttcctgcta

SEQ ID NO: 423748 - DNA, 577 bp, Homo sapiens
ctgatgcataattcccctttagtggcttcccattacagaattcttaacctaatgagactacaaacaatccagcctctacctattatattactctctacctcattctacactatagctaagcagaattttttttattttttctacaacatgatacacctcttgcttgccttcacatatgccagtagttgacatttggcaatgtcagagacgtttttggttgtcacgacaagggggtgggggtctgctactggaatgtaatgggtagaggccagagatkctgtgatactactaagcatcctacaatatacttgatatcttccataaacattattatctgaaccacaatttccatagtatggaggctgagaaaccctggcctatgctattccatctgtcttaaccactcttcttccctcttcccctactccactcctcctccaaactaccactatattctgagttatttccttaatatcacttcctgtgtaaaatgtccttaactccctaaacctagttactcccatgacaccctctagaatttcttataattacttgttcaagatatgctttcctgcta

SEQ ID NO: 423749 - DNA, 577 bp, Homo sapiens
ctgatgcataattcccctttagtggcttcccattacagaattcttaacctaatgagactacaaacaatccagcctctacctattatattactctctacctcattctacactatagctaagcagaattttttttattttttctacaacatgatacacctcttgcttgccttcacatatgccagtagttgacatttggcaatgtcagagacgtttttggttgtcacgacaagggggtgggggtctgctactggaatgtaatgggtagaggccagagatgctgtgatactactaagcatcctacaatatacttgatatcttccataaacattattatctgaaccacaatttccatagtatggaggctgagaaaccctggcctatgctattccatctgtcttaaycactcttcttccctcttcccctactccactcctcctccaaactaccactatattctgagttatttccttaatatcacttcctgtgtaaaatgtccttaactccctaaacctagttactcccatgacaccctctagaatttcttataattacttgttcaagatatgctttcctgcta

SEQ ID NO: 423750 - DNA, 545 bp, Homo sapiens
ctacacaacacattgtcatgtgcccttagcttggcagcacctcttcttaatgattagttaacttgagaataatgaaggccttatcatgtgtctaattacccatgcagtccctaatggtagtctaactcatttagataaagtctgttcttgaaggagggggtggagaggaagcctagggagaaagattgtatacgtgtgtgtgtgtgtgtgtgtgtgtgtgtgtgtacacaaagtagtaaaacaaaccatagtgtagcatagcatttgggctccttgataactaataaatgttttgtctaaatgggtgcagtccaaagaccaattctttccatatcctcagcttaagctttttgtttatatttaagtgraaactttttggataaatgatagtgttttttttacagtcttgtaagtatctgatattaggtaaagataactaaaaatgtatctctcctaggttaactgaaagttgtttggtagatccatgcaaagattcatttgttgtcccaaatctaattgagctgtatctgaagtccttcgtcaag

SEQ ID NO: 423751 - DNA, 577 bp, Homo sapiens
atatgtgattagagattattacaataaactttctatcttggtaaggtactagtcaagcacatagatctttaaaacaggttgtctcagaaaaaagttacatttacatttactgcctttgttttattgaatccaacctgaaaatagactttgctttattagtaaatactaatttaaaagcaattctgcttccttgatttctcctcttcatctctctggaacactagttcacaattaatttctcactaattatgacaagttatataattttcccagtaatctagattatataatcatccatacaaagcggacattaaggtctgatgcttaaatggaaacatcttgataagcaaaattaagaaatyattttattcaataggtatcatgcatatttaaagaaacacagagaatttgtcttgaagatggtgtaactctaccttgtcaagccctttccagaataaacggagtggtaatatgcactgctctctttgatgccaatcccatagtaatgatacctagagcaaagacaggaaccagctctgtgttagtgaaggagatttttggaggggaaaaagagact

SEQ ID NO: 423752 - DNA, 587 bp, Homo sapiens
tggtgtaactctaccttgtcaagccctttccagaataaacggagtggtaatatgcactgctctctttgatgccaatcccatagtaatgatacctagagcaaagacaggaaccagctctgtgttagtgaaggagatttttggaggggaaaaagagactaaggtataactgacataaccatgaataagaactgcaaaccctgatgacctttcttttctgacatttttcaggtaggcagcatcttaatgtgctatattcctctttgatagtcactactcctacttattgttgttatttctgactctaggcttgaaaaatgagaattacctactgacaatcctcttacataccctaaaacattaggttccaaatcccaakaatgtataaatgtaggctttggctctaagtatatgtactgtatgtatttacaaattgggtgattcaacatgaatttagtcaattggacaagaaaatgctatggttttctttaccatatgtgtagggaagaccaatctcacacatgggaatatgtatgaaacatgtgaccctttacacattattttcctcacgaggaatcaaaagtccaatt

SEQ ID NO: 423753 - DNA, 587 bp, Homo sapiens
tggtgtaactctaccttgtcaagccctttccagaataaacggagtggtaatatgcactgctctctttgatgccaatcccatagtaatgatacctagagcaaagacaggaaccagctctgtgttagtgaaggagatttttggaggggaaaaagagactaaggtataactgacataaccatgaataagaactgcaaaccctgatgacctttcttttctgacatttttcaggtaggcagcatcttaatgtgctatattcctctttgatagtcactactcctacttattgttgttatttctgactctaggcttgaaaaatgagaattacctactgacaatcctcttacataccctaaaacattaggttccaaatcccaataatgtataaatgtaggctttggctctaagtatatgtactgtatgtatttacaaattgggtgattcaacatgaatttagtcaattggacaagaaaatgctatggttttctttaccatatgtgtagggaagaccaatctcacacatgggaatatgtatgaarcatgtgaccctttacacattattttcctcacgaggaatcaaaagtccaatt

SEQ ID NO: 423754 - DNA, 647 bp, Homo sapiens
ttctttaccatatgtgtagggaagaccaatctcacacatgggaatatgtatgaaacatgtgaccctttacacattattttcctcaygaggaatcaaaagtccaattcactactattttcacttcaaaatttcatgcaacaatggggagaaggctatgttgcaaatcaatgaaaatgacatgtggaaagtaacagtgctgtagataatttgttttaaatatgccagtggatcatgagacacaatacaagtatagcaactcactgattctcaaattatggcttattctcctaagtcacaaactcttgacatattacacacccatatacaaacactacaaatattatacacatgctagtggaatagtgggcatttagtgaggatagtcagagtcctctagcatctgctttctgtggtcagtctccactctccaccatccatcccccataaagcaccactacctactgtttaccaactccttcaatttgcattcatctaggatcaggaaagaaatgtaaaaaagagaatgaggggatttccagtggacatcagcctaattatattttaaaacgttgtttccgagcaccaccatctgagtttaaagtggatcctttaaactgaggagccaccatctgaatcctcagttcatc

SEQ ID NO: 423755 - DNA, 647 bp, Homo sapiens
ttctttaccatatgtgtagggaagaccaatctcacacatgggaatatgtatgaaacatgtgaccctttacacattattttcctcacgaggaatcaaaagtccaattcactactattttcacttcaaaatttcatgcaacaatggggagaaggctatgttgcaaatcaatgaaaatgacatgtggaaagtaacagtgctgtagataatttgttttaaatatgccagtggatcatgagacacaatacaagtatagcaactcactgattctcaaattatggcttattctcctaagtcacaaactcttgacatattacacacccatatacaaacactacaaatattatacacatgctagtggaatagtgggcatttagtgaggatagtcagagtcctctagcatctgctttctgtggtcagtctccactctccaccatccatcccccataaagcaccactacctactgtttaccaactccttcaatttgcattcatctaggatcaggaaagaaatgwaaaaaagagaatgaggggatttccagtggacatcagcctaattatattttaaaacgttgtttccgagcaccaccatctgagtttaaagtggatcctttaaactgaggagccaccatctgaatcctcagttcatc

SEQ ID NO: 423756 - DNA, 573 bp, Homo sapiens
tatgaatagctatttgaaaactataaatcgagctaatgaacagctaacaaaaatattcctgtcctcttacattgacaagttacctccataatggtctagtaggtaaatatgaatttagcattcttagactcctggagttccatatgggaacatggtggtggggaaagacccactttcaccccatttttcagctctggctcctttgttcactgtgagggaactggactgcacatccaagatccagctgcatctgcatcacctactaacagctaccccctgaccacacctcagtctagggttatgaacactagtgaagcaatgtggccttctgaggatggacttgggacatgcccratataggcccaagaagtgggcctggggagttgaacagggaattccagggccccagggacccagaagtgggatgtggtttttggatggacacattcactcaggctatggactccctgcctcatgggaggacagcagctggatgacagccagaatgagccccccaaagtgggaggcccagaaatggcttctctcttctcaggtgctaagggcaggactgtg

SEQ ID NO: 423757 - DNA, 573 bp, Homo sapiens
tatgaatagctatttgaaaactataaatcgagctaatgaacagctaacaaaaatattcctgtcctcttacattgacaagttacctccataatggtctagtaggtaaatatgaatttagcattcttagactcctggagttccatatgggaacatggtggtggggaaagacccactttcaccccatttttcagctctggctcctttgttcactgtgagggaactggactgcacatccaagatccagctgcatctgcatcacctactaacagctaccccctgaccacacctcagtctagggttatgaacactagtgaagcaatgtggccttctgaggatggacttgggacatgcccaatayaggcccaagaagtgggcctggggagttgaacagggaattccagggccccagggacccagaagtgggatgtggtttttggatggacacattcactcaggctatggactccctgcctcatgggaggacagcagctggatgacagccagaatgagccccccaaagtgggaggcccagaaatggcttctctcttctcaggtgctaagggcaggactgtg

SEQ ID NO: 423758 - DNA, 596 bp, Homo sapiens
gtaacttttttcttacgacttttaaggatagaatgttttattatgcaatttatttgtttcttattgttataaatgattatattatttggcccccttattcctgtccccagtcattaggacagaatatctttacaaatagaaatatttaatgcctctacctacatccaaaatacaaaagtaactattttatatatactcaaaaaaccgtgctttttaattaatgtatgtattttatgtataagtcaaatgtaaataacactataaacccatacacaaactgacacctgaagaaaatgacttggtcagctacactcagctctacaagagagaaatggcatgtmcttttcttattagcaatgccttagattttagatatgttgatgtagctgagcatattctatcatacaatcttatatacatgccaggagatagagaaccagtgaaagagtacactcttttttttcctacatgtattcagtgctcactgtgtgccatgtgctgaggattgaaagagaggtagaggagagtctctggaggagttaacagtcttgtgagggaacaaataatgcaaacagagaattgtaataccaaattaa

SEQ ID NO: 423759 - DNA, 558 bp, Homo sapiens
agtcagttaaactgatcaaactttgaaataaagttgacttggttagaaggaagggacccattttgcctttttgaatctggcactttatttattctttccaggccacaataatgttaacattaattgcaatcaattaaataagtattaattgataatctattatatatcgaccaacagaaagaatataaaagtgaatgagacaaagtttctgtcctcaaaatatgtattatctgtttagaggaggagataagttaatttcacattaagataggtaccagcaaactgccacagggtgcagagaagggrcctacaataaatcaatggactaaaaaaagatctaaaggaagaagttcaagagacattctttcaaatgggtaaaatttcaacatacatatatgggaaaaggcattctccaggggaagacagcataaacttaaacagaagactggcagttggagtgaatcaaaggttactgggataattatttggtgagcacatagactacatgctagaaagtaagaaataggtgacatagtaaaatgaacttggactaaatca

SEQ ID NO: 423760 - DNA, 584 bp, Homo sapiens
ctctttccgacctctggtaaccaccagtctactcgctaccttcatgagatccacttgtttaggtcccacatatgagtgagatcatgtgatatttgtctttctctgcttggcttattctacttaacataatgccctccagttccatccatgttgctgcatatgacagggttttattttttatggatgaataatattcccttgtgtatataccacattttctttatccattcatccattgatgagcacttaggttgattccatatgttggctattgtgaatagtgctgccataaacatgggagagcagatatctctctttgatatattgatttcctttttctggatatatacagaaagggttaatttttgacaacagttatgacttcccttccatctttcgtgtsttactcatcctcattttaaacatatgacttggaataatctgaaaatataatagcattgcctgaaatatagagcaattctcatttgcattgatggtaacatatcctgctagaggtattctatagtcagcacagctccttcagatggatcaataatgttcatatcatggttctacagctctaa

SEQ ID NO: 423761 - DNA, 526 bp, Homo sapiens
caaattaacaagaaaaggcagtgttaaaaggatgctttggttaagctttttcttccttgaaataggttgatacgctcataatgatgtacaaaactcactgccagtgtatcctggacaatgcaattaatggaaactttgaagaggtaagaatgacaaagaatgctttatttgaccctattatatatactttcatgttctgttcttaatgagttcatgttaaagaaaaaaatcttaacatactttttactctgcaactagatccagcattttttattacacttttggcaaggaatgcctgaccatctccttcccctgctcgaaaatcctgttatcattgatattttctgtgtttgtgactcaattctttataaggtaagcactttgggatgtcttaaacatgagccatttatttctttacrtagcattctatctaaattcttgcaatatattttcagtaaatatgttatttatggctggatatacactgtctttttttttgatgagaaagcaagcaatttaatagtgc

SEQ ID NO: 423762 - DNA, 599 bp, Homo sapiens
tataattggtaacccagggcaactacatcaaacctaggtccaagatacatctttttagccatgatattgggactgatgtccagccacagagttccacagcatctaatggataatatagtgtatctacataaagaacagagagataacattatttagagctaagaacaatttcaaggaacactgcagatctacrgtgtgtggaactatggaactcatccattcatgacattaacattaatagattgaagcctcaaatctcaaatggccaagctggaaatggggacacttcatagaggagttgaaaaatgaaactctgattgcttagttctcttagagcatctcggcaaaacttgatgaatctctttagtagggtttctttgtatgtgaagaaaacgttaatatagaaggagcccatgtgccagcacacagggaagcctgattttgtgattgagtcagacacagtgcttctgtagcttggggaccatgttttatagaagactgaatgaatgggctataaatcaagaaagtcaatcgtcctttcaggagaaggcttaatgcctttaattgagctttgtaaatctgatgaaaattcagaacaa

SEQ ID NO: 423763 - DNA, 419 bp, Homo sapiens
cattcccatttgacaaatattaatctgttctatgattgaaggtattctgattgtaggttacatattataatttggttaattgagaaataaacataagaatagcatgtggatctcctataataacacactttaagttagatgtcaacaacaaccagagaaggaatagtttcatctctaaggttacattgagatggaagagtatatggtggttgaaaagcattggaaaagaagtcaagatactacctccagttatttctgatgaggctttwtccagttatgaaaggttggaaaggtcactcagccttcgtcattagaatgagatgatctctcctttctactttcctttctaaactgtaaaaaaaaatgtgctctcattcgaagggttgggtttgggtcttgcttgagggaatgcccacttc

SEQ ID NO: 423764 - DNA, 546 bp, Homo sapiens
gtgaccttaggttaggccaagagttcttacataccacaccgaaagcacatgttataaaagaaaaaatttgataaattgggccttaccaaaattaaaaacttcttccctgtgaaagacaatattaagagaatgaaaagacagtatatataaaatatttgcaaaactcatatttgataaaggacttgtatccaaacatataaagaactcttaaaactcatcaataagaaacaaatgactcaatttaaaaatggacaaaagatcttaacagacaagtcatcatagaagatatacagatgacaartaagcataagaaaagatgctcaacatcatatgtcatcagggaatttcaaattaaaacgacaatgagattatttatacaaaaactcaaaattgttcactgcacaccttttagaatggctaaaatccagaacactgacagcaccaaatgctagcaaggatgtggaacaacaggaattctcattcgttgctgctgggaatgcaaaatgatacagctactttggaagacagtttggtagtttcttacaa

SEQ ID NO: 423765 - DNA, 606 bp, Homo sapiens
ccaattcctgggccctcttctcatcccattctgtattctacctgggtgatagcattaattcacatagttttaattactgcctccatattaatggttcccatatactgctgtgctggtaaatgtttaaccatgggctctctgtcatcaattgatggacatttgggttgtttacactgtttacacctttggttattataaataatggtgcttcaacatctacaccctcttagaatacaatttcctcatctttccttggtaatttcaaacgtcagctcagatatctgcacctccaaaagtcttcttaggcctatgcagaaattatggaagtttctacagtctccttttcccctacttgatacttatactgtgatcaagtgtttcccccactataccacaagtaactccagggtagagactatatttattaatctctgtatccccagccctagcatagtacgtatcttgcaagatatattcagtaaatatttgttcaatkaatgaatcagctcactgtctatgctcatcccccatctccatatacttatatcagcgactttgttctgtcatttaccttaacccctcctcaaaccccacatacaccattca

SEQ ID NO: 423766 - DNA, 606 bp, Homo sapiens
ccaattcctgggccctcttctcatcccattctgtattctacctgggtgatagcattaattcacatagttttaattactgcctccatattaatggttcccatatactgctgtgctggtaaatgtttaaccatgggctctctgtcatcaattgatggacatttgggttgtttacactgtttacacctttggttattataaataatggtgcttcaacatctacaccctcttagaatacaatttcctcatctttccttggtaatttcaaacgtcagctcagatatctgcacctccaaaagtcttcttaggcctatgcagaaattatggaagtttctacagtctccttttcccctacttgatacttatactgtgatcaagtgtttcccccactataccacaagtaactccagggtagagactatatttattaatctctgtatccccagccctagcatagtacgtatcttgcaagatatattcagtaaatatttgttcaatgaatgaatcagctcactgtctatgctcatcccccatctccatatacttatatcagcgactttgttctrtcatttaccttaacccctcctcaaaccccacatacaccattca

SEQ ID NO: 423767 - DNA, 611 bp, Homo sapiens
tgacctcagaactgcaagaaattagttggtgttttctgcatagggtaggaaatactgagatggctagaagttatggtggggttgcagttttgtctgctgagtttagcttaagattaggtcagccatggtggagaggggagagaatttgktatgataggcatatagctatatttgaaggatataaatacagcagcaaaagaggaattgcatagaatgagatcagggtagatcagagcttaattagatgaaatcaggacaagggctgtttaggctgactatcagagaaaccatcttgatgctaaaaattactggagcgtgggctaacctttgagaggaaatggtggaaactttgccactgagtcatttataattatttacaattatacaggacaattttgttgaaaaataatgtagcataatacaaggagtggttttgctctgttcccaggatggaatggatgtgacttaataactttttcctacgctaatttggttgattgtgtcagagaaaagataggttggtcattttgtttttccccttttgaatgactcatacttgagttgatcacagccatacaaccaaaagaatacccactgattaggcagataac

SEQ ID NO: 423768 - DNA, 524 bp, Homo sapiens
ttttcctttaaaatagggaacaagacaaggscacccattttccccacttctactaaacatagtactgaaagtcctaccagagcaattaggcaagaaaaagaaataaaagccatatcaattgaaaaggaagaagttaaattgtctttatttgtaggtgacatgatcttatacagaaaaccctagaagtccaccaaaaggctcttagaaataataaaagaattcagtaaagttgcaggatacaaagttaccctgtaaaaatcaataatgtttctatacactaacaacaaacttagaaattttaaaaatgatcccatttacaatagcatcaaaataaatctaaaatacttaggaataaatttaatcaatgaggtaaaaatctgtatactaaaaactataaaatattgatgaaataaattaaagaggacacaataaataagacaaataaataaaaaataaagatattccatgttcatgggttagaagaattactatcattaaaatgtccatactgctgaaaacaatct

SEQ ID NO: 423769 - DNA, 592 bp, Homo sapiens
taaatgtagtttaaaaattcctattgagaattctgattggaattgcattaggatatttttttttttgagacaaggtcttactctgtcaccccagctggagtacagtggtgcaatgatggctcactgtagcctcgacctcccagtctcaagctgtcttcccatctcagcctcccatgtagctgggactaaaggcacgcaccatcatgcacagctaattaaaaaaaaaatttagagacagggtcttgctatgttgcctaggctagtcttgaactcctggacacaagtgatctacacacctcagcctctcaaagtgctgggattacaggcataagccactgtgtctggccagaaggagatattttaaatccaaaatagcagataactatgaatgacctgtgtggtgttttttgttacaagtataaaaacayagaaagtatatatatctaattcataatacaggttgcatctagagaggcaataggggaatggaagtggagagttatgtgaagggtattatttcttaagaaacagtcataaaacataaatggcaaagtattcaaacttactaagtctgggtgataggtaggaacat

SEQ ID NO: 423770 - DNA, 610 bp, Homo sapiens
tagagattttcagaatttagcttgaatgtatctggaggatgaccagccttctacactctctagaacatctcgcattcccatattttcagtatggaaaccatacagcctctctggatttctcacagatccaagtcctgtctatttttgatccagtcaataataataataacaatcataatcatcattattgtctctgtgatccttagaacaacccaacaagggctgggcacggtggctcccgcctgtaatcccagcactttgggaggccaaggtgggtggatcacctgaggtcaggagtttgagaacagcctggccaacatggtgaaaccccgtctctactaaaaatacaaaaattagccaggcgtggtggtgggcacctgtaatctcagctgctcgggaggctgagacaggagaattgcttgaacccgggaggcggaggttgcagtgagccgagatcgcgccactgcactccagcctgggcaacmaagagtgaaactcagtctcaaaaaaaaaaaaaagaagaaaagaaaagaacagcccaacaaggcagatattactatcccttttttactagttgaagggacgaatttgcccagggattacagactaa

SEQ ID NO: 423771 - DNA, 610 bp, Homo sapiens
tagagattttcagaatttagcttgaatgtatctggaggatgaccagccttctacactctctagaacatctcgcattcccatattttcagtatggaaaccatacagcctctctggatttctcacagatccaagtcctgtctatttttgatccagtcaataataataataacaatcataatcatcattattgtctctgtgatccttagaacaacccaacaagggctgggcacggtggctcccgcctgtaatcccagcactttgggaggccaaggtgggtggatcacctgaggtcaggagtttgagaacagcctggccaacatggtgaaaccccgtctctactaaaaatacaaaaattagccaggcgtggtggtgggcacctgtaatctcagctgctcgggaggctgagacaggagaattgcttgaacccgggaggcggaggttgcagtgagccgagatcgcgccactgcactccagcctgggcaaccaagagtgaaactcmgtctcaaaaaaaaaaaaaagaagaaaagaaaagaacagcccaacaaggcagatattactatcccttttttactagttgaagggacgaatttgcccagggattacagactaa

SEQ ID NO: 423772 - DNA, 626 bp, Homo sapiens
aactcctagcaatttttaatttgaatgtaaaacctggtaagttgttttgattatgtgctaacttcatccaaggtttgactcctcccagcacaattaggggcatggttaattccatatgtccccaggccttaccaggttgaacagttctcaaaaatgaagtagcagtttataacctcaaaagacttagcaaaccttggatctgaccatatattagtccacctatttatattttgatgwtatctgcattttaccaatagtgtttaaggctgtttttatttctcagagattaaagtcatgtgaactgaaaggtaccacagcttttatcttccctctaaaaaaacatttgattcaagcatccaagcgcttatcttcatttaggccaattaattagagctctttttatagacatcacacacatgatacatatataactacacagacaggcagaacaaaacccagttaccacaagatcctttatttgccaatctcctatttggaccattggccttttggtgcttttaattcctggggtcccatgcgaaaaacagaggactctccactctcatgtgttcattaaaagtgccaaggaaaaatggagaaaaataattcagttgactgaaaaaaac

SEQ ID NO: 423773 - DNA, 441 bp, Homo sapiens
gtttctatagagttgtttgagctcctaatatatcctggtgattaatctcttgkcagatggatagattgcaaatattttctcccattctgtgtgttgtttcttcacattgttgattgtatcctttgctgagcagactttttaacttgctgtggtcttatttgtccatttttgctttgattgactgagcttgtgggatattgctcaagaaatttctgcccagaccatgtcctaaagatatttcccaatgttttcttgtagtagtttcatgatttgaggttctagatttaatgcgttaatttattttgagttgatttttgtgtatggtgagagacaagggcctacttttatttttctgcttatggatatatagttctcccagcaccatttattgaagagactctcttttccccagtgtatgtttttggcacctttatggaaatg

SEQ ID NO: 423774 - DNA, 441 bp, Homo sapiens
gtttctatagagttgtttgagctcctaatatatcctggtgattaatctcttgtcagatggatagattgcaaatattttctcccattctgtgtgttgtttcttcacattgttgattgtatcctttgctgagcagactttttaacttgctgtggtcttatttgtccatttttgctttgattgactgagcttgtgggatattgctcaagaaatttctgcccagaccatgtcctaaagatatttcccaatgttttcttgtagtagtttcatgatttgaggttctagatttaatgcgttaatttattttgagttgatttttgtgtatggtgagagacaagggcctacttttatttttctgcttatggatatatagttytcccagcaccatttattgaagagactctcttttccccagtgtatgtttttggcacctttatggaaatg

SEQ ID NO: 423775 - DNA, 613 bp, Homo sapiens
aaacataacttatatatgcactgggcaataaaaaacctagtgtgacttgctatttcatgctattttcttttgtgtggtggtctacacacctaacctacaatatctccaaggtatgcatgtatacacaygcctgtctgaaacgtgagggttagctggataatagttttatttttttacttttttgaagagtctacatactgttttttttacagtggctgcatcatcttacatttccaccaacagtgtacagtgttccaatttctcaacatcctccccaaaacttaaaaggtaatttttttttttgtaatggccatcctaacaggtaagggattatatctcattatggttttcatttgcattttcttgatggttaatgatgttgagcaacttttaatatatctgatggccatttgtatgtcttatttttaaaaatgtctattctagtcctttgtccatttttaaattgggttattcgggtctttaaaacactgaattcttggagtttcttatatattttggatattaatgctgatacggcttggctgtgtccccacctaaatctcatcttgaattgtagctctcataatcaccacgtgtaatgggaaggacctgg

SEQ ID NO: 423776 - DNA, 331 bp, Homo sapiens
ctttccagctaatattatgaaaccagtgtaactttgaggaatggacttgcttgcattagtaacactgttattttgagtcattggctgggagaagctcctgagaaacatgacctcaacttttaaagggtgactgctttcggagtgtagcaactggggctgattgtcagtcatgctctctaaagtaggagctcttrgagaagtgttttgatgtttgccattgagtggctataggcaaagaaaatattgtcctcagagactaagggcttcactttgcatctaccacagtgaaccattaatgttaaaacgttgtcatataaagattgaatattaa

SEQ ID NO: 423777 - DNA, 331 bp, Homo sapiens
ctttccagctaatattatgaaaccagtgtaactttgaggaatggacttgcttgcattagtaacactgttattttgagtcattggctgggagaagctcctgagaaacatgacctcaacttttaaagggtgactgctttcggagtgtagcaactggggctgattgtcagtcatgctctctaaagtaggagctcttggagaagtgttttgatgtttgccattgagtggctataggcaaagamaatattgtcctcagagactaagggcttcactttgcatctaccacagtgaaccattaatgttaaaacgttgtcatataaagattgaatattaa

SEQ ID NO: 423778 - DNA, 577 bp, Homo sapiens
tgaggcaagccactgggaaagacatcttagagtaggtgggttttgtgaaattccagtaatgactatatgcagtatcccctttctcattttccttgacatattcaatccatattgttctgcctagctcaatcaaaattatttttttatttcttattcttaatccttttctmtaacaagcaatttcttttgagaaatctattaatcatttatataacagttctgcgtggtctatttaagtgttttaacaacattaatatcttctatataatgagagatcgcttatatttttgtcacaatgattgatattaccatagggaaagttggttttgttttcaatgattatttgaatgcaagttttgtatatagtgagttaccacaaccttgatggctatttactcaataagataatagtgctgtcatcgaatacatgtttatacaaatatttaagtagattttatttggattcatttttaaatgctatttcaaattatcttctgaatcctttctagcgattgaataacattatgtagaaaaagctttgcacagcctccataaaatctgttctgtttggtttatt

SEQ ID NO: 423779 - DNA, 577 bp, Homo sapiens
tgaggcaagccactgggaaagacatcttagagtaggtgggttttgtgaaattccagtaatgactatatgcagtatcccctttctcattttccttgacatattcaatccatattgttctgcctagctcaatcaaaattatttttttatttcttattcttaatccttttctataacaagcaatttcttttgagaaatctattaatcatttatataacagttctgcgtggtctatttaagtgttttaacaacattaatatcttctatataatgagagatcgcttatatttttgtcacaatgattgatattaccatagggaaagttggttttgttttcaatgattatttgaatgcaagttttgtatatagtgagttaccacaaccttgatggctatttactcaataagataatagtgctgtcatcgaatacatgtttatacaaatatttaagtagattttatttgsattcatttttaaatgctatttcaaattatcttctgaatcctttctagcgattgaataacattatgtagaaaaagctttgcacagcctccataaaatctgttctgtttggtttatt

SEQ ID NO: 423780 - DNA, 623 bp, Homo sapiens
tctgtccttttccattggtcaatgtatctctttttatgccagtacaatgctgttttgattacaatagctttatagtatattttgaaatcaggcagcatgatgcctccagattttttctttatgctagagattgctttggctctttggggtttatttctggttccatatgaattttaggattgttttttctatttttgtgaaaaaatgatgttagaaatttgatagggattacactgaatctttagatcactttgggtattacaggtgttttaataatattccttcaatctgtacagggtatatttttccatttatttgtgtctccctcaattttttaatcaatgttttacaattttcagtgtgcagatacttcacctccttggataaatttactcctaattacttttttgatgttcttgtaaatgacgttttaaaaaaaatcagatagctcattgttaatgtacagaaatgctacttattttgtatgttgatttggttatrtgcaactttactgaatttctttattgattctaatagttttttgtggaatctttagggtttttctacgtataacatcatgtcatcagcaaacagagacagtttcactttttccttacctatat

SEQ ID NO: 423781 - DNA, 432 bp, Homo sapiens
gcaattcagaaaatgatttctatagtttctttgacataaagtggataaccagaatgagttgattttcatttatctttgaagccaattataattttagtascaaccaacagttggcacttaatttgcctggtctacagataaccaagaaaagatattgccattcattggtctcctcactctcttctataaccagaagctaggctgtaaattgccattttctgtaaaagttggcccatttgactccctctcttaattaccgaacgctactggttgtgatggttttaacttgattatgtacagttgttaggcaaatgccagttaggagttgtgaatgttttagaaacatttcctcagaataattgtgctcagtttttaaggataggaactggaggctagtcagatatacatttgataaacaaccaattactcatc

SEQ ID NO: 423782 - DNA, 455 bp, Homo sapiens
agaaactttccatttttgtacctgctcagttcttccagtagaaagtaacccttgatgcatagcttcttggactgggaaggtcattagagttttttgatgatgattccaaatgcaacagagtagcttgcctgtttcaatagattttcctttgttttgactttgttgacctatcatttgctgaatgatataagcagcttcacaataaaagagggtatattatacacaggttgaagcagggtaagtatttttgtcctgagagaaaaatccgatctaaagatatatttgatttttttktgtgtgtgtgtatgtaattaggaatgaccatttgaagtagaagcagagatgtctgagagcccaattttcaaagtaataatttgctatatttatttcaaagtaaggctctatggctaattttaggaaaggccttggaaatgaaccaacatgctttaggaaga

SEQ ID NO: 423783 - DNA, 606 bp, Homo sapiens
taaacatcaacaactctatttagtcttattaagtttgatatattaattagccatccatataaagatgttaggtagatagttacatagagaagcctgagtttctgggtagaagtcaaggsagtagatccatatatgggagtcatcagtatctatatgttatataaagtcatgaagcagaggaggagaagttagcaaatagaagtattggttggtgaggtaggaaaaaaataaagagagactataggaggaggcaacaccaagagaaagagagcatttaaagtgggagggattagtaaactatgccaaatgttactgagaagataatgaggatgagagctgagaaatggctatcagactgcgcaaagtggagactattgagtggtggtaaaggaagcctaattaatgttgattgagaagaggatatagagtgaggaaatgaaatttcttcacactatttcccctcctgggataggcttggtacttataggccaggagagaattggaagagatactcaaagtacttaaagaaaaaataaatcagccaagaatactatatccagcaaagtaagttatccttcagaaatgaagtaggaataaaaaccccct

SEQ ID NO: 423784 - DNA, 373 bp, Homo sapiens
ggaaactggacttttcctgtctagcatttccttatgtcattatgattaatccctggtggtttataaaggcagttaaatggcctcctttggcatcaaataggaaaataattcatcagttcaagtcygtaaatcatttcttggtactggaagtactttatatagttagaaatgtctgcatgatttgtcactgggctccagtggggatcctgaagagcaactggcaaccaccagatgcagaggcctatgtgatgagtctcatgggcatgggtctgcagggaaagaagattggttcctttctggggtacattgccttgatcctctctgactggcctggaggaataaccacttctgtgtctgtcatatagtagtcact

SEQ ID NO: 423785 - DNA, 373 bp, Homo sapiens
ggaaactggacttttcctgtctagcatttccttatgtcattatgattaatccctggtggtttataaaggcagttaaatggcctcctttggcatcaaataggaaaataattcatcagttcaagtccgtaaatcatttcttggtactggaagtactttatatagttagaaatgtctscatgatttgtcactgggctccagtggggatcctgaagagcaactggcaaccaccagatgcagaggcctatgtgatgagtctcatgggcatgggtctgcagggaaagaagattggttcctttctggggtacattgccttgatcctctctgactggcctggaggaataaccacttctgtgtctgtcatatagtagtcact

SEQ ID NO: 423786 - DNA, 529 bp, Homo sapiens
atttgttttcagttgagtgtcctgacactagacaggtgatgactaaataactaggggcctcacttacacttgatggagatagattttcttttaagtgaaccaagttcatggaatttcacttttctaataggaacatttctcttttgctaaggcaaaaatgggtcaagtgctgagacacatggctctgaagggccatcaaatgagatccacagctgggcccttagcccctcataaaggccatttctgcctatttaaagcctcctctaggcttgatcaaaatcaaagacatgcaaaagtaataaattatacatctggtgcgtgaatcgctacttctcaaaatctcttacatagaacaggatgtttgagaatggagtttgtggaagttttgtaaaacatttggtgcttagtaaaacagaaatgaaaatattacaggacagatatattagagatatatctttggaatgacaaaagtctttwgtactgtctttaaatactagtatactgttaagtcaactatttgagagaaagg

SEQ ID NO: 423787 - DNA, 510 bp, Homo sapiens
tgtttgagcatcatttcatatcagtaatgatagatatttcacttttatgtgactgcatagtatctcatggtatacacatacagaattcctgaaaggagaattgctggatcaaaggttatatgctttttaaatttgataagactgccaatttgtcctacaatttatgctcccaccagcagtgactgagaatacccgtttccccaaatcttggtcagcagttttccctcaaatcttttgctgcttcctgagcatatagggaaaaaaattatatctcattataggtttattgggtttatcttattatgatgggtgttaagcatgttttcatataattcaatatggtaatgttttacttttttgtaaaccatatgttttcacttctttaaagagaaccctcgcaccttggtacagataatctttcaatttctaaatataattctgaaaaaaaaataatgtgaaccttcaactttgaakggaatgaccttgagctaagtccctcaagctctaagg

SEQ ID NO: 423788 - DNA, 551 bp, Homo sapiens
cactaaatcataatcttttatgaatcatttcagtttaaaagccttcagaatctcaattagattatcttagatgaagagaaaagtaaatgttacaatgaatgtctctaactgtggcaaagtggaatgttatctcttaaaccactgtctcctttagtggcttcttccaagaccaggacctacaatttgttcccatttgcttgaaaaaaaaaaatcactaatattggtggtatttggkagtgaacttaccctctagtcgatcttgctgttttcaaggatgatgctcagcatgacatactctgggcttttaaaagagcctttctttgtatgtatcaacacggtagtttctgtagctgcggacaatcaagcagaccaaacaggctaagccagactgtgtcggatcacaccacaaattataggcagatgcacttttttcaatctggcgttctcctttgacttactatatcattctccattttttccttctattatgttataccacacctaatttcccaaaaggctgagtcattttatgaaaatacataaaatacgtg

SEQ ID NO: 423789 - DNA, 596 bp, Homo sapiens
gagtgatggccaagactgtgtactcgttagttatctagatttaaccagaaaaatgaagcaacaatatatgaacaatttagttaaaataaagacattgcaaaaacagttattgatgaaaccaggcagagaaaragcagggtcaggaaatttgagtacatgtgtaggctttccatcttaaggagaaaaaaaattggataccatctggtacaagcactactctcccatgtaacatgaaaacttgatgaaaacaaaatcaaataaaccttgaatgaagaatcttactcataagaaagttcaacttcatccatgtgcaaatgtttgggcatgttgggaggcagagattaataggagtgacaatgggtataaactgaaggagctgttaaatccaattttgccttcactgtgtaatgacacaattcaccttctaccattcagtgcctcctgaaaccagatgcacttgaaatactgatggggagcgggggaacattgtttaaacattcagttttaacccatgactcaaggttgaaggtctccagtaattttttttttttgaggtaaaaagcccaatatctgtaaagccaaacttgagatagcta

SEQ ID NO: 423790 - DNA, 596 bp, Homo sapiens
gagtgatggccaagactgtgtactcgttagttatctagatttaaccagaaaaatgaagcaacaatatatgaacaatttagttaaaataaagacattgcaaaaacagttattgatgaaaccaggcagagaaagagcagggtcaggawatttgagtacatgtgtaggctttccatcttaaggagaaaaaaaattggataccatctggtacaagcactactctcccatgtaacatgaaaacttgatgaaaacaaaatcaaataaaccttgaatgaagaatcttactcataagaaagttcaacttcatccatgtgcaaatgtttgggcatgttgggaggcagagattaataggagtgacaatgggtataaactgaaggagctgttaaatccaattttgccttcactgtgtaatgacacaattcaccttctaccattcagtgcctcctgaaaccagatgcacttgaaatactgatggggagcgggggaacattgtttaaacattcagttttaacccatgactcaaggttgaaggtctccagtaattttttttttttgaggtaaaaagcccaatatctgtaaagccaaacttgagatagcta

SEQ ID NO: 423791 - DNA, 554 bp, Homo sapiens
ctagcaccatctaaaaactattttttatcccattgaaatgcctttgtacctatgtaaaaaatattaataataaatgtagggttttttttattccattgatctatacgtctatccttatgccaatacaagactgtcttaattactgtaactttatagtactttttgaacttggcaagtrtaagttctttgttctttaccaagattgttctggctgttcttgaacatttgccttctcatacagattttaggagtagcttgtcaatttttgccaaaaaaagcctactaagattttgataggcgaatgtctgtgtgagaaaaaatggaaaaggatctagaaaagactgtgagagtcatcataacataaagccaatctgacaccaagtgagagagatgaaagggaagttgggtagaattgtcctagacttccatcagtctaaagaaggtttaacaggagagtttggctgataatctttaagccaaagtcaaccaacaaattgttttctgtttcccaagaatggacctgcctttgtgtccctgccatgctcagtcattgg

SEQ ID NO: 423792 - DNA, 550 bp, Homo sapiens
ctctggagacatctttttgttctaacacagagaaatgtttgccaataaaaattcatacccaaatgagtacagttattggttaagatgaaatgtttctcatttgaaactttcatggttgttataaagaaaatttctgcatcccttcataaacgttgagactgactgaaactgactgagttaagttatagtrtcaatgaatagccacacattttctactttaaaaatataagtgatcagagagccattcggctcaaaagaagatgattgtcatccagtcaggaggtttgttgaaccttatagaatacataagataaagttataaaatgatagcatcacttacacactgaagagttataattgagatgcccagttgctgatggtagctaagatgtttgtgtttttctgaaaaggactcaatgtggcctaatgttcttgccttctatgctatgaatccttcaaagcatcactcatgcattcaataaaactttattgtatgcctactatgtgccaagcactttgataggctctcaagtttgtgctattccttaaa

SEQ ID NO: 423793 - DNA, 594 bp, Homo sapiens
gtaatcttggtctttatcttaaattctcctttagattttcagagttctctggtttttatcttgatttttgaaactaaatcttatttctctattttccttactacaaaccagcaaktctttgatagccggttctgggccttaatatatctctgaactaacaacttactgttttttgctttgagctaccagcacttatctgcacacccctagtgctaggtcactggtatctagctagagcctttcctttaaatgtctttataaaaggcagttgaaatgaggactctagagccagatatcctgggttggaatcctggctcttccaattaatagcttagtgactttaacctctccattttcctccatttaagaaatgaatacattaacagtcactatttcatagagctgttgtgggacttggtggtttaaataaataaaaatttacttagaacactgtctggcatatggtaaataccatgtaagtgtaaactattattattactattctcataaagactcccatgtgtctttactagcataacataaactaaactgcaagccccatcttagtatgttatgaaacgccaggggttcagt

SEQ ID NO: 423794 - DNA, 594 bp, Homo sapiens
gtaatcttggtctttatcttaaattctcctttagattttcagagttctctggtttttatcttgatttttgaaactaaatcttatttctctattttccttactacaaaccagcaattctttgatagccggttctgggccttaatatatctctgaactaacaacttactgttttttgctttgagctaccagcacttatctgcacacccctagtgctaggtcactggtatctagctagagcctttcctttaaatgtytttataaaaggcagttgaaatgaggactctagagccagatatcctgggttggaatcctggctcttccaattaatagcttagtgactttaacctctccattttcctccatttaagaaatgaatacattaacagtcactatttcatagagctgttgtgggacttggtggtttaaataaataaaaatttacttagaacactgtctggcatatggtaaataccatgtaagtgtaaactattattattactattctcataaagactcccatgtgtctttactagcataacataaactaaactgcaagccccatcttagtatgttatgaaacgccaggggttcagt

SEQ ID NO: 423795 - DNA, 594 bp, Homo sapiens
gtaatcttggtctttatcttaaattctcctttagattttcagagttctctggtttttatcttgatttttgaaactaaatcttatttctctattttccttactacaaaccagcaattctttgatagccggttctgggccttaatatatctctgaactaacaacttactgttttttgctttgagctaccagcacttatctgcacacccctagtgctaggtcactggtatctagctagagcctttcctttaaatgtctttataaaaggcagttgaaatgaggactctagagccagatatcctgggttggaatcctggctcttccaattaatarcttagtgactttaacctctccattttcctccatttaagaaatgaatacattaacagtcactatttcatagagctgttgtgggacttggtggtttaaataaataaaaatttacttagaacactgtctggcatatggtaaataccatgtaagtgtaaactattattattactattctcataaagactcccatgtgtctttactagcataacataaactaaactgcaagccccatcttagtatgttatgaaacgccaggggttcagt

SEQ ID NO: 423796 - DNA, 424 bp, Homo sapiens
ttctgtaaaaggaatctcaaataagacttttttaaagccgagcccagccatgggttttaatcctcaaatacttgtaagttgggtaaattcctctcctcttgagactggtgccacacctgtgtttcctttgtcccaagggggactttggtgggctgtgctactctcccttatgggtggccctacctaaaactagatctccagggggacctgcaactcctcagggaactgttggtcccctgtgcttgccagagtcagactggcttgtggggcatatttgtaggcgatctggtggtrtggtgattcaagggcagagaatcccggggcagagcagtggcccaccatgagtgcacagccagtatgataccttccatctcagtacaggtctgagggaagtatgggcgtgcttgcatgagctgtccaccca

SEQ ID NO: 423797 - DNA, 588 bp, Homo sapiens
tataaaacttttagaagaaaacacaggtgtaaatctttgtgaccctgaattacacaatgttttcttagatatgatatcaaaatcataagcagcagaagaaaaaatgggataaactacacttcatcaaattagtaacttttgtgctgtaaatgataccatcaagaaagtgaaaagacaacctgcagaatgggagaaaatatttgcaaatcatgtatctcttaggcaatttgtatccagaatacataaggaactacaactcaaaaaaaaaagataaataatctaactcagaaatgaacacagggtttcaayagacattactccaaagaacatatacaaatcaataagcacaagaaaagatgctcaacatcattaactactagggaaacgcaaatcaaaaccgcaataagatatcacatcacatacacactaaaatagctacaaccaaaaaggtagacagtagtagccattgttggtgatgatgtgaagaaattagaaccctcatatattgctggtggaaatgtaaaaatagtgcagccactttgcaacatattttgtcagtttcttaaaaaatataaacatagagttacc

SEQ ID NO: 423798 - DNA, 588 bp, Homo sapiens
tataaaacttttagaagaaaacacaggtgtaaatctttgtgaccctgaattacacaatgttttcttagatatgatatcaaaatcataagcagcagaagaaaaaatgggataaactacacttcatcaaattagtaacttttgtgctgtaaatgataccatcaagaaagtgaaaagacaacctgcagaatgggagaaaatatttgcaaatcatgtatctcttaggcaatttgtatccagaatacataaggaactacaactcaaaaaaaaaagataaataatctaactcagaaatgaacacagggtttcaatagacattactccaaagaacatatacaaatcaataagcacaagaaaagatgctcaacatcattaactactagggaaacgcaaatcaaaaccgcaataagatatcacatcacatayacactaaaatagctacaaccaaaaaggtagacagtagtagccattgttggtgatgatgtgaagaaattagaaccctcatatattgctggtggaaatgtaaaaatagtgcagccactttgcaacatattttgtcagtttcttaaaaaatataaacatagagttacc

SEQ ID NO: 423799 - DNA, 602 bp, Homo sapiens
tgagatagagggcatcaagattgcctgctttcccccaaatccagttagtttgataaaactaatttatgaactctgaattcaccctctagactaccacagattcaacagcaggaaacctgagctgagattctcagggaacccacaagatttggaaaatacagttagcaatatcagggtctagtccctagaaacttaactggaattaacaattaacaccagtcatgaacagagaccacagaggttagctgtgccagactgtttggcattcactcattcaagagttacagagcaataatgtgccaagcattgtagctcacattctarttaaagggatagaaaccagaaactatgaaatatttacagtacagtgtgagaagaacagtacactatgatagaggtcattggcagcaaagggagctcagaggagagaacaacaaactctacctgtgctgtcaaaatggtgagtatcttcaagcagagatggtttggagaaccaccctggctcctgataataccaagttgtagaataataaaatatatatttgacatttgtcccgggttatctgaacagagtgcctaaaacccttggaatttcccgagta

SEQ ID NO: 423800 - DNA, 641 bp, Homo sapiens
ctggcttacctatgtaggagctgtgtggccttggaaaagtgccttaactctctgagtttcagtttcctcatgtgttaaatggagataatatcrtctaccttatcaggatttcttgtaaaagattgtaataaacaagtgttcaatacttaaatatcaattaccatttaaaatgaataaaattatgtgtgaatgaaggaattttgcagcttagcattctatagtaattacacattttaggagatctttcatgaaggggctagtgtagtagctcattaattcaacaattatttattgagcacccattctgtgctgagcattgtgctgcatgtggtagtggatatcatgctctcaaggaacacagtagggtaggctaaactgctataataaattaacccaaatatgtaatggttcaaatgcaacagagggtcaattcttgtttgtacagcaaccaggctgaatatggaggtcactaggtggcctttctactttcaacatgtggtttccaatgttggtttggttttcaccattcctttctgtggagagtcaaataaagttctgaagtgcatctgtggaggttctatgggcaagtcttggaattaacacatgtaacttctgctcccatttgactggagcgaatttag

SEQ ID NO: 423801 - DNA, 597 bp, Homo sapiens
caccctcgctatttcaatattttaagctgacacattttacgaattcctttacactctaaaagtggtctatatatttattagataggacttctcaaggcatgatatagcctaraattttctggaacctctgaatcctttattgacactgaaggtccatgatagtgcctgcaaaatgattgaacaatactaaatcttgtaaacaatttcacattatatttgtaatgtaccacagtcattgatcttatgaatgatggtgaaactggcggtgggaaagagaggtaaacacaaaaatgtgtatcctaacactaaaccagtttcaaaaggctgtgctcccaagttatcctagccataacatgttctgatttcttactttcacattaaactctgtatagtatattgtagaacttaattcatatctgctaaattaaatgagtgaatacataaaacggaaaactgaggtaaattgtgtactacttacactaaatcaaagtacagccttaaaggaatatacatttaataatgagttttattaaataaaaataatgtattctaaacaattgtctgcatttaaaacttgccaatggaaccatgaaaaaa

SEQ ID NO: 423802 - DNA, 537 bp, Homo sapiens
gacaattatgagtacattctacagcattcctcagaggggtcttcacaggattgaacaacagtttcccactgcagtagccagctgaataatacactcactattgttttcccccgtttttccttacttcccctgcctcccacttgtgctccctgtgatcagctaccaaatgagctagttgctctctagtcctcgcctcaggcttagcttttaaagaaatccaaactaagacaaactgtgacaaattacaatccaaacgagattctttcctctcagggggatgcttagtccccccatcaagcatcattatcaaaatgaacacagactgcagaggaagaaaatatttgccttcactgagcaaagtcagactcatgaccctcaggttagagacacagagaaatgcaactaactctggggtgaataggtacagattcagagtggaaagactttaaaacagcaataaagtcctagaaataaaaaaagctgtcagctyggtacagaccagagcttgagagcaagagtactaagcgactcatagaa

SEQ ID NO: 423803 - DNA, 457 bp, Homo sapiens
tagtagtcaaagaaacgactgctacacaaaacaatcaagataaattctagggatgggatgatgcatgaggaaaatatgagtcccaaatatctttttaataacatttaaatataaaaacaaactaaaacattttgtgtcatacagtaaatatttttaatgttctcacrtatgttcacaatagccctatgacatatttactattattgtccccattttttttttggatgagaaaactgaggctcagagaacttcagtaacattcccaaggtcagatatccagtaattagtgtagacagaattcaaatccaggtggaaatgctctgaaacccacagtcttacctgctacactaaactggaacaaatattgttgaaacatatgtatctgataaaacatttaaaaatattacaggattataaattcaggcaatgtttactatcccaaagttggggggacatg

SEQ ID NO: 423804 - DNA, 547 bp, Homo sapiens
gagtctcaattttatgaaataagaaaaaagaaaaatgttagctagaccaggcatgatggatcacacttgtaatcccagcactttgggaggctgaggcgggaggattgcttgaggccaggagttctagaccagcttgggaaacatagcaagaccctgkctccacgaaaaataaaaagaaaattagcagggcgtggtgtgcacttgtcccagctactcaggaggtgcaggtgggagaatcatctgagcccaggaattcaaggttagagtgagctatgatcatgccactgcacttcagcctgggtgccagagagagatcttgtcccttaaagataaaaataaaaaataaatattagctaacctactagttttacctgagttccttcagtggattacaacatatttcaaaccacagccctattgaagttaatttctgtgtgatggaatttattagctttatgttttaaaatacactgattttctcctctgaaagagtgagaaaatattctttagaaacagtttacattacaaactctgatgagtggatatg

SEQ ID NO: 423805 - DNA, 553 bp, Homo sapiens
ttttaagtttaaaaccacaacattgtattccggaagacttctattttgagtcttttcattctgatagtatcctccaaggaactttaaagaatagaacccctgattcaggtaacaagatctgaatgtttgggatgcatcagtgagtagaagcaattcacgcactttcagaagtccttaacttttgggcycctcaagtaactggactgtaacttgaatccagtaaatgaactacatgaaactgtcaccaaactaaagcaattgatgaaacagtaacacgaataaatataaaaggcactgctaaaaaggctttaagaaaggctttttaacatttttgagggaaatagtatgtaaaagtgtagtacatgataactaaaattagttaaattaattgcaggagttactttaatcaccacatgtctacataacaatctaaactactaaacgttataatcttcaagaaaaggctacaactatgaaaaagagcattggtgaatgtattaagtttgatagtaaaaacaaaacagacaaattaagctgatttggccattgatta

SEQ ID NO: 423806 - DNA, 553 bp, Homo sapiens
ttttaagtttaaaaccacaacattgtattccggaagacttctattttgagtcttttcattctgatagtatcctccaaggaactttaaagaatagaacccctgattcaggtaacaagatctgaatgtttgggatgcatcagtgagtagaagcaattcacgcactttcagaagtccttaacttttgggcccctcaagtaactggactgtaacttgaatccagtaaatgaactacatgaaactgtcaccaaactaaagcaattgatgaaacagtaacacgaataaatataaaaggcactgctaaaaaggctttaagaaaggctttttaacatttttgagggaaatagtatgtaaaagtgtagtacatgataactaaaattagttaaattaattgcaggagttactttaatcaccacatgtctacataacaatctaaactactaaacgttataatcttcaagaaaaggctacaactatgaaaaagagcattgrtgaatgtattaagtttgatagtaaaaacaaaacagacaaattaagctgatttggccattgatta

SEQ ID NO: 423807 - DNA, 603 bp, Homo sapiens
cccccaaacctacctacttttcttgctgttctcccttcctcaataatgaacaatgtgtttaaaattgcagttgctcagataaaaacccttggagtcatccttaatgactattttactctcacacaacatttaattcaaaatgtattcagaatttgactgcttctgactatcctcactgccatcactctagtccaaaatccattttatcttgcatgaattatcacaatagcctcataactcttctctcactcttgcctgcgttaatyagtgcatagcagagttgccagagtgatctgttaacatgtttcatcatatccgtcttctcaaatctctgctttaggggaagtacaaattacgtatttcatgtgatctacgaagtccaacagggtccaggtccctattaactctctgattttatttcttgtctctttcctcatattccataaacaggatccatagtttcctgcacttggatttggaattcgcttttcgaagacataaacatggctcactcctttacttccattgggtctttactcgaaaatcacatcactgataagttcttccctgcccaagccctatctaaaattgcatgctggccag

SEQ ID NO: 423808 - DNA, 650 bp, Homo sapiens
gacttcagaatttaattgaggagggatgtcagtcatacatacactaaaaacaagacaaaaatgggccttctgtggaatttgggagggaaaaattagcaaaggtaatttgggaaaagctttactgaggwgaaatcaaggtttctggcagacagttggggtagacagaagtacaaaaagaaatacaggcaagtaaaataatacaggcaaaaacccagagatatctgacaatatataccgagaaaagagtggcttagcgttaagtgttacaggaggcaggctggggtagataggatttttgctaactgactttgaacgacagcttcagtttgtataatatgacaaaatctgtgtgtgtctgtgtgtgtatgtgcatgtgctggggagttgtaatgaagggcaaagataagagacgaaggctatgatttagcagaatttgataggtagaacagttatttatgactatagactgggggcttaaactctactttttagaatagcaatctaagacgattatttcagtcaggggatttcaatttgagttctttccccccccagtgtaagaccttgatcaacatgacttcactgatctgtaatcatgtatatcaatcatgtatcttcacaggaatgctctgaagttagacaagataata

SEQ ID NO: 423809 - DNA, 543 bp, Homo sapiens
tattctttcttcagtgtcttctgaaaccctagaataatttgaatggttgtctttatgccctcagtctcagctattccataacaaactctccttacttagaatttgatcttcatgtttgtttacctgcaatggtaaacaggcttaaggcttgtctccttcccccgccctccccatacttaagatcaagtgggaggtttctattttaacatattaactgatgccttccctcattcttggaagctatatatgtgtacttcctcaagygtgctactataaaaatacaaggaaagagacatcaaggatcaaataatgtgtttctcagtaattccctggaatctattgataagattagagccctgcattgaaaaatccttagtatattgagcaccaatgacattatctatctcgtaaataagagctgggaagattgtgtaagatacagtttgactcattccaaaggaaatgtttttcaacttccagctgttcaactggaacaagaacagtattgtaatggattatggtaagacacagtcgttgttatga

SEQ ID NO: 423810 - DNA, 543 bp, Homo sapiens
tattctttcttcagtgtcttctgaaaccctagaataatttgaatggttgtctttatgccctcagtctcagctattccataacaaactctccttacttagaatttgatcttcatgtttgtttacctgcaatggtaaacaggcttaaggcttgtctccttcccccgccctccccatacttaagatcaagtgggaggtttctattttaacatattaactgatgccttccctcattcttggaagctatatatgtgtacttcctcaagcgtgctactataaaaatacaaggaaagagacatcaaggrtcaaataatgtgtttctcagtaattccctggaatctattgataagattagagccctgcattgaaaaatccttagtatattgagcaccaatgacattatctatctcgtaaataagagctgggaagattgtgtaagatacagtttgactcattccaaaggaaatgtttttcaacttccagctgttcaactggaacaagaacagtattgtaatggattatggtaagacacagtcgttgttatga

SEQ ID NO: 423811 - DNA, 608 bp, Homo sapiens
ggtggtgacatggggatagagaccaacagactgaatgattacttgtatcagcagaagacttcaagagaggatgactataggcttgtcatccccgatttctggatgtgacttaagtccctttaaatttaaaggttgctaatgccatcatgaccaactrccattgaacattttaactgatgctctgacctcacagctttttgacctgctaagctgcaatgactttgatcaatttgcgtccatgttcatggccagttcatgctttctcacctacctcgaaccatcctaccccatggatcacacacagtgaattgctcacttaaaccacagtatactgttcttgaaacttctgtcccctttttaaaattcaagtattatctacaatgtgacagatatcacatgaggttagattgaataatgatttagtttctgcatttctggagcttactgtctcaagaagatgaacaacaaataagagatgacaacattttacatgctaaggtagaaataaagtcaactgaaaaagaattttaaggctaagctataggaagccctttctgaagagatacaattcaaggtatgatcttaaaaaggagattttataaaaaggg

SEQ ID NO: 423812 - DNA, 619 bp, Homo sapiens
agactaagatttctgggctaggcgcagtggctcacgcctgtaatcccagcactttagacggccgaggtgggaagaccacctgaggtcgggagttcgagaccagcctgaccaacatggagaaacctcatctctactacaaatacaaaattagccaggtgtggtgacgcatgcctgtaatcccagctactcaggaggctgaggcaggagaatcgcttgaacccagaaggcggaggttgcggtgagccgatattgcgccatcgcactccagcctgggcaacgacagcaaaactccatctcaaraaaaagaaaaagaaaaaaactaagatttctttcaaacctgtaatctgatgatgattgtatgcaattctttttaaaaagctaaaaatcttagattgagttatttatgaatacaaacaggtatgaagcagaaaccacgaaggcagctggcaaaaaataccagagtaagtacagctaggaactgtagatgccagtgtcagtctacatctttgaactgtatgaaagagcctattggacactaagtatttatcaaattctttctctttgaagctagttctaaaaacaatagaaacaaaaggaattttagctaacttgctttacc

SEQ ID NO: 423813 - DNA, 510 bp, Homo sapiens
ttcaataatagaatccaaggtattttgttgtaaattatgtcatttgacacttgtgttgatactaccagtagaatagtatagccaaagccagtgttataagggtataaaccaaacatattacataaaacattttattttgactcttctatttgggtccagaagtggtaaaagattatcctttgctttgtctcccaggttgtagaattacctgagctacttacttaatttgaattgtaatcactgatactgtgctgtaagttrtgggtacataattataatgtgaataataccaattcaaaatttcaatagaagtagattttaccgttgttcaatatccctttgtcaggtactactactattgaaaaatatgacctcaggactaacagttggctacatattggcaccatgaatggccgtaggcttcaatttggagtcgcagttattgataataagctctatgtcgtgggaggaagagacggtttaaaaactttgaatacagtggaatgtttt

SEQ ID NO: 423814 - DNA, 638 bp, Homo sapiens
taaataaaaattttaaaaggagttgttaacacacacacgtgtgcatgcgaatcaaacctgataaactgattcctgatagagcagtacattgagtatcaatatgtggttcttcctttctttaattttatattaggccaaaacatcttccagcatatcaaatcgtatcaaaatactgtcactcaattttagaattagatattcatctatcattttgaagcagctagaattctggtccttgtcttctcattatactagtgagataaccaaggaactgagaagtttcatagcttcttcagagtgccacagagagtgagggagcaaatcatggctccaactcaagttatgtgctttcttatgccacaaactaatgcagtttctttgacaattctcagtattaccgtatttcagtctgactcatagcactaattagaaaacattgtgaataatctgatatcaggattcctaaatgtggattgttgctcatatttagaaatgtgattaatatgtctgattttaggtaatgttttcttcaaataaatttaattaaaacattgtaaaatagaggactttcctctttccccatctaatrtgacatctaatagataggaaacttagtatactattttttattgcaaagg

SEQ ID NO: 423815 - DNA, 572 bp, Homo sapiens
ctagaattttagttcagtgtttgttgatattgggcccaaaatgggtttccgtgaggatgcaaccccagaaaggttgctctgagaggaatggagaaggtttactgctcatcttgccattgtaggttatttttttcaagggcttaagatcaggctgggattgggatggtaatgtgtttgaataataatggagacaaacaatgccaacagtcctttaccagagctgggctggtggtatttaacagtctttgcattaaatttaaagttcttaataaatacccagaatccattaattgccagagggataaagtgaggccccactgtaaaattaagctaattcccaatatgcatggtcccagtatacacaggctgtgagtgaccattaagaaacaacaacaaaaaatacttgttttatgtgttttttttkttgttgttgttgttctataaaatgggaacttcagggggtggatacctatgctgtaaggaatgcttgttataaaaatgaattaaaacactttgcttaattgttacaaaagaagggattccacctatttggaagaatgcaactgaattgt

SEQ ID NO: 423816 - DNA, 624 bp, Homo sapiens
tttaatgcataagccaatttaatgcatagaagagatacataaaaattttaaaagcagttgttaacacacacatatgtgcatgcgtgaatcaaatctgataaactgattcctcatagattagtaaattgagtatcggtgtgtggttcttcctttctttgtttaattttatattaagcaaaaactttttccaatatatcaaattgtattacaacaytgtcactcaattttagaattagatattcatctatcattttgaagcagctagaattctggcccttgtcctctcatatgttagtaagataactgcaaaacaccgaagttgcatagcttcttcagagtgccacagagagtcagggagcaaatcatggctcaaactcaagttatgtgctttctaataccacaaactcatgaagtttccttgacaattctcagtataatcttatttcaatctgactcatagcactaattagaaaacactatgaagaaagaacaccttacactgatgaaattccactgattcttagaaatcagcttatatagtacttcatcaggtaggcattccctgccactccaatctaaattaaccccccacattattcccacttataccactctgattttttt

SEQ ID NO: 423817 - DNA, 630 bp, Homo sapiens
tgctagttgtactccaaaaattctgtttcctctttgtcatgtatacrttgtccatcctcccatgcaggtcagttggggtcatgtgactgaattactggcaaagcaacatgagcaaaggtgaaataaaccacttccaaactaaggcttataacaagttatgtctgattgtggtgttttagctatagttaaaaaataaaatatgatcactctgacttggttgtagaaaacatcctaaaggtgtggctagcaagatggccaaataggaacagctctggtctgcagctcccagcgagatcaacgcagaaggcaagttatttctgcatttccaactgaggtacccagctcatcttattgaaactggttagacagtgggtgcagtccacagagggtgagctgaagcagtttctggcgttgcctcactcgggaagcgcagggggtcagggaactccctcccttagccaagggaagctgtgagggactgtgccatgaggaatggtgcattccagcccagatactatgcttttccctcagtcttcataacctgcagaccaggagattcccttgggtgcctacaccaccagcgccctgggtttcaagcacaaaactgggcagccatttgggcaggcaccc

SEQ ID NO: 423818 - DNA, 602 bp, Homo sapiens
actccctcccttagccaagggaagctgtgagggactgtgccatgaggaatggtgcattccagcccagatactatgcttttccctcagtcttcataacctgcagaccaggagattcccttgggtgcctacaccaccagcgccctgggtttcaagcacaaaactgggcagccatttgggcaggcacccagctagcagcaggagttttttttcatacctcagtggtgcctggaattccagcgagacagtctgttcactaccctggaaagggggctgaagccaaagaaccaagtgatctagttcagtgaatcccacccctatggagcacagcaagctaagatccactggcttgaaattctcgctgccagcacagmagtctgaagtcaacctgggatgctcaagcttggtgggggggaggggcatccgccattactgaggcttgagtaggcagttttcccctcacagtgtaaacaaagccaacaggaagtttgaactgggtgcagcccactgcagcctggcaaagctgctgtagccagactgcctctctagattattcctcttctggcagggcatcactgaaagaaaggcagcagccccagtcaggg

SEQ ID NO: 423819 - DNA, 602 bp, Homo sapiens
actccctcccttagccaagggaagctgtgagggactgtgccatgaggaatggtgcattccagcccagatactatgcttttccctcagtcttcataacctgcagaccaggagattcccttgggtgcctacaccaccagcgccctgggtttcaagcacaaaactgggcagccatttgggcaggcacccagctagcagcaggagttttttttcatacctcagtggtgcctggaattccagcgagacagtctgttcactaccctggaaagggggctgaagccaaagaaccaagtgatctagttcagtgaatcccacccctatggagcacagcaagctaagatccactggcttgaaattctcgctgccagcacagcagtctgaagtcaacctgggatgctcaagcttggtgggggggaggggcatccgccattactgaggcttgagtagrcagttttcccctcacagtgtaaacaaagccaacaggaagtttgaactgggtgcagcccactgcagcctggcaaagctgctgtagccagactgcctctctagattattcctcttctggcagggcatcactgaaagaaaggcagcagccccagtcaggg

SEQ ID NO: 423820 - DNA, 566 bp, Homo sapiens
tcaaacaagtagaagaaagaatgtcagagcttgaagacaagtgtatcaaattaacccaatccgacaaagataaagaaaaaarttattttaaaaaaatgaacaaagccttcaagaagattgggattatgttaaatgacaaaacagatgattagtttgtgttcccaaagaagagaaatctaaaagtttggaaaacatatttgaggggataatcaaggaaaacttccctggccttgctagagatctagacagccatacacaagaagctcaaagaacatctgggaaatttatcacaaaaaaatcatcgcctaggcacatattcatttggttatctaaagtcaaaacaaaggaaataatcttaagaactgtgagggaaaagcaccaggtaacctaaaaaggaaaacctgtgagagtaagagcagatattttagtagaaactctacaagctagaggggattgaggccttatctttagcctccttaaacaaaacaattagtcaagaattttgtatccagtgaaactaagcttcataaatgaaggaaagatagagtcttttttagacaaacaaa

SEQ ID NO: 423821 - DNA, 380 bp, Homo sapiens
tctcaccacataatttcaccattggtgataaccacagatttttctctgtagcaaattgatcaataaaatttataatacatgtggatatactgcacatatgcatgtaatatctattgaatttgtggctataggcctcaaacatcatccaaattaaaaacagagacgtatagatttagtggatcaataattttgtaaatattaacatgaatycacttttataacaaagttactaattaaatgttaatattgaaaaatagattgttaatctgttgatgatttttccttttttcttttttttttttttttttttttttttgagaaggagtcttgctctgttgccaggctggagtgcagtggggctatctcggctcacggcaacc

SEQ ID NO: 423822 - DNA, 541 bp, Homo sapiens
tagcaaaattaaccaagaaaaaaaggagaagattcaaataagcccaattagaaatgaaatgggagatattacaaccaatatctcagaaacacaaaagatcattcaaggctactaggaacacctttacatacacaaactagaaaacctagaggtgatggataaattcctagaaatatacaaccatcctagattaaactaggaagaaatagaaactctgaacagaccaataataagaagcaagattgaaacagtaactaaaaagttaccaacaaaaaaagtctaggtccagatgaaatcacaggtgaattttatgtgacattcaaagaagaattggtaccaatgatactaaaactattccaaaagatagagaaaaagggaatcctccgtaaatcattctgtgaagccagtatcatcctgataccaaaaccaggaaaggacataacaaaaaagaaaactacagcccaatatccatgatgaacatagatgcaaaaattctcaacacaatactagttwacagaatccaacaacatgtcaaaaagat

SEQ ID NO: 423823 - DNA, 621 bp, Homo sapiens
tcaaagaagaattggtaccaatgatactaaaactattccaaaagatagagaaaaagggaatcctccgtaaatcattctgtgaagccagtatcatcctgataccaaaaccaggaaaggacataacaaaaaagaaaactacagcccaatatccatgatgaacatagatgcaaaaattctcaacacaatactagttaacagaatccaacaacatgtcaaaaagataatacaccakgatcaagttagttttataccagggacgcagggattgtttaacatccacaagtcaataaatgtgatatgcctcataaaaatatttttttaaaaaatcacataatcatctcaataaatgcagtaaaaccctttgacaaagtccagcatccctttatcattaaaaccctcagcaaaatcagcatagaaggggcttaccttaaggtaatgaaagccatctatgacaaacccacagccaacataatactgaacagggaaaagttgaaaacattctccctgagaactggaagaagacaatgatgcccactttcacaacttctattcaacatagtattggaagtcctagccagagcagtcggacaagataaagaaataaagggcatccaaattggt

SEQ ID NO: 423824 - DNA, 627 bp, Homo sapiens
gggagttttagggccccacccacggccagtccctctccatactaccatagctgatgctttctggaaagtgccacctcctggcaggaggccacccagaacaaaaatgaagcattaaaccaccaaagctaagaatcctcacagactccattgcaccccctgccacctccactggaagaggcactggtatccatgttgagagacscatagatggttcacatcccaggactctgtgcagacaccccccagtaccagcctggattcagatagacttgctgggtggctagacccagaatagagacaacaatcactgcagttaagctcacaggaagccacatccataagaaaagggggatagcactacagcaagggaacatcctgtgggacaaaagaaatctgaaaaaacagtcttcagccccagaccttccctctgacagagcctacccaaatgagaaggaaccagaaaaccaaccctgcctagtaatatgacaaaacaaggctcttcaacacccccctaaagaatcacactagttcaccagcagtggatccaaaccaagaagaaatacatgatttatctgaaaaagaattcaggaggttagttattaagctaatcagggagggaccagaaaa

SEQ ID NO: 423825 - DNA, 442 bp, Homo sapiens
acactagttcaccagcagtggatccaaaccaagaagaaatwcatgatttatctgaaaaagaattcaggaggttagttattaagctaatcagggagggaccagaaaaaggcgaagcccaatgcaaggaaatccaaaaaatgatacaagaagtgaagggagaaatgttcaaggaaatagacagcttaaagaaaaaaacaatcaaaaatccaggaaactttggacacactttcagaaatgtgaaatgccctggaaagtctcagaatgtaattgagcaagtaaaagaaagaaatgtagagctcaaagacaaggttttttaattaatccaatcttacaaagacaaagaaaaaagaataagaaaatatgaacaaagcctccaagaagtctggcgttatgttaaacaaccaaacctaacaataataggtgttcctgaggaagagaattc

SEQ ID NO: 423826 - DNA, 584 bp, Homo sapiens
ctaaatctttggattgacagatgatctttagaatctatggaaattttatgtttgggtgaaggtatacacttatatgtattattttcaagaaaagttctatgacatatgagattctcagrctgcctttgaaaatgttccttgacctgtgaacttgttagaaacacaatttctcatgccccactgcagacccagttaaccaatttcatggaaacaggctgaagaatctgtgtattaacaatttctccttgtgattttaggcataaaaaacttaagatgcactggtgtaagatcagaggctggtatctttacagagccttaagtctatatgacactttcagcaaagtgaacttagtttgaacttctgttattttattggaatggagggaaatttctagcccaaatgtacaaccaacagtaccgtggtagcccacctctgagtatgccttagacctagaatatggactgtgtcaacttttcctgatcgtggtagtgataagcaatgtcatgcaaatataggctttccaaaagaatttaaaaggtgaccttacaaatatcttagaaatgaaatatataaaaaggatggt

SEQ ID NO: 423827 - DNA, 598 bp, Homo sapiens
cctgtcaattatcaatcaaygagtggataaagaaaatgggatatatggaatactactcagacataaaaaggaatgaaataatggcattcacagcaacatggatggaattggagaccattattctaagtgaagtaactcagaaatggaaaaccaaacattatatactctcataagtgggagctaaactatgaggatgcaaaggcataagaatgatacaatgaactttggggactcagaggaaagggtgggagtagggtgagggataaagtctacacatttggtgatgggtgcaccaaaatctcagaaataaccactaaagaaattattcatgcaactaaataccacctgttcattaaacaccaatagaaatttcaaaaatagcattaacaacataaaaataaatttattggttttaaaatcaaatgaaattaatctgtaaagagatgatgacttaccatcacaaaatatacagaaagaattattatacagaaattaataatataattctgtattttattaatatacagaagtatttattgcaatgactctattgcaataagtattttgtttcccaaaggtaatttcattgaatgggaga

SEQ ID NO: 423828 - DNA, 584 bp, Homo sapiens
ctaaatctttggattgacagatgatctttagaatctatggaaattttatgtttgggtgaaggtatacacttatatgtattattttcaagaaaagttctatgacatatgagattctcagactgcctttgaaaatgttccttgacctgtgaacttgttagaaacacaatttctcatgccccactgcagacccagttaaccaatttcatggaaacaggctgaagaatctgtgtattaacaatttctccttgtgattttaggcataaaaaacttaagatgcactggtgtaagatcagaggctggtatctttacagagccttaagtctatatgacactttcagcaaartgaacttagtttgaacttctgttattttattggaatggagggaaatttctagcccaaatgtacaaccaacagtaccgtggtagcccacctctgagtatgccttagacctagaatatggactgtgtcaacttttcctgatcgtggtagtgataagcaatgtcatgcaaatataggctttccaaaagaatttaaaaggtgaccttacaaatatcttagaaatgaaatatataaaaaggatggt

SEQ ID NO: 423829 - DNA, 584 bp, Homo sapiens
ctaaatctttggattgacagatgatctttagaatctatggaaattttatgtttgggtgaaggtatacacttatatgtattattttcaagaaaagttctatgacatatgagattctcagactgcctttgaaaatgttccttgacctgtgaacttgttagaaacacaatttctcatgccccactgcagacccagttaaccaatttcatggaaacaggctgaagaatctgtgtattaacaatttctccttgtgattttaggcataaaaaacttaagatgcactggtgtaagatcagaggctggtatctttacagagccttaagtctatatgacactttcagcaaagtgaacttagtttgaacttctgttattttattggaatggagggaaatttctagcccaaatgtacaaccaacagtaccgtggtagcccacctctgagtatgccttagacctagaatatggactgtgtcaacttttcctgatcgtrgtagtgataagcaatgtcatgcaaatataggctttccaaaagaatttaaaaggtgaccttacaaatatcttagaaatgaaatatataaaaaggatggt

SEQ ID NO: 423830 - DNA, 584 bp, Homo sapiens
ctaaatctttggattgacagatgatctttagaatctatggaaattttatgtttgggtgaaggtatacacttatatgtattattttcaagaaaagttctatgacatatgagattctcagactgcctttgaaaatgttccttgacctgtgaacttgttagaaacacaatttctcatgccccactgcagacccagttaaccaatttcatggaaacaggctgaagaatctgtgtattaacaatttctccttgtgattttaggcataaaaaacttaagatgcactggtgtaagatcagaggctggtatctttacagagccttaagtctatatgacactttcagcaaagtgaacttagtttgaacttctgttattttattggaatggagggaaatttctagcccaaatgtacaaccaacagtaccgtggtagcccacctctgagtatgccttagacctagaatatggactgtgtcaacttttcctgatcgtggtagtgatargcaatgtcatgcaaatataggctttccaaaagaatttaaaaggtgaccttacaaatatcttagaaatgaaatatataaaaaggatggt

SEQ ID NO: 423831 - DNA, 553 bp, Homo sapiens
acagtcatggttaatattgacacatgaggtcttattcctgtcataatattaattgttatatagctactttgtagccttatttgtgtaattgttttataagacttttgagttttatactttcagatgtttttattatggcaagtattgaacaaattttgtatccatgtttataacttccttgagcatttcttgtaagtttggtctagtggtgacagattttctcagtgtttgcttgcctgcaaaatactttatttcttcttcatttatgatgcttattctggcagtatacccaagtcagggtttacagcttttttccttaaatggcttgaaaataaaatccyagtctcttcttgcttgtaaggcttctgctgagaagtccactgttagtctgatggcgtttcctttataggttactatatgcttttcttttgctgattttaggatttttttccttcatattgaacttagtctgatgactgtatgtcttggtgagattcttcttacaatgtttctctggagttttttgagtttcttgtatcaagatacctagatc

SEQ ID NO: 423832 - DNA, 533 bp, Homo sapiens
agattcatcatatggatgtaaaagattttctaccagtactgtgaagacaagaaaaatagattatcataacaacatacacattgggattttaaaagctctctctggaagaccaaattgaaatattaaaaatataattttatatgtatatataggatatcaggttccatattttacagttcaggctcagaaaatgtccaattaagaccataaacaacaatttgatgactaataataaaatctactgttttcgagcagctagggattgcttactaaygggtgactaaggggctacaataagtcccttactcaccccttagtgagcagtcccttatttcagaaaatatcttggggcagatagctatactgtgcttgcttttatgtttgccattgtggttgaaataatttatgagaccctcaattggctcccagaacctggaacttttcaaagggttacagtgggagaagcagtaacaggaattgatacttcacctaacgaaatatttaacactaattgaggatgaggcaacatggaa

SEQ ID NO: 423833 - DNA, 548 bp, Homo sapiens
acttagaataaataggaaaattcaaacagacagaaaatagaatgttggttaccaggagctggagggagggagggaggaatggggagttattgcttaatggatacagagtttatgcttgggacaatgaaaaagttctagaaatagtgatgatggttcataggattgtgaatgtatcagataccactgaattgtatgcttaaaaatggtggaaatggtaaattttgcattagctatattttacaaaaaaatactgatctggaagcagctttgtcttagtttgggctgyggtaacaagttatcatagactcggtgacttcagcaacagatatggattgctcatggttctagaagctgcacactccaaggtcaaggcactggtggatctgctgtgtagggagattcctgatttccacttcctgatttgcagatggtaccttctctgcatcctcacatagcagaaagagtgatagagctctctggcttctccttacaggagcactaatcccattcatgagcgctcccttcttacctaactacctcccaaagtc

SEQ ID NO: 423834 - DNA, 552 bp, Homo sapiens
ttttcttgtgttgtaggttgtttgcttttgttacaaaataatccacaccagctgtaataaatacagaaaatataaatgtagataaaaactccatccatatacctcaataccatccacacagataaaagcagagaactgatgcatgtgtgaccttccagacaaatgctgtgatgtgtgcacatatacatacatgtgcacgggcatgcatacgtgcacctgcacacatgcatacactcatgcacaggtatgcacacagggacacatgcacagagacacacacatggacacagagggacacacacagacacacacayggaaaatttgatttcctactgtctttccttgacaatattaagattacacatgcacatcatcctaagatttgctttccacatttgaccatactggtgacccttccatgtcagagcacaggatcaaccacattctttctcactgctgcaacacattccatatgaatatacctcaatttatataactgcttctgcactcctatacattgcaatataatgacccccagcgatttcctaatac

SEQ ID NO: 423835 - DNA, 576 bp, Homo sapiens
acatgacacgcccccccacccctcccttccggcaccccatgttccctgtctcagggctcacacttcataagcactcatggaagttgctactgcagggtggatgccaagacagggagcctgcacgaacaggttcacagcatttgttgtttatgtggctgttgcttgtccttcactgaggtccagcatttagagggcagggactctgtctctggggcatctctttattccaggacacagcaagtacctgccacatctaggaactcagtaartatttcttgtttaataagagagggaggaagcacaggctataggatacaaaaaaaaagaagaggatggcaaagaaggacgggtgctgaggaagacagagagatggaccgtgttgagcctgcgaggtcttggcgggagctgtcctgggcgtggttgttctctgatacagtctaatttcgatgtggcctcggtgtggcatactatgggaccacagcttccccatcaggctgccttactgaggtggaactccacaaccttgatttaatagacagaagctgcatctgctccccacaagttactagcccacac

SEQ ID NO: 423836 - DNA, 594 bp, Homo sapiens
tgttcaggccaatggaacataagcatagacaacatgccaatcctgagccaagcctaggtggcatctggtgcttcctcatggcctgttgtgttcctactgttaccacaaaaaaccatgccctgggtagccactaattcaaggatgatgggaggctcaaggagcagaactcaacccaattcacaacctggagcctggaacytagagccaggagctgggagtccagagcccaacctagcccagccgtggtgccatgcaactctcttactggctcataagtgagaaatgtctgttgttttcagcctctgggttatggaaagatttgttactcagcattattacagcactgctaactgatacagatgggtctaaacttggatggttaacaaatatggaatatatctttagaataacagattattctctgattcagaaagaatgtacaacataaaatccaaaatagatggccccatgctaactgaaaccagtattcaagctagctctttacaatttaaaaggaaattggaatttgagatgggacaggcgtttttcattggagatgttttgaatggaagcatcaagatctccaaaaacgta

SEQ ID NO: 423837 - DNA, 562 bp, Homo sapiens
aggaagtaaaaatcctgcccccaccccttctatacatgcctgcaggtggcttcacaaacttgttttccctgcagctgcttgcacatgtaacagcttccaggataaccaatgagctggaaccagtaagatgtggctggggaagggggcttctcatctgtcagctggggagcctcatggggccttacatggactcagcttcttaccagttccagaagagcacccaaacggccctgggattttcaactctgaagcataaggtgggaacccggcagcaggctggaccctctggccccsctccctgttgtcctccatgagctcccagtcccgttcatatcagagcaaaaccacagctggtgggacttagcggattttgacagcatgttgattatgaatattgtccctttcaggcaagttaatgaagcacccaattcacaccagcttttatctgtcagagaaacaccagcaagcaaggtagagacaacaagccaaaccctgatgtgcaagtatgaacttcatgttaattaggaatcggaagaatgtgtgggtttctctaatgcactca

SEQ ID NO: 423838 - DNA, 476 bp, Homo sapiens
ggaacatgttgaattgtagcagtttttcttagcacctgcgccagctcaccactccacttccctgcttctcttttgggctccagtctcctggaaacccctctctgtgtgtgaaggagctgcagaagaaraaatgggtcctcctgcagaatgagctcccaaacacagcaccgaggcttttcattcttcacaccccatttccaatggtcagcagatgtggtcagcactaccagatcaagactctgaacccttctcccattccactttcccacccggaggcaggccaccatcatactcgaccaaggcaatggctaccagggatgctgtgatactcccataatcctgacgagtcaaccactatggccttaatggctctgtcttccattggctccatctatctgtcatctgtttgtctatctaaatattttatatgtatgcagaatgacaacagtccttaagatattttacatacacacata

SEQ ID NO: 423839 - DNA, 542 bp, Homo sapiens
attctgcttcttcagcctctaaaacgattcccttccctgataattgtgactcaaacggtgcatggaccacgaaagtgctttgtaaactgcacagcgctatggcaatggtgtcattatgatyttcatcgctactatcgacaacctggaataaaactctttaacttccagttgctgcaacacttaatcacccagttgaccatggaaattactcagctcggcatgaggtgcagatatagctgcaagtggaagctgtttttaaataaaatcttattaattaaggaagttctggttgttgtttatttgcatttttttaagcatctaggaagtccccttcctggttatggtctgctaaacctgtttctccctgaaattgtgttcgttatctaacattcttcaggttccatctgatcacagtcttcagccgtagatgtctctttcctccattcccccagctgagtttccaagcacagaaaggaggagcaaatacacctgagtttggggccctcttccctcagttctgtatccattttccctgagctgga

SEQ ID NO: 423840 - DNA, 446 bp, Homo sapiens
aggaaggggacactgggggaggcagtgacaatacctgccaagatccttggccacacacccatccctgcagagcactttacatggacgctttcctctccgggactgctgcaacaaaggcccacagactggagcataaacagcagggctgcatcgtctcacagttctggggaccaggggtctgaagccaaggtgtctgcagggccggttcctcctgcgctgtgagggaggctccgctccaggcctctctccagcttccagtagttgctggcaatcttygctcttccttggcttgaggaagcctcaccctgatccccaccttcatcttcacatggcgttttcctgtgtgtgttccccttaatacaagcgagtttccccttgtattaaggacactggtcatattggattggggcccaccctagtgacctcgttttaacttggtaaaggcc

SEQ ID NO: 423841 - DNA, 446 bp, Homo sapiens
aggaaggggacactgggggaggcagtgacaatacctgccaagatccttggccacacacccatccctgcagagcactttacatggacgctttcctctccgggactgctgcaacaaaggcccacagactggagcataaacagcagggctgcatcgtctcacagttctggggaccaggggtctgaagccaaggtgtctgcagggccggttcctcctgcgctgtgagggaggctccgctccaggcctctctccagcttccagtagttgctggcaatctttgctsttccttggcttgaggaagcctcaccctgatccccaccttcatcttcacatggcgttttcctgtgtgtgttccccttaatacaagcgagtttccccttgtattaaggacactggtcatattggattggggcccaccctagtgacctcgttttaacttggtaaaggcc

SEQ ID NO: 423842 - DNA, 547 bp, Homo sapiens
acatttgctttccgtacatcaccattttactccacagagaagctaatcagattgccgaaggagaaaataaaccagggcctattaattagcttaaatataagttttgaactataatatttagcaagttgaattctaaagtggagaggccaaatagaaaataatatctgctatttctcagaggctaaaatgttgttgtttctcaaagtcaaaacacaataggatttttgagatctgctttaaaagaaccgagggaaggcagcatagcaaagaagaggagatgagaagactggccctgtgtggatcatttttggatctgggggatgaaggcaggggccttaaagctttcccgtgagccaatgtgtcacactttgctggtttcctttcctcctgctcccaayaggctgagaagctcaatatcttatgacatgaataggatagaccccaagtcttaaggaatggccacaactgtcccaaaaccatcagcctcaagtcatctgcctgccatatgtttggtgcagagttgagacatacaacctggagacgtggc

SEQ ID NO: 423843 - DNA, 517 bp, Homo sapiens
cacaaacgctattcatagctgaaccagaacacttagtatgacttcttttccttctgacacaacttttagtttctcattggagttaataatcatgtttatttgcatgattttctatgtatctgtctctagttaagcccaaactgaccccatttgtatatatcccctagtctcccatccgtttcatctgaaagaactctctccataaaggaggctgctgccctgtcctcttcctgcccattgtccctctgaggggaggaagtgactgtagtgccttctggcttcctgcgtgacttctgattcttggttcctcctttgtygtcatttttctctctcgatgcttgtagaattgtcttcagtgttctgaaatttcacaatgcatgtcctgctgttggcctatttctattcagcacccattacccattgtgccaggtgctcttggccctttcagtctggaaactcatgtcctttagtgttagggaattttctgaaattaatttatttgataatttatttcact

SEQ ID NO: 423844 - DNA, 317 bp, Homo sapiens
atgacctttaaaaaagcttgcctggaatgtgacaaaaaagaacagagtaacagacgaagaggatcatagcaggcagagaacacaaagctgggtcagagacacagtggaaatatcctttctcccttttcttttcttgacattattttggttttgttagaggtgaggctggtgttagagaggccaaattttgacgatgatgaaaaagccgagggcactggggggtttgggctccaacatccttattccactgaaccacgaccctsaactgcctatccctagacatttcattatgtgagcaaaataaacacctattttaa

SEQ ID NO: 423845 - DNA, 392 bp, Homo sapiens
ttttgcttttctgacaaagcatgctgatgccttagtcttgctcttctctgattatggctttaaaatgggtgagatgtcagggagcacatcagytacctcaacaacgtgtggctgagcaattgaaccgatgctcacgtcacttacctccagaattcttgtttgtttgtgtgtttgagatagggtctcactctgttgcccaggctggagtgcagtggcacgatcacagctcactgcagctaaaaccttcccgagtttaggtgattctcccacccacctcctcagtagctgggaccacaagctcacacgacggcgcctggccacagacttgttatgtgagaaaaagaacttcctatttgtctgagtcatttagttagatcttctactgcttgtag

SEQ ID NO: 423846 - DNA, 568 bp, Homo sapiens
atatagtataacaactatttacatagcatttacattgtattaggtattttaagtaatctagagaagagtcagaatatacaggatgtgtgtacgtaaacactatgccactttatatatgggactcgagcatccttgaattttggtatcttcaggggtcctggaaccartcccctatgaataccaagggacaactgtatctatttatatttgtgcctggaaaggcctataccaaagagctaacaatacttccttagatgggatatgggggattagaactgatttttcattttcttctttatcctcttctctacacttactttttacaagaatcacataaaaagaaatatatatataaagtgtttagaacagtattactacaaagcaagcatcatataaatgtttgctgttattttataaattttaaattatgtaattcttttgtaagtatatctataaaaaggaaaaaagacaacatatattaaagacctacattgtatttatctctgggtgagcagatttggggttattttaaatttcttctttaacttctctgcactttccaaaattt

SEQ ID NO: 423847 - DNA, 600 bp, Homo sapiens
gcctgtgcgcattcttcccacccagatcctgtgctcagctgatctttggaggrcccacgccctctcagggactggggaggccctgggaaggtcaaggccaggcccttgccctggagcagcatagcctagtggcaaactcctgcacagcaccagcaggctgtgaagtaaagagagcagccaaaggcgcaacaggagagggagtccaggaaaccttagagggtaccatctttgagcctggagttcaacagccagaggaggtagcgatggtctgatagtccatgattctgcagtgctctgtacagagagccacaaacgtctttcctgtccttagacaaaataactattgttcaactagcccgtgatctttaactacagtgcaataaaattagaaatggcaaaatagttaaaaataagccatggcagtcaggcacaatggctcacaactgtaatcccagcactttgggaggctgaggcaggagaatttacttgaatccaggatgcggaggttgcagtgagctgaagttgcgccactggactccagcctgggtgatagagtgagactttgtctcaacaacaatgacaacaaaaaacatagaaaag

SEQ ID NO: 423848 - DNA, 600 bp, Homo sapiens
gcctgtgcgcattcttcccacccagatcctgtgctcagctgatctttggagggcccacgccctctcagggactggggaggccctgggaaggtcaaggccaggcccttgccctggagcagcatagcctagtggcaaactcctgcacagcaccagcaggctgtgaagtaaagagagcagccaaaggcgcaacaggagagggagtccaggaaaccttagagggtaccatctttgagcctggagttcaacagccagaggaggtagcgatggtctgatagtccatgattctgcagtgctctgtacagagagccacaaacgtctttcctgtccttagacaaaataactrttgttcaactagcccgtgatctttaactacagtgcaataaaattagaaatggcaaaatagttaaaaataagccatggcagtcaggcacaatggctcacaactgtaatcccagcactttgggaggctgaggcaggagaatttacttgaatccaggatgcggaggttgcagtgagctgaagttgcgccactggactccagcctgggtgatagagtgagactttgtctcaacaacaatgacaacaaaaaacatagaaaag

SEQ ID NO: 423849 - DNA, 546 bp, Homo sapiens
ggcgattcccaggggaccctctccattaagcgcctcagcacaagtcctccccactcccgcttcatccattcccaagtccaaagtcctcatgcctgagcactccccttgttcacctcaagtaacttcatgctggctccaccccgcagggctgtctctgcagatggagcaatcattctcctccccagggcccacgtgccaggctggggtgtgtgctgaagttaggaaatctcgcttagcagtggagggcacaaggccctaggatcttggtaggagctgagagatgggagtcagaaggagtcagccttcccctccctcagcctgattttccttatttgtaaaaagaggacagygactcctcccctgcctccttcctatagctgccgggtggctctggtcaggtaattcatgtgaaggagcttttataagtgtagatgataaacaggcctaaggtagtgaggtctcagtccctgctgcacattagaatcaccaggaaagctttaaagaaaatgctggccgggtgcaatggctcacgcctgtaatcccagc

SEQ ID NO: 423850 - DNA, 546 bp, Homo sapiens
ggcgattcccaggggaccctctccattaagcgcctcagcacaagtcctccccactcccgcttcatccattcccaagtccaaagtcctcatgcctgagcactccccttgttcacctcaagtaacttcatgctggctccaccccgcagggctgtctctgcagatggagcaatcattctcctccccagggcccacgtgccaggctggggtgtgtgctgaagttaggaaatctcgcttagcagtggagggcacaaggccctaggatcttggtaggagctgagagatgggagtcagaaggagtcagccttcccctccctcagcctgattttccttatttgtaaaaagaggacagtgactcctcccctgcctccttcctatagctgccgggtggctctggtcaggtaattyatgtgaaggagcttttataagtgtagatgataaacaggcctaaggtagtgaggtctcagtccctgctgcacattagaatcaccaggaaagctttaaagaaaatgctggccgggtgcaatggctcacgcctgtaatcccagc

SEQ ID NO: 423851 - DNA, 546 bp, Homo sapiens
ggcgattcccaggggaccctctccattaagcgcctcagcacaagtcctccccactcccgcttcatccattcccaagtccaaagtcctcatgcctgagcactccccttgttcacctcaagtaacttcatgctggctccaccccgcagggctgtctctgcagatggagcaatcattctcctccccagggcccacgtgccaggctggggtgtgtgctgaagttaggaaatctcgcttagcagtggagggcacaaggccctaggatcttggtaggagctgagagatgggagtcagaaggagtcagccttcccctccctcagcctgattttccttatttgtaaaaagaggacagtgactcctcccctgcctccttcctatagctgccgggtggctctggtcaggtaattcatgtgaaggagcttttataagtgtagatgataaacrggcctaaggtagtgaggtctcagtccctgctgcacattagaatcaccaggaaagctttaaagaaaatgctggccgggtgcaatggctcacgcctgtaatcccagc

SEQ ID NO: 423852 - DNA, 596 bp, Homo sapiens
cttatttcatgatatctcttagacatctctccatgtaagtactagattgattttgcttgtcctttttgacagctgtttgatatcccattccatggctctgccaccatttatctgccaattcccttattgatgaacttttgctccaacatttttgctgttacaaacaatgcctyggtggacacctttagatatacatgtatgtgcacttacgtgagtttttccatgggagaaattccctgatgtggacttactggctcagtgagtatgtagatttttacaagtttttatattcattgccaaattgctttccacaaggtcatagcaatttaaactcccaccagtggggtatgacagtgcttgttttcccacctggaaatgagcaccacaacgagtatcaccgtatgctttaatctctgtcagtctaataggtgtcatctatgtatctctgtcatgttatctctttgtcattttaattttcttttcatagtactgaggttaaaactattttcatatgtttggtggttatttgtatttcttataaaaattgcctgctcgttgctatttatgggcatgtttttctttttctatttcttatt

SEQ ID NO: 423853 - DNA, 596 bp, Homo sapiens
cttatttcatgatatctcttagacatctctccatgtaagtactagattgattttgcttgtcctttttgacagctgtttgatatcccattccatggctctgccaccatttatctgccaattcccttattgatgaacttttgctccaacatttttgctgttacaaacaatgccttggtggacacctttagatatacatgtatgtgcacttacgtgagtttttccatgggagaaattccctgatgtggacttactggctcagtgagtatgtagatttttacaagtttttatattcattgccaaattgctttccacaaggtcatagcaatttaaactcccaccagtggggtatgacagtgcttgttttcccacctggaaatgagcaccacaacgagtatcaccrtatgctttaatctctgtcagtctaataggtgtcatctatgtatctctgtcatgttatctctttgtcattttaattttcttttcatagtactgaggttaaaactattttcatatgtttggtggttatttgtatttcttataaaaattgcctgctcgttgctatttatgggcatgtttttctttttctatttcttatt

SEQ ID NO: 423854 - DNA, 563 bp, Homo sapiens
cagcacaggataatgtcctgggaccatcctgtgtattggggggcagggggcgtcagacacaatgtgcctggcacctaggagggctaaatggtctccccttcttcatcctcagtgacatcacccccttcactcagtcaccctgcccagccctcaccaaggtgcaggcaggggctgagcagctggagtcctgactcggcagcccctctcccmcataggtgctgaacgaggctcgtgtgcggaagcctgtgaacgtgcagatgctcttctccaatccactggatgagccggtgagggactgcgtgctgatggtggagggaagcggcctgctgttgggtaacctgaagatcgagtgagtcctgggcctaagtggccggtgcaggagggcgggagggggcgggggggccctccagatcccctgggtgggacagacagagctccctctgaccttgggttctttactcttttgggggtcttggaactctagaatctgcttttgcatttggtttgggggttcaccaaacttgaactcctgagaagaacaggtcaccagagctaagagctgg

SEQ ID NO: 423855 - DNA, 563 bp, Homo sapiens
cagcacaggataatgtcctgggaccatcctgtgtattggggggcagggggcgtcagacacaatgtgcctggcacctaggagggctaaatggtctccccttcttcatcctcagtgacatcacccccttcactcagtcaccctgcccagccctcaccaaggtgcaggcaggggctgagcagctggagtcctgactcggcagcccctctcccccataggtgctgaacgaggctcgtgtgcggaagcctgtgaacgtgcagatgctcttctccaatccactggatgagccggtgagggactgcgtgctgatggtggagggaagcggcctgctgttgggtaacctgaagatcgagtgagtcctgggcctaagtggccsgtgcaggagggcgggagggggcgggggggccctccagatcccctgggtgggacagacagagctccctctgaccttgggttctttactcttttgggggtcttggaactctagaatctgcttttgcatttggtttgggggttcaccaaacttgaactcctgagaagaacaggtcaccagagctaagagctgg

SEQ ID NO: 423856 - DNA, 409 bp, Homo sapiens
atttctgagattttggtgcacccatcacccgagcagcgtatactgtacccagtggttagtcgtttgtccctcacccctcccacccttccccgagtccccatagtccattgtatcattcttatccctttctgtcctcacagcttagcccccacttatmagtgagaagatacaatgtttggttttccattcctgagttgctttacttacaataatggtatccagctccatccaggttgctgcaaaggacctgtgcctttgtgttactaggttgtatttcctctctgtagctgaagattactcctaactaatcataactccatttcccagtgattggtttggcagtgattggtttgaggagggaacacagcccaattctggccaatgagatatgaggggatgtctgctaggg

SEQ ID NO: 423857 - DNA, 598 bp, Homo sapiens
ctcaactggcagttccatgagggtgtaggtgccatgcagcatggtgacscatgaatcccagccccagcatacagctggcacagagtgagtgctcagtaaatatctgtggctcaatgagtggatggattctagtcttaggatccactagctgcatttgagacaaagcttgttatctttcggtcttcatcatttgcaaaatggaatagaaatcttgcaagatgtggagcaacagaagccatcccatgctgctggtgggagataaattctaccaccactttataaagcatctcctagagttaaacatgggcttactttacaactcagcaattccactacctagtgtattctcaacaaaaatacatgcacgtgtggagcaaaaggcaaggaagctcatagcagcaatgttcgtcataaccccaaactcaacatcctcccatgcccatcaaaagaatgaataaatagaatgggcagatatcttgtgggatgggcacccactggaatctctatagtgatggaaatgacctacaattgcacacagcacgtggatgaatctcataaacagaatgttacatgaaagaagccatacacaaaagggcat

SEQ ID NO: 423858 - DNA, 598 bp, Homo sapiens
ctcaactggcagttccatgagggtgtaggtgccatgcagcatggtgacgcatgaatcccagccccagcatacagctggcacagagtgagtgctcagtaaatatytgtggctcaatgagtggatggattctagtcttaggatccactagctgcatttgagacaaagcttgttatctttcggtcttcatcatttgcaaaatggaatagaaatcttgcaagatgtggagcaacagaagccatcccatgctgctggtgggagataaattctaccaccactttataaagcatctcctagagttaaacatgggcttactttacaactcagcaattccactacctagtgtattctcaacaaaaatacatgcacgtgtggagcaaaaggcaaggaagctcatagcagcaatgttcgtcataaccccaaactcaacatcctcccatgcccatcaaaagaatgaataaatagaatgggcagatatcttgtgggatgggcacccactggaatctctatagtgatggaaatgacctacaattgcacacagcacgtggatgaatctcataaacagaatgttacatgaaagaagccatacacaaaagggcat

SEQ ID NO: 423859 - DNA, 661 bp, Homo sapiens
cctgcaaagtggggagggacagggctggatgggggagggggcctgaggatctggaattgtcagatctgacccccagagacccttacacccatttccagccctcagcaatggcctgctgtctgggggcctgttgggcattctggaaaaccttccgctcctggacatcctgaagcctggaggaggtacttctggtggcctccttgggggactgcttggaaaagtgacgtcagtgattcctggcctgaacaacatcattgagtgagttgtcctaaaatagagctttgatctccaccagggaaccccaggtgaagatctgccagccccaggcagtgaccctgaagcagcgaccctgaagcagcgagggagcgrcctgaagatggagccaggactcagttctgagacccatctccagtttggcagggacacccgtcctccccaaaccagcaatgccctcagttctaggcatgtcctgaggccccagcatcatctataatcctcaccacaaccctttgaggtcgatttaataatctccagtttgcaaatgggaaaaccaaagcacagaggtgcctgtgttcacgctgctagagtgatgccaagtgagtaaggctctcactctactatcctaactccaaagccaaggctcttcccactacactgtggt

SEQ ID NO: 423860 - DNA, 585 bp, Homo sapiens
tccctcattcccccacagaggggaatatttatagagaatctactatgtgctggttttgagtgggacgcagagaaacaaaaggctctgcagcaggctgcaaacagccctgatgcttcagctatgtggtggtcaggcagaccccccaccgccccgccatggtactgaaactctctgggatctataaagatgccatgtggactttctggcgagccccagtgagggagtcacagactgctagatttctggagcaaagccatgctgccttcagcagggaactgtataccatgagtaaaacagcttctgacatgctacagggccctggtcaggaaggggcgcctgatcacagggcatcagtaaccatgaggccagaactgcccatcaggaactggtcactgtcatccaccaagtcatcaggtcagcaggaccaacagcaatycttcatcaggcagaagtggtgtctgatctagtgggggctcaaaaaggtccagggggcaaaagtaagctacccagaccttcgcatcacctactagtgttgcacccagcttctccctgggtgcacacccatggccccatagatgttcccga

SEQ ID NO: 423861 - DNA, 433 bp, Homo sapiens
cacaatcttgtgggcgatacactgcaaggatgcagtatggtactgtctactgctgtgtaacaaattatcccaaactcaggactctaaaataataaacatgtgttatttaatggtttttttgaatcaggaatttgggagctgctggactgggcattctggctctgagtctgttatgargttgcagttgagttgttggctggcgctgcagtttcatctgaaggctcgactgagtgaacatgctttcaagtttactcaagtggttgttggttttcctcagttcctcaccggccattgatcagaggcctctttcctcaccacgtgagcctctccacaggtggcgttgtcctaatagtatggcgactggctttccctagagtatgtgatccaagagctcaacatggaacccacagtcttataacctaagtctcagaaa

SEQ ID NO: 423862 - DNA, 630 bp, Homo sapiens
tagtatggcgactggctttccctagagtatgtgatccaagagctcaacatggaacccacagtcttataacctaartctcagaaatgacatagcacaacttctgccatattctattggtcacacagaccaccctagtacagggtgagaggggacaacacaagggtgtggataccaggaggtggggaattggaggccaacttgcaggctggcttccatgggcatcatcccttaggatgtgatacacaccttaaaccctaggctattttatgatgctgggtgctcactacatagaatgcattggtctagaaatcaagtacaagtatctcccattcaacatcacttccagtgacacacatggagactttgaactttccattcccaaaactttagtctctgtgagtctagagtctctggttcccagagtgggaaggatcctttctctagggaactcaatgaggatctcgctaaacttcaagctaccactgtcattgggttgctttggacttttcatgccagtagaccagcagatgaagaaaggagttttcatgactgcaggggtaataaaccctggggacgcaggtggctggggaaaagcaggaatgtgtttgaaactcaggtcaaccatggggt

SEQ ID NO: 423863 - DNA, 630 bp, Homo sapiens
tagtatggcgactggctttccctagagtatgtgatccaagagctcaacatggaacccacagtcttataacctaagtctcagaaatgacatagcacaacttctgccatattctattggtcacacagaccaccctagtacagggtgagaggggacaacacaagggtgtggataccaggaggtggggaattggaggccaacttgcaggctggcttccatgggcatcatcccttaggatgtgatacacaccttaaaccctaggctattttatgatgctgggtgctcactacatagaatgcattggtctagaaatcaagtacaagtatctcccattcaacatcacttccagtgacacacatggagactttgaactttccattcccaaaactttagtctctgtgagtctagagtctctggttcccagagtgggaaggatcctttctctagggaactcaatgaggatctcgctaaacttcaagctaccactgtcattgggttgctttggacttttcatgccagtagaccagcagatgaagaaaggagttttcatgactgcaggggtaataaaycctggggacgcaggtggctggggaaaagcaggaatgtgtttgaaactcaggtcaaccatggggt

SEQ ID NO: 423864 - DNA, 598 bp, Homo sapiens
ggctgacagagaaataggaaacccctttacagaactggcaatcagagctgcagttgaaatagcggaaggtatcgctggggcacyaaggaggaagtgatttcatgtgagcaaggtgctcattattggagacaagggggaaagtgatggtatgatacagcctgtgaaatgaaatattaaaactatatgtgccaatatgggaaaacttccaaaacatgttcatgagtgagacggggaacaaggtgcaaaacctaatatccagtttgatcctccaacaatgactgtaaaaggacaagtcctttctggaaggacaggcaagaaagggtttacagtgattaaactacagggagcagaaagggctggggtaaggagcttgtatgtcttgcttcactcattatccttctgcactggtagaattttcatcctgtccatgaatcacttttccccaaacattttattataaaaatattcatacatgcagaaaatttaaaataattgtatagtaagcacccatatacccactaactagattctataattaatattttgctatacttgccttatatatctgcctatctatccatccttccatccagccttc

SEQ ID NO: 423865 - DNA, 598 bp, Homo sapiens
ggctgacagagaaataggaaacccctttacagaactggcaatcagagctgcagttgaaatagcggaaggtatcgctggggcaccraggaggaagtgatttcatgtgagcaaggtgctcattattggagacaagggggaaagtgatggtatgatacagcctgtgaaatgaaatattaaaactatatgtgccaatatgggaaaacttccaaaacatgttcatgagtgagacggggaacaaggtgcaaaacctaatatccagtttgatcctccaacaatgactgtaaaaggacaagtcctttctggaaggacaggcaagaaagggtttacagtgattaaactacagggagcagaaagggctggggtaaggagcttgtatgtcttgcttcactcattatccttctgcactggtagaattttcatcctgtccatgaatcacttttccccaaacattttattataaaaatattcatacatgcagaaaatttaaaataattgtatagtaagcacccatatacccactaactagattctataattaatattttgctatacttgccttatatatctgcctatctatccatccttccatccagccttc

SEQ ID NO: 423866 - DNA, 598 bp, Homo sapiens
ggctgacagagaaataggaaacccctttacagaactggcaatcagagctgcagttgaaatagcggaaggtatcgctggggcaccaaggaggaagtgatttcatgtgagcaaggtgctcattattggagacaagggggaaagtgatggtatgatacagcctgtgaaatgaaatattaaaactatatgtgccaatatgggaaaacttccaaaacatgttcatgagtgagacggggaacaaggtgcaaaacctaatatccagtttgatcctccaacaatgactgtaaaaggacaagtcctttctggaaggacaggcaagaaagggtttacagtgattaaactacagggagcagaaagggctggggtaaggagcttgtatgtcttgcttcactcaytatccttctgcactggtagaattttcatcctgtccatgaatcacttttccccaaacattttattataaaaatattcatacatgcagaaaatttaaaataattgtatagtaagcacccatatacccactaactagattctataattaatattttgctatacttgccttatatatctgcctatctatccatccttccatccagccttc

SEQ ID NO: 423867 - DNA, 598 bp, Homo sapiens
ggctgacagagaaataggaaacccctttacagaactggcaatcagagctgcagttgaaatagcggaaggtatcgctggggcaccaaggaggaagtgatttcatgtgagcaaggtgctcattattggagacaagggggaaagtgatggtatgatacagcctgtgaaatgaaatattaaaactatatgtgccaatatgggaaaacttccaaaacatgttcatgagtgagacggggaacaaggtgcaaaacctaatatccagtttgatcctccaacaatgactgtaaaaggacaagtcctttctggaaggacaggcaagaaagggtttacagtgattaaactacagggagcagaaagggctggggtaaggagcttgtatgtcttgcttcactcattatccttctgcactggtagaattttcatcctgtccatgaatcacttttccccaaacattttattataaaaatattcatacrtgcagaaaatttaaaataattgtatagtaagcacccatatacccactaactagattctataattaatattttgctatacttgccttatatatctgcctatctatccatccttccatccagccttc

SEQ ID NO: 423868 - DNA, 199 bp, Homo sapiens
gctatgttgcccaggcttgccttgaactcctggcctcaagtgatcctcctgcctcggcctcccaaagcactcggattacaagtgtgagccactgagccagcctttaattttttttaaakactgcaggtataggttcattgcttcactttccaccagcactcactgagctcctactgtgcgccacacagtgtggcaatgt

SEQ ID NO: 423869 - DNA, 569 bp, Homo sapiens
catacaataatacacagtgtataataaagtgtgtgtgtgcaaaatataagtttaaactcttttaagtttagctgggagtggtggcttatacctgtaatcccagcaatttgagaaactgaggtgggaggattgcttgagctcaggagttcgtgaccagccaggacaatatgacaaaaccctgtctctacaaaaaatacaaaaattaaccaggtgtggcagcacacgcctgtagtcccagctacttgggaggctgaggcaagaggattgcttgagccggagaggtcgaggctgcagtgagccgtgattgcaccactgcattccagcctgggcgacagagtgagaccctgtctcacaaaaaataaaaaattttaattttaaaggagatasacaagaaatgagcatgtgtgaaagcacttctgtaaactacatgcactaatgatgccacccattatttagctatgagatcttgggatagttacttaacctctctgtaccaaggtttcctcattcagaaaatagggatagtaataaatgaatccaggtaaaatacttttttaaagtacctacac

SEQ ID NO: 423870 - DNA, 594 bp, Homo sapiens
tctctgcgctgagaatctcatgaggcactggggtgagccgctggtcagatgtgggagtctaagtgatgatccatgtggatgggaggctctgtctgttaaagtgtctccatgtccctggggtttatctgactccacagtatttcccgcaccgcccccaactttttggcagttctcccatctcttgcccacttgaccagactttaatagttccctgtgttttccagacacagccaaatcatcaacaagttcgtgaatagcgtgatcaacacgctgaaaagcactgtatcctccctgctgcagaaggaggtgagtctcccactccttggagcccagatccaggcctggtgggggcaggtgggggaatttgcaggcctggctgtatcctctgagcacttttccttcggaggtgaaagcttctccttaggaggtcagctggagcttcctcctctactaatcagcctggtgggtagcagggkagagcagaggcctgacattagctgaaattgccaggtcccaaacttgagcctctcaccatatccacgcactaccaatatgcttttgtagctaacatcttcaacacaattttacttaaat

SEQ ID NO: 423871 - DNA, 638 bp, Homo sapiens
ggaagtggccaccccaattggccgttagagatcacaggtgtgcataagcctgcttggcccggagttctgccaagggaggttcctgcctccttgtcccactggacagctcttcctgcagccagggatgtgagacaggccctytccctgggcacatgggtacagacttctcaccccatagacagccactactgtcttcctttcttcctccaacctgccgagctctttcccacctgagggcctttgccctcatggttccctctgcctggctccccttccacatttttatactcaagcctggctccatctcctcctctcctcctgggctctgctcaaatgtcgcctgagaccttccctaatcctggtctaatgtggcctccttgctatttccaatcttacagtaagctttttccccttaatacaatttatggttatttggtttcttgtttatttcaccttgttctgattccctcaccagatgataagctgctggggaatagggtgactgttattccctagagtcaagcacagtgcctggcacacagttggcccacagtaaataatggttgggtggatggataaatgaatttttttcaaagtcaaactccttgaaagccagtttcccaggagagcaagggttt

SEQ ID NO: 423872 - DNA, 593 bp, Homo sapiens
tttgtggactggtacctggaacagatacttatcttgtagctgccaccaagaaacactttccagatgggcaccgtagcaggacactgtgctaggacacgctttgagtagtgctgtttcagatgaaaatcacatcacatggggctttgaatttcacagaatcctgtggtcagctggttgctcccctgtgaattatctttcagttgtgtggttgtatatggaggagaaagttgtagtttgtggctcatgtgtcactgactggtgatgttggatgatttctcttttctaacaagcagagagcagcctcaggcacagaacccttgacgggcatggggtcttgccagaatggaattacactgacttgtttccattgcatttattttgtggccacttaatatttttggatrttgattctgattttcctattagagccaagatgtaaagtttctttaatagataatttaggtgcaaaaagtgagttgccttaaaacatagtgtacattatcatgcagctacgagtgaatatatgacaaaaatcatgaaagtggtacaagacaaatttgcagagaactctagtggaaggcaggatagaggag

SEQ ID NO: 423873 - DNA, 456 bp, Homo sapiens
ggccaagagtggactcaggtattgagttagtgccgtggtcccycccaccaatgccagccagcgaggctgtgctccatcagtcctattgaaggcttcctttaacatgcatgtcggcccggtgtggaggtgcacactgtactcccaagtactaggaaggctgaggtgggatgattgtttgagcccaggagtttgaggctgtagtgcactatgattgcccccgtgaatagccactgcactccagcctggaaaacagagcaaaactctttcaaaaaaaaaaaaaaaagagagagagagagaaaagaaaaaatatgtttaagtgcaaagagttgatttaaagacaaatcttaagggatggaaggataggttttaaatagggaaggctaaaaatcatagggatggttggcaaatgacagacagctggagacctctggtgtgatctttctcctcccccccacc

SEQ ID NO: 423874 - DNA, 556 bp, Homo sapiens
acaattaaatgttgcttatattgcatataaaacataaatttatataatgatatacatgtacatatgtgtgtgtggcgtgtgtgtgtgtgcatatccctgtcgacaccaccagaatatgttttaatgaaaccgtcatgttttaatgaaaacagaaagccttctgtttcatgtcgtgacgctggaatgaaaacagtctctcccagcatctagctcagtgcctggcacatcatgaaagcttaataaatacggctagaattaatgaatgagtttctttcccytcccctgtcctgtatttttaataaggctgttgagcctggggcctctgccctctgctggtcactatcatcacacagcctcactcaggaggcccctggccccgttctgcctggagtgttggcaggtggcaagggttgtaagctcctgcccagtcccgtgggcagttctaggatcttacccccagcccctgcgattctgaggggacgtgtcagtcattcagcctccagccagtccctggggatgtctgagggaggaagtaaggctcaagtcccctgaagtg

SEQ ID NO: 423875 - DNA, 556 bp, Homo sapiens
acaattaaatgttgcttatattgcatataaaacataaatttatataatgatatacatgtacatatgtgtgtgtggcgtgtgtgtgtgtgcatatccctgtcgacaccaccagaatatgttttaatgaaaccgtcatgttttaatgaaaacagaaagccttctgtttcatgtcgtgacgctggaatgaaaacagtctctcccagcatctagctcagtgcctggcacatcatgaaagcttaataaatacggctagaattaatgaatgagtttctttcccctcccctgtcctgtatttttaataaggctgttgagcctggggcctctgccctctgctggtcactatcatcacacagyctcactcaggaggcccctggccccgttctgcctggagtgttggcaggtggcaagggttgtaagctcctgcccagtcccgtgggcagttctaggatcttacccccagcccctgcgattctgaggggacgtgtcagtcattcagcctccagccagtccctggggatgtctgagggaggaagtaaggctcaagtcccctgaagtg

SEQ ID NO: 423876 - DNA, 513 bp, Homo sapiens
ctttcttttctctgtctctcccacccttcctctttttatttgcccccactcagggtgcagatacaggttttgtaaggctgaagtttaaatgacagtcaggggccagaggaagaggaagatattattataagtagcaatgaagtaaacatttatctaaaattaaaaaaaaataaatcaccagaaattgcaaatgtttaaatgttgaaagtccttcaacattattcaataccaaaaaagttacaccatgttttttaatgagctgctttatactttttcctacacgtttggctgtattccctttgattgccttttgatatgacaatggattttatatataatctttaatagaaaacagaaagataatttagtttttgggctagcatggttgatcaaaatctattttttattggctgaaatgcgtaaaatgcaaaaacccacctcatacacaagcgcacccatttttcttttagtttttagtactgcaacaagmacatgccctacaaacacagaaat

SEQ ID NO: 423877 - DNA, 305 bp, Homo sapiens
tctaagaaggtattagaacagtggtcttggctgagtcttatgggactagaatcaggaatttggagcttgcgtttctgctactaatctatgagtcatttggagaayctcattcttctctggactgcagtgtcctcacctataaaatgtgtataagtgtactggggtggtggggagggggttagactgtatcagccttcttctacagggggctcataagcccaatcaatggtatttgtagtccaacctcctgaagctgtgaaaaaaactttgtgtgtacacatatttttctgggaagaaggtccatt

SEQ ID NO: 423878 - DNA, 305 bp, Homo sapiens
tctaagaaggtattagaacagtggtcttggctgagtcttatgggactagaatcaggaatttggagcttgcgtttctgctactaatctatgagtcatttggagaacctcattcttctctggactgcagtgtcctcacctataaaatgtgtataagtgtactggggtggtggggagggggttagactgtatcagccttcttctayagggggctcataagcccaatcaatggtatttgtagtccaacctcctgaagctgtgaaaaaaactttgtgtgtacacatatttttctgggaagaaggtccatt

SEQ ID NO: 423879 - DNA, 491 bp, Homo sapiens
aatataagaaatgagtttaagggaagataaaatgtaataggtggtgatgcggccaggaaaaacaaaaagcctaaataatacaattaacatttttttttttcctgtgaagcagccacaaagtaaaccaggaatttcctctaataccaaaccatcagatgggttttcctgggagttacttcccacacctgaacaaaatttcagctgatcccaagtgacacagtgtgtaacgatatcccgctatgaggagggcccatgattgcaggactcttggcagtactagtgtgagttgaaacaatgaatgaatttgccagatctgatcaacagtttcaaggaagagtggactcactaatcttygagatctgggaaaaccttgagtggggccttcgtgttcctatctttctgagttgaagaaggaactcatccttcatctccaagtcaatggtaccagtggcttctattcccaggtatgtcaaattcctgccaacaaagct

SEQ ID NO: 423880 - DNA, 575 bp, Homo sapiens
catgtgagtctccaatttaataggggttaaaaataatcttcaaggtcatcatattggtagcacttttttcttatcagacactgggagtaataatttatgaagcatttttgagttcacttgcacatctgctcctttggaccagggaaagctctatgagaaacacattctccccatgttcttatagcacaacagggttcatattttattgatgggtttcttaaaataatggtaataaaaatataattttaggcttttccagaagacacctgattactatccagtagccacttgctcatccttttctcttgcctgcagagtcctccccttattatagatatggaaaatgccagataattttttctcaagtcatccttgcaaataagttcaggtcatgtgaccataacccagccaatgagtactgagggagaagtcttcacagaaaatccctrtagaaagattttattttctagtaagaacctgatgtttgagaagtgattccttacctctctgtctgctggctgtacagccagttgtgtgagaatatgtgctcataattgtggcagccaccttgtgac

SEQ ID NO: 423881 - DNA, 412 bp, Homo sapiens
ccttattaagtcagtcctttgctaattgaatktttaaaatctggggcctactgggtataacatttattgagacaaagtaattaacattttctttcttgatgcatttctttcaatattatgcttaaaacctcaacacatagtagaatgcttagcatataataggagttcataatagctattaaaaacaaagtattaagtaagagaaatgtgttctagaactggcagtcttcttgaaccaagaaaggctcaagggaaacaaaaggaatctcaactatgtacctcagatttctgagtccagaagttcattttcagtggcagtacaaatgtgggacatttttggttaaaatacgtattttactgtataggtccactgtgattttaaatgcccttatgttgcttaacagacattact

SEQ ID NO: 423882 - DNA, 537 bp, Homo sapiens
aaaaggctccatagctctgcttttgagccatggaagctgcctgcccctcccttttcctggaaggtcccatgactagtttcctaataccaactagtcaagaatatgtagggctaaagggacattaatattaacataagtgatacagtgaggaccagaagccttggatgtaagggagaacacgtgagctttccgtcagagaagactaggttcaaataccagtcctccaaggaaagccagctccttgctggggaccttgggctagtgcttagtatctgatttcttcatctggaaaatagctataataatggaacccatcttagagggttggttaacaytatatgaaaaaatgaaagttcaatgcacagtctgtgatctgatataggtcaggatgcaatattgttaatactattagctactataaatattattggtaagtaataatttcctataattaatataataaacaatattgtatcaaaattatctaaatcattaatactgataagcaataattatttactggtaattatagatatt

SEQ ID NO: 423883 - DNA, 601 bp, Homo sapiens
gaggaaggtgctgcttgaacaagaaggtgcccttctgcyaagagacaagccttttccagcttgaaaactattattttaccattctatattctgagcaggaaatgaatggacagactgtatgtagcgatgtgatatacaaacagggatggcagctacaagaatgtggaagtgtggaaggaagaaagaaaggaaaaaaggaaggagggggagagaagcagaaaggaagagaaaaataagggaggaagaaagaaaaggaaggaaagaaaggaagaaaaaagaagggaggaaggaagaagaagagaagcatggagatagggaagaaagaaggaagaaaggcaaaaagaaagggaaaagatgttctaagggctattaaacctatgggaaaggaaatttttatcagcagaatccagagataatataaatcagcaagaagaaggatagattgattttgaaattcaacaaatatttatcatgtgcttgctacattctagggcaggggttgaaatctcaaacacacagaggagccaggcaagatggtgctgatataaaagattcagggttctctcggtcctctatttttgcaatttgaggtaaacagttt

SEQ ID NO: 423884 - DNA, 512 bp, Homo sapiens
tatcaaggaaagttttttcatgagattgcagcaattcagtcacacctgaaggctccacttgtaattccagtcctgttgctatttctaccacatctgcaattacttccttcactgaagtcttgaaccccttgaagtcatctataaaggttggagtcaacttcttctaaactcctgttaacattgatattttgacctcctcccatgagtcatgaatgttcttaatggcatctagaatggtgagtctttttcagaaggttttcaatttattttgcacagatctatcaaaaaagtcattatctatggcagctgtaaccttaaaaatgtatttcctagatagtaagacttataaatcaaaattactccttgatccatgggctacagaacggaygctgtgttagcagacaggaaaacaacattcagctccttgtaagtctccatcagagctcttgggtgaccagatgcattgttactgattttgaaacaaatctttttatctgaccagtaaatctcaa

SEQ ID NO: 423885 - DNA, 671 bp, Homo sapiens
ccttcccaactggtacacttcttatttccttattttgtccttctgcattagggagaacttccagtacaacattgaaaaggagtggtgagaggggatatccttgtcttgttcctgatcttagtggtaaagtttctagtatcttaacattaaatttaatgttggctgtwaggtttttttgtggatattctttatcaagttgaggaagttcccacttttcctagtttactgagagattttatcataaattggtattgaattttgtcaaatgccatttctgtggctatttatataatcatgtgattttttagcctattgatgtgatggattatattagctgatttttgaatgttcaaccagcttgcacacatgaaataattcccacttggtcgttgtgtataattctcattatacattattggatttcacttggtaatattttgtttaggatttttccatctatgttcataagagttatcagcctatagttttcttttcttgtaatatttgtctggttttggtgttaagataatggtggcttcatagaatgaggaagttttctctctgcttataatcttctgaaagagattgtagagtattggtataattccttccttaaatatttgctagtatgtatacatctttaattttactgttcattcgaatcatgtcat

SEQ ID NO: 423886 - DNA, 550 bp, Homo sapiens
tgtgggcatgatcaggtcacagggtattatattttccctgtgggctcatcatggccgggcactcctaatcactgctaccaagcttactaacaataacaaaaaggaacgctctatcctgttataagtgctgttacatggctttatcttattgagcaagtgtctctaggctaatcactggactgtggtcaccttagaacaactctctggtgaatgctgtgatgttcacccaaatctccattcaggaattgagaacttattccccatctgtggaaaggctacggaagatgccccttaggtcagatctcctgccaaggacagcctgcacccagtcactgatcactgtggggacataaaggcccrggcccatcaccccaactaaagggctacttaagctcctgagatccccaaaggctgagacctctgttggaacctcatggcagctcaatttctgtttctgcccaatcctgctttcttttcttctgcagatatggatcccaggagctatccaaaggtttcctggggtagaatcaaatcactgatccttgttttt

SEQ ID NO: 423887 - DNA, 471 bp, Homo sapiens
cttaaatatgttccaaaaactcacagtggaaatattgtttggatgtttgtatttactttccattaaaaccaacagcataacattacatttattctttaaaggaatttttatgtgaatcttagcaaatatggtccatttacgttgcttaggcttacactgctaactaagggataatgtttagagactacagagcagtgattctcaaccctggctgtacctaagaatcaccagggaagctttaaaaatcatgatacccacaccacatcctagaccagttaaatcatggtctctgctggaagcccaggcattttttttaaagcttcctaggtgatttcaatgtacagtcaaagttgaaaactgctarcataacagactgagcagttactgtctccattagcctatcctgtttatgtatcattatttctcagtggaacttttgattaatgctgggttgcaatcaaatattatgcc

SEQ ID NO: 423888 - DNA, 581 bp, Homo sapiens
gggtgacgcaaaccttaggaaaacaggttcacaactgtaatttgatcagaaaatcaaattccagggtttccccaygctcggtaaatgttctcaattttccaaattctccacattttatgacttttcattgagaattgagtgtagatactgatctagcagccatttgtgattctccattatcagaggtagatttttcaagattctctacatactaagcaggaagattagcacaaatattttatgtttacaaacattaaggaagttccctttagccaaaaaacatatgaaccaaccgtaataccctaccctataagcagttgcacaatgtgatctgaggataaaataaaatgttaatgatgcagtgctttatgtctatgacatagtaaaagccataaatgtctgttcttgtttcacttcattttcattctaacatattcccgccattgtctctttgtaaccccaggtgagacaggaaggaagagccataactggttcaatttttcaaaagtgagatttaaaacatcagaatcagcttcaaattatgagtctcacagcaacaatttgggatgtcattgatttgg

SEQ ID NO: 423889 - DNA, 581 bp, Homo sapiens
gggtgacgcaaaccttaggaaaacaggttcacaactgtaatttgatcagaaaatcaaattccagggtttccccacgctcggtaaatgttctcaattttccaaattctccacattttatgacttttcattgagaattgagtgtagatactgatctagcagccatttgtgattctccattatcagaggtagatttttcaagattctctacatactaagcaggaagattagcacaaatattttatgtttacaaacattaaggaagttccctttagccaaaaaacatatgaaccaaccgtaataccctaccctataagcagttgcacaatgtgatctgaggataaaataaaatgttaatgatgcagtgctttatgtctatgacatagtaaaagccataaatgtctgttcttgtttcacttyattttcattctaacatattcccgccattgtctctttgtaaccccaggtgagacaggaaggaagagccataactggttcaatttttcaaaagtgagatttaaaacatcagaatcagcttcaaattatgagtctcacagcaacaatttgggatgtcattgatttgg

SEQ ID NO: 423890 - DNA, 625 bp, Homo sapiens
taatgagttttaagaataccccgaaggccagaatggctagagtgggttatgaggaggagaagagaaggtgaggtgagcaaggtgatagaaagcttgatcaagtggagtcctgtaggctgttaaaattgttgtggcttttattctggtgaaatgaaaaaccagcggagcattttgagyagttgattgatttgacagcatcactggggctggtgattgagaaaagtgaaaggaggccagaaccccaatttgcaggctactgcaataacacaggaaaaagaggatggtggctagtactgggatggtatcactgaagttagtgagaagtgattagattctgaataataatgataaacaatttgagttaaaaaatccaagatatgtaaatcataatttgattttgataatagcaatgtttatttgatatagcaagagttcttgatattaaaacaatgcttttgacaaaataatgctgaaagtacctattctatgttcacaattctactggaaatgccatgaatatgaatattatgcatatggaacaccaaatatcagcattaaattctttggcaatatatttttgtctttcctagcatatctcaaaaatcaagatgaatccttaagcttt

SEQ ID NO: 423891 - DNA, 595 bp, Homo sapiens
gcctaggtgtgttagaccctttcctgctttcttgaattttgcttcactctttttccctccctctgtctcatgaaccccagaaggaatgaaattgtggtccatgtatgaattcaatgggcagacatatttgtttggtttccactgcggggaaaactgtacagtgtgcatctcatttgaactcgtggtcaatatttaacatttggaaatttcacataagaatccctatttccaacttctctgaaaatttgaaagatctggccacactgggcccacatttgtggcaaacaatgagttggagtccttataaaattatgctgagtgaaagaaacaagttacaaaagaccaggtattgtatgatttcatgtatatgaaatatccagaataggcaaatctgtagaggtgatggattagtggtttcccagggctgggcatttggagggaaatggggagtgactgctaaagggcacacgggatttcttttggggaataagaatgttctaaaagcgattgtgataatgrttacacaaatctgtcactatactaaaaataatggaattgcacatattaaatgtgtaaattacatggtatgtgaatt

SEQ ID NO: 423892 - DNA, 595 bp, Homo sapiens
gcctaggtgtgttagaccctttcctgctttcttgaattttgcttcactctttttccctccctctgtctcatgaaccccagaaggaatgaaattgtggtccatgtatgaattcaatgggcagacatatttgtttggtttccactgcggggaaaactgtacagtgtgcatctcatttgaactcgtggtcaatatttaacatttggaaatttcacataagaatccctatttccaacttctctgaaaatttgaaagatctggccacactgggcccacatttgtggcaaacaatgagttggagtccttataaaattatgctgagtgaaagaaacaagttacaaaagaccaggtattgtatgatttcatgtatatgaaatatccagaataggcaaatctgtagaggtgatggattagtggtttcccagggctgggcatttggagggaaatggggagtgactgctaaagggcacacgggatttcttttggggaataagaatgttctaaaagcgattgtgataatggttacayaaatctgtcactatactaaaaataatggaattgcacatattaaatgtgtaaattacatggtatgtgaatt

SEQ ID NO: 423893 - DNA, 570 bp, Homo sapiens
aatggttttccattgcttttagaactgaaattctcactcaaatcctaaagtttctggataacttagttccttcttatctgatcaacttcttcaaatgttgtttccacctcattcactaatctctagccatgtgccattacctttcaatttcttgggcacagtagataaatgcttttacacctaaggcttctgcagccattgttttattaaattaaatgtcaactccttcaagaagacttccttttctaattctctgtctcagccacttgtgtcctttgyagtacttatggcaagttgaaactgcctcatttgtctgtttccttatttttttaactgcctctgcaactgtgatatgcatcctgaaggcagagaccaaatagaatctattcattgcttaaactttgcccaaagcctgaagcaaagtattctctcaagactctcaataaatatatctggaataaatcagcagataaataaataattgcttgagcagtttgctattttgcctgggtaatattttttctagtagactgaaataatgtctctatatctctgactttcaaaccataa

SEQ ID NO: 423894 - DNA, 621 bp, Homo sapiens
ctgtctttgcaactgtaccccttttgaataatataaatatcatggttactcacttggcagagtggacatccctaagaaattcaatcagacattttgaggttggtgagagagggagagttgacggagttggaggaagaagaagtcgtgacaccatgactgagaactctgtctgatgacccagggtcataaaatttatcattataaatgwcaaataaaataaatgataattaatcaataaaaaatgacacatgataaataaataaataaataataaaattaccatctgtgcagggcaggctgaaaatgctgagaaggtaaaactctctaggagaatccttcagccagtgactgatgggagttggtggatactcaactcccttgcctcttgagccagatgactgaaacgtatgctctatactgtcccccagagatgcccagttgaactgggctccagttacccacagtggtaatttgcttaacagcataccttctattgactgctttcccttacctgtatcatttttcctttcttttcccagtgttttgtgagagcatcttccaaataaattacttgtactcacattcttgtctcgtgaccagtttctgggagaatctaaactt

SEQ ID NO: 423895 - DNA, 621 bp, Homo sapiens
ctgtctttgcaactgtaccccttttgaataatataaatatcatggttactcacttggcagagtggacatccctaagaaattcaatcagacattttgaggttggtgagagagggagagttgacggagttggaggaagaagaagtcgtgacaccatgactgagaactctgtctgatgacccagggtcataaaatttatcattataaatgtcaaataaaataaatgataattaatcaataaaaaatgacacatgataaataaataaataaataataaaattaccatctgtgcagggcaggctgaaaatgctgagaaggtaaaactctctaggagaatccttcagccagtgactgatgggagttggtggatactcaactcccttgcctcttgagccagatgactgaaacgtatgctctatactgtcccccagagatgcccagttgaactgggctccagttacccacagtggtaatttgcttaacagcataccttctrttgactgctttcccttacctgtatcatttttcctttcttttcccagtgttttgtgagagcatcttccaaataaattacttgtactcacattcttgtctcgtgaccagtttctgggagaatctaaactt

SEQ ID NO: 423896 - DNA, 559 bp, Homo sapiens
gctattgcagcagtctaggcaagagatgatggtggcacaggccagcaaggtaccagtgtgggtggaaggaaattatacaaatctggatatatattgaagaaaggttcaatgggatttcctggctttcttcatttttggaataatgtagctactctggcattagtccaagtcactagtagtcattgaagaacaaagaataactggtggaaacagcttcctccagtgaatgttattgataagggatcaatgtgaggcacaggtcttaatctcttgttccacctccaatcctggcgatctttccctctcatgactcatgctcaaaatttgtccagttcctctctatacgtctcattcataaatgatgttggtcaccaccttctcattcagccactktcaatacttctgaaaccaattggaatgtaagtaaatacatgcattcctaggtaggtaggtaggtaggtaggtaggtaggtaggtaggtagatagataggtagatgcatagattcccaagcaaccaaaaatatagatacaatggtctctgcatttgattatgtgctt

SEQ ID NO: 423897 - DNA, 559 bp, Homo sapiens
gctattgcagcagtctaggcaagagatgatggtggcacaggccagcaaggtaccagtgtgggtggaaggaaattatacaaatctggatatatattgaagaaaggttcaatgggatttcctggctttcttcatttttggaataatgtagctactctggcattagtccaagtcactagtagtcattgaagaacaaagaataactggtggaaacagcttcctccagtgaatgttattgataagggatcaatgtgaggcacaggtcttaatctcttgttccacctccaatcctggcgatctttccctctcatgactcatgctcaaaatttgtccagttcctctctatacgtctcattcataaatgatgttggtcaccaccttctcattcagccactgtcaatacttctgaaaccaattggaatgtaagtaaatacatgcattcctargtaggtaggtaggtaggtaggtaggtaggtaggtaggtagatagataggtagatgcatagattcccaagcaaccaaaaatatagatacaatggtctctgcatttgattatgtgctt

SEQ ID NO: 423898 - DNA, 526 bp, Homo sapiens
aaagatcagcaggagccagatcacgaagarcatgtaccattcaaactttatcccagggacagcagagcaccagcgaaaggttttaagtaggaaagaaaatactattctggccacaagatgaaaaatagaatgtaattgagaaagggagactggtaggtggaagaaaggcaaggctattgtcattttaagatgtttacttgcaaattgtcttaatggtctttttcttagacaaccagatgtcaatctggcatcttagtgtttgaagtctggaatgggcacaggagagtagagtaagaagaatggagtcttcccatgatggtgggtgaagaggggtgggatagagtagcctcctcaagggattgatgcttggtccagaatcagaggtgaccataagaatttaggatttatctgaaaccttataagccatttcaacaaatatttagcaataaactttgtccaattctgtaatctcaagaaagtcatctgagcttaaaaacaattggctgagatggatgtgcattgcagc

SEQ ID NO: 423899 - DNA, 621 bp, Homo sapiens
cgttgctgtcagctgccattattataaatagcaattgctctgcttctccctgggggaatgtaggcatcattgtttggtttttgtttagattaagaggttttttccaatagctttttacaaytagatctgaaaaatgaaactagtagcacagtgatgctgcttccatttatcattccagaagcttggatatgttgaaagtcaaaaccagagaaggaggttcctgcttctttcctatcatcaggtttgagtgccctttctcaatgaacaattaacaaagaagtcagctctatttaatgttctgtgttcactccagaatttcaggaaagtaagaagcaaggagagtcaaaagaatcctaagtcactgatgtcttcatcaacccaatcatcagtgacctctaacattagctgattttctcaataaacattgtttatctttctcactatggttaaatgagattatgaatacaaaccaaatcctctgagtctagattttgaaatgtggccataagggccaagactgactgatggtttgtaggtatatgagggtaaaattagatctgctggctccatctgaaagaggcaattttgagagaaaattatagtggcaggtacaggacaagg

SEQ ID NO: 423900 - DNA, 621 bp, Homo sapiens
cgttgctgtcagctgccattattataaatagcaattgctctgcttctccctgggggaatgtaggcatcattgtttggtttttgtttagattaagaggttttttccaatagctttttacaactagatctgaaaaatgaaactagtagcacagtgatgctgcttccatttatcattccagaagcttggatatgttgaaagtcaaaaccagagaaggaggttcctgcttctttcctatcatcaggtttgagtgccctttctcaatgaacaattaacaaagaagtcagctctatttaatgttctgtgttcactccagaatttcaggaaagtaagaagcaaggagagtcaaaagaatcctaagtcactgatgtcttcatcaacccaatcatcagtgacctctaacattagctgattttctcaataaacattgtttatctttctcactatggttaaatgagattatgaatacaaaccaaatcctctgagtctagattttgaaatgtggccataagggccaagactgactgatggtttgtaggtatatgagggtaaaattagatctgctgrctccatctgaaagaggcaattttgagagaaaattatagtggcaggtacaggacaagg

SEQ ID NO: 423901 - DNA, 545 bp, Homo sapiens
aggtaagatatatgtacaaaatattcattggagtttgaagacttattataagggaaaggatgtggaaagatccattagtaatttggatatattgggttaaataaaaggtattagtaaacttgattttccctgtgccttttgctttttatacggtggctataagagatttcaaaattacaaatgtggcttgtattgtgtatctattggacagtgctggtgtagcagatcaattattccatgtatagatagagaaaaataaatgtcatatgtttgatttggttactgcatgatttatcacataattttgtcctatcttgtattattatatatctttcttgtttcttgatcatcttccagccatattggaaactttcagaagataaatataaaatcttaaacttattctgcagcccatattgtacctaggacagtgctaggcacatgataagtgtttaatyaatgtttgttaatggagtaaaactcgatggtaggacattttcaaaagatttctttgggggctagtctgagagttagaacacaggtta

SEQ ID NO: 423902 - DNA, 572 bp, Homo sapiens
agcattaaaatgtaggtggcatagctttgaatagtagttgccattttaacctctactggcctacttgtaccacctaaaatgtggcttctgcaactactctaatttattgcattctttttcataaaaaaacttggacatagcaagcaaggtgtcagcatacaaggcaacaatgcattgagccaagatcttacaatcttattacaagataaagagtagagtgcctcttgcttaargatgttctgtagatggccccaaatgctaagagcaatttgattaataatcccatctgttttactccttgaatttgtttccagggaaaatgtgcctttgatcactaggcgctgacgagggtataacctggcccgaggtgtttccctggagtgaaatatgcagcacttctcaactcccaattccatttaatttattgtttgtttttgctcaagaagagcctgtttttacagctgaacagatttggaagctggcttggggtgtttcatttccttacatgaagagttataatgtaggggatggtaaccagctgtttccaccttcactaaagacagagcaaacaa

SEQ ID NO: 423903 - DNA, 570 bp, Homo sapiens
caatcagactagacacacttcaagtgctcaataggccatgtggctagtggctgccctactggacagtatatgtctatattcccagtgaagaagaggctgggccacagccatggtcattgcccatggagacttgcccactctcagtgcgcacagacagaatacattgaggttatctcacattagtgctagatgggccatggagttcagattatcccattcttaatttgtagatgtggggatgattacatttccgggaggtggttgtcttgtcctaagtcatacattggtatgctcaatggtttcaactgcatccaaactttggtttctgaactgtgtagtgcttaaggacctgatgcatgaatcaaactttcagctatcgtatctccaaggcttcctcatctattggctgaataactgggctaatygttaaatttcttggtgcctcaatttcctcatatataaaatgagaaagagtatagtatctacctaactgaggtgtccatatgatgatgttcatttcaaatacattacaaaatgcttagaataaagcacagagtaagtgttcaataa

SEQ ID NO: 423904 - DNA, 492 bp, Homo sapiens
ttaaccttactttcctgattttaaattgaggcctttcttcaaaatactgctttttctaaattctatttttatgcattcttcttcatgatgaccttgtgagtggaaaaacaactccaactattttttctctgctctcacaccaatcaacacagaagacatctgtgaccaaatgtgtatgggtttttctccacacaccaagcaagcartcaattctgtagcagacgccaacggggtatcctccaatttaattttgacactgtctacttgaagatagcgtcagaatccacaggttgagggctcggtctcacaaggctgcccctccttcagatgatagtctcaagtctaggcctctgaatgtctggcccaccagcttcaagttggggttccacaatacctcccttgggtttaattaaattgctggagcagctcatagaactcagtgaaacatctacttacatttaccagtttattataaaggtattacaaaggaca

SEQ ID NO: 423905 - DNA, 492 bp, Homo sapiens
ttaaccttactttcctgattttaaattgaggcctttcttcaaaatactgctttttctaaattctatttttatgcattcttcttcatgatgaccttgtgagtggaaaaacaactccaactattttttctctgctctcacaccaatcaacacagaagacatctgtgaccaaatgtgtatgggtttttctccacacaccaagcaagcagtcaattctgtagcagacgccaacggggtatcctccaatttaattttgacactrtctacttgaagatagcgtcagaatccacaggttgagggctcggtctcacaaggctgcccctccttcagatgatagtctcaagtctaggcctctgaatgtctggcccaccagcttcaagttggggttccacaatacctcccttgggtttaattaaattgctggagcagctcatagaactcagtgaaacatctacttacatttaccagtttattataaaggtattacaaaggaca

SEQ ID NO: 423906 - DNA, 492 bp, Homo sapiens
ttaaccttactttcctgattttaaattgaggcctttcttcaaaatactgctttttctaaattctatttttatgcattcttcttcatgatgaccttgtgagtggaaaaacaactccaactattttttctctgctctcacaccaatcaacacagaagacatctgtgaccaaatgtgtatgggtttttctccacacaccaagcaagcagtcaattctgtagcagacgccaacggggtatcctccaatttaattttgacactgtctacttgaagatagcgtcagaatccacaggttgagggctcrgtctcacaaggctgcccctccttcagatgatagtctcaagtctaggcctctgaatgtctggcccaccagcttcaagttggggttccacaatacctcccttgggtttaattaaattgctggagcagctcatagaactcagtgaaacatctacttacatttaccagtttattataaaggtattacaaaggaca

SEQ ID NO: 423907 - DNA, 449 bp, Homo sapiens
tgtccacctcattgactgcttcagaaggcgccaccagcttcctcctggtgtttgtagcgagtgcctgtgctggcagctgttctatgtaacaactgtctggttctatgtcttgtagcccagggagttagaaaatgtaaagtattcaaaatcttctaaggaatcaacactttcctgtttgaagacaaccttggaagctggtgtggagaaggcytgaatggtgagtagcacattcctggggcccccacagcacatgcctcagggagcttggcctttccctgcacacagaccttgccaagaccctctgccagagctgtggccgggtgggatgtgtcatgggagctgaaagcaaagcatctgatggcaggaaatgcctgcagtgactgaggcctgtgcacatctgctctacatctcaacacctcatgaaggccagggctttgagggaaatagcg

SEQ ID NO: 423908 - DNA, 569 bp, Homo sapiens
ttgtgctacttatactggttcataatctggaggcaaggttcgactgcagccgccccgtcagcctgtgctaggcatggtgtcttcacaggaggcaaatccagagcctggctgtggggaaagtgaccactctgccctgaccccgatcagttaaggagctgtgcaataaccttcctagtacctgagtgagtgtgtaacttattgggttggcsaagcctggtaaagctgttggaatgagtatgtgattctttttaagtatgaaaataaagatatatgtacagacttgtattttttctctggtggcattcctttaggaatgctgtgtgtctgtccggcaccccggtaggcctgattgggtttctagtcctccttaaccacttatctcccatatgagagtgtgaaaaataggaacacgtgctctacctccatttagggatttgcttgggatacagaagaggccatgtgtctcagagctgttaagggcttatttttttaaaacattggagtcatagcatgtgtgtaaactttaaatatgcaaataaataagtatctatgtctgtgtggagtgctgt

SEQ ID NO: 423909 - DNA, 532 bp, Homo sapiens
tcctagaatgtaaactactctggcatatgtactacaagcatttgaaaaaaaaagtgtgttctgtttttgttgtgaggagtgttttataaatgccacttatatttctttcattcataagacatttttgttaggtattctatgtcttgtcatttaaaatgtttctaccaataagaacctattatcaggctgggcacggtggttcacgcctgtaatmccggtacttatgggaggccaaggcaggtggatcacctgaggtcaggagttcgagaccagccaggccaacatggtaaaacccagtctctacttaaaatacaacaattagctgggcatggtggcacatgcctgtaaccccagctacttgagaggctggggcaggagaatagcttgaacccaggaggcagaggagacagagggtgcagtgagccgagattgcgccattgcactccagcctgggtgacagagtgagactgcgtctcaaaaacaaacaaaacaaacaataacaacaaacaaacaaacaaaaaactgttatcag

SEQ ID NO: 423910 - DNA, 373 bp, Homo sapiens
gccgctcctcgcgcccccggcgccgggcgccatggcccgagccgaaggcgcctctggccccggagcgcccgcggcctctgcgcttggcgcggccgcccaagtaggagaagaaggcgcagcccaggaacactcggaagcagcaggtcgccccgaacacgaagccgcagccgcggscctgctccgtgcgcttctgcagcaggaagttgagcacccacgaggggctgcgcaccgagaagaccaggaacaccacgaggggcaggtgggcgctcagcgcgccagccttgagcggcccgggccgccacacgatgcccccaacgcgcggcgccgcgtagtaggcgtcgtcctcgtcgctcgagtccgtgtcccagtcagc

SEQ ID NO: 423911 - DNA, 523 bp, Homo sapiens
ggttccagtaggagttatgtaacatctttttttttttttttttgagacagaaacactgatgtgtgaacataagctttcattcctcttgaattgaatttcattcctcttgaatatctagaattcggttttttgagtcatatggaaaatataggtttaactttataggaaccgccaaaatgcttgtttatttttaattttttwaaaatagagatagggtcacactaggttgtactatgttgtccagactggtcttgaactcctggactcaagtgatcctcctgcctccacgccccaaaatgctaggattatagtggtgtgagccactgcactggccccagattgttttttcaagtggatgtatcattgtgcatccccgccagcagcaaatgaaagttccagctgccctacatccttgtcatctttgatattgtcaggttttttctcgattttttttgctttttagttttgtctttgcaatagctgtatcatactgtggctttaatttgcaattccctaatgacta

SEQ ID NO: 423912 - DNA, 523 bp, Homo sapiens
ggttccagtaggagttatgtaacatctttttttttttttttttgagacagaaacactgatgtgtgaacataagctttcattcctcttgaattgaatttcattcctcttgaatatctagaattcggttttttgagtcatatggaaaatataggtttaactttataggaaccgccaaaatgcttgtttatttttaattttttaaaaatagagatagggtcacactaggttgtactatgttgtccagactggtcttgaactcctggactcaagtgatcctcctgcctccacgccccaaaatgctaggattatagtggtgtgagccactgcactggccccagattgttttttcaagtggatgtatcattgtgcatccccgccagcagcaaatgaragttccagctgccctacatccttgtcatctttgatattgtcaggttttttctcgattttttttgctttttagttttgtctttgcaatagctgtatcatactgtggctttaatttgcaattccctaatgacta

SEQ ID NO: 423913 - DNA, 458 bp, Homo sapiens
acagccctcaggagaccctgagaacatgtcctcaaggtggtcagggctcagcctagttttatacattttagggagacatgagacatcaatcaaatacatgtaagctatacattggattggtccagaaaggtggggcaatttgaagcagggagggcctccaggttwtcagtagatttaaaaatcttccgattggcaattggttgaaagagcaattatcaataaaaaggaatatctgggttacgataaggggttgtggagaccaaagttttatcatgcagatgaaacctccaggtaacaggcttcagagagaatagaccataatgtttcttatcagacttaaggtctatgtcaatattaaatgctggtctgctttttctgaatttcaaaagggaggagggtatcgtaaggcctgcctgacccttccttcctatcatggcctgagccagtttttcaggtta

SEQ ID NO: 423914 - DNA, 577 bp, Homo sapiens
ttgtcttgcaaaatagactatatacttcctaaaggtaaggagtctattctatttttctctcatctaaacttaggaagaacctgacacatgaaagatactcgggaaaatatttgttgaactgagctactctccctttcagaccctttcttatcttccctgttctactcttccaattttgcagagaaactaaagcccactgaagttcagagaatttcccaagctggtgaatggctgagccatgactttaaactcaagtattgctccaagtctagttcttttttttcttttaatcttgtttttccyactaatggcctatcctaatcttgaagtgatatatatagaagcttctagcattatgcacatgctgtgaatgtttgagaccttgggatccttaatttgtcaaatgtttggaagaaaaatatactgctctaattatagaatgcagatggctctttgaaaacttacaaactatgtcatttagcaaagtagaacataagagaaacatgctttataaagtggccttattttcttaaagggacaatttttgtgaatcttacttcaaaagacataaacagga

SEQ ID NO: 423915 - DNA, 556 bp, Homo sapiens
acttgaacaaaaaaaaagagacagtgtcatttgaagaaatggtattataaaaatgtcaattctctgtaactcgatttataaattcaacaatcattccagtaaaaatacaaaaacattttttggagctagacaagtttattataaagcttatttggccaatcaaagaagcaaaaaccatcaggaaaacccttaaaaaaaaaraataatggtggaatgggaaatagccagtcctaccagatattaaaacatatataaagcctttccaataaaacaatgtgatattggtgcatgggtggatatagagaacaatgaatcagaagagaaatccagaaattaatccaattggataaacaaatttagtacacacaaaaaaatcagtattttaactcaattgggtaaaaagggatgttttcataagtgatgttcaaataattggattactctatggaaaaatataaagttagatataattctcaaactgtgtgcaatgatgatttccaaatggtcaaagatttacatgtaatgaaaaaaatgaaacaatacaaatattaatata

SEQ ID NO: 423916 - DNA, 490 bp, Homo sapiens
aaacaatacaaatattaatataaggaaacattgatgaatctctctataaattatgataaaggtttcctaataataattcaaagtccgcatgcaaaaaaggaaaggactctgaatttagttacttaaaaataaacttttgcrctataagcaaactaaaaatgtaaattacaaaacaggaaaaaaatatgtgcaatttatatacccttaagacagaaaaagactctaaaaaaaagttcaacaattctatgagaaaaacaagcaatggatatgaacagatggttcacagtaaaaatacaaatatactttaacataatataaggtgctcaaactggactcataaataagacgctagttaaaaatcacttggaaaggagagaatcaatagcagatctgtgactccctgcctctcactctgggaggattaaccttaaacagatctccttttaaactttctaaagcttttaccaagatacaccaggtttgtctacca

SEQ ID NO: 423917 - DNA, 490 bp, Homo sapiens
aaacaatacaaatattaatataaggaaacattgatgaatctctctataaattatgataaaggtttcctaataataattcaaagtccgcatgcaaaaaaggaaaggactctgaatttagttacttaaaaataaacttttgcactataagcaaactaaaaatgtaaattacaaaacaggaaaaaaatatgtgcaatttatatacccttaagacagaaaaagactctaaaaaaaagttcracaattctatgagaaaaacaagcaatggatatgaacagatggttcacagtaaaaatacaaatatactttaacataatataaggtgctcaaactggactcataaataagacgctagttaaaaatcacttggaaaggagagaatcaatagcagatctgtgactccctgcctctcactctgggaggattaaccttaaacagatctccttttaaactttctaaagcttttaccaagatacaccaggtttgtctacca

SEQ ID NO: 423918 - DNA, 549 bp, Homo sapiens
ggcattatacaaatgcatatacacatttgtttatcttataatcartgaaaggacaaattagaacatgaaaaataataggttatccatagggtaaaggaagaaacgggtcaagaggcagagatgtaagctaaacttccctgagtatgtcttgatttaagtttcacagttttaaaacaaaaatgaaacaaatacttaaaaaaagcaatccctaaaataaaaagtgaaataaaacaagtcagcctaatgggtattgattggtatctcaaccactcagagaaaaaatattttaagtgactttaaaacatggtaatttgattgtatatccttaataggttacattataagggcaaaattattttagtaataactggtatttttttctctctcacacatatatgtctatgtgattaatcatacatatatacaaatgattatagtggtatcattctgacacacattcacatgcatgcacatatatgattaatcatatgcacctggatacgtaaacatgattaaaattaaagaataagtactggacacctaatacat

SEQ ID NO: 423919 - DNA, 549 bp, Homo sapiens
ggcattatacaaatgcatatacacatttgtttatcttataatcaatgaaaggacaaattagaacatgraaaataataggttatccatagggtaaaggaagaaacgggtcaagaggcagagatgtaagctaaacttccctgagtatgtcttgatttaagtttcacagttttaaaacaaaaatgaaacaaatacttaaaaaaagcaatccctaaaataaaaagtgaaataaaacaagtcagcctaatgggtattgattggtatctcaaccactcagagaaaaaatattttaagtgactttaaaacatggtaatttgattgtatatccttaataggttacattataagggcaaaattattttagtaataactggtatttttttctctctcacacatatatgtctatgtgattaatcatacatatatacaaatgattatagtggtatcattctgacacacattcacatgcatgcacatatatgattaatcatatgcacctggatacgtaaacatgattaaaattaaagaataagtactggacacctaatacat

SEQ ID NO: 423920 - DNA, 564 bp, Homo sapiens
gagaactattttattactaaaaaataatgctaagaccaaaccaacaaaccaaagaaacctaatttgtcaactttttggaattccagtgaataaagacggaaacaaacatgcatttgtcctgctatccaggtgtggactgtatctcaaggtaaccatacaatagctcaggggaggttttcagcacagaagggttccaggcaggtaacgcatgtaggagttaccaccttccaactcctactaaaatagtagatcragggctgcaaaagtcatgaggtgaaaagctaatgaggaacacttactaatagatggattgggctgacaatacttaaacccactcatcagccatggcctggaagaagcagagcaccagacattctgggcctcctggcaggatacacatagcaccacctatggcctaggtagcatccttggagtgggaagaggacttgactcgattttcaaaaaaatcaaaggacagagtgatgtattaaatgatacagggtgcaatcaaccaaattcaggatggcgattttacagaacaatctagttgtcccaacaaataaa

SEQ ID NO: 423921 - DNA, 498 bp, Homo sapiens
gacatgaacagtcacttctcaaaagaagacacacaagtggtcaattaaagtatgaaacaatgttccacatcactaataatcagaaacatgcaaatcaaaaccacaatgagacaccatctcacaacagtcagaatgtcaattattaaaagtcaaaaaacagcagatgctgatttggctgcaaagcaaagggaagggaatgcatacactgttgataggaatgtaaattagttcagccactgtggaaagcagtttggagatttctcaaagaacttagaactaccatttgacccggcaaccccattactgggtgtatatccaaaagaaagtaaattgttctactgaaaagacacatgmacttatatgttcattgcagcactattcacgatagcaaagacatggaatcaacctagttgccgattaacggtggattggataaagaaactgtggtatatatgctatctgtggaatactatgcaggcataaaaagaaatgaagtaa

SEQ ID NO: 423922 - DNA, 610 bp, Homo sapiens
gcagcctccacctcctaggctccagcaatccccccacttcagcccctcaagtagctgggactacaggtgcaygccaccatgcccagctaatttttgtatttttttgtagagacagggtcttgctctgttgctcaggctggtcttgaactccaggactcagtctaaccaccagccttggcctctcaaagtgctaggattacaggcttgagccaccatgctcggcctatattttctttcaaatgtgtgttttgtgcttaagtatttcttctgttggccaaatctctgatttcccattttaattaagtcttaatgtttgcaaattatttttttcatctttttaagctttttatgttgcatctcaacattagacatgaggagactcacatactgttatataatgaaaatagttttgtacatatatatttttttcctgaaaactgatttgcttatgaaatagttatgaagaaaaatcttgattcacattacagattttcaataaggtcatgtatatagagaataataaggtcatgtatatagagatatcaaaatcatgaaggcatctttcaacaatcagatccttttgaagtgagtttatatataaggattatat

SEQ ID NO: 423923 - DNA, 559 bp, Homo sapiens
aatgtatcacacctcatgttgttttgttgagttgagcctgcagaagaggcacctgtctatccagccatgtggggaatcaaggagctgtcagtacatgtgcagcatcatctaaaatattaatcctacccaagagctgaaagtagataaatagatgtcacacactttccaccacacaagctaaaaagcataaggcctggtttcaatcccaggtttctgactctaaacaccatgctcttaattgctgtctttccagaaaaagacgaaaagactaaatgcattttctactatgatcagattataccaattgctcttatattttttttctctccttccacatagaagtgcagtaaatgtatgtcctaaaccaacactctagttaagattctaattttattgtagcaaaatatacataccatacaatttaccattttaaccatttttaagcagacatttcagtgatgttgagtatatgcacattgttatacaatcacygtcatctatttccagaacttcatcttcctaaactgaaactccatgcctgtcacacaataactctcca

SEQ ID NO: 423924 - DNA, 497 bp, Homo sapiens
tctttgcagcaggcgcaattcagtttggwttcacccaaaacaaaaatggtctccgtcggagtcaacgccctttcctgtgcggaccaatcagaatctcaaacacagggcacggggcccacacttccgtccggtctgcctggtctctctaaccgcgccagtgtgcctccgactcggaacggcttccgcggccggggcagcgagggccgggggcggcgggcgggatgagtgcggtgtgcggtggagcggcgcggatgctgcggacgccgggacgccacggctacgccgccgagttctccccgtacctgccgggccgcctggcctgcgccaccgcgcagcactacggcatcgcgggtgaggcggcgccgcgcagctggggccggggggcggaggcggaggcgggggccagccgggctccagttcctcgcgctcgagggaaagcccctctgagcgtagacggttccgcgggtccacgccagggggcagaagaggcgctggtc

SEQ ID NO: 423925 - DNA, 497 bp, Homo sapiens
tctttgcagcaggcgcaattcagtttggattcacccaaaacaaaaatggtctccgtcggagtcaacgccctttcctgtgcggaccaatcagaatctcaaacacagggcacggggcccacacttccgyccggtctgcctggtctctctaaccgcgccagtgtgcctccgactcggaacggcttccgcggccggggcagcgagggccgggggcggcgggcgggatgagtgcggtgtgcggtggagcggcgcggatgctgcggacgccgggacgccacggctacgccgccgagttctccccgtacctgccgggccgcctggcctgcgccaccgcgcagcactacggcatcgcgggtgaggcggcgccgcgcagctggggccggggggcggaggcggaggcgggggccagccgggctccagttcctcgcgctcgagggaaagcccctctgagcgtagacggttccgcgggtccacgccagggggcagaagaggcgctggtc

SEQ ID NO: 423926 - DNA, 497 bp, Homo sapiens
tctttgcagcaggcgcaattcagtttggattcacccaaaacaaaaatggtctccgtcggagtcaacgccctttcctgtgcggaccaatcagaatctcaaacacagggcacggggcccacacttccgtccggtctgcctggtctcyctaaccgcgccagtgtgcctccgactcggaacggcttccgcggccggggcagcgagggccgggggcggcgggcgggatgagtgcggtgtgcggtggagcggcgcggatgctgcggacgccgggacgccacggctacgccgccgagttctccccgtacctgccgggccgcctggcctgcgccaccgcgcagcactacggcatcgcgggtgaggcggcgccgcgcagctggggccggggggcggaggcggaggcgggggccagccgggctccagttcctcgcgctcgagggaaagcccctctgagcgtagacggttccgcgggtccacgccagggggcagaagaggcgctggtc

SEQ ID NO: 423927 - DNA, 507 bp, Homo sapiens
ggcggcctctgtagttcagctgctcgggaggctgaggcgggagaatggcgtgaacctgggaggtggagcttgcagtgcgccaagatcgcgccactgcactccagcctgggcgacagagtgagagtctgtcacaaaaaaaaaaaaaagaaactgaaagttttaaagtgagagaaaagcgttatgagaataaagaagtagaagcgatcttaaagttaaatggggaatagttatataaacttgtgatttatttttctctgtctaaaaaaagtacatatttctttgttttttgcacagtaaagatttagaagcagtgacaactgagtagcagtgaatattcttagtgccctgagtatggcctctaaatactgtttgccactaacaggaatagtgtctttgsagaagtcatttattccagagctgagcaggaatgcaagatatcttcttgtgtcagaaagcaggaaagctatgaaaggccgctggagacatatcaaaggtttagaaggtaca

SEQ ID NO: 423928 - DNA, 530 bp, Homo sapiens
ttactcactgggctgtgtaccatgcgtttgtaagcaaatgcagtgcttagatcttctttgcttcacttgttttcatacatttcctataacacttgtgtattcttttacatagccgaatgccttacatagccaaacacgaaaatatttttgatwgttattatataagatatgggagtaaccatcttattcaaatttttaaaacatactgagttcattttgattgttgagaaggacgctgctagtgagtcagtcagatatttattgaatgtccatcatttattggagattcagtgaggaagacaacagatggagttcctgcactcttagagcatatagtccagtaggaaagaggaatgctaagacaaaatctagaagcagctagtgatgaagactgtgaagttctttaaggagaggtaatatagcacagtggtcaggaacaaggattctggagctggactgcttcagatcaagttctactttcctgctgttaggagactttctttggtcatgccatttaaacctcttgtctc

SEQ ID NO: 423929 - DNA, 525 bp, Homo sapiens
actggtttttttcatgcaacattatgtcttgtgagactcatccatgttattcctacaataacagttcttaatctcctagtctgcattcattgtaatgttttggtacttttaaatttttttatttttattttttgagacagagtctggctctatcacccaggctggagtgcagcggcacagtctyggctcattgtagcctctgcctcctaggctcaagcagtcctcccacctcagcctcctgagtagctgggactacaggtgcatgctaccaagcccgactaatttttgtattttctgtagagacaggatttcacggttgcccaggctggtctggaactcttaaactcaaacgacctgcctgccttgaccttccaaagtgctaggattacaagtgtgagccaccatgcctgacctgttttggtactttaagtcagttcacatactcatatcttattagggtgaacccaagctcattgatcttgagacaatgctatagctatagcagaatttatacttttaacctag

SEQ ID NO: 423930 - DNA, 560 bp, Homo sapiens
acacaactgtatcaatgaatcaatgtgacattagrtttttctaaaggtgtataaaataatagaagtaaatttctagtaaggaaactttatattcttcatgtaaaatggaatctatgtgacccacactagcttttggaattaatatcaatagtaaaataggtagtgaatcagtgattatactgaaacaaaatgttgctgagctagtaatagttatgtgccttttaatattttcaacaacttgtcaaacctccaaaaccttgtaggagtaagataatcctccccgctatcctcaccaagaaccacaaactctggaaatcgatgaggttcatgtgtggaaaactaaaacgcctaaatgctcaagtagcattttactgtagaaatacaaaatctgaaattatatatcaagctattttccaaagctgtaactttttataccctctcactttgtgctttccttccagatcctttcagagccattttcatacacaatttttattttttgttttactttgctggcttttttgatttattaactttaaatatgttttttatgttaggca

SEQ ID NO: 423931 - DNA, 560 bp, Homo sapiens
acacaactgtatcaatgaatcaatgtgacattagatttttctaaaggtgtataaaataatagaagtaaatttctagtaaggaaactttatattcttcatgtaaaatggaatctatgtgacccacactagcttttggaattaatatcaatagtaaaataggtagtgaatcagtgattatactgaaacaaaatgttgctgagctagtaatagttatgtgccttttaatattttcaacaacttgycaaacctccaaaaccttgtaggagtaagataatcctccccgctatcctcaccaagaaccacaaactctggaaatcgatgaggttcatgtgtggaaaactaaaacgcctaaatgctcaagtagcattttactgtagaaatacaaaatctgaaattatatatcaagctattttccaaagctgtaactttttataccctctcactttgtgctttccttccagatcctttcagagccattttcatacacaatttttattttttgttttactttgctggcttttttgatttattaactttaaatatgttttttatgttaggca

SEQ ID NO: 423932 - DNA, 560 bp, Homo sapiens
acacaactgtatcaatgaatcaatgtgacattagatttttctaaaggtgtataaaataatagaagtaaatttctagtaaggaaactttatattcttcatgtaaaatggaatctatgtgacccacactagcttttggaattaatatcaatagtaaaataggtagtgaatcagtgattatactgaaacaaaatgttgctgagctagtaatagttatgtgccttttaatattttcaacaacttgtcaaacctccaaaaccttgtaggagtaagataatcctccccgctatcctcaccaagaaccacaaactctggaaatcgatgaggttcatgtgtggaaaactaaaaygcctaaatgctcaagtagcattttactgtagaaatacaaaatctgaaattatatatcaagctattttccaaagctgtaactttttataccctctcactttgtgctttccttccagatcctttcagagccattttcatacacaatttttattttttgttttactttgctggcttttttgatttattaactttaaatatgttttttatgttaggca

SEQ ID NO: 423933 - DNA, 558 bp, Homo sapiens
gtgtgaacttttttcctactcgtgtcatcaaatttctacagtgaattctcgataaacctcccaatttgacaagtaattgatgcatactaaccaaacatataaaagtctttcacaaataaaagctacttaaaatgtttggatgacaaaccggtatccctgaaatgctgatgttaaaatgaaacattcagtaaacaagggaggtaccttcagtgactgcagagagtccgagttagtatcacagtagaggatgatgttgttggccatgctgaaactttctctcaccccaaggtggtaaaacaaggacggctgccggaaggcatcgctcatctccaccaccgcaatatctgcaaacagaaaacaaagtcccccaaagaatgacacccaaataatgcccaatcagcacattttggtttgaattatcttagtattcaaaagaggaaataaggaaaygatagggattttctctcttcatttatcactgaattttgaatttgcagctctacctggaagtggttttataaaatgtaacaaacctcctttttctgtttttaagagaca

SEQ ID NO: 423934 - DNA, 549 bp, Homo sapiens
ggccatgaattatttctacaaatataagatctgtaaatgtaagcaaatatttgaatgcacggtagcatggtggaatcagagcaagaatgtgaactgaaatttttgccatctgtttctgattttcccctctagattcactctccatttatatcccccagagtctctgtcttgggaggctatgaattaagtcaatgggctcccttcctttctgtttatcagttggatttggtcagtggggagtccaggcagggatctgcaggaggaaggacattgggagytgggtatttctctcctggactcactctgtatgagtcactacaggctggctgtgttcttcaacagaaggttattgctcttcccaaggtgacagctcctatgggactcactttctaacagggtctcataactgtcccttgctttgttgtttattggcacctagaaatgataaagttgctggccccaagctcatgaagaattccttgaagcctccttatacccttccacagctttgtaattagtctttttgtaaataaacccacttcaaattat

SEQ ID NO: 423935 - DNA, 531 bp, Homo sapiens
tgattggacccccggagcccatcctggccgttgtgggtgaggacgccgagctgccctgtcgcctgtcyccgaacgcgagcgccgagcacttggagctacgctggttccgaaagaaggtttcgccggccgtgctggtgcatagggacgggcgcgagcaggaagccgagcagatgcccgagtaccgcgggcgggcgacgctggtccaggacggcatcgccaaggggcgcgtggccttgaggatccgtggcgtcagagtctctgacgacggggagtacacgtgctttttcagggaggatggaagctacgaagaagccctggtgcatctgaaggtggctggtgagtagacgggttttgactttctccgacgactcccctgctgtatacactttcgtatggatcagttactttggaaaccatcagattcattctcaaaatctcttttaggttgatgtcgccggggagggacgactatctgggcgggaggcgagggggggtaaaagaatttaccaagacagttgtaaagaaaggcag

SEQ ID NO: 423936 - DNA, 479 bp, Homo sapiens
catctcaacccttcctggacttcttcaagtcagcctgttctagtgggccccataagcaaatggaggcttctctgacagcttcttttctcaagtcttggtgacaaatatttgtttttgctttgatttgttcctttccaaaaaactctgagtacaatgcaatctttttaaatagcgaatcacagcttgttttatgtggccagatcttactgtttgctgtgaattttcagagatgctacagccttctcracaacagattatgaatcattccaaagattgaccttctaaaaacattacctgcagattctgacaatgaatctgtttaggatttccccaggaaagaaaatagaatgactagagattatgatgttgcttgtagtttaaatttggtgtttgccttctgctttccctggttcctctcgtacatgttgtaagatataacatgtggaagaaaagtgtaagaaaagcaagaaattcagaat

SEQ ID NO: 423937 - DNA, 493 bp, Homo sapiens
ttctgactccgcaggagtaaggaaattcctgcaagataaatttgcctggaagactcagaagcaagaggggcagctcccgacaacatatggggttatcatttctttgcggagcattctgccactgaccacgtggtaacgccaactacgccagagaaacgctcgccctacccaagttgtgcccagccttgcctggccattttggccgaagaacgaaggaccgttcagagattaaattaaagtctctattgtgttcttccctattcagtcatttgtagaataaattctatggcttcagtttgaacactggaggggctgggtctgagcttttcattggtttttctggtttgagaggtcggtacagagacgcacgcgcacatcagcaaaacwcgcacttggaacgaagaaacacggaactaggcaggaagaactatttactctgaaaaataagcccttagtgggtttccgtagtgtagtggttatcacgttcgcctca

SEQ ID NO: 423938 - DNA, 540 bp, Homo sapiens
cctaatccttaaagtgacttagttggagtaaggaagtagttaaggttaaataaggtcatagggatgcaccttgatccctaagattagtttccttatgagaggagacagagtactcaaaccatgtgaagacacagcaataaggtgtccatctgcaagccaggaagtgagcccttaccaagaaccaaatcagttggcaacttaatcttggacttcccagcctccagaactgtgagaaaataaatttttgttgttttaagccatccagtctgtggtatttttgtcatagcagcctgctatagtttgaatgtctgtgtccttccaaaattcattatactgaaatctaagacctaatatgatagtattaagaggtggggactttaggaagtcatttggccatcagagctcggccatttttttttgtggggggccttctctttcttctgccatatgagaacacagtgtttcttccttttgccctccatttcttytgccatgtgaggacacaaacataagtgctatcttggaaggagaaagcaggtc

SEQ ID NO: 423939 - DNA, 434 bp, Homo sapiens
cgacaccattggctggttcactcacacccggccaatcctggactctaaaatacttagggaaatcttgggacactgtggaagcccagagaatctgatcccgggtcccacaacttcacatatcgcgagtaagtgggaggcaaagaaaattctttttctcctcttttgggacagtttgtgactagtagtgcctgtgcccctggaaaggttggagacttgggggacgactggagaattgccatttgaggaccaaaggagaaaagaaactacacgctaattctagaaggtaggaaagggagggtaggcgctrcagctccggggtgaaggcggtcgatggaagtagcgggatccgctgtggacttgagagggggttctgggagagggaaagcccaccggtggggcggcgcctcctcgcctggctttacctccggtggccc

SEQ ID NO: 423940 - DNA, 487 bp, Homo sapiens
actgctaggccatatttagagggagaaaaacattctcattcttatggaaactaaggaagttggggagatgtcatgctcgttttagacccaattcctcatacaaaggacatcttctcataggagcaaaaaggcttacatcttagttcttaggaaccagcaggcaaatttggctgctggcaaaactgaaataattgctgtcaattattggtacctcttcctaccatcaggcctttctatgcctaggagaaagaaaaattgactcccacttaggtattaggaatgcaatatctttaccttccaaagtgtgatagtagagaagaaaatgcataacccaaagacaatttcttaatggtgaaatttgggactaaagttasggctagggataaagcctctgtgatttcctcatcagcccctaacccccaatacacaaaaagaagaaaaatcacatcacatatgtggagtactcccctttggtacaagaccccca

SEQ ID NO: 423941 - DNA, 634 bp, Homo sapiens
agggcatttaggttaggctaatgcaaataaagctgctatgaacattcatgtacaaggcttcgtatggacatatttcctctttcccctgtgctacagaaaagcagatctcttcagcactataaaattgctcttgcaaatgcaatttctaacaaaagagctctgtaaagtactcagattttggaaagtgctgttctatcctgtgaaaataaatctgaataaatcacaaagtctttgattttaattagttgtcatactctataacatattgctctggtatcagtgcttacatttacatctttgttttctgaaatatggaaaacaaaytttgtgacttttccttgttaagccggaaaagaatcattagaactaccttagtatcccacatgcatggaggtaataaaactctgtcactttagtggatttcttactaaattttttttaaaaaggagcaactgtggctcatttactgtaaagtgtcactctacttcggaccacaagctgcatcacaccaaccctgtcaggctgtcagtcatcttgcaaatgcgttccttggatcaccagagtcacagctcctgggaaagcagctcaagaagggcatctgcctttgcaaaagcaaaacatgcaataaaacccc

SEQ ID NO: 423942 - DNA, 634 bp, Homo sapiens
tatataaaacaatgggtattttacatctttaacatatgtgttacacgatagatagatagatagatagatagatagatagatagatagatagacagatccatatatctaaaaatgaaatcgcagtattttgtaacttgatttttttcaaacaactttctccttttatccttctcatctcctctaaaacctgaccatatcaaaggttcccaattggtcccctaatttatttagagctagtttcctcaaaccaatattaaataaaaaactacatacttgcctaattatgtgccttaagtgtctttacctgactaatgactcatggaagagtcctggctctgtcctgcagaattcatcccgatattttgcttaatgatccgtcgattgcaagakagtatagtgatattggaaagggtataactttggggaacaaaccaatctcaggaagaattccagctccaccccttttcaactttgtaactgtgatagttgaaatctcagtcttttcatctgtaaaatggggataataatgcctacccacaagaataaattgtgagagattacagttttgtaaaatgcctaacacagtgtctggcatataataatcagttagcacattagctcccaatctggtcat

SEQ ID NO: 423943 - DNA, 532 bp, Homo sapiens
acagtgcccccagcacacctcaacacagcggcattgttaaggcatttggactctctgagacagatggaactgtagctaccagttgttggtctgtggtctctatttggattctgaagataggtctggtaattaagatgtggcctttcaatagtttacctggaaacattctctacatgcatagagagaagttcagggatgctggctcaaccacaagagccagagacccttctgggactatagtgaatatccctggagagaccaatcaggaatttcctggaggtgagggtacaggactggtttcccggagtctcctgaagcttggcatagacctcatgactgtgggcttgtctttaagctatgttcgtcttcctctgccctgagaawtgccagatgggcgttctctactccaatgtttgaggctgggttcaatgtgcctggcccttcatggctagggcctcctgagagcataggccacgctggaacctatggtttcatttgggtcatgtggccatagatggcagccaagggttat

SEQ ID NO: 423944 - DNA, 555 bp, Homo sapiens
tacaaattgcattataaattgcactaagacacataatattacctattactatagttatggttaaacactttatgaagaaaatatttcagacatcgtcctctaaacatttattgtccttctgaaaatataaagaacacatgagtcaccactattaatagtactgttktctaaagctttggtttcattaataatgtggctaaaaaaagaaattatgtctgcaatgctcagcctgagaatgtactaatcagttgactatagaaagagcttagaagatgcttctgaagttgtagccgaccacattaaacatctattccttttttgttgttgttaaatatgctgcttaggtgacaatccaaatagttagatgctgattaaaatggactctagtctcaaaagaaacatttgtggctgtccaaaacctaacttgggctaaaaatggaagtgacgtgctattacatatagaggtcaacaaatacatggaactctttccttccctttctcattcttccatatgtacaaggtggccatcttctgactgccaggaaaaatatacca

SEQ ID NO: 423945 - DNA, 510 bp, Homo sapiens
tttccagtggcacttttagttactttgaagttgtcttcagccatagaaagacatggcaaatgtcttagaagcagatagctatatctatacttccttctgtcctaaccaccaccgacaccccaatgttggtagagaattctagtaaagaaaggaaagtggaaaggtgagttttagggttacctataatttgactttctgtgtctcaaagtacccttttttgttatgtgttttgtcaaacctaagttattattgctattgcttttactttatattcttctctgtgtagtgcatactaaacaaaccttaaaacacaagtggctcaatttacttcaaatattcatgtaaaataaaatcgagttccttcartatcagatttggaactacttcagagtgaaaaggaaataacaatgagaatagtgaaaggaggctcatggaaaagtaccaagcagagagaggttgccaacctttccccatgtgatgaactctcttttgacaacacccacacaatca

SEQ ID NO: 423946 - DNA, 579 bp, Homo sapiens
gttctccttttcattgttttctagatagttcagaatttcattctgattttatctttgtcccaagtgtgtttcttaatttccaagttgttaaaatttttggttatattttaatacttatttctagttttattgggcaatacttaaagaatgtggtctgtaaacgctcttttgaatttttcaagctattctccaggccaagtacttgactaatttttctaaatgtttcatggcactagaaagctagagaaaggacatgaaattctatataaaattctgtgatatatacctactaagtcagtttctaaattggatcatcaaagcctctctgtcctaacctgttatctactatctactcattaaaatataccactataaaaccaaattattaatcaatkcttcctgcattgtgacagtttttaaaaatgcatttatagttgctgtgttatttggacatggaagtttatgactttacaaattgctcctctttctactattttatgctttcattccaatacaaattgctcttagtgtttttattttgtttgctctttgtcttgtatatttctgttcatcttttca

SEQ ID NO: 423947 - DNA, 507 bp, Homo sapiens
attcagttcatatctaaattcccacaataggcaaaaacacaggcatatacaagttttttttttttttttcaatttgccctctacacttcccaatttagaagaaactatcactagtttcttgggtatttatatttgtcactaagtcactttaatgcatcttcaaatatrtgtaaaaaatagaactcttataccaccatcaaccagacagcatatattaccaattaaataagtgcccactatttataaatagtgcatgtttagggatcaataaaaacatatccttacacgtaaggacatatcctaatcttatcataatatctccaaactgcaaaagcatgtgctgggctgttctctaccgaataccataaaactgaatattgttcaccactatggtcgatctttctaactttaaagagtacacaactgaactcaattactccaaagatatgtgaaaacacagaaaaatgacccctgttaaaagagtaaacctagcttttgttttacttt

SEQ ID NO: 423948 - DNA, 582 bp, Homo sapiens
tgggctgttctctaccgaataccataaaactgaatattgttcaccactatggtcgatctttctaactttaargagtacacaactgaactcaattactccaaagatatgtgaaaacacagaaaaatgacccctgttaaaagagtaaacctagcttttgttttactttccttttatataaaaaagatgtacaggtttctcttctgagggccagtagtcaatttagagagataactacagatgttttttttgttgttgttatttggatacttttactccccagtgtaccactataacaagatctctctactgtcttattatattccatgaagaattaacttgactaaattccatctctttgttttgtctcagtcttgactcgtcaaaaaattgctcagtataacagctcattataacaatattggtcttgggtactactaacaaacttgctgcaagaagacaggcctcttatatgagacttctttttcctttcctcaaaaatgagtaattcctctgactggcactattgactagtgctctgacctatctgtgtaacaaggatcaaatcataataaccactaccag

SEQ ID NO: 423949 - DNA, 582 bp, Homo sapiens
tgggctgttctctaccgaataccataaaactgaatattgttcaccactatggtcgatctttctaactttaaagagtacacaactgaactcaattactccaaagatatgtgaaaacacagaaaaatgacccctgttaaaagagtaaacctagcttttgttttactttccttttatataaaaaagatgtacaggtttctcttctgagggccagtagtcaatttagagagataactacagatgytttttttgttgttgttatttggatacttttactccccagtgtaccactataacaagatctctctactgtcttattatattccatgaagaattaacttgactaaattccatctctttgttttgtctcagtcttgactcgtcaaaaaattgctcagtataacagctcattataacaatattggtcttgggtactactaacaaacttgctgcaagaagacaggcctcttatatgagacttctttttcctttcctcaaaaatgagtaattcctctgactggcactattgactagtgctctgacctatctgtgtaacaaggatcaaatcataataaccactaccag

SEQ ID NO: 423950 - DNA, 334 bp, Homo sapiens
cattccttggctcatggccccttctatcttcaaagccagcaatggccagttgagtctttctcccatcacatccctttggcattcactcttctccttcccttttccatctttaagaacccttgagattacatctcactcattgggataatccaggataatctccctatttaaagttcagctgattagcaaasttaattccatttgctaccattctcctttgccatgtaatatagaaatatttgcaagctctggaaaaattagatatccttaagaggctactattccaccttctagagtcaaacatcttggtctttaatgatatagtaggaataaa

SEQ ID NO: 423951 - DNA, 395 bp, Homo sapiens
ctggccaagacaaaacaagctgttcgattccccattgggagtacccaaatggaggtttacttgctttttttgaaattgactttgctgtatccagcagatcataaatctctgatagaagaatgttaagtcaaaagtgcacaatgagcagggcagtgaactatttattyagggatggaggaggtattacatttgtattctccggatagtttggatatttgtataatcttgcccctaagccaacaatattgtggaaaggtggagtagtcaggcaaatgggcccaggataacctgacaataaaatattcatgtggggtactgttgttatagaatttagaggaaggtgaattgccctgaaatcataaaggtagaccttggagatggactgctgagaatgt

SEQ ID NO: 423952 - DNA, 565 bp, Homo sapiens
acttcggtgaaaatttttttgcaatgggacagttgaaataaagtatgaggaatgatgcagtacataacttcgtgtattacccatctaataatttttttcttttatctttcctgatttaatttcattgaaatcgtggttgtattgcctgtattagtagagagaactatcaacatacaattgacagtgtgtatttattcctaaaggaatttcattatgcccataaagtcactccatctaatcatagtagggttaactaattccagcccatttaccaaatggaagagagttttgtaactctttttacctcctaaatcctactacactttcgtagggactgatgttactgcatatactaatgtactaacagtacaacctagccaagccaaaccaacagcaaaagaaaaaaacatcaggaatgggagtgaggaatatgaattaaacaggtaataaaaggaaaatggaagaaattatgaaaataatgaaagggytcacagatgggttatcacctcagggaaggaggcaatagtgttattcccaaaagtatgtgtcacagcaaaaaaataat

SEQ ID NO: 423953 - DNA, 576 bp, Homo sapiens
agggatgagcttgtgaagatggcaattattaaaaaatagttttttcagtgtcctaggtgaaaatgagcaattatcgagctataaaaagctatgaaacatgggacagagaaagccagattttsttttctccatctgtataagggaggtataagtaattatttctgacttatttagcaaattataattacttcaaaaaacaacgtatcaaaagcaaaattaattatactttttggatttaattttaattttaattttaattttttgtagagatagagtcttgctatgtcactatgttgcccaggctggtattgaactcctgagctcaagggatcctcctgactcaatctctcaactggctgagactaaagacgcatgccagcacacccagccaacattaattctgttttgatgattaagatgcattgtgtaagactgtgagtgtaatttgtaaattgaccttagaaatatctaagtacaacttctagctttattgcttaatagcaatgtgatgagaatcaatttcctcatttataaggggcaaggaataatatctacattttgtaacttctaagagtg

SEQ ID NO: 423954 - DNA, 573 bp, Homo sapiens
atcattctggggtctggaggagggtggctgtcttctcatagctctacaggcagtgccccagtgggcactctgtgtgggagctccaactcacatttcccttccacactgccctagcagaggttctccatgagggccctgcccctgcagcaaacttcttcttggacatccaggcatttcgatacmtcttctgaaatctaagtggaggctcccaaaccccagaaaatggcttgtgggaactcaaagactcaacatcatgtgaaagctgccaaggctttgggcctgcaccgtctgaagtcgcagtctgagctgtaccttggcttctttcagccacagctggagcagttggcattcagggcaccaggttcctaggctgcgtacagcatggggaccctgggcccagtccatgaaaccaattttcctcctaggcctctgggcctgtgataggagggactgccatgaagacctctgacatgccttgatacattttccccattgttttgggaattaacatttggctctttgttacttatgaaaatttctgcagctggcttgaatttctcctcagaacatggg

SEQ ID NO: 423955 - DNA, 573 bp, Homo sapiens
atcattctggggtctggaggagggtggctgtcttctcatagctctacaggcagtgccccagtgggcactctgtgtgggagctccaactcacatttcccttccacactgccctagcagaggttctccatgagggccctgcccctgcagcaaacttcttcttggacatccaggcatttcgatacctcttctgaaatctaagtggaggctcccaaaccccagaaaatggcttgtgggaactcaaagactcaacatcatgtgraagctgccaaggctttgggcctgcaccgtctgaagtcgcagtctgagctgtaccttggcttctttcagccacagctggagcagttggcattcagggcaccaggttcctaggctgcgtacagcatggggaccctgggcccagtccatgaaaccaattttcctcctaggcctctgggcctgtgataggagggactgccatgaagacctctgacatgccttgatacattttccccattgttttgggaattaacatttggctctttgttacttatgaaaatttctgcagctggcttgaatttctcctcagaacatggg

SEQ ID NO: 423956 - DNA, 614 bp, Homo sapiens
tttaatagcgccccactctactgataccaatttactgtattagtctgttttcatgctgctgataaagacatacacaagactaggcaatttacagaaaaggaggtttaatggactcacagttccatgtggctgatgggccttacaatcatggcagaaagtgaaaggcacatctcacattgcagcaggcaagagaracaatgagagccaagcgaaaggggcttccccttataaagccatcagctctcgtgagaccttttcactacaatgagaacagtatgtgggaaaccgcccctctgatttaattgtctcctactgggtttctcccacaacaagagggacttacgggagctacaattcaagatgagattttggtggggacacagccaaaccatatcaagcaatatttaggttgattccatacatttgctactgtgaatagttctgtgataaacatacaagtgaaaatatcttcctgatataatgattttctttcttttgtgtagatacccagtagtgaggtttctggatcaaatggtagttctgtttttagttctttgagaaatctccatattttttttctatagagatcgaattattctacaatcccaccaaca

SEQ ID NO: 423957 - DNA, 614 bp, Homo sapiens
tttaatagcgccccactctactgataccaatttactgtattagtctgttttcatgctgctgataaagacatacacaagactaggcaatttacagaaaaggaggtttaatggactcacagttccatgtggctgatgggccttacaatcatggcagaaagtgaaaggcacatctcacattgcagcaggcaagagaaacaatgagagccaarcgaaaggggcttccccttataaagccatcagctctcgtgagaccttttcactacaatgagaacagtatgtgggaaaccgcccctctgatttaattgtctcctactgggtttctcccacaacaagagggacttacgggagctacaattcaagatgagattttggtggggacacagccaaaccatatcaagcaatatttaggttgattccatacatttgctactgtgaatagttctgtgataaacatacaagtgaaaatatcttcctgatataatgattttctttcttttgtgtagatacccagtagtgaggtttctggatcaaatggtagttctgtttttagttctttgagaaatctccatattttttttctatagagatcgaattattctacaatcccaccaaca

SEQ ID NO: 423958 - DNA, 556 bp, Homo sapiens
atagacattcccttttcttcacaatcttgacaacatcagttaatattttgacttagaaaattattttaaactcagaggagatgtgtgcatgtttgttacgtgggtacattgcatactgttgggggttggtcttctagtgtacctgttacccaaatttgatgttttattaatagccattcttactggtataaaatggttctcactgtaggttattttgcatttctctggtcattagtgatgttaagcattttttcatatgtcgtcttttctgattgtacttatytgaatcttctcttttgttttggttagcaatctatcagttttgtctctcttcccaagaaccaaattctcatttcattgatgcttttattgattttttcagtctcaatttcattagctctgctccaatcttttttatttcttttcttctgccagctttgagtttggtctgtttttgtttttctagttcctcgagatacagtattaggttgttaatttgaaatctatctttttgatttaggcatttaacagtatgaactattttcagtaccatttt

SEQ ID NO: 423959 - DNA, 489 bp, Homo sapiens
aatcaatacactatttgggtttgggaaatgagaataacttggatcatgataccaagataagcagagcactatggaagaaaatcttcttgaggataaacaaccttggaaagtggaaattttgagcaattagaaaaacgtaaatgagatgtatactagatttagacagtataaaatttgtaacgtgtttgtgaacttctggactttcttgtggagatattgtgaggcacttgtgggctttaaacttaagccttggggtaatgttttacttttatcttctcttacttcccctaggatatattggcaagtagcaagcagcgtcattacatytaacttaatttcatctcatttggctagagatttcattaatttacaacctggtgtcaattagctctcagagacaaatatgtccacacatgtatggtctcttatggtgaagcagtttagtgtctatgagcttggcccagaattggtaattattcttggggctgg

SEQ ID NO: 423960 - DNA, 633 bp, Homo sapiens
cacagtagttaagccaatatctttctcctaacaaatcagcttagaataattttaaaaagagagtctacatattgaaaattttatctgaaatgtcaacagcctaaaaaaaccccacatattttaatcttcttaaatgtgaaatatgttgcgttgacatatatcaaakattatttagtcaagcaatttcacttaaactcgtggttcacatttattctgaacctttcagcaaactttatgtgaattgtgtgacaagttgtaaaattgtttatcaataaattctcagttagtttaatagaaaataggaataatcaaagatttaaaaaatacaatctggcattgcataggtagttcatagtttagtgcataaagcaataaatgttttcacaaatatttattatgctaatgtaatgtaacaatacttatttactttcagcctgcaacttcacaaaagtaactagagttaaagcaataattcagaacattttaaagtggaagtaaaaaaatgctttgtctcatgtggaaacaagtattcagcattttaaaatgaggtttattaaattgtgttaattttcaatagagcaacacattgataattatttttcaatgtatagaatacaatttctacatacacac

SEQ ID NO: 423961 - DNA, 559 bp, Homo sapiens
gttttcaagatcaaatagagacttggagaaaattttgtctctacctcaacataataactatggcggggcgttaatatgcttttggaggaaagatttcatcttaaaactgagattcttctgttgagtgactggcatttcacaggaaaagttttttgcacaatttaatacttttatatatttctctcaaagagctcttttggtgtgaaaaaatgtaaatgaggtttatatttgtatagtgcatgttatgttcttgttgcatttaaatgtcctgatatcctacccaaagatttcaatgtcctgttttaaaacaattatttttccagaacatacttacaagtggaccactttgtcgtaaaaactgtgtagctttaygttatcttacattatctcctgtcagaatataccctcaacacaagctttgtaggagtttgtcttcctgaaagagagtaaaaacccagtgggaatttcaattatatttaatatattatttaaaagtagattactctcatagtttctgatttcaaaacagtaaaagtttatacatggtttaaaaataatt

SEQ ID NO: 423962 - DNA, 636 bp, Homo sapiens
gatccaaaaagaaaccagtcacaaggctgtgtgagtcttaggcaaaggcagaaagctgggccattgagtgagcatctgctgatgaatggtgaggtcactagctattttccatgcttagcttccagctcagcttatactgtccagaaaggagattaaaatattcctgtctagagaggtggatcatcacatgaaaaaatatttcctggtcattcagttttgaagatatcaattgaaatgcttggttcacaccaaatcaatcaacaataaaactactggagaggtctcactcatgttagagtttcccataaaattatcctaattttcttttaaatatgtttgctagttctatgattattttccctaaagttamtttctttccatatcttgctctgtttggtttcatattttcattctccaaaaccatctctatgttgccaaagtgaggcactgccccatgactgcattatcagatgagccactgtctatgtcgctaacctcctgtactaattctctgttttaaatacttaaagtatttcatttctttctggtcgaggtttgactaaaacaatatgaaaggatagaaaagatcatcagaaatggaaagagttatctatcataaaagtcagaaacaaagga

SEQ ID NO: 423963 - DNA, 636 bp, Homo sapiens
gatccaaaaagaaaccagtcacaaggctgtgtgagtcttaggcaaaggcagaaagctgggccattgagtgagcatctgctgatgaatggtgaggtcactagctattttccatgcttagcttccagctcagcttatactgtccagaaaggagattaaaatattcctgtctagagaggtggatcatcacatgaaaaaatatttcctggtcattcagttttgaagatatcaattgaaatgcttggttcacaccaaatcaatcaacaataaaactactggagaggtctcactcatgttagagtttcccataaaattatcctaattttcttttaaatatgtttgctagttctatgattattttccctaaagttaatttctttccatatcttgctctgtttggtttcatattttcattctccaaaaccatctctatgttgccaaagtgaggcactgccccatgactgcattatcagatgagccactgtctatgycgctaacctcctgtactaattctctgttttaaatacttaaagtatttcatttctttctggtcgaggtttgactaaaacaatatgaaaggatagaaaagatcatcagaaatggaaagagttatctatcataaaagtcagaaacaaagga

SEQ ID NO: 423964 - DNA, 576 bp, Homo sapiens
gtaaacatagataaaataataaccatatgtagtcaatatctttaatatcaattgtgagagtgctttatcagatttggtgcttaataccaaacattgagaggtatctactagcagagatttgttttattttcaatttttacaaggtgaagtttaaggcccaatattctttataatgtgctatgtgattatctgtctcaaaataattttaacataaaactatccaggggtagaatccctgttttaatgtatcaccttatctatcaaaagatattttcatatccaaatatccagataatgcctttgtttcttcatattccagctaattttttaaatgcccacatggaaattaggatatccatttcaaaggtacatttcaaaattmccttattccatcttctttaaaaaatatgtttatataaggtaacaattccaacagtgtgccattgggtttatagcccaaatagacataatatgtataatagtaatagcacaagaaagtacaggtggtggaacaatacaaaaataaagtttatgtatttcactaaaaccaagtttgtttttaactgaagtagattc

SEQ ID NO: 423965 - DNA, 553 bp, Homo sapiens
ataataataagaatacatgtaaatatatgtgtattaagamctgtaccatatatcgctactactccaaagtggatttctgttaggtgaaattttggctttttattgtaataaacttaaacataaaaaattaccatcaaaacacttattacaaaacattcaaatcaccctcttttataaatgtataaactatgtttggggccaaaactgtttttaaataagctcctattttattttttcaactgtttgattaaaattttaccttgatatttattcattgtgacaaatgtaaaattacatggacacatatgtatttcaacactaactttcatctataaaaaacaaaaattcaccaattaaattcctatccccagaaataatactacacctatatctgaaaattattttgtaccttatcttagagctctttcgtatctataaacttttagtatataaaataattattttgtctacttttatattaacactgatataaaagtggttattatattaaacaatgatataataaacactattttcattttttaaaattata

SEQ ID NO: 423966 - DNA, 584 bp, Homo sapiens
tatccatttttttcttaagcacttgggttttttgttattgagttgtttgagttccttatatattatgattattaatttttcagttgaattatttgcaaatattttcttttattctgtggattgtccsttcactttaattatttcctttgctgtacagaagccttttagcttgatgtgatcacatttgccaataatttctttctttccctgtgtttttaaggtcttactcaagaaatctttgcccagaccaatatcctggagcattccccagcattttcttctactagtttcatagtttcaggttttacatttaagtatttaaaccatttcgatttgatttttgtgtattatgagggacaggagtctgattttattcttctacatacagttagccagttttcgcagcatcacttatttaaaaaactgtcaaaaaaaggccaggactagatggattcacagccgaattctgcctgaggtacaagtaggagctggtaccattccttctgaaactattccaatcaatagaaaaagagggaatcctccctaactcattttatgaggccagcatcatcctcatactaaag

SEQ ID NO: 423967 - DNA, 584 bp, Homo sapiens
tatccatttttttcttaagcacttgggttttttgttattgagttgtttgagttccttatatattatgattattaatttttcagttgaattatttgcaaatattttcttttattctgtggattgtccgttcactttaattatttcctttgctgtacagaagscttttagcttgatgtgatcacatttgccaataatttctttctttccctgtgtttttaaggtcttactcaagaaatctttgcccagaccaatatcctggagcattccccagcattttcttctactagtttcatagtttcaggttttacatttaagtatttaaaccatttcgatttgatttttgtgtattatgagggacaggagtctgattttattcttctacatacagttagccagttttcgcagcatcacttatttaaaaaactgtcaaaaaaaggccaggactagatggattcacagccgaattctgcctgaggtacaagtaggagctggtaccattccttctgaaactattccaatcaatagaaaaagagggaatcctccctaactcattttatgaggccagcatcatcctcatactaaag

SEQ ID NO: 423968 - DNA, 584 bp, Homo sapiens
tatccatttttttcttaagcacttgggttttttgttattgagttgtttgagttccttatatattatgattattaatttttcagttgaattatttgcaaatattttcttttattctgtggattgtccgttcactttaattatttcctttgctgtacagaagccttttagcttgatgtgatcacatttgccaataatttctttctttccctgtgtttttaaggtcttactcaagaaatctttgcccagaccaatatcctggagcattccccagcattttcttctactagtttcatagtttcaggttytacatttaagtatttaaaccatttcgatttgatttttgtgtattatgagggacaggagtctgattttattcttctacatacagttagccagttttcgcagcatcacttatttaaaaaactgtcaaaaaaaggccaggactagatggattcacagccgaattctgcctgaggtacaagtaggagctggtaccattccttctgaaactattccaatcaatagaaaaagagggaatcctccctaactcattttatgaggccagcatcatcctcatactaaag

SEQ ID NO: 423969 - DNA, 571 bp, Homo sapiens
attatttctccaatttaactgtatctttgtaaccattgaccaatctcttcctttcccaccagccctctccccatcatagttttttccatagttttttctccccatcacagctttttcactctaggttttcagctagtgagagaaagtgttacagctcgtttactcccaccactggcaagctccrggttcttgtcccacaaccaagaataataagccacatgcacaccagagagtgagtaatgcagagttggatttattaagcagcagagaagctctcaccaaggagaagggatctgagatagggtttctggctgtgaggctaagttcagggtttttatacacttggaaggaggaggaatgcactgattggtctgcgggccaacttggaggaagcaccaatcagaaagagacatgttagtggaaagaaccaattgaaggcagaggtaaaggctcagcctacaaccaatcaggggctggaggaatgttacactttatgcaaactaatgttcggcccatgaccaaacacagaaatataggtatatgtaaaataagtgaaagataaggaccagtt

SEQ ID NO: 423970 - DNA, 568 bp, Homo sapiens
ggtttctggctgtgaggctaagttmagggtttttatacacttggaaggaggaggaatgcactgattggtctgcgggccaacttggaggaagcaccaatcagaaagagacatgttagtggaaagaaccaattgaaggcagaggtaaaggctcagcctacaaccaatcaggggctggaggaatgttacactttatgcaaactaatgttcggcccatgaccaaacacagaaatataggtatatgtaaaataagtgaaagataaggaccagttgggaggaagtgtgtgaaacgagacagaggggtaagccaaggagagggaaatgtgtccaaaacaggagtggaatttgttcatctgggttcaaagagtaggcatttccgtccaagaatgcagactctttcttatcttatggggcctgcagttttattttcaggctgttcctagtttaaaggagttttactgaggacccactctaactgcctgcctgacggtttctttctttctcctctctccctagcctctggaatcactattctattctctacttttatgagaacaaaatttttagctcc

SEQ ID NO: 423971 - DNA, 568 bp, Homo sapiens
ggtttctggctgtgaggctaagttcagggtttttatacacttggaaggaggaggaatgcactgattggtctgcgggccaacttggaggaagcaccaatcagaaagagacatgttagtggaaagaaccaattgaaggcagaggtaaaggctcagcctacaaccaatcaggggctggaggaatgttacactttatgcaaactaatgttcggcccatgaccaaacacagaaatataggtatatgtaaaataagtgaaagataaggaccagttgggaggaagtgtgtgaaacgagacagaggggtaagccaaggagagggaaatgtgtccaaaacaggagtggaatttgttcatctgggttcaaagagtaggcatttccrtccaagaatgcagactctttcttatcttatggggcctgcagttttattttcaggctgttcctagtttaaaggagttttactgaggacccactctaactgcctgcctgacggtttctttctttctcctctctccctagcctctggaatcactattctattctctacttttatgagaacaaaatttttagctcc

SEQ ID NO: 423972 - DNA, 568 bp, Homo sapiens
ggtttctggctgtgaggctaagttcagggtttttatacacttggaaggaggaggaatgcactgattggtctgcgggccaacttggaggaagcaccaatcagaaagagacatgttagtggaaagaaccaattgaaggcagaggtaaaggctcagcctacaaccaatcaggggctggaggaatgttacactttatgcaaactaatgttcggcccatgaccaaacacagaaatataggtatatgtaaaataagtgaaagataaggaccagttgggaggaagtgtgtgaaacgagacagaggggtaagccaaggagagggaaatgtgtccaaaacaggagtggaatttgttcatctgggttcaaagagtaggcatttccgtccaagaatgcagactctttcttatcttatggggcctgcagttttattttcaggctgttcctagtttaaaggagttttactgaggacccactctaactgcctgcctgayggtttctttctttctcctctctccctagcctctggaatcactattctattctctacttttatgagaacaaaatttttagctcc

SEQ ID NO: 423973 - DNA, 449 bp, Homo sapiens
tttataaattatccagtctcaggtagttctctatagcaatgagagaatggacaaatatattgtataaagcaattaaaatagaaaatttactgaataatactctctagtcccatccctatcactgactatgggtagtacatagaataaggttatttctttggggaaggaatgggaaaagatactgtaatttatctgatttatggtgtgttaaacatttcttatatcaatgtggctatatggtgtaacaaggggctatagatttatkaatagaacaaagtggaagtgaatgcatgtagctagtgatcttccaggttagaaaagatttcatgtggttaatctgaagtcttcagttgattttgatagctatggaaaatagtatccagtggaaaaaataaaattggccttagaacaactaagaacacaattacatctcttaatcaatacatgta

SEQ ID NO: 423974 - DNA, 553 bp, Homo sapiens
cccacaggcccaccaccacatagaagccaccaaaacttgrggcttgcacccagtgaagcaatgaccagaactgtaccttggccccttttagctatggctggtgctggagtgtctgggacaaaggatgccatgtcccaaggctgcacggagcagcgtggccctgggcctggcccatgaaaccatttttttttttcctaggcctcagctacagtgatgggaggggctgccacaaagatctctgaaatgccctagggacattttcttcattgtcttagctcctcgtcacttatgcaaccttctgcagctggttttaatttatccccagaaaatgggtttttattttcaactacatagtcaggctgcaaattttccaaactttaatgctctgctttccttttaaacataagtttcaatttcagagcatctctttgtgaacacacatgactgtacacttttacaaatagccaggttacctcttgaatgctttgctgcttaacaatgttttccaccagatacactaaatcttctctcccaagttcaaagtcccacagat

SEQ ID NO: 423975 - DNA, 594 bp, Homo sapiens
gtaatttacttatagtgactctattttagggaggaatctttctgttgcagcttacaattatatatgcagaaatagaatttattagctcatgatattgaaaattttgtaggtagacctattttcaagtgtatctgatttctcttgcttatgcaatgttaccagatatctatacatgtttaatctcgtagctctttgttgattttattctcaggcatctcttcaagtagagctaaaaacggtcagttggcagctaacacagtacttcaagttgaagattgctgagaagatatgtggttcttccaactatggaattaatttctatggctgaatttccttgctgtgtcactttcccttgagtaaatctctatccagggaagtgtaattcctggctgggcaagcctggaaggattcaccattgtgacaatgatgtgagttaacagactggtaagcctggcaaaaatcactkcagtgggagaggagcagtttctaaaataaaaattaataaaccaaagataaaattagaaacaaatattagatataaaaggagtgatttattcacattggggcagaaactgagtctttatttagattttc

SEQ ID NO: 423976 - DNA, 561 bp, Homo sapiens
aagttattaggtgaggctgaccaaggtatcaggagctcactctgcacacgaagattctcaggatgtaggacatggaataaaggaagattttggagctttaagatttaatgtctgtcctgctgcgtttggacttgtgtgaggactgagaccctttggttttggacaatttcttcattttgaaaaggaaatgtttacccaatgcttgcaaaatcattgtatcttgaaagtaaataaatttttattgatcctaaaggctcatagctgaaaggaacttgccttgaatctcagatgaaactttggactttagagttgatgctggaacaagttaagacttttgggaactattgacatagaatgatatgacattgtgtagtattttgtatgtcagaaggacataagatttggagaaccaatgtcataaggtggtgttttggtcaaagaagcaaacctctcatgaagagattaatgctcttcctgggtaggaggcagtgaatgagacttctcattctattagttcttacaagrgttgattgttaaaaagaagttggcgcctcctctgtc

SEQ ID NO: 423977 - DNA, 575 bp, Homo sapiens
acccctttcatgttttcaagatgttgtcaaggagtagcttcttactacataggtactgaaatcacagagatgtgcgcatttgactaattctagcaaagcaatgaaagtgaaagtaatgtgccacttcctggtcaaaggttktgaaaactagatcttactttaaaacccccttagcattagttggatgaagacaacaatgatgctctagtggatgaaaaaactgtgaccccaaatatttcttttttttttttttttgagatggagtctcgctctgtcgcccaggctagagtgcagtggcacgatctcagctcactgcaaactccacctcccagattcaagtgattatcccacctcagcctcctgagtagatcggactacaggtgtgtgccaccacaccaggctaatttttgtattttttgttaatacagagtttcccatgttgatcaggcttgtcttgaactcctaacttcatgtgatccacctgcctcaacctcccaaagagctgggattacaggtgtgagcctctgtgcctggctgtgacctcaaagattagatctctgaatcaccatgtaaag

SEQ ID NO: 423978 - DNA, 548 bp, Homo sapiens
ctgcaccaaggtcccagtgcttaggttctgcccttgaatgcttgcttggtttatcagacatattgtttaaaatcaatgtaactgctccacatttgttttgattaatggtactatggtatatatttttgcatctcttcattttaatctaactttaactaattcttgcatataacatataattgggtctttttttctcatactttaagatgatacctttgttctaggtggtatattcagaccacatttaaagctcctattaatagagttggtttagtatctaccatgttggcaactgttttctgcctgtaaatttstttttttcttgctttcccttttctagctttgatggtgttaattgaacatttatataattaaattttatttcttcccttagcatattaattagacttcaaaaaatttagcaattgacctagagttacaacatacatgtttaaccaatcaaatcccaccttcaaactactataatttataatggactatttccagtttttccttagtgtcccataggatattgttgttatttattt

SEQ ID NO: 423979 - DNA, 365 bp, Homo sapiens
ttagacttcaaaaaatttagcaattgacctagagttacaacatacatgtttaaccaatcaaatcccaccttcaaactactataatttataatggactatttccagtttttccttagtgtcccataggatattgttgttatttatttcatgaattcataacctaccgtcacccaatactttgttataatttctttaaacaaatggtytttaggttggttaggataacaaaaataaaatattttatttttcattcagttattatttttctgatctttctatttctatgaagatcaaatttataacatattatttttctactacttaaataaattttagcatttcttgcgtgacagctctgagtgcta

SEQ ID NO: 423980 - DNA, 558 bp, Homo sapiens
gtgtattatacacctatgaattggtcccacagttttggaatgtttgattcccttttttaaactatattttattctttactttttaatttgggaagagtatattgatttattttagcttctatagacctttaaactcacagtttaatttcttcgctgtattctgcctactgattagcctaagacagttgttatttatattgcaatgttttctattatttacttttgattcttagcatttccttctctattcttgaaacatgttaattttttctmttataattattaacattttaaccatagttactttaaatttattatctgataactccaaaatatgaatcttatctgaatctggttgtaattctcatgggattcttgaggtgatgcttttctggcttgaaacctctgtggtcagtgatgcctttgccctagctttgctcaggtccactaggctcattccacccactcagcctagctggctgcactcagctcgcagtaccagcctaaatcccatccctgccaaaggtgacccaggtgcaaagcactgagggatgtggg

SEQ ID NO: 423981 - DNA, 573 bp, Homo sapiens
cttctatctttctctttactttccaatttgggaaatgcctattggcatcagtgaaatctgaactttggaagaaatataagcagatgggattaattgacagaacattttctgtttcaaaactttaaacatattattggaggttacttattttataaggtaagaaaatcctatagtagattaagagcccaagttaacaccttatagcctcttaaggctactggtagatgttctatgtaatcmaattgccagctatatggcaagtcttatacttggaaattttagccatagccactttcaagccgtcctcaccttttgacattgaatatagtttcttattttactatcagtttcatcaagtacaaggggaatgtgccgtccgtcagcctattgtgcatggcataagcacctatatatttatataaaatatatatacatatatatgtatattttgtgaatcctgataactaattctaggaattgtatttagacttttgccttagcattttcattttcttttgagactgcaactgttttgctagtttttgttggttatttagtgcactcatttgttct

SEQ ID NO: 423982 - DNA, 573 bp, Homo sapiens
cttctatctttctctttactttccaatttgggaaatgcctattggcatcagtgaaatctgaactttggaagaaatataagcagatgggattaattgacagaacattttctgtttcaaaactttaaacatattattggaggttacttattttataaggtaagaaaatcctatagtagattaagagcccaagttaacaccttatagcctcttaaggctactggtagatgttctatgtaatccaattgccagctatatggcaagtcttatacttggaaattttagccatagccactttcaagccgtcctcaccttttgacattgaatatagtttcttattttactatcagtttcatcaagtacaaggggaatgtgccgtccgtcagcctattgtgcatggcataagcacctatatatttatataaaatatatatacatatatatgtatattttgtgaatcctgataactaattctaggaattgtatttagacttttgccttagcattttcattttcttttgagactgsaactgttttgctagtttttgttggttatttagtgcactcatttgttct

SEQ ID NO: 423983 - DNA, 533 bp, Homo sapiens
atataccttggcatagttttctttgagtttcttgaacttggatttgttgagcttctcagatatgtgggtttatagttttcatcacagttggataatttttgccaattatttctctaaaatgctttttctatccctgctattctctccttttctttgaggattccaacttcaagtatactgggatgcttgaacttttcccatgagtccctgatatttgtttcttttctttttttttcattcttttttgtctctctgttccatatctggataggttttattacttaatcttcaagtttactaagctttttgtctgccgtgactaatcttttaatttcatccagtgtatttttaacctcaaacagtataggtttcatctctagaagtttattttatcttttaaaagtatcttctatktccctacttaacatgtttcatctttcttctagctccttaaacatatggaattccattataataatgtttaatatccttatctattaattctatcatctgttttattactgagttgtgct

SEQ ID NO: 423984 - DNA, 533 bp, Homo sapiens
atataccttggcatagttttctttgagtttcttgaacttggatttgttgagcttctcagatatgtgggtttatagttttcatcacagttggataatttttgccaattatttctctaaaatgctttttctatccctgctattctctccttttctttgaggattccaacttcaagtatactgggatgcttgaacttttcccatgagtccctgatatttgtttcttttctttttttttcattcttttttgtctctctgttccatatctggataggttttattacttaatcttcaagtttactaagctttttgtctgccgtgactaatcttttaatttcatccagtgtatttttaacctcaaacagtataggtttcatctctagaagtttattttatcttttaaaagtatcttctatttccctacttaacatgtttcatctttcttctagctccttaaacatayggaattccattataataatgtttaatatccttatctattaattctatcatctgttttattactgagttgtgct

SEQ ID NO: 423985 - DNA, 633 bp, Homo sapiens
tgtaaactataaaacactactgaaagaaattgaataaaacacaaataaatggaragacatcctgtgttcatagactgaaagaattaatactgttaaatgtctatattacccaaagcaatctacaagtttaatgccacccctatcaaaactccaatatcatttttttcaaaaacagaaaaagacagtcattaaattcttatggagctacaaaaggccctaaatatctaaaacaatcttgagtaaaaagaacaaaactgggcacatcacactccctgatttcaaaatatattataaggctattttaaccaaacagctggaataataccacgtatcaaccaatagaacagtatacaaagcctggaaataagtccacatatttacagtcaattgatcttccacaaaggtgctaagaacacataatggggaaaggacagcttcttctataaatggtgctaggacaactggatatccacatccagaagaatgaaattggatccttatttcatatcatatatgaaaatcaactcacaatgaattaaagaactaaatataagacctgaagctgtaaagctactagaagaaagcacagggggaaagctctacaacattgatctgagcaataattttttatat

SEQ ID NO: 423986 - DNA, 633 bp, Homo sapiens
tgtaaactataaaacactactgaaagaaattgaataaaacacaaataaatggaaagacatcctgtgttcatagactgaaagaattaatactgttaaatgtctatattacccaaagcaatctacaagtttaatgccacccctatcaaaactccaatatcatttttttcaaaaacagaaaaagacagtcattaaattcttatggagctacaaaaggccctaaatatctaaaacaatcttgagtaaaaagaacaaaactgggcacatcacactccctgatttcaaaatatattataaggctattttaaccaaacagctggaataataccacgtatcaaccaatagaacagtatacaaagcctggaaataagtccacatatttacagtcaattgatcttccrcaaaggtgctaagaacacataatggggaaaggacagcttcttctataaatggtgctaggacaactggatatccacatccagaagaatgaaattggatccttatttcatatcatatatgaaaatcaactcacaatgaattaaagaactaaatataagacctgaagctgtaaagctactagaagaaagcacagggggaaagctctacaacattgatctgagcaataattttttatat

SEQ ID NO: 423987 - DNA, 633 bp, Homo sapiens
tgtaaactataaaacactactgaaagaaattgaataaaacacaaataaatggaaagacatcctgtgttcatagactgaaagaattaatactgttaaatgtctatattacccaaagcaatctacaagtttaatgccacccctatcaaaactccaatatcatttttttcaaaaacagaaaaagacagtcattaaattcttatggagctacaaaaggccctaaatatctaaaacaatcttgagtaaaaagaacaaaactgggcacatcacactccctgatttcaaaatatattataaggctattttaaccaaacagctggaataataccacgtatcaaccaatagaacagtatacaaagcctggaaataagtccacatatttacagtcaattgatcttccacaaaggtgctaagaacacataatggggaaaggacagcttcttctataaatggtgctaggacaactggatatccacatccagaagaatgaaattggatccttatttcatatcatatatgaaaatcaactcacaatgaattaaagamctaaatataagacctgaagctgtaaagctactagaagaaagcacagggggaaagctctacaacattgatctgagcaataattttttatat

SEQ ID NO: 423988 - DNA, 501 bp, Homo sapiens
tgggtccctgctcccataccttgaattcctgagatggccttgaggctccacacaagagtacagttagaaaaccattgcttgagatgatagcaagttaaagatattattttwaaaaatagattttaaaagatacaacattctcaggcaggtcatccatagccctctcaaacagtacatggcaattatcaaagacttttctgaatcagaagtaggatataaggagtgacatcaagaaataaatgagttattctctattattaccctagtcagaaggctttcaagatgaccatccaggaaagtcaaactcaccctgccatattgctctcctgccacagcagtctcctaattttcacgagtgatgccctgtactctttttccattcccctctaacccgtcacttaacactaggcccaatgttagactctagggacagtctgtgctctttgccccaagcacttaaattagggcttagcattgattcagttctgctcctcatctcac

SEQ ID NO: 423989 - DNA, 541 bp, Homo sapiens
cctgcctggcgacagagtaagactctgtctcaaaaaaaggaaccataacacaagtccaattacaaktgccatgccaaaagttcaagcattatgaaagctcaaatgcctgactaataaatctcaatgacagcatctggtatggctcctctgaagacaggtcatctaagctgggtattcagaaacaagtaagattttgagaaatctatttgttcaacaaatacctactgagcttctactatatgccaagtcttgttttagatggtaggggaagagcagagaccaacacacagaaggtccctgatcccataaagctatgttctgttgggagcaaaagacaaataaaaaagtaaacaagtgagggaatatcaagtggagacgattggatgctcaaagacaattcaacttgggtgccttgcatttctgcatgtttcatgagaaggggctctaactgtccctttgtttggaactgtcttttcaaggatgtttgtatagcaaacagccttggaagataatagtgtccccctcgggagcaggtggtagg

SEQ ID NO: 423990 - DNA, 223 bp, Homo sapiens
cttgcaggtaaatccttttctagttgaggcccyagctgagaccccagccctggccaacatcttagttgcagcttgtgagaccctatgcagaggacccaggtaagacatgttcagactcctgatgaaaacaaaatttgagataataaatgggaattgtttaaagctgctaagtttatggtaatttgttaagcaatacagaaaatgaatacaggtgtaatgtaga

SEQ ID NO: 423991 - DNA, 598 bp, Homo sapiens
gctaccaggtacatttcttttgaaaagcagctattaacaacttgctatctrgctcttgtcaacatcgaatgcctaattcatggagacttttggacttccagtctgaagttctcattgtggggtaggtcaacttggactcaactggtaacaagctgtgaagagcccagtaaaccttgttttcaaatagaaatggtatattcaagaatgcaggcaccctggccccagttgcatctcagcttcacatgaaaaactggcaggtttctctgggagaaactatctcctctattctaccatttgaaacaaagtcactggctcaatagggccttttgttcacagaattctgccctcaatcaaactatggcctgcaggctggccactcatttttttttaaataaataaaacaaaactatgtttttcatgataaaaataaacagtgcaaagaagcatatgagggaacatgcatttaaaaatattgtttttaaaaaaattttaagttttattttactttcagggatacatgtgcaggtttgttatataggtaaactcatgacttggaggttttatgtacagatattttgtcacctgggtaccaagcata

SEQ ID NO: 423992 - DNA, 598 bp, Homo sapiens
gctaccaggtacatttcttttgaaaagcagctattaacaacttgctatctggctcttgtcaacatcgaatgcctaattcatggagacttttggacttccagtctgaagttctcattgtggggtaggtcaacttggactcaactggtaacaagctgtgaagagcccagtaamccttgttttcaaatagaaatggtatattcaagaatgcaggcaccctggccccagttgcatctcagcttcacatgaaaaactggcaggtttctctgggagaaactatctcctctattctaccatttgaaacaaagtcactggctcaatagggccttttgttcacagaattctgccctcaatcaaactatggcctgcaggctggccactcatttttttttaaataaataaaacaaaactatgtttttcatgataaaaataaacagtgcaaagaagcatatgagggaacatgcatttaaaaatattgtttttaaaaaaattttaagttttattttactttcagggatacatgtgcaggtttgttatataggtaaactcatgacttggaggttttatgtacagatattttgtcacctgggtaccaagcata

SEQ ID NO: 423993 - DNA, 536 bp, Homo sapiens
tgactctgtttcatggtgctacaggttttatagtcagatggagactcagattgggaagtacagttctgccttttttaaacatggaaaaccaggctcaagcaaggtgaaatgacttgctcagggtcacatggctggaagcagggctgcagctggagcgcaggcatcttcttacccagctcctcagaaggacattcattattgggataacttgaggagatttatgtaacagcacttgaagttaacggggtctttggaatrcatgtctaccttgtggcataaaaagcactgcctgtgtatgtgtagctttgttacagaaggaagcagacacatacttggcatatatatttatttccttctaactgttgattctaaaccatctgaatgtttctaaacattctgtaatataaggaattgcaactcatttcccatattttgtgcagtgtgtggtactgagatattatttatgtgggcaagttgggaattgtgatgggaagctaaacatgaataggacaataaaaagagaaacatatttaatt

SEQ ID NO: 423994 - DNA, 580 bp, Homo sapiens
tatagctccaaaataatctcctttgactccatgtcccacatccagagcatgctggtgtaaggggtgggctcccaaggccttgggcagctctacctctttggctttgcagggttcagcccccatggctgctttcacaggttgttgtgtgcctggggcttttccaggtgcagggagcaagctaccagtggacgtagcattctggagtctggaggatggtggcccccttctcacagctccactaggcagtgcctcaytggggactgtgtggggattccaaccccacatttccccttggcactctcctagcagaggctctctgtgagggctctgcctctgtggcaggcttctgcttgggcacccaggctttcccatacatcctctgaaatctaggcaaaggctactaagactcctttactcttgcactgtgtgggcctgcaggcttaacaccacatgaatgcctccaaagctcatggcttttgtcgtctggagtggcagccagagatgtactggagtccctttgatccacagctgacgatggagcagaggagatgtaggaagcagtgtcctgagactgcacagg

SEQ ID NO: 423995 - DNA, 523 bp, Homo sapiens
ggtacacttgttacaaatgatgagccaatcttgatacattaatattaaagtccatagtttaaggttcactcttagtattatacacttctatgagttttgacaaaaaccctatcacatgcatctaccactacagtatcatatagaatagtttcactgttctgaaaatcacctgtgctccacttattcatcctttcttcacctctttcctcggaacccctagcaatcactgatctttttattgtctccacaggtttgcctcttccagactgtcatatagttgtaatcttatagtatatagccttttcagattggcttttcttacttagcaagtttcctccrtgtctcctcacagtgtgatagttcatttctttttattactgaataagatttcattgtatggatgtaccaccgtttgtttacctatttacctatattggttgctttcaagttttagcaattatgaataaactgctataaacaaaagacatcaaatcaacctagatgccatgaacagcagactgga

SEQ ID NO: 423996 - DNA, 614 bp, Homo sapiens
aaaacaaactttctatattaggctgactcatcccaaaggcagtaacaggcaaagcctggacccaggcgaagtctcaataacattatcaaagaagccagggctcagaggaatgtgctctagagactctcccagcactctctcaaaataaggagaagaaaacaaatttccctttcccctatgatatgagtaaacttatgagtttatagattcctgttttctgtaactagtaacttcaagtattctgttttatctaagcagcacagtgaaagttataagacatgcctgagcaggcctgggctgcagccatctaggtgccatagcaaaggttatgagataaacccgtgcaaggcactagagcaagcctggataacagccatctagacckcatagcaagagttgcatgtaatcctgagttatgaacctgtcacaatttgattaactgcctttgttctgcctctgtctccttgctttcacaccactacacactactataagcttattccaagctagcccacccccttttagaagtgtgtataaaagtcaagtgctgtctttgttctaggcccagtttttggatgttaatctgctaagtctaagtgcactcaataaacatc

SEQ ID NO: 423997 - DNA, 638 bp, Homo sapiens
tttcactgctggtatataagaaagcaatttatatattaaccttgtatcctgcaatcttgttaaaattgcttattagcttcagggttttctgatgttgattctttgggattttctacattgatggtcatgtcatctatgaacaaatacatttttatttcttcctttccaatctgtatacattttatgttattttcctatcttattgtatcagctaggacttcccagtaggatgttaaataggagtggtaagaacagacattcttgccttkttcctacctgatcttaggggtagatcttgcttctcaccattaagtataacagtagctgtatggtttttgtagatgttttatatcaagttgaggaagtccctctctattcctagtttgctgagggtttttttttttttttaatcattaatgggttttgggttttctcaaatgttttttctgcatctattgataaaatcatgttttttcttatttagcctgttgatgtaatgaattaaattaactgatttttgaaaccacacatggaataaatcccactggttcatgatgtataattctttttatacaccattgggtgttatttgctaataatttgttgtggatttttacatctgtattcatgagagatgg

SEQ ID NO: 423998 - DNA, 615 bp, Homo sapiens
actgctggcttatcagaggtttgagattaactctggatttaatttgtctgagctatatatttcccagtccttagtaaatgaccaagaattgattctgggtggtgagaaatccatacactatcacactggcatgtcccttgaggattaggcaagccattttagtactgaggtacacaacagayctttgccctcctgcttgctatggttggctttgaacgcagacattgagtgtggagagggtttggctctgagtccaagtgggctgactgcctcacacaatctcttcccatgccccctgaggtttctgagccccattgcacaggcagtcactagatcaactggaatttaccgcatcaaattcaagtgtagacaaaccttttggtattcatgccggtgtgtgtgaagtgtccacactgatacctggcttgtcagtggtggctaataccttgaaaacatgatggagacactgagctgatttggaggcacatatgttagctattgatcaagggcatcttttgctcttagttggggccccttaagccgcttactttcatagactaactttgacttctttcttcttcacatcaggagcccacttacatcctagccactgga

SEQ ID NO: 423999 - DNA, 615 bp, Homo sapiens
actgctggcttatcagaggtttgagattaactctggatttaatttgtctgagctatatatttcccagtccttagtaaatgaccaagaattgattctgggtggtgagaaatccatacactatcacactggcatgtcccttgaggattaggcaagccattttagtactgaggtacacaacagatctttgccctcctgcttgctatggttggctttgaacgcagacattgagtgtggagagggtttggctctgagtccaagtgggctgactgcctcacacaatctcttcccatgccccctgaggtttctgagccccattgcacaggcagtcactagatcaactggaatttaccgcatcaaattcaagtgtagacaaaccttttggtattcrtgccggtgtgtgtgaagtgtccacactgatacctggcttgtcagtggtggctaataccttgaaaacatgatggagacactgagctgatttggaggcacatatgttagctattgatcaagggcatcttttgctcttagttggggccccttaagccgcttactttcatagactaactttgacttctttcttcttcacatcaggagcccacttacatcctagccactgga

SEQ ID NO: 424000 - DNA, 546 bp, Homo sapiens
tctccattagtgcctgccaaatggcatcctaaagaattgttttctcttccattggactgcaagttttgcaaatggtctatcagttcaggaggagggagaggggctggatgacaaaactgtagtcatttcattatgtttcttgtactgtctctgggttggcaaatagtgctcaatggatggttgatgaataattgratagataattgaatggaagattccttgtgagagacctgaagatatctggttcttgaaatgaaaagcaacatgctttgctttttcatttctttgctcaattatacaatttggtctacggttggcttaggtaagggtggtagcagcccacagtgtgtctggactgggtcatctcataaccaaattgctcgtgcatgaggtctgaagcaggcagtgaatgctatttgagaataaataccaacactgctgaaagccaagaagtacaattgatggggggaggctttgaggaaatttaataataaaattcaaattttccatcgagtttattgactccttaaaactcaagaaaataac

SEQ ID NO: 424001 - DNA, 608 bp, Homo sapiens
cctcccttcttatcaattagatactctttccactctctttcccttgaataggcaagcaccggtcatagagactcaatcctcccatctgtgtcatctttggtcatgaacaatggtcagctaaccattcacaagctgtacaggcttcagagaagagagtagaacatgctggtggcaaagtggaacatctgctgagtgctgaaaagagtgttcagtcaagtttagcctaaagctgcctccttacatatttaagctcagtctaaatgtttccctgtacatcatgaactataacaagyagaggtgtaaaccgaccattgctcacacttgtgccagtcactgaattttgggcaatcaaatgtagccaattgtttgaaccgtgatcaaataaggcaaaagctgagctgtaaccaatccagtgtttctgtacctcactaccattttctctatgtccctttcctttcgctgtccataaatcttccatcacgtggttgcactggagtctctctgcatctgctgtggttctgggggctgcccgatttgcttattgtcattgctcaatacaactcttttacatttaattcggctgaagtttttcttttactgagagtcac

SEQ ID NO: 424002 - DNA, 510 bp, Homo sapiens
aagaacatattcatctccacagtgtttagcaggtcattctgctcagaagaattgactcctcttcagtgactccccagtgcctaaaagataaactccaaattcatgaacttcacagttgatgttttctacaataacatctccaagctttgcctctataattttcttatacaaacctactaaacgttttgctttccctcttctgtattcctactcttacccaattgttcagactgtttctctgttcgtaatttcstatttctttccctcccacatcctagtcaaatcttttctattcttcagaatttcatgtttgcattaagcttcccttgaccattgcaaccatctgtatttttctcatctcctattttatgaagcacttctatcatttttcttttttatccttattttctctgtgacttttaaaatttaataacatgtacattgttaatatttagcattacatttaagtttattgtttctaatttatcttatttttaaatttaaaaatta

SEQ ID NO: 424003 - DNA, 510 bp, Homo sapiens
aagaacatattcatctccacagtgtttagcaggtcattctgctcagaagaattgactcctcttcagtgactccccagtgcctaaaagataaactccaaattcatgaacttcacagttgatgttttctacaataacatctccaagctttgcctctataattttcttatacaaacctactaaacgttttgctttccctcttctgtattcctactcttacccaattgttcagactgtttctctgttcgtaatttcctatttctttccctcccacatcctagtcaaatcttttctattcttcagaatttcmtgtttgcattaagcttcccttgaccattgcaaccatctgtatttttctcatctcctattttatgaagcacttctatcatttttcttttttatccttattttctctgtgacttttaaaatttaataacatgtacattgttaatatttagcattacatttaagtttattgtttctaatttatcttatttttaaatttaaaaatta

SEQ ID NO: 424004 - DNA, 474 bp, Homo sapiens
atgttgactataatttgtaatgccctcagctagtgtctctgctatatatacctctatgttataagactatgggaacattcttcaaaaatattatctaaagagcccatgtaaagattatcatggaataatacaatgaggaaatttaattattctgtgacatcaaacatatgcttgcctaagaaacctaaaaaaagttaaattatttttgaaattttcagtcagatatttctattgcacagatgatatatttatttttgtgcaagtgaaaaaaatgttacttkacatattttggcaaaataacttgtaaatttattgcacttacttgccaatgaatgtgttatgtctgcaaatcataaatatttgtaatgtgtaacactggtaggattttgagtcccacataaaaagttacctctggccctaattctttttagactgatcaaattaattgcattaagggagtgattaactatttat

SEQ ID NO: 424005 - DNA, 474 bp, Homo sapiens
atgttgactataatttgtaatgccctcagctagtgtctctgctatatatacctctatgttataagactatgggaacattcttcaaaaatattatctaaagagcccatgtaaagattatcatggaataatacaatgaggaaatttaattattctgtgacatcaaacatatgcttgcctaagaaacctaaaaaaagttaaattatttttgaaattttcagtcagatatttctattgcacagatgatatatttatttttgtgcaagtgaaaaaaatgttacttgacatattttggcaaaataacttgtaaatttattrcacttacttgccaatgaatgtgttatgtctgcaaatcataaatatttgtaatgtgtaacactggtaggattttgagtcccacataaaaagttacctctggccctaattctttttagactgatcaaattaattgcattaagggagtgattaactatttat

SEQ ID NO: 424006 - DNA, 546 bp, Homo sapiens
cctgaaatgttatttcgttgttgctggctgctctctacaaaaaagactgagaagagagtatagagcgatagtatatgaaagagggtagggaggaatgatttaagtcttaaacattccacagtatgtaaggcttttacattataaaatgtaaacaggaccttgatgttagatgtatgataatctaatgtgaaatgtacaaaatctcccactaagaggctttataagaaatagcttagcatttattttcaatgactttaaaaatgtcctgacgggatctaagtaacacaatatttggattgttttttaaggtaatgttgagcccacagttttttacaggtagtgtgctagtatgtcctatctcattttgtaactattatttttcacattttatagatgagaaaattgagctgtagtgaagttaactatcttgctaaagatcacatagtaagtggtagaaccaggattttaacgcacattttattccagggccctagttcttaatgcttaaacttgrttatgtcactgaaaatattcctatgggatata

SEQ ID NO: 424007 - DNA, 576 bp, Homo sapiens
gctaaaaatacaaaggctgacaatacccagtggtggtgaaaatatggaataacttgaactctcatacattgcagatgggagtattaaaatggtacaaccattttggaaagctgatcagcagttcttataaagttaatcatacactgtatcagttatctattgccaccttaactaaccagatcaaagtttagtagcataaaactatatatatatatatatatrtgtgtgtgtattttttttaagatagggtctcgccatgttgcccaggctggtttcaaactcctgagctcaagcaatccacctgccttggtctcccaaagtgctgggattacaggtgtgagccactgtacccagcctaataattctttctttatgattctctgggtcagtaactcggtttgagtttagccaagtggttcttcccctagtcttgcacagaatcactcgtgtcaccacagtaatacagctcaactgggaccagattttctaaaatagcttcactcaaatatctggtaagtgttattgattgagctgcatgtcttcagcaagctagcccaggcttctttacatggcatc

SEQ ID NO: 424008 - DNA, 521 bp, Homo sapiens
cacctctcctgctgcatttttctccatggtactaagcaaatttaacaaaaactataattttcttattttgtttattgactgttttccttctagaagtaaacaccatgagagcaagattttggcctgttttgttcacagccatagtccctgtgcctggaacatggggaacgtgttaagtgatcactcaatacttgttgaataacgaggagttgaaattatcaaagtaaatgaggtctcccagggaggacatgtagagtaagaacagaagaaaggtaaggtgggtaaaggtagggaaacaactgtcaaccatcaacatttaaaggctagaataagaaacaagattcttgagagcrgatcaaagaattaggtgagttagaaggatcataaggttgtagacataggctcaacgaagagccttaagaactgttaaagaggtagatgagtgtgtcaaacccttaatgccatttttaggaagatcaagagagaaaaggtgcacagccagcatgtacagagttaggatg

SEQ ID NO: 424009 - DNA, 527 bp, Homo sapiens
tggctatgtctagctacaaaagtgttcaggaaacagagcatttcagctgagtactttgttgccaccaatgaaattagggttttactactaatgaaaacaaggaatctgaaatatgggaacaaartaagaggcaatttaagatggtctaggccaaaaatgtggtggttaagactaggttagtaccaatgaagtgttgctacatgggacacatgttgaagatccagccgacggggttcactgatggggtggtcataggaggtgaaagaaagaagtcatggatgcctccatggtttttggtctgagccactggatgtatacaattccagtaagtgagatggagaatttcctcaaactttgatttgtgtatatgttaatatctatgtgatcgcaatatgtctcagacacaaatgatctgcccttcacctcctctccgctctccaactctaatcttacacaactgacaccaagattaccccagtatacattcggcctcactgccagcatcacttattttagaaccagaagtt

SEQ ID NO: 424010 - DNA, 527 bp, Homo sapiens
tggctatgtctagctacaaaagtgttcaggaaacagagcatttcagctgagtactttgttgccaccaatgaaattagggttttactactaatgaaaacaaggaatctgaaatatgggaacaaaataagaggcaatttaagatggtctaggccaaaaatgtggtggttaagactaggttagtaccaatgaagtgttgctacatgggacacatgttgaagatccagccgacggggwtcactgatggggtggtcataggaggtgaaagaaagaagtcatggatgcctccatggtttttggtctgagccactggatgtatacaattccagtaagtgagatggagaatttcctcaaactttgatttgtgtatatgttaatatctatgtgatcgcaatatgtctcagacacaaatgatctgcccttcacctcctctccgctctccaactctaatcttacacaactgacaccaagattaccccagtatacattcggcctcactgccagcatcacttattttagaaccagaagtt

SEQ ID NO: 424011 - DNA, 609 bp, Homo sapiens
gctatattcttatcttaataaggatgaatgtttgtgtgttaaatatatttatagtaaagaacagtgttttagtgcagagtttcatagagatccataactaatcatatctcccatgtaattttcatttgccaatgaacagaggcaytttgataactattccttatttccagccactaaagtaggccatgatttttattctcatttagcagataaggaaagaaatgcacaaagaggtgaaataactgacttagccatttgaagatgtggtagtagggttgaaattcgaaatctcagcctcttccaacttcataaaccctagagctatatagccggttttgcaataagaaagcctatttatatgactttccatgggaccaagaagtcaaaaccacaacagggtaaaagcaggaagacatggctttcttggcagggtatttcaaaggcagcaacgttaaccaatttcagggcattttgctatattgtgggggctgtcctggataagcatgactaaaaagtgcttgaataaagaagcatattctttgagaacactgttaaccttcttgtttttgaaaaattaaactaatcaagctctgtgcttataatgagtcc

SEQ ID NO: 424012 - DNA, 566 bp, Homo sapiens
acaatttaagagatggaaggaaataaggcatagtgataaccagttccagtatcacagaaaaaagaataggtgatccaggagcatcrttgtgaactgcagtatctgtaggctacaaaagtaggagagaattttaactctagatgatttcactataggactagctttaggttggtaaaataataaacagtacttcttataaggctatatatattatacattcttataaccctttaatttactcctgtagaatacagaaagaggaaagggaggcaaatcaaaggaaactggaatgaaagaaggtgggaaaaacagagatggtaaagtaaactgcagaacagggtgaaccaggttatctgtagtgtcagctgcgagtccatgataaaaggacatttgaaaactcttggatttccagaagcccagagatggaaaggactctagcaaaatcctatcccataattttacagatgctattttaggcagtgttccttagagcttaataaaatgtagatttctctagtgtcatcatatacctgtgaaatcaaaagctcaagaattgggacccagag

SEQ ID NO: 424013 - DNA, 636 bp, Homo sapiens
aatatatccctacatattattattttactcactggaattgggctcattaacgtcaggtagaataatgaatgtctagaaagcaaaaatgaaaaatttccagactattcagtgctaccagtgcatygctaaggcttctaaaacagaatgccaaagcactgattccacatgcattcaaaatacagagttagtgcaatcctaaccacaatgattctcactccctgaagtttacttgttcaagtaagaggccaatgaggtctgactgaattacttgacttaatactcatggagttaggacacttaagacaaaggaagaaaataagtgtggctaaatatatacaatgcatttggaataagtaaaagacagaaccctagacattcagcaatcattacctggaaattaaagagggcaggagcaatcctattatgcattataaacagccccgctgctgacttaatggtagtttgagtagcataaccaaggagtccttgctccaatattaataggaaatgtattgtaggaatccaatagttcatgaaattaacaaggaaaatgaactggagtgaagcaaccttgcaagtaataggaggcatcagcaattgcttccctggagcatattgaacacttaaaaagagctt

SEQ ID NO: 424014 - DNA, 567 bp, Homo sapiens
ctcaattaaaccttcttaattaactcagagaagaataacaattgttattctgactcagagcaatgtttttcatacttctgtggaggtatttgtgatttcccagaccctgccacagacctacacagcctgaatctctcaggagggtcctgggaataagcatttcagctgtttacacaggaggcaaaaaaacacaaatgtaaggaactaaacaaattttctcatactacactcttaaaatattgtttgttctcaggagcaggtgttcttaccaagtaaagagcgagacccagatggaaaagatccttacttcacaattcgtactttttatcaattataccaaacccttayagaccaaatcatattcccaagatgttaaatgcacaatggttactttagaggcataaaaagtttcattttagtatctatacattgtaaagtattttagaaaaaaacaactaacccattaaacccatgatttcatggatattattaagaaaagttaggttttaaaaataagacagtgtagaaattgatttaagaaaaatattaagtaaataatcagacaag

SEQ ID NO: 424015 - DNA, 590 bp, Homo sapiens
tcaattaatcacttgggcaaatagtattagtaatacactttctaagtattagctgtagggccacacttcttggcagtctttccccaacaccactgccatgtgactcattggtactatcagtccaattgcctaaaaggaaagtatggcagtgatcttctaattcacacacccatgtcattaaaggaagaaaactaagtacacatctcccagtacacatactaccataccataatatattatgtacattataaaatataaaaaaaagaaaakaaaatgaaaaagatacaaatagaggctctaatgttttcattctgcagcccaatagagtacatgcagtgaattgattcatacatgaaaggctacacaattgcacctcttgcaacttctgtatttcatttgataccacaaaccacctgcagctctacatttcagtcatactggacttctttgtgatttcccaagcacaacttacttcttggattctattttttgtgtgtatactgttcctagaaattcttccttgcatataccttcttgcaaacttctattcaccttcctaaaccctactcaagaataacctctatgagctc

SEQ ID NO: 424016 - DNA, 567 bp, Homo sapiens
ctcaattaaaccttcttaattaactcagagaagaataacaattgttattctgactcagagcaatgtttttcatacttctgtggaggtatttgtgatttcccagaccctgccacagacctacacagcctgaatctctcaggagggtcctgggaataagcatttcagctgtttacacaggaggcaaaaaaacacaaatgtaaggaactaaacaaattttctcatactacactcttaaaatattgtttgttctcaggagcaggtgttcttaccaagtaaagagcgagacccagatggaaaagatccttacttcacaattcgtactttttatcaattataccaaacccttacagaccaaatcatattcccaagatgttaaatgcacaatggttactttagaggcataaaaagtttcattttagyatctatacattgtaaagtattttagaaaaaaacaactaacccattaaacccatgatttcatggatattattaagaaaagttaggttttaaaaataagacagtgtagaaattgatttaagaaaaatattaagtaaataatcagacaag

SEQ ID NO: 424017 - DNA, 590 bp, Homo sapiens
tcaattaatcacttgggcaaatagtattagtaatacactttctaagtattagctgtagggccacacttcttggcagtctttccccaacaccactgccatgtgactcattggtactatcagtccaattgcctaaaaggaaagtatggcagtgatcttctaattcacacacccatgtcattaaaggaagaaaactaagtacacatctcccagtacacatactaccataccataatatattatgtacattataaaatataaaaaaaagaaaataaaatgaaaaagatacaaatagaggctctaatgttttcattctgcagcccaatagagtacatgcagtgaattrattcatacatgaaaggctacacaattgcacctcttgcaacttctgtatttcatttgataccacaaaccacctgcagctctacatttcagtcatactggacttctttgtgatttcccaagcacaacttacttcttggattctattttttgtgtgtatactgttcctagaaattcttccttgcatataccttcttgcaaacttctattcaccttcctaaaccctactcaagaataacctctatgagctc

SEQ ID NO: 424018 - DNA, 590 bp, Homo sapiens
tcaattaatcacttgggcaaatagtattagtaatacactttctaagtattagctgtagggccacacttcttggcagtctttccccaacaccactgccatgtgactcattggtactatcagtccaattgcctaaaaggaaagtatggcagtgatcttctaattcacacacccatgtcattaaaggaagaaaactaagtacacatctcccagtacacatactaccataccataatatattatgtacattataaaatataaaaaaaagaaaataaaatgaaaaagatacaaatagaggctctaatgttttcattctgcagcccaatagagtacatgcagtgaattgattcatacatgaaaggctacacaattgcacctcttgcaacttctgtatttcatttgataccacaaaccacctgcagctctacatttcagtcatactggacttctttgtgmtttcccaagcacaacttacttcttggattctattttttgtgtgtatactgttcctagaaattcttccttgcatataccttcttgcaaacttctattcaccttcctaaaccctactcaagaataacctctatgagctc

SEQ ID NO: 424019 - DNA, 532 bp, Homo sapiens
tttccctttgtgcatacatcaagccctggactgttgaaaacattaagtacctgaactttggctccttcaggaaaggctgtatgcatgttagtttataccaggtatctacccatctaactccattctttcatttaatcaataaactgcctactaggcatctggctctgtgctagctactaataattaaaactctgagcaagaaatacatgatctctgcctttatgaaggtcagagtccagcagagacataggaccataatgatagaatgtgataggcaccataataggagcaggacagggagctgcagaagctgtactgggagaacctccaggatgtcttttaggagatttaagcaacagtttctactgatgcaatcttataactgaaagagataatgattcacaaagtatttgccactatttataatactgacttgaatatkggccttatttatcatctgttctgtctattcaaataattaccttgtccttgggaacagtctgaacaggttctaatggccacacagttgatg

SEQ ID NO: 424020 - DNA, 584 bp, Homo sapiens
taattttccagactgaaaagtcccactcagtatctagcacaatgtttagaaaaagagccacagcaaagtgcatcatattgaaattgcaaaacaccagggacaaggacaagttcctaagagctttcagagagaaaaaaaataagttacrtacaaaaatcctggaatctgagtttttgttttttggtttttttttttgagacagaatctcactctgttgcacagtctgcagtgcagtggcatgatctcggctcactgcaacctctgcttcctgggttgaagtgattctcctacttcagcctcccgagtagctgggactacaggtgcttgccaccacatctggctaatttttgtacttttagtagagacagggttttgccatgttggccaggcaggtctccaacccctgacctcaggtgatctgcacacctcggcctcccaaactgctgggattacaggtgtgagccactgaatctgagtatcttaaaactattcagcctcaagaccagaaggagctacaagatgatggaatattgccttcaaaatttcaatgcaaaatgaacttcaacctggtatcctgtaaccaa

SEQ ID NO: 424021 - DNA, 548 bp, Homo sapiens
acttccaagactttgcttaaattgttccttcaccctgttgcttatttcatgcatctttctaacttaatactaataataaagccaccagtcaaggtgtcatttcctttttttaaaataaggtctaactcatccacttctgttcacgttgatttgtgcattctctaaagttcwaaagtacttctaaatccatcctgtgatattcatcccaaacttgttctcaatttaataaatatttattaagcaccaactgataatttaagatttcatcaataattagctttgtcttcaaatttttgagagagagatttttctcatgcaccttatgagaccagatattgctagaaatgtagatacttcattttcatgggccaatttagaaatcctaggtttaatcttgtatctgtagctctttccactacactgcaccaatggcttctggactgagtggtgaatgattttcttaaacctctacacacgcacaaatggtccctacctccaggagaactccctaccaaaacagacattgcaaaactaaaaaatatattgaa

SEQ ID NO: 424022 - DNA, 548 bp, Homo sapiens
acttccaagactttgcttaaattgttccttcaccctgttgcttatttcatgcatctttctaacttaatactaataataaagccaccagtcaaggtgtcatttcctttttttaaaataaggtctaactcatccacttctgttcacgttgatttgtgcattctctaaagttctaaagtacttctaaatccatcctgtgatattcatcccaaacttgttctcaatttaataaatatttattaagcaccaactgataatttaagattwcatcaataattagctttgtcttcaaatttttgagagagagatttttctcatgcaccttatgagaccagatattgctagaaatgtagatacttcattttcatgggccaatttagaaatcctaggtttaatcttgtatctgtagctctttccactacactgcaccaatggcttctggactgagtggtgaatgattttcttaaacctctacacacgcacaaatggtccctacctccaggagaactccctaccaaaacagacattgcaaaactaaaaaatatattgaa

SEQ ID NO: 424023 - DNA, 555 bp, Homo sapiens
cagctcaactagactgcaatttgcccatcttaataactggtatctcatgctcaagcctctttctaagcttccacagtgagtttactcatgacatctaaaattctcctctttggtgaatgcaacagtatatggyagctctccaaggcaaaggtgtaccttgaagtcaagcctacacaatgtgttctctctggctctttgaacaactcaacgatttgtctattggctgaaggccacatgattggaccagtcatgacttagtaccaagacagggtgactgagtacaactacaactcaaatctcttcaaagtgctcttgtcctgaatagactattaagtcgccttgatatttctttataggtcttactatctaaataatttcatgtattttatgtgttcatataaaatctgacttctctctcttggaccatatgagtttggggatctaattctgatcaaactgaacacaatgaggttatctttataaattcaatgaagtacctacaatatgttcatccctatgtaacatagacttaagacaaattaaaaaactgacttc

SEQ ID NO: 424024 - DNA, 555 bp, Homo sapiens
cagctcaactagactgcaatttgcccatcttaataactggtatctcatgctcaagcctctttctaagcttccacagtgagtttactcatgacatctaaaattctcctctttggtgaatgcaacagtatatggtagctctccaaggcaaaggtgtaccttgaagtcaagcctacacaatgtgttctctctggctctttgaacaactcaaygatttgtctattggctgaaggccacatgattggaccagtcatgacttagtaccaagacagggtgactgagtacaactacaactcaaatctcttcaaagtgctcttgtcctgaatagactattaagtcgccttgatatttctttataggtcttactatctaaataatttcatgtattttatgtgttcatataaaatctgacttctctctcttggaccatatgagtttggggatctaattctgatcaaactgaacacaatgaggttatctttataaattcaatgaagtacctacaatatgttcatccctatgtaacatagacttaagacaaattaaaaaactgacttc

SEQ ID NO: 424025 - DNA, 578 bp, Homo sapiens
gcaatgcgagaatgaactaataaaaatattgtcattcttcttcctccagccagctcaactagactgcaatttgcccatcttaataactggtatctcatgctcaagcctctttctaagcttccacagtgagtttactcatgacatctaaaattctcctctttggtgaatgcaacagtatatggtagctctccaaggcaaaggtgtaccttgaagtcaagcctacacaatgtgttctctctggctctttgaacaactcaacgatttgtctattggctgaaggccacatgattggaccagtcatgacttagtaccaagacagggtgactgagtacaactacaactcaaatctcttcaaagtgctcttgtcctgaatagactattaagtcgccttgatatttctttataggtcttactatctaaataatttcatgtattttatgtgttcatataaaatctgacttctctctcttggaycatatgagtttggggatctaattctgatcaaactgaacacaatgaggttatctttataaattcaatgaagtacctacaatatgttcatccctatgtaacataga

SEQ ID NO: 424026 - DNA, 509 bp, Homo sapiens
tgagtcagggccagagttccccctgaaactagaagcctgaccagcaggcagcagccaggacctggtcagggaggccagcacatactgacacaattgccccgggctgtttatttagctttagcttcaattcactgtgggtcccaaaggttcttaccctgggtatttgtaaatagacagccatttcttcctcatttttcattcggttacaggatgttttgttcctttgtggactaattggccgagtcactcctgcacttcattattttggagtctgagcaattctccaatttcctaaaagcacttagaattctaatcacatgtctcacctaycacagggtgctcaccaaaagtgacttttggatatcactgaatattaagatgaatcactatcaaagatgccaacacgacttcaaagaatcaggtccatttctaagacttcaatggtcttagggtggcctagtctagagtggtggttgtcaatcagggatgactttgttccctacggaaca

SEQ ID NO: 424027 - DNA, 560 bp, Homo sapiens
aaaatgtcaatattgacgtagttgagaaaccttggtctatagtctacactagagtcacatattagcaaaataacccacactcattttccagtatcccatctccaaattttgatggaaagacaagcctaaatatgaaaacatggttaattacaataagaatgytttaatagtctttactaggaaactattgatatcatttaaaaccattagatgaggcatcaggcattcccattaaaaaaacatttattagcattaaatcagctatctcaatttttctcttgtgctagaaaacagagtatgcactcctgcttcttggcctcaagaagaatcactgtctattagttggcaaatataagtgcccagtgtatctcttcagcccttgtaaatatacaaagaaataccacagctgttgttctcagtcacgattacacaacacaaactttccccagggaagtgaaactccaccttctctaggtgtgtctctctatatccacgagccttgggaaaggtcagcggtacataagaaccgagggccagagaagggggcttcttaaacaccc

SEQ ID NO: 424028 - DNA, 401 bp, Homo sapiens
ataaagagctgccccaaagaacccttcattacaaagtctttaagtatctaggcttcctcatgccatttcatgggtctgggtttgcatacttgttatgtgtgagattgagtgctttacccaccacacatcaataaacaaaaattttaattccctcacttgtaatacaatagatgtcaaaakcttataattcacaacattcaagcactaaaggctaaattctgcctacaggttttcttccttgcatagttaatatctattccacataattgttttctgctaaggtaatactgttaggatacctttctcaatttctccttgatgtttcaccttttcccttgcacggacaaacataggaacaaacaaagtcaatcctacatctgttagttgacttccctgtggct

SEQ ID NO: 424029 - DNA, 411 bp, Homo sapiens
cccaccacacatcaataaacaaaaattttaattccctcacttgtaatacaatagatgtcaaaatcttataattcacaacattcaagcactaaaggctaaattctgcctacaggttttcttccttgcatagttaatatctattccacataattgttttctgctaaggtaatactgttaggatrcctttctcaatttctccttgatgtttcaccttttcccttgcacggacaaacataggaacaaacaaagtcaatcctacatctgttagttgacttccctgtggctgtccttttctaatcaaaagatttttctgcacctgatcacctcagttacccttagtttttgtcttttagagctagagtatgttttaaagcaaatgtatctgattcacattttctcactagacagttt

SEQ ID NO: 424030 - DNA, 669 bp, Homo sapiens
agattctgttgaccatatttagagcaacctacactgtagctaaagacattctcccacacaataatgaaactcaggagataagaagttagaagcagcaatcgaatcaagagaatgagtaactcaaaccaatgggcctcaataataaaaagggtgaaattcaacaatcaagtgttagaaaaaaaaaaacaatctgagaaagacaaagtatgtctaaacaataaaagaactcatggctgtcaagatttccaactggctatcatctttagtatcasctttcatcataatacagcagatgagaagttaaggataacgtgaagagcactgcttatgggccagccttgatctttgaaacctggagcagtgaattaatatttataatttatcaggcaataatattcttggcccaagatagccagagactcattcctaactgtaagcaaggtcaaaggttggcctgaggatcatgactctcacatttgaactggataggtttatacaactaaagaggaagctatcctctactacgctaaaaaattgacaattaggaaaatcattacactggttccataggcatattctatgatccccagatctggttacgaggcctagatgagtcaatgaatacacaattactgagtatcaactatatgtttcaggaattgtgcattg

SEQ ID NO: 424031 - DNA, 669 bp, Homo sapiens
agattctgttgaccatatttagagcaacctacactgtagctaaagacattctcccacacaataatgaaactcaggagataagaagttagaagcagcaatcgaatcaagagaatgagtaactcaaaccaatgggcctcaataataaaaagggtgaaattcaacaatcaagtgttagaaaaaaaaaaacaatctgagaaagacaaagtatgtctaaacaataaaagaactcatggctgtcaagatttccaactggctatcatctttagtatcagctttcatcataatacagcagatgagaagttaaggataacgtgaagagcactgcttatgggccagccttgatctttgaaacctggagcagtgaattaatatttataatttatcaggcaataatattmttggcccaagatagccagagactcattcctaactgtaagcaaggtcaaaggttggcctgaggatcatgactctcacatttgaactggataggtttatacaactaaagaggaagctatcctctactacgctaaaaaattgacaattaggaaaatcattacactggttccataggcatattctatgatccccagatctggttacgaggcctagatgagtcaatgaatacacaattactgagtatcaactatatgtttcaggaattgtgcattg

SEQ ID NO: 424032 - DNA, 564 bp, Homo sapiens
aactggctatcatctttagtatcagctttcatcataatacagcagatgagaagttaaggataacgtgaagagcactgcttatgggccagccttgatctttgaaacctggagcagtgaattaatatttataatttatcaggcaataatattcttggcccaagatagccagagactcattcctaactgtaagcaaggtcaaaggttggcctgaggatcatgactctcacatttgaactggataggtttatacaactaaagaggaagctatcctctactacgctaaaaaattgacaattaggaaaatcattacactggttccataggcatattctatgatccccagatctggttaygaggcctagatgagtcaatgaatacacaattactgagtatcaactatatgtttcaggaattgtgcattgcattgtgctggaaacataaagatgaatgaaactaagtaacctctgcattcatgtatttgcattctgatggaggaaactgacattaaaataataaaaatccattatttgaataattaaactataaatcctaaaaagggagctt

SEQ ID NO: 424033 - DNA, 651 bp, Homo sapiens
cgtaattaacatctgaatcagtagactaagtaaagaagattgccttccttaatgtagatgagccttatccaatcagctgaaggcctgaatagaacaaaaaggctgagtatgaagtaacttgaactgagacattggtcttatctggtcttcaaacttagactgaagcataggttcttcttggatatccagcttgctggccttctgactggaacttacaccattggtcttcctggttcttacgcctttggacttggactctctatctgcttctctttttctctccctccttctctctcccttcctctctctctttttatctctctctctctttttatctctctctctctctcaaatggcttatgactcaaatggggcgaaagttaatcctgaggcttttgctcaagtttttcattcacttattcaagcaaatattttttaaagcatattatgagtccaggcactgttytaggcaatgcagattaaaaaaaaaaaaaaagtaaagtgcttgccctcatgatgtatatattcttctgggagaggtaataaaataaatacaaaaaaatgtgaaaagtaaaccttacataatacattaaataatgttgaaagctaaggagaagaaaaccgaaggagcaatgtcaaacggtgatgggg

SEQ ID NO: 424034 - DNA, 627 bp, Homo sapiens
taattgtatcagtcagttttcactaggctatgctgcaattacaaatgcaaatttcagtggcttatgacaaaggcttatttctcactcacatacatgagagcagtaggtcagctgcagcactgccccatgtcgtcttcgttcaggttctaagcagaaggaactgccyctatctgggacaggctattctcaagtggcaggaagaaaacgaaatggctaaagcatcgtaacaggtcttaaaaccttcacttggccatgcagtcccccagttctgctcacattccactgaccaaagcgagtataaggctaagtctgctcttgcaaaggggccgggaagtatggtccacccacaaggaggcactgaaagtcacctaacagtgggtggaagtatacacaatcctcttacagaaagaggagcaaacaattgggaacggtagtgtactctgccacatgaatcgtaacagttttacttgttatttaaggaaatagtgccatgctctaactgacctggttggctcagcaactatagtcaaggacttttaaacagttttatcagtttccactgctagacacagctctacttcatttcctctgatcaattgcctcactcaccgtgcagagaaagagttc

SEQ ID NO: 424035 - DNA, 627 bp, Homo sapiens
taattgtatcagtcagttttcactaggctatgctgcaattacaaatgcaaatttcagtggcttatgacaaaggcttatttctcactcacatacatgagagcagtaggtcagctgcagcactgccccatgtcgtcttcgttcaggttctaagcagaaggaactgcctctatctgggacaggctattctcaagtggcaggaagaaaacgaaatggctaaagcatcgtaacaggtcttaaaaccttcacttggccatgcagtcccccagttctgctcacattccactgaccaaagcgagtataaggctaagtctgctcttgcaaaggggccgggaagtatggtccacccacaaggaggcactgaaagtcacctaacagtgggtggaagtatacacaatcctcttacagaaagaggagcaaacaattgggaacggtagtgtactctgccacatgaatcrtaacagttttacttgttatttaaggaaatagtgccatgctctaactgacctggttggctcagcaactatagtcaaggacttttaaacagttttatcagtttccactgctagacacagctctacttcatttcctctgatcaattgcctcactcaccgtgcagagaaagagttc

SEQ ID NO: 424036 - DNA, 567 bp, Homo sapiens
tctgtctgttttcacttcatgtgttttgggctctgttgtttcatgcatatatatttataattattatatcttcttgacattttgaccctttcattataaaatgtccttgcctaattctagtaacaacttgtgtcttaaagcctatttttctgatattaacatagccaccccagctctccttgattactgattttgaagggtatatatatctttttctatcctttcacttccaacttatttgcattttggatctaaagtgagtcttgtatagacagcatataattagagtaagcttttttctctattttaacagtctttgctttcctttrcatctcattttttttcttcctgaaatagatatttgttcataagaaatatgggtacactatcttttattcaaaactttagtttaattacagagagagaaaaagaaagagtaaaccaagtagctgcaaatagctcactggggggtgaaaacaaggcaaatcacttggccaaatcttgccctcgtctgatttaaatttccgtaaaaacttcaactgacaaactaaaccagctgctggtgta

SEQ ID NO: 424037 - DNA, 567 bp, Homo sapiens
tctgtctgttttcacttcatgtgttttgggctctgttgtttcatgcatatatatttataattattatatcttcttgacattttgaccctttcattataaaatgtccttgcctaattctagtaacaacttgtgtcttaaagcctatttttctgatattaacatagccaccccagctctccttgattactgattttgaagggtatatatatctttttctatcctttcacttccaacttatttgcattttggatctaaagtgagtcttgtatagacagcatataattagagtaagcttttttctctattttaacagtctttgctttcctttacatctcattttttttcttcctgaaatagatakttgttcataagaaatatgggtacactatcttttattcaaaactttagtttaattacagagagagaaaaagaaagagtaaaccaagtagctgcaaatagctcactggggggtgaaaacaaggcaaatcacttggccaaatcttgccctcgtctgatttaaatttccgtaaaaacttcaactgacaaactaaaccagctgctggtgta

SEQ ID NO: 424038 - DNA, 554 bp, Homo sapiens
ttaacccagactgtagggcgctggcaaaggccagtggcctatctctcaaaacaactagatggggtttccaaaggctggcccccatgtctaagggccctggcagcaatggccttgttagcacaagaagcagataagctaactcttaggcaaaacctaaacataaagtacccccatgctgtggtgactttaataaataccaaaggacatcattagctaatgaatgctagactaactagatatcaragcttgatctatgaaaatccccgcataaccattgaagtttacaacaccctaaaccccgccaccttgctcctggtatcagagagcccagttgaacataactgtgtagaggtattggactcagtttattctagtgggcccaacctccaaaccatccttaaacagcagtagactgagagctgtacgtggatgggagcagcttcaccaacccctgcaaagtggctctgaagaagataacaagccctgcttcagtcacacctggaagctgactggtccatgcacggccgaagcatgaggaaactcatcacgggact

SEQ ID NO: 424039 - DNA, 602 bp, Homo sapiens
aatagacagaataaaataaaaattaaaagtgaaataaaacaaatcttaaaactaaaaaatataatgaatgaagtaagaaatttaatagagakcatcatcagcagaattgatcaagcagaaaaatgaatctgtaaactcaaagataggtgatatgaaaatatacagtcatggggaaaaagaaaaaaatgaagaaatcctgcaagatttacaggacagcatgaaaagagcagtttttgattcattgaagtttaagagggagtagaaaaagacaaaggggtagaaagcttatagtaagaaacttttcagccctaaagaaaggcatacatattccagtaaaggaagatcaaaggtgaacatcagatttgatacaattaagagtgggtgaggacatattattatgcaactatcaaagatcaaaaacaaagaatcataaaagcaccaagataaaaataagcaaataaggaagttccaatatatctggcagcagactttctttttataggttaggaggagtgggatgatgtattcaaagagctgaagaaaaaataagcaaaaatctgtcagcaaagaatactgtgcccagtaaaactgttcttcagaaa

SEQ ID NO: 424040 - DNA, 567 bp, Homo sapiens
aattccttttaagagcaaaagtcagcatacttcaccagagaaaagctagagttatgttcagatgcagaagtgcaagtaaattagaaagcaatgagtcaggatgacaaccataggaaattgaaggtaaaaggttcccaagtgtcagctgattttctgaagaacacataatagcagtcatagaagagcataaaaattatactgattacaagtccatagagtatgatgtctgcctataacactacctgttaactcagcacttgagtgcctatttgcctcctcatgttcactgtgctccaactttggagtgttcagaatcaaagttggtggaagaaaaatagaaagacaaaaaactaaaatagaagaaatatacaacacccctttcttaaatgmgggctggcttctagtcttctgtcacgtgagctgaagttggactggttcaagaaggatggagaggaagccacgacactaaaccattgggttggatattttaattcctcattagaggaatctgaattattttaaaattactaaaaatatatggaacttaccagtgttatatttttagta

SEQ ID NO: 424041 - DNA, 541 bp, Homo sapiens
taacatgtcccagtaatactgaacctgccttctttatatcttggttcctccaagttagatcttggaacaatccacccacagaagtgtttgcatctgaaggtttaaccrtttgtaaggaggaatggctctgcaatggctcttgggctctcagtagtgtgtagcagaaagaatttgccggaagactcacctctagtatgcagaactcagcacacaccactggtgggtttactatatggaggacaggagcactcaatgactatgtaaaccacacagcagtacaactagaaagaaaataggtatatccatatgcttacgccaatcttgccatcttcactattcattcttaggaatatatgaataatggggctaagagaaggatagaactatactttccagtatttctgaatatgttaaagtgatggatattctaatttaatagacagataaaaataagaaagaatgggactgatgttctctactgtcagttttctcagattctaccaaatattatccttgtttttctcacaattccaaattgctg

SEQ ID NO: 424042 - DNA, 543 bp, Homo sapiens
actaccaaacataggtgaacaaaagagagacaaaattttatttcagatttactgacttttgggaagtgcattgtgtggaaaataagtgattggatacttatgctttgacaattaaattgatgagatcataaggttgcctggaaatggctggaaaaaaatgcctctctgaatgtgttagggaatgtttcccaaattgcacacgctctctgtcctytgtcttattctgaactcttggagactctcctgcatttaggaggtttgtggattaaagctgggaaaccagtagatagtatcatatattttgaaaaagctcatagggtatctaatatgatcgtttcctaacacagcagaagaacactggtttcaattgatttgatattttttgacagtatatgtagctgtgtggacagtattttcctaacctttcccaaatgaaatatcaacaatatataaacattcacactttttaaattaactcgtgaagttttatcaatggaatccttgaaatccaatcacttttaattataattttagtgaatcatc

SEQ ID NO: 424043 - DNA, 549 bp, Homo sapiens
ttctgcttgatctagtctattgttgaagctctcccttgtatttttttttcctttcattgaattcttcatttccaggatttctgtttggcttttttttttaatgatatctatctctttgttgaatttctcattcatatcatgaattgtttttctgatttccttgtatggtttatcttttatatctcactgagtttccttaagatcattattttgaatttcttaggcatttcatagttttcctttacttaggatctattattacaggactattattttcctttagaaagtcatattcccttgctttttatggtttgtgtgtgtgtgtgtgtgtgtgtgtgtgtctttacattgttatctgcacacctgatataacagtcacttattccaaatttatggattggtttttatagcgaaagacttttttcctgtaaaagtatctatagcrttggttgtgtagtgtgctttggttttgattatgagtggatgcagtagtgtagtctccatatgatttcttcaactgtagtcaacatcagcagtgtctctgagttc

SEQ ID NO: 424044 - DNA, 622 bp, Homo sapiens
gacattagaatggtatattttgttacatctcttactgttttaagatttttttgggggaccaggcacagtggcttacatctgtaatcccagcaatttgggaggtcgaggtgggcaggtaacctgaggtcaggagtttgagaccagcctggccaacatggtgaaaccctgtctctactaaaaatacaaaaattagccatgtgtggtggcacatgcctatagtcccaacttctagggaggttgaggtgggaggatcgcttgaacccrggaggtagaggttgcagtgagctgagatcacgccactgaactccagcctgggcgacagacagagcaagaccctgtctcaacaaaacaacaaaaaatttttttggtctttcatttgcagaaatttgactattatatgtatcttcctgtgggtttctttgggtttgtaccatttgggtttcactcagcttcttgaatttgtatgttcatatcttttttgtcaaagttgggaagttttcagctatatttatttcttcaactactttttcattcatgccctcttttttctttccctccagaactgtgaggacaagaatgttagaactttttttatagtctcacagttccctaaggacttgtt

SEQ ID NO: 424045 - DNA, 617 bp, Homo sapiens
tagccagtagtctagaataaaagtaaaatataatgcattggataggcagctgaaattttatagaagctttgtagaagaatctcatagaagagttttgaattgtagtagagatatttttggaggtttcagatgtctcaaataatctccatgtagttttacattactataccttggaattgggagacttgtgtagagcaagttgatgtaacatcacaataggaaagatkaatatttttatattctaaaaactactcaagcatatgagtggcacatgaaatatcaaatatcatccctcagtgtggcaataatatttccagggcaaaagcaattcttgttgtcactttagtttgaatgagtaattttctggccaaaaacattgcagattttttttttaagatctcagcgcattaaataaaagaaactgttagctatttggaggtacaagatttcattggtggctttgcatgcttaatcatgaacacttttcttcaactcctaaaacaatagagaaatatcagcattaataaaataccttcaaaacacatagtttaatttaaacaataatttccacatatagaatagatccctgtcatttttactaatggtggaccccctgc

SEQ ID NO: 424046 - DNA, 617 bp, Homo sapiens
tagccagtagtctagaataaaagtaaaatataatgcattggataggcagctgaaattttatagaagctttgtagaagaatctcatagaagagttttgaattgtagtagagatatttttggaggtttcagatgtctcaaataatctccatgtagttttacattactataccttggaattgggagacttgtgtagagcaagttgatgtaacatcacaataggaaagattaatatttttatattctaaaaactactcaagcatatgagtggcacatgaaatatcaaatatcatccctcagtrtggcaataatatttccagggcaaaagcaattcttgttgtcactttagtttgaatgagtaattttctggccaaaaacattgcagattttttttttaagatctcagcgcattaaataaaagaaactgttagctatttggaggtacaagatttcattggtggctttgcatgcttaatcatgaacacttttcttcaactcctaaaacaatagagaaatatcagcattaataaaataccttcaaaacacatagtttaatttaaacaataatttccacatatagaatagatccctgtcatttttactaatggtggaccccctgc

SEQ ID NO: 424047 - DNA, 511 bp, Homo sapiens
gcttttggtatcttagagacctccaagctgttgatactgcagttttgtcacattttatcagttcctctaaggtgtctttctggtttgcttagtccagaccccaaacttgattatctgggctgatctcatatctttattctcaacttaaacaacatcaaaattctgaaggtaaaaagaggtgtaatgaaaagtgagtctccctctggatctctcccttcaatagacagttttcagtttagaagataatcactgttttaaacttcttatctatccacctagaaatatgctataaaatatgagcacatagatttgtgtatatgtgtctataaacagtttttaagcatttatatgtgtgtgtatacaccatttgatagtacattagagatactgcckggcatcctactttgcacgctgtaatttgaagattgttctgcattagtgaatagggatatgtttcattatttttgatggttgtataatatttccttgtctgcttacatcaacctttaac

SEQ ID NO: 424048 - DNA, 608 bp, Homo sapiens
gaatgaaagaacatgcattgttacaataaaatgataaagttggagggtatgagatggggggacctgcctttccatagttagggaagatgcctttgaggaggcaatatttcagctgagacctaatggaatataaaggtcagccaggcatcagcttgatagacgagcattttggcttggtgaccagaaggggtttgcttcctggggggactgaaagaagcccagcatggctggagtttggaggtgagcaaagcagtgagcagctctgatgaggatagacaagccaggcctgatcacatggggccttgtaggccatgttaaagaatttgagtgtctccacatgtactgtttgcaaactcatggcctcccctttgatgctctgttctaggtgatcgctgcaatcattatctgtcaaacacacctgtgcctatgcataatgttagcttggtgctttagtgcacsctcatattccttctggctggaatggaaatagtattaacttgaattggaatgtgtgctcagagacctgcaagcaatatagtcctgggcaagtttggagccctactgggcctcatatcttgtgaaattatgaagagatgaaacaggatatt

SEQ ID NO: 424049 - DNA, 608 bp, Homo sapiens
gaatgaaagaacatgcattgttacaataaaatgataaagttggagggtatgagatggggggacctgcctttccatagttagggaagatgcctttgaggaggcaatatttcagctgagacctaatggaatataaaggtcagccaggcatcagcttgatagacgagcattttggcttggtgaccagaaggggtttgcttcctggggggactgaaagaagcccagcatggctggagtttggaggtgagcaaagcagtgagcagctctgatgaggatagacaagccaggcctgatcacatggggccttgtaggccatgttaaagaatttgagtgtctccacatgtactgtttgcaaactcatggcctcccctttgatgctctgttctaggtgatcgctgcaatcattatctgtcaaacacacctgtgcctatgcataatgttagcttggtgctttagtgcacgctcatattccttctggctggaatggaaatagtattaacttgaattggaatgtgtgctcagagacctgcaagcaatatagtcctgggcaagtttggagccctactgrgcctcatatcttgtgaaattatgaagagatgaaacaggatatt

SEQ ID NO: 424050 - DNA, 465 bp, Homo sapiens
gagctggggcaagcacctttgggcaccatcaagagcaaactccatactggccccacggcagcatctagggaagggtgcctgagatcccagaagccccagaagaagtgttacagtgccctattagcttttctgtctgtggatggcttaagtgttaacagctcattggagggtcagtgtcacagccttttgcaccgacactcatggcaccygagttcttgtccggcatccaggaggaatgaggttgcttggatgaattgaagatggtaaatgcagaagattttattgctggtgaaagtggctctcagtgggaagcagagctgaaaagaggaccgtgtgggaaggtaatcttcccctggagtccggccagggacagactcttctctgaagctgttccaccaagctgtccatctgaagtcaagcagcttccctcggacatcgaactgtagtcccagatgtccagttcct

SEQ ID NO: 424051 - DNA, 592 bp, Homo sapiens
gggtatgctagaatagcctgatttgggaatttktttgttttcttatttgtgtaacatcctctccatgccaaatgtgattgccttgcttaagatggtgtaatattaacatcattgctttacaaatgctaaatcaattgtttatctatggtactgttaatgggatggctactttatccctttcttttaaaggccacagaacggagccaaattctgacacctccatttcctcctgtgatgttacagagcctgatttcagtttcataaaaataaataaaaataaaatatatgcgctaatatgaaatgtcagctaaaatcaatagtaatctatttctcttgcagcgtgagcgggacccaaacaatcaattagcagtaagcttgtcaaaatgcatggggcagaggttgctagatgcttcatcacaattttatttgcccagagcatttgaataaatgaagtgaaatgtttccgcaagtctctgaatctttgatagataatttttggacctcctgctgaaatactgttggctaatttcctgcagtaaattttttcagtgattgtcacaacctgtagtaataaatgacattttctccaata

SEQ ID NO: 424052 - DNA, 592 bp, Homo sapiens
gggtatgctagaatagcctgatttgggaatttttttgttttcttatttgtgtaacatcctctccatgccaaatgtgattgccttgcttaagatggtgtaatattaacatcattgctttacaaatgctaaatcaattgtttatctatggtactgttaatgggatggctactttatccctttcttttaaaggccacagaacggagccaaattctgacacctccatttcctcctgtgatgttacagagcctgatttcagtttcataaaaataaataaaaataaaatatrtgcgctaatatgaaatgtcagctaaaatcaatagtaatctatttctcttgcagcgtgagcgggacccaaacaatcaattagcagtaagcttgtcaaaatgcatggggcagaggttgctagatgcttcatcacaattttatttgcccagagcatttgaataaatgaagtgaaatgtttccgcaagtctctgaatctttgatagataatttttggacctcctgctgaaatactgttggctaatttcctgcagtaaattttttcagtgattgtcacaacctgtagtaataaatgacattttctccaata

SEQ ID NO: 424053 - DNA, 594 bp, Homo sapiens
cagaggtctgaattggcaatcagactcacaagatgcaagtaagctttaatgttgtgtttccgcagctttatagaaggatacagggcaggaacctcagcaggcacatcatcatcccatggggctcaccacatacttaagtacacagcccttcacagaagattttaaaacagaagtttgttctcacttgccatcttatttctcttgttgtttattaccttaaatagagactaatataaatacagctatttttatgaaaaaaatcactattggaaaatgtgtgaatcaagcatagttcatgagaaataagaaaatgaatgtaatatccatatacatcaaagttttaggcacaaaaaagaatggataaaaatgtttaaaacwtatctcagcattatgcccaaatttatattgtttaaaaacatatctcagcattatgcccaaatttatattttttacagttttatatacattatatacagaagtccccagtggacttctataaatgatatgattacctttcagtggaaagcttaatttgagtacattactgacataggtcaaattatttgaagttgtgtattcaggtaaaaatcgctg

SEQ ID NO: 424054 - DNA, 607 bp, Homo sapiens
tatccattataaaataaggaacaaaccaaatatcagcattgtggtatgcagacacagtatcaaaggctgagaagagcttctcctaaaaataaatttctaacaacaacttcagtataaacaaaaatgattaaagagaaaaaatcatattttttcttagaacaaccatataaaatatatttcatcattaaatgaacagcagaaatccatctccaagacaattttgcaaataaattatatgcattaacatttttctttaagtcaatataaatttaagattgcatagagaaaatgtctrctgttccccccatttcattgtccttgggagaggcgatactgcagtcatcaacattgcaaatgttatgattttataatccacatttaattttttggccctctgcagactatgtcactgggaatggcagatccacacaggatgcaggaaagataagttttcatcatatgcacataattattatatggattcccctctgtcttaatctgattaatgaatgtgatcgtcatacatatccaaacacaaatagttctttccatctaattttgttgataaatttggaaagatgatcaccagatacagaagaaaagccac

SEQ ID NO: 424055 - DNA, 566 bp, Homo sapiens
agggtttatcatttgggaaaactaggaagctgtaggtgtcattgcaacccaaaggacttgggaaaagaagcagataatccaatgtaggaagaaaaaagggattaaagaaaagaaagagtgaagaggactggatactccctaagtggagatatgatgttggagatacttggctgcatcttaatgaactctggaagacagtctgtcattttattttgcttccaaagctgagcatctgtaaagaacagaaaacagactcttaggagaaattcaaaaccagtaagggtgatcaattcttctatatgaagacttctgttgtgcaaaatttttattttaactttatttcttatgaaacaaagcaaaatagttcttttcaatcacttataaaaacacrtattctggaaaatgtaactggacccaacatgaaataaagagtaataaagtgaaaaagaacaatctttttttgaagaagtttcatgctagaaatgagattaactgtccatctgaaatgtaagcatggtacttttttttaattaaaaaattaaaactgtattatgtaggtatgtata

SEQ ID NO: 424056 - DNA, 588 bp, Homo sapiens
tgcagttctagccctgtgggagaaactataaaagtctaaaaggaaaagaaaaaaactgcatgctaaattgggatgggggaaaagaaaaagggaatctctgtagatcaaggaggggccagtaacctacagctagtccccactatcaaatttacctttttttttttttttttcaaaaagcctagtattcttggacatcacattttaaaagaaagccaaaaatgaaaatctccgttcattgaaataataaataaccctttctactggcagaagtgagtacaacaaatgggtcccagtacaattctgctgataaggttcctgggagctgctgaactgtcaaaacaagaacacgtaactactgaagctcagtgaaaaaaaaaaaaaaaaggtcaagtggatgctacaagagagccttactttttaaaaagatttaaggcamcaatgacaacaaaaaattagcaggagaagctggagtaaagttgaacaattagtctctaattattgttatcataaatatttactattgtaaatataggtacacctttcaagaaaagctttgtgttgcctttgcctgtgaaaattggactgcat

SEQ ID NO: 424057 - DNA, 621 bp, Homo sapiens
acaaacacagttttgtaactaccatatagtagttacccccttaaaaattaccgccttcctatttgtagtcaacctctctcctccacccttagaccctgccaatcactgatttctttctttctttttttcttttatagagacggggtctcactatgttgcttagcctggccttgaactcctggccgcaaacagtcttcctgcctcagcctccggagtagctgggactataggtgcacaccactgtaccttgacttcttttctattcttctggttttgccttttctgaatgtatcgtaaataaagtcatgcagttttgttgtcgttttaatagtaatattttaatacagcataattaatgtgtagattttctgcaatacrttctgtaatgattagatattcttgcctgaaagagaaacctgtcatccttaaccagtaagaatttattttgagagctacctgcactgtaaacaaacatacagacctgggggaggtgaactgcctgggaaggcagaatttaccaattaaaaccaagttcagtgatagaaatattccacaccagtcacataattaagcctaaggaaataaaacacaagacagagaaaatatttttttaactaacaa

SEQ ID NO: 424058 - DNA, 587 bp, Homo sapiens
tccttcactttttatttcattcacataccccctacagacacacacacacacacacacacacacacttcacacatgggtaataagaaggtccatgctattccagctattacttaaaatttaagcaaaaagccacctgcaggttgaaattgttattaggtttagctgtgtcaacaaaacttacatagttatgagtgtcctgaattcattccaacaatcttggagccatattttaaaaaagaacattaacaagacagactttggccagagagggacagctgtgctgttaaaggctctgaaaattacatatttgagaaataatgaaaagaaccagaaacgccttaggctcttgtcactcaatgctgctcaatggtaaaacctcttcatgcctttaaaaattacaagccactagtcgaagcttgcacaaatatgcttcaaaaatcaattgyatttaaatggtatataattgtttacattctataaaaatatatattcaattaaatagacatttattgcattatttcacaaaggattatattaggtgctgggtgttgtgagtgaagaggatgggcttagctttggatatgaag

SEQ ID NO: 424059 - DNA, 401 bp, Homo sapiens
aaacaattcctccaggtttccttttctggtgcatcytgcatatcacacctgcttggattatttgttttttaaatacttttatttctttctgaataagtaaaatatgctcacattacacaattttaaaagtatgaggctgggaggagtggctcacacctgtaatcccagcactttgggaggctgaggcggacagaacactcaagggcagcagttcaagaccagcctggtcaacatggtgaaaccccatctccactaaaaatacaaaataaattaaccggatgtggtagttcatgcctgtgataccagctacttgggaggctgaggcaggataattgcttgaacctgggcagcggaggttgcagtgagccaagatcatgccactgcactccagcctgggtgat

SEQ ID NO: 424060 - DNA, 580 bp, Homo sapiens
ttaaacactggtgcatggcatcgtggaagaggaaggtcatctttcctactgggctgtgcgtaattccatcctgcagtcaggtagactatctgaagctggatgttccagccattctttactcaattaaacttctggcaacacctttctacttatcacacaacaaccactttcttaaaaggtcatttgcacatttctggccattcagaggcatcctataataagaaatgtttgcactcaaaaagatggattttacccatttctttgaaaaatcatttagggcattttctgatgctagcttttaatcagctacctaagccacccagacttgggggaggtagattgatcttcctgctcactgatgaaaggaatgttcctctagccactacacccatgccagcctggatgttgggatttttaaacaaaaawatttttacttatatgacaataattatcaaagctgcagtttgagtcttttctctcttttcagaagaaaattctcttttattttctccctttccttgcattttataaatagatcagtctcaaagcaagtcttcaaggggcactcaggtgaagttaa

SEQ ID NO: 424061 - DNA, 566 bp, Homo sapiens
gacagtggtttgtggactgggagacagcaataactctcctctgatgatcccttctggtgagaccactaagattgctttaaagaaagtctaggtatctttcagagaagtgacaggagcatgtacaagtgaactgctttgaacaggtctttaattagtaccaacacctgctactccaatctaccagatgattcctaccctatttgccaaatatatatatattattttctttgacatcttcaactcacatatcaagcctgcaaagacctaatgaagtcttcagacaagtaaacaatgaggctctgctgaaatcctgggmggagaagcaccctgtttgtctctattgcttcagtgtgcaaaattgcttcccactgatcacctcatccctgctcttagcaaaagctcctttctggaacaataatctggaaccagtgtcagaagttaatccccacttggcatgagggatgagtttaaaagacctgtttcaggaatcaagattcccagtacccttttagaacaaggcttgctatttatagagcacatttcccaaatggggcatctggttattt

SEQ ID NO: 424062 - DNA, 590 bp, Homo sapiens
atttttttctcaagaaaagagcactttaacaggacacaaggatactttgacagacattttggcctcttaaaattcactttgtaattctggtatttgaaaaagcaaacactagcagttatatataaaatgtaatgaattactgagaggatagaggcaatttcactaattcagttgtgaaataaaaatctagggcagtgtttcgaatggaatagaacaaamtattagagtgtatcacatttcaataaaggtaagtaatatttaatggctttttttgttgtgtgtaagtggatgttacaatatgaaatgcaagatggtctgagaagcactgaagtagaaaattggctttaaaaataaaatggaaaggaagagaacagatcttaaagacagagtcaacaagattagaaatcaaattggatttggtgagcggaggggaaggggaatggaaaagaagttatgataaaaagtgaaaaataatgttaatcactttgaaatatataaccaaaagattgtaatttcagaaataaaatgtgaaaatgtacctgatgtggaatacgtatcgtgctctaaaatgtttttctttaataagttaa

SEQ ID NO: 424063 - DNA, 590 bp, Homo sapiens
atttttttctcaagaaaagagcactttaacaggacacaaggatactttgacagacattttggcctcttaaaattcactttgtaattctggtatttgaaaaagcaaacactagcagttatatataaaatgtaatgaattactgagaggatagaggcaatttcactaattcagttgtgaaataaaaatctagggcagtgtttcgaatggaatagaacaaactattagagtgtatcacatttcaataaaggtaagtaatatttaatggctttttttgttgtgtgtaagtggatgttacaatatgaaatgcaagatggtctgagaagcactgaagtagaaaattggctttaaaaataaaatggaaaggaagagaacagatcttaaagacagagtcaacaagattagaaatcaaattggatttggtgagcggaggggaaggggaatggaaaagaagttatgataaaaagtgaaaaataatgttaatcactttkaaatatataaccaaaagattgtaatttcagaaataaaatgtgaaaatgtacctgatgtggaatacgtatcgtgctctaaaatgtttttctttaataagttaa

SEQ ID NO: 424064 - DNA, 578 bp, Homo sapiens
acaaaacagtatgaaatagaaaatgtcacttttttgtggaataatgagtcaaaagtaaaatgctgcctcaaagtcagagagagatgaataaaaacagagaggaggctagaggaagacagggctgtgcacagagaaactttataaacattatgcatatccctcattatagtcttaaaaaygtcacttcaaaaaaattttcaatgtttgtgctattttcacaacctgagttccaaatcaagacatatcaaaccaagctaaattaagttaaatcaagctgagaatacaaggatgacacgatggaaaatttacgaatatagtggggtaactttaaaactgcatatcataatgtgaaaaagaattaaggaacatggctattgcataaatctgtatttactatttaactgaactgcattaggtgatattgtctaaaataaatcctttcacctaaacaattgctccaacatctagaacagagtctgaaattagtagacactcaaaacatatctatggcagaaatgtcttatggtaattataagactctagtggccaagattaaaaaaaatttttgaaaaccaatc

SEQ ID NO: 424065 - DNA, 598 bp, Homo sapiens
gggtagcctccatgcaccctcctgcttcccaccctacagttagggatttcctgtcaggctgcttttggtagacagagcactgtgctgctcgaggtaaagtagattggagctgagtggaagttgtccaccattcgtatctgccttcagtgtctatgtggagagcacagaaccccctctccatgtcctgcaaggcagaagttacatgtcatctggtgaggttgacaggtaggcagttgcaatgatgtgccttccaccctcatgaggtgaatgcagcatgaatgagtcactttttgagaggaccatcagcaaaaatcagtctccacaatatcagtgagagattttaaccaagtgaagggcagagattgaatgaaaataaasaggttccaggtcttttattttatggcccccaggctgcatttctgagcctataccataaagtaagttgtgtgtaagaggagtgtgtgcggaagagggttgaggaatggaaagcaactctaaaactgagttttacatattcatcctagtaaaagaaagaacattcagaggacaggaaaaaaaatgcctccccattttatgcacagcattatgatggcagcaa

SEQ ID NO: 424066 - DNA, 607 bp, Homo sapiens
atgagtatcagtgggtagtttcaggtgagaaacatgaaactctttgccattatttttgggattttttaagaatgtaattttccatgtataggtggagattttaaaataaamggtaaactacctcattttttcagttgacttggtaaaactccaagagggttatctaccatagttatttctttccagattaaagacaaccctccatttaaatagaaagttgatggtaattttatcatttcagtgttctgttcagtctgtatttgtggaaatggaaatatagcctagggaccagtttctaggactgggtactgataatttgctaataaggaaaagcatctgccttagaaagcatttcaataacttctgtgtgtattttcttgcagtattatcagaaaatccacccagcttcaccattactgtgacgtctgaggctggagaaaatgatgaaagtaagtcttataaaaaatacttgtggtttttctaaatttctcaggaatttcactcattctgtaggcattatgctggatattgtcatgtggaggtgctaaggggctgttacgaatctgctatgaatgttgtatatttctagtcagaatttactgtgtga

SEQ ID NO: 424067 - DNA, 607 bp, Homo sapiens
atgagtatcagtgggtagtttcaggtgagaaacatgaaactctttgccattatttttgggattttttaagaatgtaattttccatgtataggtggagattttaaaataaacggtaaactacctcattttttcagttgacttggtaaaactccaagagggttatctaccatagttatttctttccagattaaagacaaccctccatttaaatagaaagttgatggtaattttatcatttcagtgttctgttcagtctgtatttgtggaaatggaaatatagcctagggaccagtttctaggactgggtactgataatttgctaataaggaaaagcatctgccttagaaagcatttcaataacttctgtgtgtattttcttgcagtattatcagaaaatccacccagcttcaccattactgtgacgtctgaggctggagaaaatgatgaaagtaagtcttataaaaaatacttgtggtttttctaaatttctcaggaatttcactcattctgtaggcattatgctggatattgtcatgtggaggtgctaaggggctgttacgaatctrctatgaatgttgtatatttctagtcagaatttactgtgtga

SEQ ID NO: 424068 - DNA, 620 bp, Homo sapiens
taaccttacatgcctcactttcctcatctataaaatgggaataataatactagttgagtatcccttttccaaaatgcttgggaccagaagtatttagaatttcagatttttttaaaattttggaatatttgcatatacataatgagatatcttggggatgggacccaggtctaaacataaagttatgtttcatatatacctcatacacatagcttgaaggtaattttatacaacattttaaataatttcgtacattaaacaaagtttgtgtacacaaggtcaagtgtgaaattttctgcttgtggtgttatatcagtgctcaaaacttttggaattttgaattaggaatggtcagcctgtagttcctacctaacagaattgaggtgaagattgaatgagttaacatcgtagacaagtacaacaggaatgttattagctactgttagctggacttaaattacaatgtaaagtttgagcctaactccaatttcatgacaaagtagaagagtagtgttatgttaataagtacttctaaaccagtgtcttgatatkgagctacaataaatattaagtccaataaaggtgtttttgttaatccaaaatgcaatttcccctcagtc

SEQ ID NO: 424069 - DNA, 595 bp, Homo sapiens
agtctatgatacattacgggatcttagtgatcttatttttttctataacttaaaacatttttctatttagtcatcctaggaattatcactacttatcaataattccaacctatactaaaaaatgtgaaaaggtaagaatactggtattgcctagaaggacaatgcaagagtcaaataagccaccacgattgcctcatcttctacttttctcatttctttaccaaactattgcatcatgcttcaagaagatacacaagaagtatggagacaccatctttatggactttttaaagctttcattgaacacagttgagggttcagaatttttcaggttcttaaactttaatgttcgtaagtcacctggggatcttgttaacktacaggttctcattcaattggtctagatgagctttgagtttgcatttctaacaagctcccaggtgatactgaagctgctgggctaaaggtcacattttgagtagcaacaatgagaccatgcacaggctattgaaattggtttagattataattaaaggattgattttttgatgtgtttctattacaaaaataccaagtccttgcttactttctaaaa

SEQ ID NO: 424070 - DNA, 606 bp, Homo sapiens
tctgtcataaaaggagaaatgaaatgatcataacaaaataatatgcatcttcatatgtaaatgatccagaacagttttactagaatacataatagatcatatggttgcatgagtcagtttggatttagaagtaagaatattgaaagcatttctttacacaaatactgaagaatgaaagrcaagaggttccagttaacatcagaattaaaattagtgttcagatacataaaaacataccaggctcattagtctataaaccaaagagggaataaccttaatagaaacaggaataacatgccaagcaaataacagtctgtcaaagaggaaaagtaagaaagaataatattctcagaataacactggcctcatttataagagtaatgttgaaaacgtccctctatgatgtggaacaggtaacgattaaatacctcagcaatcttatctccctttttgaaattccaatactcattcaagatatgcatcctgctacttcaaaagacctggaaggccatattcagtaacctacaagataatgcatattttcatgtgatgaggtgcactccgggttcttgccttgcctcagttctcaaacgtgagtctcaaact

SEQ ID NO: 424071 - DNA, 587 bp, Homo sapiens
gctgcccctggccgcgtgctagttgtgtgactgcttgggtaagccttggtttgtcatctgtaaaatgcaagtattgctagtactgctctcacagggctttcatgagctttcaacgatgtaactaatccagataaagtggattatttagtgcagaatagacattgcctgttatcatcttaataatggggaaaaagaagtactttaaaattgttagcatccaacacatttcctaagtgtttttttaattcccaaagcctttcacagtaacagaccagcgttagaagaaatgtagacatttttaagttattggcaagttttccaagtaataaaattggttttaaactggaataagcytctgtgttaaaattcaggtttggttttagttctagatgtttgattgcttactgttacatcatgtaaaatgatttgaatgaaagtatagaaagaagtagaccataggggataatgagaaacaatgtattgaaatagttcccattttgaagtttttctgaatgtacatttaaatattatataacttagtaaaaaagaagaaattaagttaatgagaaaaatgaaatgtttttcaa

SEQ ID NO: 424072 - DNA, 578 bp, Homo sapiens
aaacagttctgtctcactggcattccaggcatcactggggtatgaaaaaaaactcctgcaggtagctccttttctgcccaaacagctgctcagttttgtgcttgaaacctagggccctggtggtgtagccacccaagggaatctcctggtctgtgggttgcaaagaccatggggaaagcgtagtatctgggcyggacagtgccgtcccccatggcttcccttggctaggggagtcccagtccctcatggcttcccttggctaggggagggagttccctgaccccttgtgattcctgggtagcgcaatgccccaccctgcttctgctagccctccatgggctgcacccaccgtctaagcagtcccagtgagatgaacctggtacctcagtttgaaatccagaaatcacctaccctctgcattggtcttgctgggagctgcagactggagctttttgcgttcggctgtcttgcccgggaatccttatttttcaactttataatgatgcaaaactgttgcaaatttgatgtaatatatttcaacaaattatacttaagatattcaacactttattataaaa

SEQ ID NO: 424073 - DNA, 594 bp, Homo sapiens
aaactacccaatcaaaaagaaggcagagaaaaagagagatatattttttaaaaagatgggacaataagaaaacaaataccaaaatggtagaataaaatataaccatatcaataatcacattaaatataaaccacccaatacccccarttaaaaggcacatttttagagttgaatgaaaggaaacaaacaaaccatagacacaaaatatagccaattgtcaaccaccatatgtagcccacgaaatgcaatttaaatagaaagatgcagatagataaaagcattggaaatatatattatgctacaactaataaaaataaatttggagtggctatactaacatcagacaaagtagatttcagataattaaatattgccaggtataaaaaagatcaattggtaatgtgatagagtcaattcatcaaaaggagggaacaacatgattagttttgtacctcataacagagattcaaaattcataaaacaaaattttatagcactattaaagaaataattgtattcacaattcaaacatgtaggtagaaaatcagtaaagacatggaagattgaacaaaattatccaactacttgacctga

SEQ ID NO: 424074 - DNA, 569 bp, Homo sapiens
catcaatcaatacatgtaagatatacattgactcgatctggaaggacggggtgggacaacttgaagatggggggggttccaggtaataggtggatttataaatgttctgactggcaattggttgaaagagttattattagtagaaagaaatgtctgggttatgataaaaggtggtggagatcaaggttttatcaygcagatgaagcctccaagcagtaggcttcagagagagcacattgagaatgtttcttatcacacataaggtctgtgatgatgttaatactggaggggtataatgaggcatactggaactcctcttccatcacggccttaactagtatttcaggttaactctggaatgtccttggctgagaggaggggtctattcagatgagtgggggccttagaagtttgtttttgatttacagtttcattcagcttttgggactattgcaaaggtcattttctctaagaagtgttctcttcctctcctgaatttcaaatagatatcacctcctgtttccactcttttcatacctgtgtcactgtactttttacactatactgta

SEQ ID NO: 424075 - DNA, 569 bp, Homo sapiens
catcaatcaatacatgtaagatatacattgactcgatctggaaggacggggtgggacaacttgaagatggggggggttccaggtaataggtggatttataaatgttctgactggcaattggttgaaagagttattattagtagaaagaaatgtctgggttatgataaaaggtggtggagatcaaggttttatcacgcagatgaagcctccaagcagtaggcttcagagagagcacattgagaatgtttcttatcacacataaggtctgtgatgatgttaatactggagrggtataatgaggcatactggaactcctcttccatcacggccttaactagtatttcaggttaactctggaatgtccttggctgagaggaggggtctattcagatgagtgggggccttagaagtttgtttttgatttacagtttcattcagcttttgggactattgcaaaggtcattttctctaagaagtgttctcttcctctcctgaatttcaaatagatatcacctcctgtttccactcttttcatacctgtgtcactgtactttttacactatactgta

SEQ ID NO: 424076 - DNA, 562 bp, Homo sapiens
tgtaacactcactgcgagggtccacggcttcattcttgaagtcagtgagaccaagaacccaccaaatccagacacaccaccatgtcacttcctcaacacatggggattagaattcgatatgaggtttgggtgggaatgcaaagcaaaaccatatcattctgccccagcccctgccaaatctcatgtcctttttacatttcaaacccaatcatgtyatcctgcattagtccaatctcacaatgctataagaacatacccgagactaagtaatttataaaggaaagaggtttaattgactcacacttccacagggctgggtggcctcaggaaacttacaatcatggtggaaatagaagcaaacccatcctttttcacaaggcagcaggagagaaaagaatgaatgctgagtgaagggaaaagccccttataaaacaatcagatcttgtgagaactcactatcatgtgaacagcatggcagaaactgccactataattcaattatctctaccttgtccctcccattgcattggaagattttgggaactattttacatttaaagat

SEQ ID NO: 424077 - DNA, 486 bp, Homo sapiens
cacttttggacacggatatggtttggttctgtgtccccacccaaatctcatgtcaaattgtaatctccacatgttgaaggagggatctggtgggaggtgattggatcatgggggtggagagtgagtgagttctcacggtatctgatggtttaaaagtgtggcacttccccccaaattctctctctctctcttgccttgccatgacatgcttgcttcctcttcaccttctgccatgattgtaartttcctgaggcctcccagtcacaattaaacatctgttcttcataaattacccagtatcaggtggttatttatagcagggtgagaacagactaatacacacccgtatgcagaagatctatatacagctactcaataaagagtttgagcagtctgtaatacgttgggtgcgattgaagacatgatactggaaaaaattactcaagaaaagattctagagtaagaacagaaaaacaaacgtgaaac

SEQ ID NO: 424078 - DNA, 486 bp, Homo sapiens
cacttttggacacggatatggtttggttctgtgtccccacccaaatctcatgtcaaattgtaatctccacatgttgaaggagggatctggtgggaggtgattggatcatgggggtggagagtgagtgagttctcacggtatctgatggtttaaaagtgtggcacttccccccaaattctctctctctctcttgccttgccatgacatgcttgcttcctcttcaccttctgccatgattgtaaatttcctgaggcctcccagtcacaattaaacatctgttcttcataaattacccagtatcaggtggttatttatagcagggtgagaacagactaatacacacccgtatgcagaagatctatatacagctactcaataaasagtttgagcagtctgtaatacgttgggtgcgattgaagacatgatactggaaaaaattactcaagaaaagattctagagtaagaacagaaaaacaaacgtgaaac

SEQ ID NO: 424079 - DNA, 540 bp, Homo sapiens
gtgaatgagaacagatattcaaaatggtacaggaaaaaacaagagagaattgttttataataatatggaaaaagaggttgatgaattatgtcaaatgctgaagagaggtaagttaagcaagaactaagaaaaagtcacttctagaaaaaaaaatgccaaagtatgacgttgagttaaaaatataaaacaataattgtgtatacatagggtactgctatgtattgaaagtctgtgtccctccaaaatttctatgttaaatcctaaatcccccagatgatggtatttgttggtgtgtgcttgggaagtgattgggtcaccagggtagagccctcatgaatgttattagtgtcattatagagacacagaagaggatggtctcttctctctcctcccctataaggataggaatcgagggccatctgcagrccaggaagagtaccctgcccagacgtatctgctggcaacttgatcattcacttcccagtctccttaattgtaagggcaaaaacaattctcttgtttcagccacccagtggatgg

SEQ ID NO: 424080 - DNA, 532 bp, Homo sapiens
gccttggcttctggaataagggatgccacaatggggaatgccaattagaattcytgaaagttcttcgtctttggcgaagatagtaaatcacaaataatattttatctagaagtggaggaatgacaattcttagtaccatccttaaagacctagggtttgcaaaggaaagacatcctaatatgaaaaagacacatgtacatgcatgtttatagtggcaaaatttaaaactgcaaaaatatggaactaacttaaatgctcatcagctcgcaagtggataaagaaaatgcgctatatgtactgctatatatccgcccaaaactattgaaataaaagaaaaaatgaaaaaataaatgtaaaagtaaaatagaaaataaagatctaggattctttttatttgaaatggctgactagaagcagttagtgtgtaccactctgacagaaagtaaagtgctgagtaaatactgactcttcaagtggattgtctaagaaaccatgttgagatccatcaaagaagtgaggagatgcatggaga

SEQ ID NO: 424081 - DNA, 532 bp, Homo sapiens
gccttggcttctggaataagggatgccacaatggggaatgccaattagaattcctgaaagttcttcgtctttrgcgaagatagtaaatcacaaataatattttatctagaagtggaggaatgacaattcttagtaccatccttaaagacctagggtttgcaaaggaaagacatcctaatatgaaaaagacacatgtacatgcatgtttatagtggcaaaatttaaaactgcaaaaatatggaactaacttaaatgctcatcagctcgcaagtggataaagaaaatgcgctatatgtactgctatatatccgcccaaaactattgaaataaaagaaaaaatgaaaaaataaatgtaaaagtaaaatagaaaataaagatctaggattctttttatttgaaatggctgactagaagcagttagtgtgtaccactctgacagaaagtaaagtgctgagtaaatactgactcttcaagtggattgtctaagaaaccatgttgagatccatcaaagaagtgaggagatgcatggaga

SEQ ID NO: 424082 - DNA, 532 bp, Homo sapiens
gccttggcttctggaataagggatgccacaatggggaatgccaattagaattcctgaaagttcttcgtctttggcgaakatagtaaatcacaaataatattttatctagaagtggaggaatgacaattcttagtaccatccttaaagacctagggtttgcaaaggaaagacatcctaatatgaaaaagacacatgtacatgcatgtttatagtggcaaaatttaaaactgcaaaaatatggaactaacttaaatgctcatcagctcgcaagtggataaagaaaatgcgctatatgtactgctatatatccgcccaaaactattgaaataaaagaaaaaatgaaaaaataaatgtaaaagtaaaatagaaaataaagatctaggattctttttatttgaaatggctgactagaagcagttagtgtgtaccactctgacagaaagtaaagtgctgagtaaatactgactcttcaagtggattgtctaagaaaccatgttgagatccatcaaagaagtgaggagatgcatggaga

SEQ ID NO: 424083 - DNA, 576 bp, Homo sapiens
tgcaattacagtgctggggagtggtcagactgccctacttctccttgctagacaaggctctgctgggcttccagcacagtgaccctacccacgcctgaactcttcargtgggcacaggactgtattcccccagaaacttcacataccacggaccatgcaaacctccaactcccaccgcccctggccaggcaagacttgccagcttggacttctagaacagcaaccccacccctacctgaatgctgtggatgggcaaagctctgtgttgccctgggaaccaccctgatgacagactgtgtaactccttttacacccactgttcagagccaggtatgcctcattgttttgagcttccagcaccttggcacagctttgtgttctcacaggaaatgtccagacagtggacgtggaactcccccagccttgactgcttccattcaagcaagacatgcagtttggcagtacctgaatgagagaggtgtcttctttatcagaactgagtaggatgtgatgctgggttcataagctgtcatgggagcagggcatacttcactttgcagggctgatccaagaagg

SEQ ID NO: 424084 - DNA, 539 bp, Homo sapiens
agaaatacacataatccccttgagatactgtacaaaataaccatacccaaggtgcatagtcatcagattcaccaaggtcaatgtgaaaaaatatatcttaaatacagccagagagaagggtcaggtcatttctaaagggaacctcatcagaatagcagtgratctctcagcagaaaccttataagccagaaaaaattgagggcctattttcagcatcctcaaagaatggaaattctaaccaagaattttttattctgccaaataaagcttaataagtgaagggaaaataaaattcttctctaacaagcaaacactaagggaatttattaccaacagaccagatttacaagaaatcctcaagggggtgctaaacatggaaatgaaaggtcaatacctactaccacgaaaacacacataagcatatagcccacagataacataaagcaattacacaatcaagtctacaaaacaaccagctaccaacatgacggcaggaataaaattttacatatcaatactaaccttgaatttaaatggtc

SEQ ID NO: 424085 - DNA, 591 bp, Homo sapiens
tctcttaactattaacataattctatacctagaaaaccccatagtctttgcccaactgctcctcgaactgataaataacttcagtaaatttacaggatacaaaatcaatgtatgaaacccagtagcatttctatataccaataatatcctcaatgagagctaaatcaagaacacaaacccatttacaatagccataaaaaagggaaatatctaataagacacctaaccaagggtgtcgaagatctctacaaggaaaactacaaaaaatgctgaaataaatccagacaatacatataaatgaaaaaaaaaaacgtccacrttcatggatcagaagaatcagtattgttaaaatggccatactgtccaaagcaatttacagatttaatgctatttctatcaaaataccaatgtcattttttcacagatatggaaaaaactattctaaaatttatatggaatcataaaaatagcccgaacaaccaaagcattataagcaaaaaaccaagctagaggcatcatattactgaacttcaaactatagtataaggctacagtaactaaataacatggtacaaaaatagaaatataagc

SEQ ID NO: 424086 - DNA, 591 bp, Homo sapiens
tctcttaactattaacataattctatacctagaaaaccccatagtctttgcccaactgctcctcgaactgataaataacttcagtaaatttacaggatacaaaatcaatgtatgaaacccagtagcatttctatataccaataatatcctcaatgagagctaaatcaagaacacaaacccatttacaatagccataaaaaagggaaatatctaataagacacctaaccaagggtgtcgaagatctctacaaggaaaactacaaaaaatgctgaaataaatccagacaatacatataaatgaaaaaaaaaaacgtccacgttcatggatcrgaagaatcagtattgttaaaatggccatactgtccaaagcaatttacagatttaatgctatttctatcaaaataccaatgtcattttttcacagatatggaaaaaactattctaaaatttatatggaatcataaaaatagcccgaacaaccaaagcattataagcaaaaaaccaagctagaggcatcatattactgaacttcaaactatagtataaggctacagtaactaaataacatggtacaaaaatagaaatataagc

SEQ ID NO: 424087 - DNA, 591 bp, Homo sapiens
tctcttaactattaacataattctatacctagaaaaccccatagtctttgcccaactgctcctcgaactgataaataacttcagtaaatttacaggatacaaaatcaatgtatgaaacccagtagcatttctatataccaataatatcctcaatgagagctaaatcaagaacacaaacccatttacaatagccataaaaaagggaaatatctaataagacacctaaccaagggtgtcgaagatctctacaaggaaaactacaaaaaatgctgaaataaatccagacaatacatataaatgaaaaaaaaaaacgtccacgttcatggatcagaagaatcagtattgttaaaatggccatactgtccaaagcaatttacagatttaatgctatttctatcaaaataccaatgtcattttttcacagatatggaaaaaactattctaaaatttatatggaatcataaaaatagcccgaacaaccaaagcattataagcaaaaaaccaagctagaggcatcatattactgaacttcaaactatastataaggctacagtaactaaataacatggtacaaaaatagaaatataagc

SEQ ID NO: 424088 - DNA, 539 bp, Homo sapiens
tctgaaggagtttattaggtatctatagayaccaatagcagaaatttgtacccaaagtggctgctactaaaacaaaagcctataaacattggctttaggattgcttagtgaaaaggtgcagtggttccttgagaaaactatcagttaagacctgtagaacagtgacaagctatgttattcagtaaaagaatatttggcaacactgggactgaagtaatgtggaaaataatacatacacacacacacacacacacacacacacacacacacacatatacctaaagttgtggaattggccaaggacattttcaagcaggatattgaaagttcaactttcatatgataagaggaaagataatatataaatagaaagagattaagtatagaaggaactgtttagttttcaaacgtacctaaaagaaacattttcaacacaggacttgcaaagttgggaaatacaaatatctgttaattgcaaacttttctaaagaacaaaagattataaaaagaaatacaaacttggggcaagacacattaca

SEQ ID NO: 424089 - DNA, 551 bp, Homo sapiens
gtgcttattcgttcacacttttgagtctggtatgcctgaaccctgcctttgactaatcaaatatttcaattccaggtctagcctataataggataaaacatttcaactttcttgtgaaccttgagcctctgtggaaaatatgtggctactgtattggtctattttctattgctgtaacagaatactacaaggtgggcaatttatagagaaaataagtttatttagttcacagttctggagtctggggaatccaagagcatggcactggagccttcctgctgcattatgacatggcaggagatatyacattgcaagacaaagcaagtgtgctagctcagatccctttttctcttcatataaagccaccaatcccattataagggccccaccttgatgatcatagacaatactaattatctcctaagggtgccacctccaaacaagatatgagtttggtgattaagttttcaacacatgaaattcagggggacacattcaaaccatagcaactaagctgttacagaaaatatgtgaagatacttcctggaaat

SEQ ID NO: 424090 - DNA, 551 bp, Homo sapiens
gtgcttattcgttcacacttttgagtctggtatgcctgaaccctgcctttgactaatcaaatatttcaattccaggtctagcctataataggataaaacatttcaactttcttgtgaaccttgagcctctgtggaaaatatgtggctactgtattggtctattttctattgctgtaacagaatactacaaggtgggcaatttatagagaaaataagtttatttagttcacagttctggagtctggggaatccaagagcatggcactggagccttcctgctgcattatgacatggcaggagatatcacattgcaagacaaagcaagtgtgctagctcagatccctttttytcttcatataaagccaccaatcccattataagggccccaccttgatgatcatagacaatactaattatctcctaagggtgccacctccaaacaagatatgagtttggtgattaagttttcaacacatgaaattcagggggacacattcaaaccatagcaactaagctgttacagaaaatatgtgaagatacttcctggaaat

SEQ ID NO: 424091 - DNA, 614 bp, Homo sapiens
tgttcattatttaaacaggcatatactttgacccaataattccagcytcaatgtatctgatgttgttattcactattcacaaatattctctttctcctctttaaaggcatatggcaaaattccttttcatcatctcttttgatgataggtgttaccaaataaatttcacttctaagtgaagtttcaagagcttaggtataatgtattacattctttctttctcagatcagttctcatcattgtctcagatggtgtcttttgcaatacctgactgaatattgaagttatttataagaataagcagcaatgcttcatgctgaccaaagagtgtgagctacaaattaatccttatggtttacacagggaatttcaaatttctttcttactgtagcttaacctcatcaaacctgatttagaaattctgatcttatagaaaattaaaatatgagaataaacagatatacaattctttatttctgtttataattaacagaaaaaaacataataacctgaatgtcctcccattggaaaatattaaagccaaaaatgttatataagtgtctagtacatacataacttttaagttacagcttagaaaataatgtattgagatt

SEQ ID NO: 424092 - DNA, 610 bp, Homo sapiens
ctgttgcactcaggtcataaatatggagttgtggggtgtaatagaaatattcgttcccataaggaagacataaggatgggtagtgcaaatcaggcactgacctatgtgattatgaaaaacagtcatagtatagttgctactggctggaattatgatatgtcccatgcgaggtgttaagggaggtgctaagatgtcctaggcgccataaagtgtcttggggtggcatggactctacgtggggtctgggatatcccattcacaaatcacaggggaatgggatgtggctattagactgattgatgccacgatggatgcagacatgagtatggccgccctgcaaatggcagtgggggctacagtctaagatgttataattgcctgactagaggctatgggctcgtcccccatgacagaccttccagccaaagtggaacccattactttcctggctatgctctttagcacaggagggaatgttkgagaaagtggcattggttgtgttgaccagtttgaagctacctgcaaacaagaattttaagggatttcctttttaatgatgtagccacaactgtgtttgggcaggtacacataagggttagaacttttataa

SEQ ID NO: 424093 - DNA, 569 bp, Homo sapiens
tttttgtttcctgagcatatttttaagaatggaatggacatgctctattatggcctgtccttgggggttatctgggatgcctgtggaatgttagatgttccacatgtgacaaaattgttgaaatcatgagctagcataagccagaccattataagttttaatttttgtgggctgccccataaacataaaagagaagatgtttaataacatatcaggtggactctccagaaagagcatgtgtgctaattaggtgagaattggcatcaacggatacatgtacctatcttagttttccaaattcagggacgtgtgtaacatctgtttgccrtaactgattaggttccagtcctctagggttaacacctgttgaagaaggggacatgcctgtgagctggcaatatgggcattgcaggataatttgtttagctagtttttgggtaagtttaaattgttaaatttctccaattttggtagaaaaattgatgtgattgggtctcttggtcaagcagtgacgtcgtaacttgcaggtctgtttgatcattgccataagccaatgggccaggcagtga

SEQ ID NO: 424094 - DNA, 545 bp, Homo sapiens
gttgaaatctttttcttattactttaattaaaagatggagtttagctccctttctttgaattygggttggctttagtaacttacctggataaatagaatattgcaaaactgaacatgtatgacttccaagtcaagattagaagatgccctaaacttgatgtcttagaaccatccctcaggaacctctgatacaccatgtaagaattccagctattatgatactgctatgcttcaaaggtcatctataggagctttgagtaacagccttgccatgtattacatctgagcccttcaaccatctctgccaagtagccagatatgtaaatgaagccatgttacaccctccaaccatacctattgccagctaaaaactactaaaggatttcccacctgatctctgtttgaattcttgacctgcaattaggaattataataaaagcttttaagctgctacattttggggtagtttattacagaaatgcctaagcagaacaaagtcttgaagccttcactaagtgacatatgttcactccctctcatgatta

SEQ ID NO: 424095 - DNA, 534 bp, Homo sapiens
atttttcaaagatacaaaatttctgtcaggaaggggtaactgaagttataataaacattcatattttatgttacaaagaaggaatctatacaaatgtcacattaataatctaaggaaaagtggtgggaaacaaaatataagcaatttgtaaatctttttttttttttttttcagaatgggatgtatttgataaaagaaaaacttaaggccacgcatggtggtgactcacacctgtaatcccagcactttgggagggcgagactggcggatcacctgaggtcaggaattcgagaccagcctggctaacatggtgaaacctactaaaaatacaaaattagctaggcatggtggcacatgcctgtatcccagccactcaggagggtgaggcaggaraatcgcttgaaccctggaggtggagggtgcagtgagcagaaatagcgccactgcactccagcctgggtgacaagagtgagactccatctccaaaaaaaaaaaaaaagtaaaacttcagatgaactaaatttaaagaagttg

SEQ ID NO: 424096 - DNA, 534 bp, Homo sapiens
atttttcaaagatacaaaatttctgtcaggaaggggtaactgaagttataataaacattcatattttatgttacaaagaaggaatctatacaaatgtcacattaataatctaaggaaaagtggtgggaaacaaaatataagcaatttgtaaatctttttttttttttttttcagaatgggatgtatttgataaaagaaaaacttaaggccacgcatggtggtgactcacacctgtaatcccagcactttgggagggcgagactggcggatcacctgaggtcaggaattcgagaccagcctggctaacatggtgaaacctactaaaaatacaaaattagctaggcatggtggcacatgcctgtatcccagccactcaggagggtgaggcaggagaatcgcttgaaccctggaggtggagggtgcagtgagcagaaatagcgccactgcactccagcctgggtgacaagagtgaractccatctccaaaaaaaaaaaaaaagtaaaacttcagatgaactaaatttaaagaagttg

SEQ ID NO: 424097 - DNA, 507 bp, Homo sapiens
tgactataattaataacaatatattatattcttgaacatcactgagaatagattttacgtgttctcaccacaaaaatgtgaggtaatgcatatgttatttaacacaattgagcaattccacaatatatacataaattaaaacatgttgcacatgataaatatataaaatggtatgaataataatattttagtctcattttatcagtggtakgttggttagtgtttaatagccaactctttggggaaataataatcatcacttgctgtttgctgatttctgtggtgtaaatatttccatgatggtagaatttaaactatctactaaagcaacactactgaataaagactagaagaaatgtataaaagcaccaataatatgatattgctaccatacacacactacatacagaacttgagcacacataataataaaaatatagttaaaaaatagaaaatgttgtgtcttgattatatattatttgtttataatttgcttaattataaatt

SEQ ID NO: 424098 - DNA, 579 bp, Homo sapiens
tgactataattaataacaatatattatattcttgaacatcactgagaatagattttacgtgttctcaccacaaaaatgtgaggtaatgcatatgttatttaacacaattgagcaattccacaatatatacataaattaaaacatgttgcacatgataaatatataaaatggtatgaataataatattttagtctcattttatcagtggtaggttggttagtgtttaatagccaactctttggggaaataataatcatcacttgctgtttgctgatttctgtggtgtaaatatttccatgatggtagaatttaaactatctactaaagcaacactactgaataaagactagaagaaatgtataaaagcaccaataatatgatattgctaccatacacacactacatacagaacttgagcacacataataataaaaatatagttaaaaaatagaaaatgttgtgtcttgattatatattmtttgtttataatttgcttaattataaatttatacaaattgatttataacaatggttatgtttaacaagaagcttatgaaatccctgaaaattaaaaaagca

SEQ ID NO: 424099 - DNA, 517 bp, Homo sapiens
gtattctttttcttttttcatacgccttatttaaaattattatatgttgaaaatagtgaaaaaaatagttccagaagatctaatttttcaccagacttagtctctttttaatcttattatctaaagcaatcagaaactgtgttggattaggctatattgcatttttagtgaaagttagcccatctcaattttacccttactgttaaggcattactctcccagtgaaatgggtcactgtctctctatccctaaaatatcatgacagatatagctctgtccttcagggattacaaaccaagatctccttctgttccaagwagttcaaaatctagcatataactcaagggaaagaaaattgttatgcttgaggcaaatattctccaaaacacgtcttactttcctaagccctgtaagatgtgagagatctactgtgcttttacgaactttcaaactagttctccagtctcctgaaaagcatcagagctcaacaaatgctcagtggaaaaaaactgactat

SEQ ID NO: 424100 - DNA, 393 bp, Homo sapiens
ccaattgtttgaacaacctgtgctttatacagacacactaagaaataatgtttaattgttcaactaggcatcttgtggcccaactaagtagacacataaaactaaccatcayaatagatttttaatttttaaaagagttgctaatattctattattctccttcttaaatttatttcattgaaatcgttaagattataggcaaaagtttacattcaaaaatggtaattttggtattacacataattataaaaatagaataaattaacatttcaacaatctagatatataaaactgttatgtatcttcatacaaacaataagccaaattataaaactgaataattttaagtttattattctattaataaaaatactcatttttatttttattaat

SEQ ID NO: 424101 - DNA, 563 bp, Homo sapiens
ggctgtggctctcttttatgtagactagtttgttttattgtccctagtattatctacgattacatttctaaaagattctctttttatttcagttacttgagcaaatcagatggagaaaaggaaaacaaatttactctacagagctcagtaaacacaagctacacatttccacttatgttctgaatgatgccatgtctataccagcaccatctagtgaaatcattatcaaacttcaccttgaaaaaatttatgagttggctgcagtatgtgaggtactagggaccctccaccaaattaagaggcacttcatttttgtcttagtcatgacctttgctgacccctagaaaagaaaatttatgtatcctccatatcttgggaagtawcatagagcaatgtcaatggagtgaattttaaaatgtaacaaaaatgagtctgtccagcatcaatctgttatgactattatctgaattttcttcagaaacattaaaattcaactggatctatgaagtagtattgtgcgtggcatgaatcttagttgctacaaatatcagaatgttcttgaa

SEQ ID NO: 424102 - DNA, 589 bp, Homo sapiens
ctcagtaaacacaagctacacatttccacttatgttctgaatgatgccatgtctataccagcaccatctagtgaaatcattatcaaacttcaccttgaaaaaatttatgagttggctgcagtatgtgaggtactagggaccctccaccaaattaagaggcacttcatttttgtcttagtcatgacctttgctgacccctagaaaagaaaatttatgtatcctccatatcttgggaagtatcatagagcaatgtyaatggagtgaattttaaaatgtaacaaaaatgagtctgtccagcatcaatctgttatgactattatctgaattttcttcagaaacattaaaattcaactggatctatgaagtagtattgtgcgtggcatgaatcttagttgctacaaatatcagaatgttcttgaatgtttggatgctttgagagaaaatattaaattaaaattctaaaaatatcagaataaacagaattagaacattaaaacctttaaatccttttatataaaggcatatttatatatttatataaagatatttcaaaatatttttattactctatttttatgtttctattacc

SEQ ID NO: 424103 - DNA, 573 bp, Homo sapiens
agtaagttatcagacttaatgcyttatgaaagcttggtttgatttttaacaatacatatctgttaggtaatgcagtactgaaaaaggagaatttcattatctctatatagaaggagagagatctatcttctaagcaatgggcctcaggaggaatttcctacaaagtgactgcatttggactcaatgactaatactcctggaccctggtgaggaaaatattgcagtgctgtcactgcaggtcttgatgcaaagaaacctgctggtcaagataaaaagagaaaaaacaaaaggtggatgatattgcaataacaagagaaatagacacctattcagtctggctgaattttgatatttttgcctaccaaacaagtttctatttcatacttttaaaaatagatgtattgaggctcagcaatacattttacgtatgtatgtgtttgtgtatatttgtgtgtatatatatatatgctcatatttccttttccatggatattacatattcattatgttccctttcaaaaatgttaaatcatttgatatgcttacaaatatacatccttcaaactcatatta

SEQ ID NO: 424104 - DNA, 573 bp, Homo sapiens
agtaagttatcagacttaatgccttatgaaagcttggtttgatttttaacaatacatatctgttaggtaatgcagtactgaaaaaggagaatttcattatctctatatagaaggagagagatctatcttctaagcaatgggcctcaggaggaatttcytacaaagtgactgcatttggactcaatgactaatactcctggaccctggtgaggaaaatattgcagtgctgtcactgcaggtcttgatgcaaagaaacctgctggtcaagataaaaagagaaaaaacaaaaggtggatgatattgcaataacaagagaaatagacacctattcagtctggctgaattttgatatttttgcctaccaaacaagtttctatttcatacttttaaaaatagatgtattgaggctcagcaatacattttacgtatgtatgtgtttgtgtatatttgtgtgtatatatatatatgctcatatttccttttccatggatattacatattcattatgttccctttcaaaaatgttaaatcatttgatatgcttacaaatatacatccttcaaactcatatta

SEQ ID NO: 424105 - DNA, 556 bp, Homo sapiens
ctttaacgttgcttgctgacagagagcctatatgaggagatttaacattcctacatgacttctaaaacatttactgagaagtataaaaaatgaataacttatttcagcaatttctgcaagtttcraaagttgtaagggagtttatttttcgctttagtggactccactttaatcaattaataatttgaaataaattaatgcattattgtaaaaaacacaattaaagcattaaataacagtacctctaaaagacacagcaatttaagtgtattaacacaaacaaatatttatagatgtattttttaaagaaagtatgaatccaatttttggcttatgtaccagaaaaaaaaatagtgtgaccactctgtgttaatctccatcttccacccacctcactgcagcctcagcaatgagaagccgatctgcagtttcagagggcaagcagctcctgagataatattgatgaagatgggcaagatattagcagccaagcacaccagttttccagatctatgatttgtttttctgcctgaagtgtatctagagagagaaagtt

SEQ ID NO: 424106 - DNA, 556 bp, Homo sapiens
ctttaacgttgcttgctgacagagagcctatatgaggagatttaacattcctacatgacttctaaaacatttactgagaagtataaaaaatgaataacttatttcagcaatttctgcaagtttcgaaagttgtaagggagtttatttttcgctttagtggactccactttaatcaattaataatttgaaataaattaatgcattattgtaaaaaacacaattaaagcattaaataacagtacctctaaaagacacagcaatttaagtgtattaacacaaacaaatatttrtagatgtattttttaaagaaagtatgaatccaatttttggcttatgtaccagaaaaaaaaatagtgtgaccactctgtgttaatctccatcttccacccacctcactgcagcctcagcaatgagaagccgatctgcagtttcagagggcaagcagctcctgagataatattgatgaagatgggcaagatattagcagccaagcacaccagttttccagatctatgatttgtttttctgcctgaagtgtatctagagagagaaagtt

SEQ ID NO: 424107 - DNA, 556 bp, Homo sapiens
ctttaacgttgcttgctgacagagagcctatatgaggagatttaacattcctacatgacttctaaaacatttactgagaagtataaaaaatgaataacttatttcagcaatttctgcaagtttcgaaagttgtaagggagtttatttttcgctttagtggactccactttaatcaattaataatttgaaataaattaatgcattattgtaaaaaacacaattaaagcattaaataacagtacctctaaaagacacagcaatttaagtgtattaacacaaacaaatatttatagatgtattttttaaagaaagtatgaatccaatttttggcttatgtaccagaaaaaaaaatagtgtgaccactctgtgttaatctccatcttccacccacctcactgcagcctcagcaatgagaagcygatctgcagtttcagagggcaagcagctcctgagataatattgatgaagatgggcaagatattagcagccaagcacaccagttttccagatctatgatttgtttttctgcctgaagtgtatctagagagagaaagtt

SEQ ID NO: 424108 - DNA, 539 bp, Homo sapiens
ctgactggcaggtgtgctctgccgtctgcttttggaaacaagccctcaagtgaattatttaaagtcagrcagcctactattagcagacctaaaggaggaactcctagcaattaattaaatcctgatatttaaccccctgagctgagctagtgcctgtagggcaaaggtgctcaaacttcaggctgcgtcggaataaccctgagagcttgttaaaaagcagactgctgggccccaaccccggagtttctggttcagtaggtctggggtgggcctggaaatgtgcacttctagcaagtttcaggggcttctgctgaccctggatcagtgtatcacacaggaccgatagattattgtccctgattatggtgaataatatggcccaaaacacttaagaaacctccaattttctcaaactagcacatctgtgtacctaattatccatgtgtcgtctctctgtgtgtgaggccacgtgctctccacgaagacaggtgagtggagaccaagacacagaggtgctgctatgaccgcaactgcaccca

SEQ ID NO: 424109 - DNA, 539 bp, Homo sapiens
ctgactggcaggtgtgctctgccgtctgcttttggaaacaagccctcaagtgaattatttaaagtcagacagcctactattagcagacctaaaggaggaactcctagcaattaattaaatcctgatatttaaccccctgagctgagctagtgcctgtagggcaamggtgctcaaacttcaggctgcgtcggaataaccctgagagcttgttaaaaagcagactgctgggccccaaccccggagtttctggttcagtaggtctggggtgggcctggaaatgtgcacttctagcaagtttcaggggcttctgctgaccctggatcagtgtatcacacaggaccgatagattattgtccctgattatggtgaataatatggcccaaaacacttaagaaacctccaattttctcaaactagcacatctgtgtacctaattatccatgtgtcgtctctctgtgtgtgaggccacgtgctctccacgaagacaggtgagtggagaccaagacacagaggtgctgctatgaccgcaactgcaccca

SEQ ID NO: 424110 - DNA, 619 bp, Homo sapiens
aagctatataaattgtctgcaaaaaatttaaatgattattattttatcttctattgacgtgtaaactaaaacattgtcatatggctgagtaactgttatgatttttagcaacttcagatttttcatataataatgattctacttaactagcactttaaaatatagcaaacacttgatcatatatcacctaattcagtccctaacaagcaaattactatgatgtatttaaaatagacattataatccttcatttcatactatgcaaaagaattaccacagcaaattgcctaagattagactttgtattggacatgctgacaatgcagaaagattcatatttgaaatggtcaaattagaaaaaaatctaagtaattttctgtctatatattttatatatataaatattacatgtttatttgctttttggtcttgtttttgtttttatgaaacaggaaagaaagacattttgatgagttgacaaaaaaggaagtcagaagtcagaagaaaggatattgtgatcacatggggacagagagaatatctcyaaaaatcactctgaacttttgatgaccttgatttacacaagagaatgcctgcactgacaaaataaacacaaggg

SEQ ID NO: 424111 - DNA, 539 bp, Homo sapiens
ctgactggcaggtgtgctctgccgtctgcttttggaaacaagccctcaagtgaattatttaaagtcagacagcctactattagcagacctaaaggaggaactcctagcaattaattaaatcctgatatttaaccccctgagctgagctagtgcctgtagggcaaaggtgctcaaacttcaggctgcgtcggaataaccctgagagcttgttaaaaagcagactgctgggccccaaccccggagtttctggttcagtaggtctggggtgggcctggaaatgtgcacttctagcaagtttcaggggcttctgctgaycctggatcagtgtatcacacaggaccgatagattattgtccctgattatggtgaataatatggcccaaaacacttaagaaacctccaattttctcaaactagcacatctgtgtacctaattatccatgtgtcgtctctctgtgtgtgaggccacgtgctctccacgaagacaggtgagtggagaccaagacacagaggtgctgctatgaccgcaactgcaccca

SEQ ID NO: 424112 - DNA, 576 bp, Homo sapiens
ctccagcaatcttcacccctggaggaacacaaaactgaacaactctccacacaaaaaagcacctttataagaatgaaaaattaggtgagctatcacacagtatctggttttagtatcttaagaaaaagggccctaaaaataaaagacaaggcamtcttaaatcacctataccacctctccccagtccgcaggcagtggccacatggcacacatagagaatcttgcaattaggggagagagtgtatcagaactcaatgctgccttgtcacagcagaaagcaacatggggcagaacttagccagcacacatggagaaagcatttagatcagccctagccagagataaattatctatcccagcagtcagaactggagttccagcaagccccacctccacagactaaaatgctctggggtcctaaataaacatggaagtcagtggtattatcccattcttgcactgctataaaaaatacccgagaatgggtaatttataagaaaagagatttaactgccttatgattcagcagagagtagaggaaatacagcgtcagcatctgcttctcaggagttgtca

SEQ ID NO: 424113 - DNA, 427 bp, Homo sapiens
tttggttggtcaactgtaaagaaaattaaaaaatgccccataaagtttagatgaatatttatcccacctacaaggaaaatgcatgaacgtatagaagtactgtgacacaaagtccatttgagaggctaaaaggccaaagtgtccgggggctraaaacctgcagccacctgccgggttcaaatgccagctctaccgcttgacaggctacatgactgtaacaagttacttaacttctttatacctcaattttcatcatctgcaaaatggagttgatactaataatgcctagcttacatggtttttgtgaagactaaattatctgatctgtataaagcatttggaggcaggctgcccacagtaaatcctatataagcgcttgctattctattattatcaagatttcaacaattatgactatttagttcat

SEQ ID NO: 424114 - DNA, 585 bp, Homo sapiens
gcctccccttcattcaaggaaccgtgggtctcgaatttgggtgagagttcctgactctctactgtagtggctcagacaagttcactagacctggagttatttgttcatttttggttatttaaatcaaaacaggccgggcatggtggctcacacctgtagtcccagcactttgggaggccgaggcrcgtagattgcttcagatcaagagttcgagaccagcctggccaacatgcgaaactttgtactaaaaatacaaagaaaaaaattaaaattagccggtgtggtggtgcatgcttgtaattccagctacttgggaggctgaagcaggagaatcacttgaaccctgggggtggaagttgtggtaaactgagatcatgccattgcactccagcctgggtgacagagcgagactccatctcaaaaaataaaaataaaaaataaaaacagatctaagtgggttgcctgttgatttgagttattgagtctaattaaatatagacagggatttctgcctatcacaacaaagtttgagatgacctaatattccatatccaccttgctgcctgttaggatcaccatgcccac

SEQ ID NO: 424115 - DNA, 603 bp, Homo sapiens
tcactgctgcaagcagtatctgactgttttattttctatgggttaactcaaaataggcagccaattgaaatctacttcagtatactgacagagctgctgcccaattagcttctttacatacaagcaaagttacacttggccgatgttaaaacatgtatacctgtgtttattttcatctagggtccacttttaattagagaaaggttctattaggtatgttttaggtgaagccttattggcctgaattctcaggtcatttttaataatagaagagtctaggattaatattgttataaacatcaagcttaatagttgttttttttataaagaaatgtttcccattagtaaaatggctaaaatcctttttataaaatatgtattaatgtgcctggcaaagagagatgtctagattgtttttcaccaagggttaaattctgggtaggaggttgtagggtgatttttccccccttttatttttgtacttgtttgacttgcttgagtcttaaaaaaaaatgagcatgtatcttttttttcaaaatctatgaagcattcaaaaagtgctggygcataagaaacataaagtaaatatttatttaatacatg

SEQ ID NO: 424116 - DNA, 566 bp, Homo sapiens
ttaacagcggacatgtcttttcacagagaattcccaagactggacttctgaggaagcctcctggaacgtgctgctccactgccctacatcagcactgaggcatgcgcatttccatgtgggtcattaattatcaggaaggtttcttctcttttgcccacaattatatcctcaattgccaggagcctcctttgcctgcactgggcagaaagacaaggtctgcagccatgtggccagtgctgggcacattgaccaacacctactagtcctcagtatgcatgttcagattgactaaagacacccatggtccacaaagtcccatggtgtctgttacttgcatcaaatacagagaaggcaatccttttcctatagagccctacagagaaaatgggagaaatcaacaataaggcaaagagagagtaatacagaccraatagctcatgttcactggctggctgccatagacaagatgctcaattaaaatcgtatccccatccctgggccctcaatctgaacctctgagcaatctaagatgtcctgggacaatgatgctgcaatcatggatttgc

SEQ ID NO: 424117 - DNA, 611 bp, Homo sapiens
aattaccttgaatcacaactctggtaaaagttttagcaatggaagagttaaaatgattcactagatggaagttttygataatttgttgactttagccatggataattaagagtgatggaatcctcgtttcactatcaaggaagctgcagtcaaggtcaaacaggttgggactaatccagacaaaacactagcattttctcagtgaaatgcttatatatgtgcaataagatttgaatatcagtcattcattcatttattcaacaaatattgtgtcaagctcaccaaataccctgaaaactcactattttcctgcccttgctgttcttccttccttgaaatacatactgcacctcggcaaagtccatagcctgactctttgaaactctagtcaccttcctgttatcatgagactgtggctaatcttaccttagcacaagcagcaaattatgtccgtgggccacaccctgcccactgttttttttgtaaataaaactttattggaacacagccacacctatttgtttatgtattatctatggctgtctttctgctacaacagaagagctctgtagttgtgatagagacagtatggtctaaaaagtctaaaatac

SEQ ID NO: 424118 - DNA, 611 bp, Homo sapiens
aattaccttgaatcacaactctggtaaaagttttagcaatggaagagttaaaatgattcactagatggaagtttttgataatttgttgactttagccatggataattaagagtgatggaatcctcgtttcactatcaaggaagctgcagtcaaggtcaaacaggttgggactaatccagacaaaacactagcattttctcagtgaaatgcttatataygtgcaataagatttgaatatcagtcattcattcatttattcaacaaatattgtgtcaagctcaccaaataccctgaaaactcactattttcctgcccttgctgttcttccttccttgaaatacatactgcacctcggcaaagtccatagcctgactctttgaaactctagtcaccttcctgttatcatgagactgtggctaatcttaccttagcacaagcagcaaattatgtccgtgggccacaccctgcccactgttttttttgtaaataaaactttattggaacacagccacacctatttgtttatgtattatctatggctgtctttctgctacaacagaagagctctgtagttgtgatagagacagtatggtctaaaaagtctaaaatac

SEQ ID NO: 424119 - DNA, 504 bp, Homo sapiens
gttccctgaaaagtctccaatacatgaaataatgagattgacatcccattgtccatacaatgcccacagactacataagtatttttcttacccgctgtttcaaaaacttttaagccagcaaataagccttcggggataaggaccctacaaaatatattatgaattaacactatccacttcctagagccaacattctgaaatgtgtaaactagtagttagagtccttaagtgaatacagctgtgattcatggtcctctcctggcagtgttgagtagaagtattttgaagaaagcctaatattcgtagcaatccagacaactcttcaaataaaaatttaaattcagttaaaaatataacctatatactatataggttaacctggcttcaatccatcccaccttattgcatagtgacagtctgtgagagatgtatgtgacactttcaacccgccccattaaacaaacacagaaacccaaaragaaatgaaggattgagaggcaaaag

SEQ ID NO: 424120 - DNA, 518 bp, Homo sapiens
atatatcatatatagagaaagggcatgaaaagacatatatcaaaatgttgacagtaattgcgtctgggtgggaaaattacaggctttgtttttctttttgcttatttttattgcctactctttttgtcatgtccatgtattattttcataaaaataaaaaactagttttaattaaaaattaacacatagtctcagtcatagacaattacatcagctatagtcayagtcctaatgacaataaaaaggatttgttggttacattacttaacttcaaaacattctgacacccattatccaagaaagtggagcacatgagaaatgctttcaaaggaaaaagaaactcccaattccaaacaatttataaagcatgggggaaaaatgctactatctctactagttaaggttatgaatagtagactgatggttatttctgaaaaatattttatctccctttccatctccatatgctctgacttacttctggagtagatatctatcaggcatcattggactcatta

SEQ ID NO: 424121 - DNA, 450 bp, Homo sapiens
tgggtgaatcttggcaaaataatgttgaataaattaaaaaggccacagaaaattacatctggcatgaaacttcatttttaacttaaaactaacaaactactgttaaatgacatatttttaagaatacatatattattaaattatatttttgaaaagtgatggaatgacaaatacaagatttgggataaagatttatttggtaagtaaggggaaagggatggagaaaggtcacatagatagargtaagctatgatcaatattctagttcttgtgttagtggcaggttcactttatgtattaaattataaaaagattaatagataattgtatcagtaatttactgcagcataataagttacctaataatttagtaacttaaatatacttcttttaacatacttctttcatctatttttcccttcctgaagtgtcttaaagcacattcctggc

SEQ ID NO: 424122 - DNA, 587 bp, Homo sapiens
gtgtgagccaccgcgcctagccaagaaattgattttggattacttaggcaaggaggarctaatcaggccttaggaagaatgagaactggggacgctctagggcagtcagtagcaggaatttacagacagtttctctagactacagcactgctgtcaggaagttttggctcaggctgccttttatccttggatggctgctcaagattcaaagtcctgtgagagggggtctgtttggtctttattgccaaatagatcatttccttcatgggtgaatggtgtactaggtttgagcctgcttgagtgttggccacccctgtggtcagctggggagtaagctactgtatttcatgcctgcttagacctcacagaataagggaaaagaatttccctaattgaaaagtgaaatgtgttacaggccaaaaggggaatggattctgagcagggcaccctgtccttgaatttactgccttctgccccctttcttactgtatagataatttaaaagaattcccaccttaaatgaggaaattagtcattctgaccacctccacaaaaaagataacttattgtcatgtctaggacctctg

SEQ ID NO: 424123 - DNA, 593 bp, Homo sapiens
tcagccctttgcataaaccaatacttgctcaggtctaatgttaatagttacaaacatacatctaactccgacctaattcacatgacctatctctaccccttgatattaggcagaactcttacayggacaaagaatagaaactaaattctaactacccaaagaggggaaaacagcagtatcaaaaggattccaggttgcagcagctcacaggatctaaggaagagttaaggtaaacagggcaagggcagggcctcatagaataaagctaggtactctgcctagctcaatttgggttaagttcaatttgggtcaagctgccctagactaaccacggtggccagaaggatgtgaaagtatgatttcccagtctgtcacatgttcatggaatctcaatctctaccatggatattcatccctctacttatcatcccacctaactaacccatattcaaatatctcctaaataatggcttcatcgtaacttgtccttacaacttaattaggcaagcctgcatccattcaacagtacttatttgagtactttgactagattactccctgacagtcactattctagatgctaaggacagaga

SEQ ID NO: 424124 - DNA, 593 bp, Homo sapiens
tcagccctttgcataaaccaatacttgctcaggtctaatgttaatagttacaaacatacatctaactccgacctaattcacatgacctatctctaccccttgatattaggcagaactcttacatggacaaagaatagaaactaaattctaactacccaaagaggggaaaacagcagtatcaaaaggattccaggttgcagcagctcacaggatctaaggaagagttaaggtaaacagggcaagggcagggcctcatagaataaagctaggtactctgcctagctcaatttgggttaagttcaatttgggtcaagctgccctagactaaccacggtggccagaaggatgtgaaagtatgatttcccagtctgtcacatgttcatggaatctcaatctctaccatggatattcatccctctacttatcatcccacctaactaacccatattcaaatatctcytaaataatggcttcatcgtaacttgtccttacaacttaattaggcaagcctgcatccattcaacagtacttatttgagtactttgactagattactccctgacagtcactattctagatgctaaggacagaga

SEQ ID NO: 424125 - DNA, 411 bp, Homo sapiens
acagctccacttttctttaaaaaatagtaagcactcaatactttagagttactaacattaccaaggttgtcagttttactattaactaggaaaagctatcatgagtaggtgagacccggtgtgttgtttaatattacttaaattacttatgttttgcctccagcttcttcattagaaaaacctgcatctagttactctctctaactcctcataggagcttaaaaaaatcagttaagcartttgaagtctgtaacacagctggaaaacattgcttttgttactctaattcagcaaattacctcctatggtgtattaaatattcctttttctgctctgtaagagttaattcatttctcatcggtgagaacttttcacaggcttgtgaagcagcaaagtgttacagagataaca

SEQ ID NO: 424126 - DNA, 606 bp, Homo sapiens
tacaatggtgtttcattctcaaatacagaaatgctggggcatgtagtgaacaagtaatactgaaaagctgattcaaggaataaataataaatagtaggggttttccccataaaatattgacacagaagcctacaaacctgcagttcttcagatggcagctcttcctacctcagattagatgatgtaatctcacataaacaaaggggaaaagaccaataaaagaaggtttaggatctttacagtaaaacaaaaccaagttattcattgcatttgggtgacataatagatgacattattggtcagggaaaaacatattttcctacctatccacctagaaaattggactgggcatacccactctgatttatgtggtcaaatacaaagcattttcaaatactgggcaaatttttaaataatrtggactatatatttattgaacacaattgtccttttgaagtatttttttcagtcatactcaaaaagtcagatactttttgacagctcaggaaatatatagcaaaaagcttttcataatattgtataacaaatcagagaagaaatgcctatgaacaaacagtctaaaatcaaaccaaatgcatatacata

SEQ ID NO: 424127 - DNA, 606 bp, Homo sapiens
tacaatggtgtttcattctcaaatacagaaatgctggggcatgtagtgaacaagtaatactgaaaagctgattcaaggaataaataataaatagtaggggttttccccataaaatattgacacagaagcctacaaacctgcagttcttcagatggcagctcttcctacctcagattagatgatgtaatctcacataaacaaaggggaaaagaccaataaaagaaggtttaggatctttacagtaaaacaaaaccaagttattcattgcatttgggtgacataatagatgacattattggtcagggaaaaacatattttcctacctatccacctagaaaattggactgggcatacccactctgatttatgtggtcaaatacaaagcattttcaaatactgggcaaatttttaaataatatggactatatatttattgaacacaattgtccttttgaagtatttttttcagtcatactcaraaagtcagatactttttgacagctcaggaaatatatagcaaaaagcttttcataatattgtataacaaatcagagaagaaatgcctatgaacaaacagtctaaaatcaaaccaaatgcatatacata

SEQ ID NO: 424128 - DNA, 393 bp, Homo sapiens
aagatttagattattacatacacttaacttayaaacagcatcagggttgagaggatagactgcaatactgaaagaagttctgttacaggtaaaatgctatcaaacagcactgcatgccacaaagaaatcttttatgaaaggaaaagtcaatcaatgcagcaaacttcatggctgtcttattttaagaaattgtaagagccactccaatcttcagcaactaccaccttgatcagtcagcagccatcaacatcaaggcaagaccctccaccagcaaaaagattacaactcaccaaaggctcaaatgatcattaccatttttagtaacaaaaaatgtatttttaaataaaggtgtctatattgtttttctagatataatgcacacttaatagactg

SEQ ID NO: 424129 - DNA, 393 bp, Homo sapiens
aagatttagattattacatacacttaacttacaaacagcatcagggttgagaggatagactgcaatactsaaagaagttctgttacaggtaaaatgctatcaaacagcactgcatgccacaaagaaatcttttatgaaaggaaaagtcaatcaatgcagcaaacttcatggctgtcttattttaagaaattgtaagagccactccaatcttcagcaactaccaccttgatcagtcagcagccatcaacatcaaggcaagaccctccaccagcaaaaagattacaactcaccaaaggctcaaatgatcattaccatttttagtaacaaaaaatgtatttttaaataaaggtgtctatattgtttttctagatataatgcacacttaatagactg

SEQ ID NO: 424130 - DNA, 393 bp, Homo sapiens
aagatttagattattacatacacttaacttacaaacagcatcagggttgagaggatagactgcaatactgaaagaagttctgttacaggtaaaatgctatcaaacagcactgcatgccacaaagaaatcttttatgaaaggaaamgtcaatcaatgcagcaaacttcatggctgtcttattttaagaaattgtaagagccactccaatcttcagcaactaccaccttgatcagtcagcagccatcaacatcaaggcaagaccctccaccagcaaaaagattacaactcaccaaaggctcaaatgatcattaccatttttagtaacaaaaaatgtatttttaaataaaggtgtctatattgtttttctagatataatgcacacttaatagactg

SEQ ID NO: 424131 - DNA, 393 bp, Homo sapiens
aagatttagattattacatacacttaacttacaaacagcatcagggttgagaggatagactgcaatactgaaagaagttctgttacaggtaaaatgctatcaaacagcactgcatgccacaaagaaatcttttatgaaaggaaaagtcaatcaatgcagcaaacttcatggctgtcttattttaagaaattgtaagagccactccaatcttcagcaactaccaccttgatcagtcagcagccatcaacatcaaggcaagaccctccaccagcaaaaagattacaactcaccaaaggctcaaatgatcattaccatttttagtaacaaaaaatgtatttttaaataaaggtgtctayattgtttttctagatataatgcacacttaatagactg

SEQ ID NO: 424132 - DNA, 392 bp, Homo sapiens
ctagatataatgcacacttaatagactgcagtgtagtatacatwtgagttttatatgcactgggaaagcaaattgtgtgacttcctttatttaaattttattgtggtggtctggagcaaaacctgcaatatcttctaggtatgccagtaccaccttagcgatgttaaatacctacatctatgttgtctaggatctatcccgtcaagtatcctatgtactattctaaaccaattcttcaattattttaaatcagcaagtaaatttatctttgctgaaaatgaggaaagatggttattgtgaaatcagtcagatggaatcttgacctgagtaggcccttagatacaattttgagaaaggcataactagctgcagataagaagtacaaggtaaag

SEQ ID NO: 424133 - DNA, 392 bp, Homo sapiens
ctagatataatgcacacttaatagactgcagtgtagtatacatttgagttttatatgcactgggaaagcaaattgtgtgacttcctttatttaaattttattgtggtggtctggarcaaaacctgcaatatcttctaggtatgccagtaccaccttagcgatgttaaatacctacatctatgttgtctaggatctatcccgtcaagtatcctatgtactattctaaaccaattcttcaattattttaaatcagcaagtaaatttatctttgctgaaaatgaggaaagatggttattgtgaaatcagtcagatggaatcttgacctgagtaggcccttagatacaattttgagaaaggcataactagctgcagataagaagtacaaggtaaag

SEQ ID NO: 424134 - DNA, 392 bp, Homo sapiens
ctagatataatgcacacttaatagactgcagtgtagtatacatttgagttttatatgcactgggaaagcaaattgtgtgacttcctttatttaaattttattgtggtggtctggagcaaaacctgcaatatcttctaggtatgccagtaccaccttagcgatgttaaatacctacatctatgttgtctaggatctatcccgtcaagtatcctatgtactattctaaaccaattcttcaattattttaaatcagcaagtaaatttatctttgctgaaaatgaggaaagatgkttattgtgaaatcagtcagatggaatcttgacctgagtaggcccttagatacaattttgagaaaggcataactagctgcagataagaagtacaaggtaaag

SEQ ID NO: 424135 - DNA, 392 bp, Homo sapiens
ctagatataatgcacacttaatagactgcagtgtagtatacatttgagttttatatgcactgggaaagcaaattgtgtgacttcctttatttaaattttattgtggtggtctggagcaaaacctgcaatatcttctaggtatgccagtaccaccttagcgatgttaaatacctacatctatgttgtctaggatctatcccgtcaagtatcctatgtactattctaaaccaattcttcaattattttaaatcagcaagtaaatttatctttgctgaaaatgaggaaagatggttattgtgaaatcagtcagatggaaycttgacctgagtaggcccttagatacaattttgagaaaggcataactagctgcagataagaagtacaaggtaaag

SEQ ID NO: 424136 - DNA, 274 bp, Homo sapiens
tgtgaaaatctaagtctaacaaaatatagcttttaaaacaacatttacatgtaaacaatatgtgccatgttatccatagaaaggagtcatcattactgtttgggatgaaacataatatagttgtaaacagagattaaatggttttaccaaggcattattcaaattgcatcctttatgtaagaggcctcaaggcacaatcaataagttaatgattaaaatacataaaactgyagcagataatcatcatcataaaattgtgttaaaataatgttta

SEQ ID NO: 424137 - DNA, 601 bp, Homo sapiens
ccttgaaactctaaagaccacactgcagtgtttctgcagttgccatatcactaaagaataggataccaaacctcaaagcaagtaatggagcctcaaggtttacacagtgagttacagcaagcataacaggaaacaagaagggcaacgaaagtgcatgcaatgttggcaaaaaagagtccacctttaaaaataagtccacctttaaagacagaaaaaattggaaatttcctagaaaaacaaagacttcatgatctcttcttgaattaccttgagatcattctcattagtgaacattatattcaaatatactrattaaaatgactatatcctggattcatgtttttttaaatatagatttttcaagaggcaattttaagtatttttaaaactaacggtagaaataaaagcattattgtgataaaactcatatccaagagaattaatctatatatatatatctttcctttgttggtaaagagacatcaaattataatataacctaaaaacatcaacatagaaagcacaccttatcttcaaattggtttaacagtattattctatctaaattacaaagcgactatatttaaacaaataaaaatcc

SEQ ID NO: 424138 - DNA, 590 bp, Homo sapiens
gtgacaaacacacaacaggttgttaaagaaagccaagagtatactttccccacacttcaagcccctgagattcctaatattaataaatcttccaaagaaaaatccttcagtatcagaagtctgacccattttggagcttatacgtacccaatttgtccagagacatggccaattaaaacatactcttgatatcttaaactggcatctttttaagaagatacatattttattgtcattttcccctaaragtaccacatatattagcaacaaaaatttgacccaccttttaaaatgttgaataaaatgtcattttatttttttaatctcattttaatatatcagcataatccataaggtatcactggcaaaatgacatttataaatgaatgacagagttgaagtcttctattttttatcttatttccataatttaagaattaaaaagtatttggagtacaacatcaagggcaattaaatttactaaagctaatttttgccagaatagtgttaggagaaggataataacacctgttttattctaatgatagacttaacccaatacataatttaatttgaattttgactagcta

SEQ ID NO: 424139 - DNA, 590 bp, Homo sapiens
gtgacaaacacacaacaggttgttaaagaaagccaagagtatactttccccacacttcaagcccctgagattcctaatattaataaatcttccaaagaaaaatccttcagtatcagaagtctgacccattttggagcttatacgtacccaatttgtccagagacatggccaattaaaacatactcttgatatcttaaactggcatctttttaagaagatacatattttattgtcattttcccctaaaagtaccacatatattagcaacaaaaatttgacccaccttttaaaatgttgaataaaatgtcattttatttttttaatctcattttaatatatcagcataatccataaggtatcactggcaaaatgacatttataaatgaatracagagttgaagtcttctattttttatcttatttccataatttaagaattaaaaagtatttggagtacaacatcaagggcaattaaatttactaaagctaatttttgccagaatagtgttaggagaaggataataacacctgttttattctaatgatagacttaacccaatacataatttaatttgaattttgactagcta

SEQ ID NO: 424140 - DNA, 603 bp, Homo sapiens
ctggcaaaatgacatttataaatgaatgacagagttgaagtcttctattttttatcttatttccataatttaagaattaaaaagtatttggagtacaacatcaagrgcaattaaatttactaaagctaatttttgccagaatagtgttaggagaaggataataacacctgttttattctaatgatagacttaacccaatacataatttaatttgaattttgactagctagcctcctgacaattcatgaaagcaagcccaacctgttcaagtcaatgtttaaatattaattcttatactgtataatctagaattggtattccacatgctatggaaagcatcaagagaagaattaaacccttaacatacacatatctttattatacaccaaactatttataagagagaatataacaaatttcactgcaataaagcttcaaaaatatgttttagatgacttggtagctgttaagggtacctttaaaattgctgcccaaaaataataagaaagattagactatttttgcaagaaactttcttttgagggtggtttaggggggacatggagtttcgctcttgttgcccaggctggagtgcaacggcga

SEQ ID NO: 424141 - DNA, 603 bp, Homo sapiens
ctggcaaaatgacatttataaatgaatgacagagttgaagtcttctattttttatcttatttccataatttaagaattaaaaagtatttggagtacaacatcaagggcaattaaatttactaaagctaatttttgccagaatagtgttaggagaaggataataacacctgttttattctaatgatagacttaacccaatacataatttaatttgaattttgactagctagcctcctgacaattcatgaaagcaagcccaacctgttcaagtcaatgtttaaatattaattcttatactgtataatctagaattggtattccacatgctatggaaagcatcaagagaagaattaaacccttaacatacacatatctttattatacaccaaactatttataagagagaatataacaaatttcactgcaataaagcttcaaaaatatgttttagatgacttggtagctgttaagggtacctttaaaattgctgcccaaaaataataagaaagattagactatttttgcaagaaactttcttttgagggkggtttaggggggacatggagtttcgctcttgttgcccaggctggagtgcaacggcga

SEQ ID NO: 424142 - DNA, 537 bp, Homo sapiens
agtgtgcatcaatttcatctggatgatttgttaaaccacagattgtgggccctgaccccagaacttgattctgagactccacatttctaacaaattcccaaatgatgctgatgctgagatctactggwccctgaaataaaaaatcctaacaataaatgtttcatatacttacatcccaccagccaaatatttaatccttcagtagtcaatttttaacaacacaagttggttctaagtcttgacgcaagctagattctggaagaaaagataagctttttaaacagtgctaaatgttccttgacccaattataacaacatataatagaccttaagcatgctgtcatcaaggacagaaaccacagctacagaaaatgtgcattatcaatgttgtacctaatatccaataaaaccagcttaaagcaattcagaataacaacactatgagcaatatctgacaggacacatgctttgaatttattagaagaattatccagttcaatgtaatacttaacaaagctagtcgccgaagtgatttaa

SEQ ID NO: 424143 - DNA, 251 bp, Homo sapiens
tttaggactgtatgttcacagggtcatccccaccagaggactgaaagctaatcttatgacatacttctctgttaactttcagtgccaaaaaaagatttagcaagtaagttcctgccccwaaatactataacttaacatactatttaaatagaggccttcaacagttcaacctggaggaaatggtcagggggagttctacaggagataattttcatcagctatctgttcagacaggtgtgcctactattaat

SEQ ID NO: 424144 - DNA, 251 bp, Homo sapiens
tttaggactgtatgttcacagggtcatccccaccagaggactgaaagctaatcttatgacatacttctctgttaactttcagtgccaaaaaaagatttagcaagtaagttcctgccccaraatactataacttaacatactatttaaatagaggccttcaacagttcaacctggaggaaatggtcagggggagttctacaggagataattttcatcagctatctgttcagacaggtgtgcctactattaat

SEQ ID NO: 424145 - DNA, 251 bp, Homo sapiens
tttaggactgtatgttcacagggtcatccccaccagaggactgaaagctaatcttatgacatacttctctgttaactttcagtgccaaaaaaagatttagcaagtaagttcctgccccaaaatactataacttaacatactatttaaatagaggccttcaacagttcaacctggaggaaayggtcagggggagttctacaggagataattttcatcagctatctgttcagacaggtgtgcctactattaat

SEQ ID NO: 424146 - DNA, 626 bp, Homo sapiens
attttcatcagctatctgttcagacaggtgtgcctactattaatgatatattaatgataaaattttcacccttgttttagaaaaatctgctttattcattgatatgaatgccactgatgtaacagcaatgaaaatttattaaacttccaaatataatttgccaaaatttgagatagaaaccacagacaacccttcaytcaggaagtaaaacatttactaatcacatacttctagcctaaaagactagatttagtaatccttaaaaggtggtcaatttagtctctacctcagtagcagaaaaggagccaacataaaacaagtatcaccagaaaaccacaggagtacgctgagtgatgtagaatttgctagtcccagatagttggctcagcttgaataaatggtcttttcactccacagaaacaagaaaactgaaaacatcatccaatactgcattcagagactgcacaattagctgatcagagctaatctagagagaagctgccttttcttcacagaaacaagaattatgatttttaaaaatgttttgaggaattaaatgcaaatttatttcacttttactagattagtttcaccctatttacttattttcccagatttattttctg

SEQ ID NO: 424147 - DNA, 430 bp, Homo sapiens
gcacgacaacatagcaaaaaagcagctggaacttaaattgggaatcatcacttaaaagtagcatgtgagcaagttacttagttactttctgtatgccagttgccttattgactaatggcgataataatgcctgctttscagtgttgataggaggtctgaattgtaagaatttttgttaaagagcctgacataaagcaatcactgtttattaaaataaataatatctgaatagcattttacagtgtacaaagagtcttcaatagcctctaattagatccttgcaaccccctgaaagagcatttctgtatatcatttgatgaatggaggcttggaggagttagaaacttgttaggatcagaaagcaagtcagcagtgcagtgggaactcaaagcttttgattcctaattccccattttttcactgcaccata

SEQ ID NO: 424148 - DNA, 562 bp, Homo sapiens
ttcattatttccaggatgctacgtgctctcatrtaatcacatacctccactatgccaagagtcatcatgatttattataattactttagttaaacttctctttttactgataactattcagtcctacaaaggcagaaataaatgtatccctagaacctaacatcacgtgaggcaaccagtaagagttcctttaatatgtgtccaataaacaataaataaaacaaactcttagaatgctaaaaggtgtgtgagcatgtattactgaacagctctcacataaagtacctcagtacatctcagccactatatgtaacctcattacaaagtctactatttactgcagtgtttatttgccttgttctaggtagctggttgataagacaagaaagatttttctatcttccttcaatagcattaaaaagaaaatcagtaactttttatatttctgttaagaactcatttcttataccttttttcaactttaagatatattaaactagtaaagtaaattaactacaaaactccaggaaacgttagtattctacataaattaagaatggtg

SEQ ID NO: 424149 - DNA, 562 bp, Homo sapiens
ttcattatttccaggatgctacgtgctctcatgtaatcacatacctccactatgccaagagtcatcatgatttattataattactttagttaaacttctctttttactgataactattcagtcctacaaaggcagaaataaatgtayccctagaacctaacatcacgtgaggcaaccagtaagagttcctttaatatgtgtccaataaacaataaataaaacaaactcttagaatgctaaaaggtgtgtgagcatgtattactgaacagctctcacataaagtacctcagtacatctcagccactatatgtaacctcattacaaagtctactatttactgcagtgtttatttgccttgttctaggtagctggttgataagacaagaaagatttttctatcttccttcaatagcattaaaaagaaaatcagtaactttttatatttctgttaagaactcatttcttataccttttttcaactttaagatatattaaactagtaaagtaaattaactacaaaactccaggaaacgttagtattctacataaattaagaatggtg

SEQ ID NO: 424150 - DNA, 442 bp, Homo sapiens
acttacgtgtaaaattgatgaaaagtgatacaaaaagctgttttcactccatactmccacctcaaaagaaaaccttcactataagaggccgaatcagtgaccctccacatatgctctaattcctgggtcctctgaatgtgttaggttacatggtaaaaggggctctgcagatgtaattaaggttaaggatcttagatgaaaagattatcctggatatccctgtagtctgatctaatcgcacgggcctttaaaagcagaaaactttctcaggttggaggcagtgtgacacagcagcataagttagagagatctgaagcatgggaaggctctgagatgggacccacaggcaaggacttcagaggcctctaggaaatcatggaaagcatgagaaggaatgtgggcagcctctaggaggaaagaccaggcttcaactgacagccag

SEQ ID NO: 424151 - DNA, 442 bp, Homo sapiens
acttacgtgtaaaattgatgaaaagtgatacaaaaagctgttttcactccatactaccacctcaaaagaaaaccttcactataagaggccgaatcagtgaccctccacatatgctctaattcctgggtcctctgaatgtgttaggttacatggtaaaaggggctctgcagatgtaattaaggttaaggatcttagatgaaaagattatcctggatatccctgtagtctgatctaatcgcaygggcctttaaaagcagaaaactttctcaggttggaggcagtgtgacacagcagcataagttagagagatctgaagcatgggaaggctctgagatgggacccacaggcaaggacttcagaggcctctaggaaatcatggaaagcatgagaaggaatgtgggcagcctctaggaggaaagaccaggcttcaactgacagccag

SEQ ID NO: 424152 - DNA, 442 bp, Homo sapiens
acttacgtgtaaaattgatgaaaagtgatacaaaaagctgttttcactccatactaccacctcaaaagaaaaccttcactataagaggccgaatcagtgaccctccacatatgctctaattcctgggtcctctgaatgtgttaggttacatggtaaaaggggctctgcagatgtaattaaggttaaggatcttagatgaaaagattatcctggatatccctgtagtctgatctaatcgcacgggcctttaaaagcagaaaactttctcaggttggargcagtgtgacacagcagcataagttagagagatctgaagcatgggaaggctctgagatgggacccacaggcaaggacttcagaggcctctaggaaatcatggaaagcatgagaaggaatgtgggcagcctctaggaggaaagaccaggcttcaactgacagccag

SEQ ID NO: 424153 - DNA, 442 bp, Homo sapiens
acttacgtgtaaaattgatgaaaagtgatacaaaaagctgttttcactccatactaccacctcaaaagaaaaccttcactataagaggccgaatcagtgaccctccacatatgctctaattcctgggtcctctgaatgtgttaggttacatggtaaaaggggctctgcagatgtaattaaggttaaggatcttagatgaaaagattatcctggatatccctgtagtctgatctaatcgcacgggcctttaaaagcagaaaactttctcaggttggaggcagtgtgacacagcagcataagttagagagatctgaagcatgggaaggctctgagatgggacccacaggcaaggacttcagaggcctctaggaaatcmtggaaagcatgagaaggaatgtgggcagcctctaggaggaaagaccaggcttcaactgacagccag

SEQ ID NO: 424154 - DNA, 519 bp, Homo sapiens
tgctgaaggattaaattattttcacaaagtcacaacaatatcctgagatgtttcacttattagattacatgttatcttctagtcatctaagcattactacataacagacaaccaaaagaacaaaattacataaaatttttaaagctagcaataaataatagaagactataccatgccttgaaatgacaaatgtgatgagatgaagttttaatttactgtgacaagccagactgttcctgtacaatttcaaggacaaagaaaacatggatctataagcctcctgttgtaggcgagggtttgtttcttttctaaaggtcaggagccaatagttcacacttggtgagactaaattccctaagggctgcctctgaaggagatcaagagagaaatgtatcgaaaaaaaaaaaactgtatcaagarttagaaaaaacgtatgttagctgacagatggctaatttattatttttttaagagaatttacaagactttttggagatgtggttgattcaggactgaggc

SEQ ID NO: 424155 - DNA, 344 bp, Homo sapiens
gaattggattcaactaaaacagtttggacacatcacttctgcagtctcaaaataatatatattgttaagygatattctagattatttgattggcagtgttaccttaattctctttgagtctctaaatcctgtaaaatgatttgagaatttctctgtattgctacttcaatttttacaggtatttgtattatctcccaaattagttttattgacaaatttaattaaaatgctactcatcattcctctttcttcattagaggcaataaacaaaattagacctaataatgatctcggtaacaacctcctaatgtccatccgcctctaggtaacatttaaattacaca

SEQ ID NO: 424156 - DNA, 522 bp, Homo sapiens
gtagaacaggaagtgtcaaactatgcacatcagctgccacccgacatatacatgtctctgacatggtaataaaatgagaaaccgttttgtttaataataataataaagcaacagcrgtgggtgcacattacatgtagcatccagtcctggttgcctagcaaccagtcatgagtgaaatccacagagaataaaagcccttaaatgaatgtacagtttgtgcaactttcaaggactcaaagagatgtgccagtagttaatctaaattctagctggcaattaccatactcagatggaggaaggagaatccatcattatctctcagaatcaactgtgagattaactagaagctagattctaccctttaggtttttaccttttgaaccagtggttttctaggaaaaaaaatttgacattatgatttataaattataaaaactttatgcagaaaaaacaagaaaatttcactaatataacttgtattcattcattcaacaaaacatataatacctatcacacaccaga

SEQ ID NO: 424157 - DNA, 522 bp, Homo sapiens
gtagaacaggaagtgtcaaactatgcacatcagctgccacccgacatatacatgtctctgacatggtaataaaatgagaaaccgttttgtttaataataataataaagcaacagcagtgggtgcacattacatgtagcatccagtcctggttgcctagcaaccagtcatgagtgaaatccacagagaataaaagcccttaaatgaatktacagtttgtgcaactttcaaggactcaaagagatgtgccagtagttaatctaaattctagctggcaattaccatactcagatggaggaaggagaatccatcattatctctcagaatcaactgtgagattaactagaagctagattctaccctttaggtttttaccttttgaaccagtggttttctaggaaaaaaaatttgacattatgatttataaattataaaaactttatgcagaaaaaacaagaaaatttcactaatataacttgtattcattcattcaacaaaacatataatacctatcacacaccaga

SEQ ID NO: 424158 - DNA, 522 bp, Homo sapiens
gtagaacaggaagtgtcaaactatgcacatcagctgccacccgacatatacatgtctctgacatggtaataaaatgagaaaccgttttgtttaataataataataaagcaacagcagtgggtgcacattacatgtagcatccagtcctggttgcctagcaaccagtcatgagtgaaatccacagagaataaaagcccttaaatgaatgtacagtttgtgcaactttcaaggactcaaagagatgtgycagtagttaatctaaattctagctggcaattaccatactcagatggaggaaggagaatccatcattatctctcagaatcaactgtgagattaactagaagctagattctaccctttaggtttttaccttttgaaccagtggttttctaggaaaaaaaatttgacattatgatttataaattataaaaactttatgcagaaaaaacaagaaaatttcactaatataacttgtattcattcattcaacaaaacatataatacctatcacacaccaga

SEQ ID NO: 424159 - DNA, 522 bp, Homo sapiens
gtagaacaggaagtgtcaaactatgcacatcagctgccacccgacatatacatgtctctgacatggtaataaaatgagaaaccgttttgtttaataataataataaagcaacagcagtgggtgcacattacatgtagcatccagtcctggttgcctagcaaccagtcatgagtgaaatccacagagaataaaagcccttaaatgaatgtacagtttgtgcaactttcaaggactcaaagagatgtgccagtagttaatctaaattctagctggcaattaccataytcagatggaggaaggagaatccatcattatctctcagaatcaactgtgagattaactagaagctagattctaccctttaggtttttaccttttgaaccagtggttttctaggaaaaaaaatttgacattatgatttataaattataaaaactttatgcagaaaaaacaagaaaatttcactaatataacttgtattcattcattcaacaaaacatataatacctatcacacaccaga

SEQ ID NO: 424160 - DNA, 501 bp, Homo sapiens
ggttgcagcctgccggatggccattctgatagactaggaagtgtagcctctgcccagaagccagaaacagacactttgagggaggagcaaaggaaacaggaatttatgctgaacagggtagccaaatacacatattkaataagctataggaggagtcatgaatatttatgagaggagaagcatgcacacatgcaattaaggttcacgtcccttcatgagtcacgtgtaaaaaaatggcggcattagcatgatccaaaggtggagctttccggcatcggatagtgaagcagagaatatgaaaaccctcactgcgcatcctccatagactggcctgaaccactctgtagttagtagtctcttgtcaggagggaatgttggtaaactgttgggtggaaactgcaaagggaagggtgagcatcaggtggttggttgatatcagggatggaatgagtctttcctgagggctcatttctgtttagcctaatggcagttagcaaggga

SEQ ID NO: 424161 - DNA, 501 bp, Homo sapiens
ggttgcagcctgccggatggccattctgatagactaggaagtgtagcctctgcccagaagccagaaacagacactttgagggaggagcaaaggaaacaggaatttatgctgaacagggtagccaaatacacatatttaataagctataggaggagtcatgaatatttatgagaggagaagcatgcacacatgcaattaaggttcacgtcccttcatgagtcaygtgtaaaaaaatggcggcattagcatgatccaaaggtggagctttccggcatcggatagtgaagcagagaatatgaaaaccctcactgcgcatcctccatagactggcctgaaccactctgtagttagtagtctcttgtcaggagggaatgttggtaaactgttgggtggaaactgcaaagggaagggtgagcatcaggtggttggttgatatcagggatggaatgagtctttcctgagggctcatttctgtttagcctaatggcagttagcaaggga

SEQ ID NO: 424162 - DNA, 556 bp, Homo sapiens
tgtggagtcttgaactggatcttggaacagcagaaggacattagtgagaaaactgataaaatgtgaatgaagtctctagttacagtattgtaccaatgttaatttgttgattctgatagttgaataatatttgtgcgagatgctaatattaggagaagctcagtgaagagtatatggaactctttgtactgtttttgtaacttttccattaatctaaacttttctcacaaataaaaagtttatggccgggtgcagtggctcatgtttgtaaatccagcactttgggaggctgaggcgggtggatcacctgaggtcaggagtttgagaccagtctggccaatrtggtgaaaccccatctctactaaaaacacaaaaattagctggacgtggtggtgggcgcctgtaatcccagctactcgggaggctgaggcaggagaatcgcttaaacccagaggtggaggttgcagtgagccaaggtcgtgccactgcactccagcctgggcgacagagtgacactccgtctcaaaaaaaaaaaaaaaaaaaatttatataccag

SEQ ID NO: 424163 - DNA, 556 bp, Homo sapiens
tgtggagtcttgaactggatcttggaacagcagaaggacattagtgagaaaactgataaaatgtgaatgaagtctctagttacagtattgtaccaatgttaatttgttgattctgatagttgaataatatttgtgcgagatgctaatattaggagaagctcagtgaagagtatatggaactctttgtactgtttttgtaacttttccattaatctaaacttttctcacaaataaaaagtttatggccgggtgcagtggctcatgtttgtaaatccagcactttgggaggctgaggcgggtggatcacctgaggtcaggagtttgagaccagtctggccaatgtggtgaaaccccatctctactaaaaacacaaaaattagctggacgtggtggtgggcgcctgtaatcccagctactcgggaggctgaggcaggagaatcgcttaaacccagaggtggaggttgcagtgagccaagrtcgtgccactgcactccagcctgggcgacagagtgacactccgtctcaaaaaaaaaaaaaaaaaaaatttatataccag

SEQ ID NO: 424164 - DNA, 411 bp, Homo sapiens
acagctccacttttctttaaaaaatagtaagcactcartactttagagttactaacattaccaaggttgtcagttttactattaactaggaaaagctatcatgagtaggtgagacccggtgtgttgtttaatattacttaaattacttatgttttgcctccagcttcttcattagaaaaacctgcatctagttactctctctaactcctcataggagcttaaaaaaatcagttaagcagtttgaagtctgtaacacagctggaaaacattgcttttgttactctaattcagcaaattacctcctatggtgtattaaatattcctttttctgctctgtaagagttaattcatttctcatcggtgagaacttttcacaggcttgtgaagcagcaaagtgttacagagataaca

SEQ ID NO: 424165 - DNA, 497 bp, Homo sapiens
aaggcactttgaccgttcccttttacccccttaaaagcaggaattaaaattcccmtgtggaagatgtcctccctgtaccaaaaggaaaagaacattttcatcaaggacaggaagttgaaaccaagagaattctgtccaagcagatcttaaaataattcttgttttcctttagccttcctacatagttacatttccacaatttactccattcaacctactataaaagcatttaggttttgctacttctttggggtctattattagagctcccatgtcccatgccacataaaatttatattaaatttatatggttttctcctcttaatcttatgtcagtttaattatcaggccagccataaaaactcttaagaggacagaggtaaaattttgcctcccctacaaggatatttgagtttgtcagactctttagtttctgaaattgacggtaaatttagttctgaaatagtaaacatacacgcagtataacattttaaaaa

SEQ ID NO: 424166 - DNA, 486 bp, Homo sapiens
caccggcgcgccggccccgacccgctcggcatagttgcctttgcggagcaggcggtgcactcggcccacggggaactggagaccggccctagaagagcgagtcttggccttagcgcgggctttgcctccctgcttgccacgtccagacatagcgagcgcaactcactacgagcaaccacaaagtgaacgggaaaggcggcgctttttataaacactattgggcgcgaaaaagaagacgygttgttggttagggctgcagtttaatttcaaccaatagtagtgcgtcttctggatttgcgaatcctgattgggcagacctgacctctgacgttaccctgaataactaccaatcagacacaagacttcaactcttcaccttatttgcataagcgattctatataaaagcgccttgtcataccctgctcacgctgtttttccttttcgttggcgctttatagctacacagtgctatgccagagccagcg

SEQ ID NO: 424167 - DNA, 462 bp, Homo sapiens
tccagtatgaagtaatagtatagtattttataccctgcagagtttaattcagtagactaatttttcatgaaatgcagttctgctaaatactaacatttcaaagcagagacagttgtttcttttgcattttatagcaggatagaacmcaaacatgaaccttaggaagtattttgcatacagtagtaaaataaattacatggaatatcagggctatggtttgaatgtgtgtctccgtccaaaattcatacattggaacttaaacactgctgtgtggtgatgggactaagagatgggatctttaagaagtgatctttaggactagtgaccttataaaagggctggagggaactagataggcattttttttttttttttttttttttttttgctttccaccgtgtagggacacagtgttcaaggggccctcttagaagcagagaccaggtcctcactaaacactga

SEQ ID NO: 424168 - DNA, 462 bp, Homo sapiens
tccagtatgaagtaatagtatagtattttataccctgcagagtttaattcagtagactaatttttcatgaaatgcagttctgctaaatactaacatttcaaagcagagacagttgtttcttttgcattttatagcaggatagaacacaaacatgaaccttaggaagtattttgcatacagtagtaaaataaattacatggaatatcagggctatggtttgaatgtgtrtctccgtccaaaattcatacattggaacttaaacactgctgtgtggtgatgggactaagagatgggatctttaagaagtgatctttaggactagtgaccttataaaagggctggagggaactagataggcattttttttttttttttttttttttttttgctttccaccgtgtagggacacagtgttcaaggggccctcttagaagcagagaccaggtcctcactaaacactga

SEQ ID NO: 424169 - DNA, 525 bp, Homo sapiens
taccatctttaatataaccataaaaaaacagaaaattcattttaaggatatatataagccaagacacacatggtgggataattttctaaataatctcttttatacattttctaacattggctcattttaaaacatgtgtattgttttaagaaatattttttcattttgtatcttgtatcygaatggagggaatacgctccttgatagacactactctgcatatcttaatcctgtggtttccaactcccagtaaacctcacaaaagtggagatgctaaatttttgctattgtacacatttatactcatttctttgatatccactccactgtccttctctattacaggcagtttggaaatataaaaaatatatatatatttaatatataaatttatatatttatatttatatatatttatatataaatataaaaatacacataacaggatgtgtgtgtgtgtgtgagagagagagagagatagggtgtgaatgtgtgtgcatgtgtgtatttgtgaaagagaaagaa

SEQ ID NO: 424170 - DNA, 525 bp, Homo sapiens
taccatctttaatataaccataaaaaaacagaaaattcattttaaggatatatataagccaagacacacatggtgggataattttctaaataatctcttttatacattttctaacattggctcattttaaaacatgtgtattgttttaagaaatattttttcattttgtatcttgtatctgaatggagggaatacgctccttgatagacactactctgcatatcttaatcctgtggtttccaactcccagtaaacctcacaaaagtggagatgctaaatttttgctattgtacacatttatactcatttctttgatatccactccactgtccttctctattacaggcagtttggaaatataaaaaatatatatatatttaatatataaatttayatatttatatttatatatatttatatataaatataaaaatacacataacaggatgtgtgtgtgtgtgtgagagagagagagagatagggtgtgaatgtgtgtgcatgtgtgtatttgtgaaagagaaagaa

SEQ ID NO: 424171 - DNA, 620 bp, Homo sapiens
atagcatgtgggaaagagcttgaactaaaataaaattaaagaccagcatggctggaaaataataatgggcaagttaaagagatgcaggggctgaggtgatcaagttggaaaagggctagatcgcgtaggacttctaggactttccatttcatttgaggcacrgtatgagcccttgcaggattttaggaagaggagtggcataacatgaactgcattctttaaaggccacatgactgaacatgtggagggagccagaatggaagcaagagacaaatattaaaggcacataaatgtggcagatagggtgatgtgatagaaattgatgtaagagagacagaatgctggagaaatgcaattgaaaacgaaatctcctccaaacccaaacacttctccacaaaggtagaaaacaattttaatgttcaataagtatcaaaccagactgcaatgcacattataggcagactgctaagagatttcaaactggaaagtaatctcacccttttatatagccaagcccattcaacctgttacatgcctattcttaaggtaagcaacaactacagacagtccccaacttatgagtttgtgactttccaatggtataatatggatacattaga

SEQ ID NO: 424172 - DNA, 620 bp, Homo sapiens
atagcatgtgggaaagagcttgaactaaaataaaattaaagaccagcatggctggaaaataataatgggcaagttaaagagatgcaggggctgaggtgatcaagttggaaaagggctagatcgcgtaggacttctaggactttccatttcatttgaggcacggtatgagcccttgcaggattttaggaagaggagtggcataacatgaactgcattctttaaaggccacatgactgaacatgtggarggagccagaatggaagcaagagacaaatattaaaggcacataaatgtggcagatagggtgatgtgatagaaattgatgtaagagagacagaatgctggagaaatgcaattgaaaacgaaatctcctccaaacccaaacacttctccacaaaggtagaaaacaattttaatgttcaataagtatcaaaccagactgcaatgcacattataggcagactgctaagagatttcaaactggaaagtaatctcacccttttatatagccaagcccattcaacctgttacatgcctattcttaaggtaagcaacaactacagacagtccccaacttatgagtttgtgactttccaatggtataatatggatacattaga

SEQ ID NO: 424173 - DNA, 620 bp, Homo sapiens
atagcatgtgggaaagagcttgaactaaaataaaattaaagaccagcatggctggaaaataataatgggcaagttaaagagatgcaggggctgaggtgatcaagttggaaaagggctagatcgcgtaggacttctaggactttccatttcatttgaggcacggtatgagcccttgcaggattttaggaagaggagtggcataacatgaactgcattctttaaaggccacatgactgaacatgtggagggagccagaatggaagcaagagacaaatattaaaggcacataaatgtggcagatagggtgatgtgatagaaattgatgtaagagagacagaaygctggagaaatgcaattgaaaacgaaatctcctccaaacccaaacacttctccacaaaggtagaaaacaattttaatgttcaataagtatcaaaccagactgcaatgcacattataggcagactgctaagagatttcaaactggaaagtaatctcacccttttatatagccaagcccattcaacctgttacatgcctattcttaaggtaagcaacaactacagacagtccccaacttatgagtttgtgactttccaatggtataatatggatacattaga

SEQ ID NO: 424174 - DNA, 389 bp, Homo sapiens
tgctgtgtccctttgtcttttttcttgttttttgaccctctctttccctttctatgatactatgaaggttcaatgcagtttagcaaacccaatgtttattatcactattttgaactgcttcctagatcatctgagatgatgaaaattaaattttaaaaaaaactaaaattaaattaaacttaaatttaaaaaactaaaaatgaatagaaagaagagtrattatttgggtaattatgtaattatttacttacctacttttcttcgtattcatgtttttaaatagcagtaataaagtatttataaaaactggtctctttacctcaagcagtgaaaacttaacatatctttgtgtttggctgtggttttctttccctctttaatttaaaact

SEQ ID NO: 424175 - DNA, 389 bp, Homo sapiens
tgctgtgtccctttgtcttttttcttgttttttgaccctctctttccctttctatgatactatgaaggttcaatgcagtttagcaaacccaatgtttattatcactattttgaactgcttcctagatcatctgagatgatgaaaattaaattttaaaaaaaactaaaattaaattaaacttaaatttaaaaaactaaaaatgaatagaaagaagagtgattatttgggtaattatgtaattatttacttacctacttttcttcgtattcatgtttttaaatagcagtaataaagtattyataaaaactggtctctttacctcaagcagtgaaaacttaacatatctttgtgtttggctgtggttttctttccctctttaatttaaaact

SEQ ID NO: 424176 - DNA, 442 bp, Homo sapiens
cctgtttgcccgggagctggcataatttcaagtcatctgtgagacattcaaggggaatcttaagtaaataatctattacttcctaggactaggcaagtttggaacaaccctaaaaccaatagcactcttccatctaaagaggaagttcaggtcctgtaacccttcaacacttactgtcaaggctaagatacagttggttctcagtactagtgtaaagggttttggagataaatgttcttgcttctgtgtagactgtctatatttgagagatyctctcatgtccctccctttaggattgcttggtgcttttttccattctgtcttctctcacgtatatggggcagaaggatgagcaagagctctctacaacttgtcagggcaaacactgccacttttaaaaagccaaacaaggatgagaatgagatgcagagaaaagaggaca

SEQ ID NO: 424177 - DNA, 620 bp, Homo sapiens
gagcaaataatgaagctcttgtagaaaatgattagaaagattattttaaatgttttttgctaataaaacttttgagtgacaaatagaaagataacttactacattttctcacagttatgtcaggaaaatgaataggtagctgaatgtctttcccagctgaaaatgagcatgaaaattatacctgaatggcatcacgagtgcagggccccaggaagagaacctaaagaatgctgctscattttgggactgagaagttttaggtcagtccctgttttcttctgcacaaagtaatggtgagaatagccttcctctatctgattccctaataaataaaaagtttatataatggatttgcaaatattttttagcccatactagtaaaaataccacacactcttcacactacaaaaaagttatcaccaaatagaatgggaagattggcattgacttgcctgcctccccattctagattttattaaaattgtaaatatctccatctgttatcaaaacaaaggaaggaaaggaagtgttacctgtaaaatcttcacgatttcaacagcataatcacttctttcttaaattctggaaggaaggagaaaaaaaggaagtgtaattctgaa

SEQ ID NO: 424178 - DNA, 628 bp, Homo sapiens
agtcttcttaacaactatttgctgctggacacacacaaacatccacacaccatactcctcttaattccttcagtctacacttttagaactctgtgtggcttttgttaagctattgtttaagctaaaagctcttcttccaagccatctcttccttaacagttcaaatrccactttttcttacatccattagttgatttttttcttgaatttttattgtactttaattcttcctttattttgatgctgaacactgctttttctataacatacgtgagtgcatacatatgtattatatatgcattttttagctccttaaaagttaagaactatgtcttagtaatcttgacatagaagattctaaaaatagtatttattaatttctattgcaagttggtaataaggcaatgatattttccataaagaaaaatgagagtagaactttattttagtttgttgatattttgactaattgacttacaaaatgggagttggagtatagggttgggaagagagtagattaatgcaactgtagaaatacttagaaaacaggggcaaaaagaggaaagcctaattacttgagcccagaagtattttatgaaaaaaaaattactttcacttaaatatgact

SEQ ID NO: 424179 - DNA, 564 bp, Homo sapiens
tacacatacataaagtacttttaggtaaagatgaaagctattacagtactctgttatagcccacctcattaatagatcattgaataaaccactaatctatcacttaaataatggactatacagctaaagcataataaaaaagagttttgatcaagctttgagtagtgtttttcaagacagacaaagaagaaaatgcagtttttctctctctctctcttgctctctgtctctgcatgtaaatctatctgcatgtaaatctatctctgaggtttcagagttgcattatggtgataaaatcaacaagcaattggttctggccataaaacacataagcttaaggacctacaagtcagcaatttgagagtcaaatccatctttcatgggtggatttcactcagctaatagacagagaatgatgtataaaatcataatgccaacttrtaaatttataaatagaaatatggttgtcatacctccttaaacactgacatcggcataaccacctcttctctcccaaaggcagatcattaaggaaagtcaaactttaatgggaagggtcctcaa

SEQ ID NO: 424180 - DNA, 617 bp, Homo sapiens
ccactggaattaaataaatagtgtcatatagaaggaattacattggtgtagaggcctaggttcttgccccaatctacagttgccatctaactacattgtacacattaccatcatgaaactcgataaataactactcagattgataataagtaaaagccattagactttccttcaaaaatacattgagtactctttttcacactcttcaatcttcaatgttctcaccagttgctctgtgtcttgcagatgaatctttgtttgttttagttctttttagttcttttcttcttyctaggatgtttgtccatattaacaattccttccttttataacagctccctaaagaaactctttggtcttttctcccattgcaccctcttcacattggaatcaaattgcctggttttccatctgcataaaattatctctgaaatctgaattctacatatcacccaggacccgttcctatgctatatttttcatgagatttttactggtcctcccagctagtgcttcctccactcatggaacttccatagcattcaatccatgcctcttttaagataattacaattttctgtgaatatgcactcatccccaaaagaatattgcacaca

SEQ ID NO: 424181 - DNA, 496 bp, Homo sapiens
catctgaacaatgtttgctcagttgacaccttactgataaaaacgtaatagctatgtaagagtggactaaagagctgatttactttattatttcattcaatatgaactataggacaatgcgtttctataaaaaatttgtaccacagattttgagtggcaatacatagcaaaataattgtcctttcccttctaaaattattttttgataactaagtgaacttgttayaaaaaaatttcctcaattgcttctcagtatatttgtagttaatttgagctcatgatcctcaagagattatgtgaaaatcctaatggaagcataaaaaagactgaaagctttgtggatgtttcacaggctaagacttcaaacttccgcaccaagttttaatcccgttggtatctgtccaggggaaaatatgttctgattttcattcttcttcctgaagttttcaacttgctttcctaatattcttcatcaacacatgagttcttccactgc

SEQ ID NO: 424182 - DNA, 496 bp, Homo sapiens
catctgaacaatgtttgctcagttgacaccttactgataaaaacgtaatagctatgtaagagtggactaaagagctgatttactttattatttcattcaatatgaactataggacaatgcgtttctataaaaaatttgtaccacagattttgagtggcaatacatagcaaaataattgtcctttcccttctaaaattattttttgataactaagtgaacttgttataaaaaaatttcctcaattgcttctcagtatatttgtagttaatttgagctcatgatcctcaagagattatgtgaaaatcctaatggaagcataaaaaagactgaaagctttgtggatgtttcacaggctaagacttcaaacttccrcaccaagttttaatcccgttggtatctgtccaggggaaaatatgttctgattttcattcttcttcctgaagttttcaacttgctttcctaatattcttcatcaacacatgagttcttccactgc

SEQ ID NO: 424183 - DNA, 496 bp, Homo sapiens
catctgaacaatgtttgctcagttgacaccttactgataaaaacgtaatagctatgtaagagtggactaaagagctgatttactttattatttcattcaatatgaactataggacaatgcgtttctataaaaaatttgtaccacagattttgagtggcaatacatagcaaaataattgtcctttcccttctaaaattattttttgataactaagtgaacttgttataaaaaaatttcctcaattgcttctcagtatatttgtagttaatttgagctcatgatcctcaagagattatgtgaaaatcctaatggaagcataaaaaagactgaaagctttgtggatgtttcacaggctaagacttcaaacttccgcaccaagttttaatcccgttggtatctgtccaggggaaaatatgttctgattttcattcttcttcctgaagtkttcaacttgctttcctaatattcttcatcaacacatgagttcttccactgc

SEQ ID NO: 424184 - DNA, 491 bp, Homo sapiens
atatctagttgatcttctacatgattttatattaatctccaggaactttttctgattgtttctttacataaatatcttagtttttccttttggtttttgtttttattggaagcaatatttcttgttattcttaggatttcaattacaccaattgcttttgtcttctttatcttcctgtattgtctgtttcttttactttttcttttttaaccatttgcacttccccaccctgctgacatgtttacattacyaggtctggtacaaaggagtccagagcttctcaggttcagtttctcctgaatatattaatggctggcctcctgcttgagggggagtcacttgatctccagaagggaaggagaactaggggcttaactgtaccttatgcacattttcctccaatccaagaaagccttactaacttcataagtcatggaactccttgagagtgagtttttcaggttgcagtggtcctcagtgtggtcttctat

SEQ ID NO: 424185 - DNA, 547 bp, Homo sapiens
actcagttggattaatgagaatctctctccaaggaatgtggaattgggtcaatgagcaggaaggtcagttagtggtggttgcttctttgttgtattataacgactcctaggtcagaggatctcgctttgaggacactgtgataggaatgtttaaggagagcacaagaaactgtcctttagcaagaaaaggagaatgagagaggcactaaaatggccccatttattaccagaaaaaggcacatactaagaaaatctgcaaggtgaactgtaggtctagttcctgtcataatgccccattacttatctacctttgatctcatgggaaaagtcggtatccttctaattacacctctgttttatgaaacaataagtcacyatataatatgcatgatttttaaatcaatttcaagacacacctgacaactgtcatatgaagattataattagtgttaatggaaggccagctaagattgcattgcaaatttggtgtccttttacacttcataaaggataacctctgcaatgaacatttaattggtaaattata

SEQ ID NO: 424186 - DNA, 583 bp, Homo sapiens
tcaacgcctgtgcagggaggcacacagaccattactgggtcacagcaggagtaatatgaatacttaaagagcactttgaaaagaaataatgtacaaaytcattaattaatctcatatcctgtaatttctgtgccttttcactttctctgcctttttactaaaaacaaaagaaaacaaaacaaaaagcacatgctgtgtcttgtcctcactccatgaccacaaagtatgactaactactgtcttcctttcagagcatttttccataaatatgggaatactaactactacctcataaaatcgttaagaatatttaaaaatacaattcatgtaaagcacttagaacttcagctggcaagataaaagtcccaataaatgttagctgctgttgttttttatcattattattgagaaccaaagctatacagcccaatgtatatattaacatgactttactcttacaagaaactcttgcccaagaagatgaaaaggcaaataattgtattttttgtttatttcaagaaattccaccaaatccatatatccaaactttcaactatgctttcatcatctcatttctcataac

SEQ ID NO: 424187 - DNA, 583 bp, Homo sapiens
tcaacgcctgtgcagggaggcacacagaccattactgggtcacagcaggagtaatatgaatacttaaagagcactttgaaaagaaataatgtacaaattcattaattaatctcatatcctgtaatttctgtgccttttcactttctctgcctttttactaaaaacaaaagaaaacaaaacaaaaagcacatgctgtgtcttgtcctcactccatgaccacaaagtatgactaactactgtcttcctttcagagcatttttcyataaatatgggaatactaactactacctcataaaatcgttaagaatatttaaaaatacaattcatgtaaagcacttagaacttcagctggcaagataaaagtcccaataaatgttagctgctgttgttttttatcattattattgagaaccaaagctatacagcccaatgtatatattaacatgactttactcttacaagaaactcttgcccaagaagatgaaaaggcaaataattgtattttttgtttatttcaagaaattccaccaaatccatatatccaaactttcaactatgctttcatcatctcatttctcataac

SEQ ID NO: 424188 - DNA, 583 bp, Homo sapiens
tcaacgcctgtgcagggaggcacacagaccattactgggtcacagcaggagtaatatgaatacttaaagagcactttgaaaagaaataatgtacaaattcattaattaatctcatatcctgtaatttctgtgccttttcactttctctgcctttttactaaaaacaaaagaaaacaaaacaaaaagcacatgctgtgtcttgtcctcactccatgaccacaaagtatgactaactactgtcttcctttcagagcatttttccataaatatgggaatactaactactacctcataaaatcgttaagaatatttaaaaatacaattcatgtaaagcacttagaacttcagctggcaagataaaagtcycaataaatgttagctgctgttgttttttatcattattattgagaaccaaagctatacagcccaatgtatatattaacatgactttactcttacaagaaactcttgcccaagaagatgaaaaggcaaataattgtattttttgtttatttcaagaaattccaccaaatccatatatccaaactttcaactatgctttcatcatctcatttctcataac

SEQ ID NO: 424189 - DNA, 576 bp, Homo sapiens
atttgatcctgtcattgtattgttagctggttgttatgtagacttgattgtatagcagctttatagtgtcagttggctatgttcttaagtgtgttcttgtggtgggtagtattggtcttttgtttccatgtttagcaatcctttagaacctcttgtaaggcacgtctggtagtaacaaattcccttagcatttgcttctctgaaaaggattgtgtttttacttcacttataaagtttagtttggctgtatatgaaattcttggtagaaatttcttttgcttaataatgcagtatatagcccccttccctcatttcttctagcttgctaagtttctactgaaatgtccactgttagcctgatggggttccctttgtaggtggcctgccacttatctctagctgctttttttttcttatacrttgaccttgcagaatctgatgaccatgtgtcttggggatgattgtcctgtatagtatctcacaggtgttcttttaattttcatgttgacctctctaatagcggagatcaacatgaaaatgaataatgagattttcagggacaatattctcaaatat

SEQ ID NO: 424190 - DNA, 576 bp, Homo sapiens
atttgatcctgtcattgtattgttagctggttgttatgtagacttgattgtatagcagctttatagtgtcagttggctatgttcttaagtgtgttcttgtggtgggtagtattggtcttttgtttccatgtttagcaatcctttagaacctcttgtaaggcacgtctggtagtaacaaattcccttagcatttgcttctctgaaaaggattgtgtttttacttcacttataaagtttagtttggctgtatatgaaattcttggtagaaatttcttttgcttaataatgcagtatatagcccccttccctcatttcttctagcttgctaagtttctactgaaatgtccactgttagcctgatggggttccctttgtaggtggcctgccacttatctctagctgctttttttttcttatacgttgaccttgcagaatctgatgaccatgtgtcttggggatgattgtcctgtatagtatctcacaggtgttcttttaattttcatgttgacctctctaatagyggagatcaacatgaaaatgaataatgagattttcagggacaatattctcaaatat

SEQ ID NO: 424191 - DNA, 546 bp, Homo sapiens
taattcacctcttccctaggagctgcttggggacaggaatgagtcctggtgctcagcaaccacaygcaggttttccagcttcctcctctttcagcccctgggttccgtgtcttccctgtatccactctcaatgccttctttccaaatgttcagagtgtgtcagtctacctgatggtctggtctctcttggtgggagaagctcttccaggctgtatatttagccatcttccataaccaggttttagattcacttttactatctctcagccttagcactgtactctcatagaaggcaaattcagcatcagctttagctcctattaactaaggagagtcttcaagaaaatgtgaattgtaatgatggaatttaattctccccagagtctcacactggggtgtgggagaagggtcagtcatcacaacccagaacctttcataagtttctgtaagtttccatgtgctgttgcagtaggacctctcatgatcctattgagtgatgaaaaaaacaatagcagtttttctcctgaactttgagaaacaaaaagg

SEQ ID NO: 424192 - DNA, 546 bp, Homo sapiens
taattcacctcttccctaggagctgcttggggacaggaatgagtcctggtgctcagcaaccacatgcaggttttccagcttcctcctctttcagcccctgggttccgtgtcttccctgtatccactctcaatgccttctttccaaatgttcagagtgtgtcagtctacctgatggtctggtctctcttggtgggagaagctcttccaggctgtatatttagccatcttccataaccaggttttagattcacttttactatctctcagccttagcactgtactctcatagaaggcaaattcagcatcagctttagctcctattaactaaggagagtcttcaagaaaatgtgaattgtaatgatggaatttaattctccccagagtctcacactggggtgtgggagaagggtcagtcatcacaacccagaacctttcataagtttctgtaagtttccatgtgctgttgcagtaggacctctcatgatcctaytgagtgatgaaaaaaacaatagcagtttttctcctgaactttgagaaacaaaaagg

SEQ ID NO: 424193 - DNA, 554 bp, Homo sapiens
ctggtaggaggtaattgaatcacaggggcaggcctttcccatgctgttctcatgatagtgaattagtctcacgagatctgatggttctataagggggagtttccctaacaagctctctgttctcttgtctgctgccatgtgagatgtgcctttcaccttctgccatgactgtgaggcttctccagccacatggaactgtaagtccattaaacctctttcttttgtaaattgcccagtttcaagtatgtctttatcagcagcatgaaaatggactaattcgcccctaaagccccaaagggttgcaatcataaaaaaattggagatacttcttagttgctaaaataagcagaaatacgtcaaggaggtgaagacggtgaggacatttcaaraagagcaatgacacagacgtgtgaaatcatgtaaccgtaaacacttcttgccaggtgccagctgaagagatgatgaaacaggaagtaggtaggagctaacggagggtcttaaattctacggagagaaaattgtcatgtattaagtgatactgaaagttttaagaa

SEQ ID NO: 424194 - DNA, 391 bp, Homo sapiens
cagttcatgatcaagtttctccagatggctcaaaaatatgtttttacagttgacttgtccaaattaattcaaaattcttgtattaaaaaaaagaaatctgtgttctttccaaagtgtttttattcatgaataaaactgaattctgtaataataatatagaaaaatcttcattgtgctacttatgatgcctacatatatttgttttattttaaatgctcacctataaatcccattttgatagttggtagaatttcaactcacccaaagatattcttcacatggttttagtttgccatgctcattgtatccaacaaaggaattactgtcactcattaacagtgctaacagtgcttgktatatagtagatgttccatcaatatttgctgaattc

SEQ ID NO: 424195 - DNA, 583 bp, Homo sapiens
caacattattttaaatattatcttatctaatgaatggtgttttctcaagtatcaagtagcttgtttcctattacatcataatatccagagggcattttctcctccactgccccccacttccttcttactttagggaagacaaagacaaagaggtaaagggcaaaaagcaatcrtgagttcaatttcccaaaaactgtgaagactcagggggtggaaaataaagaaataacaagtttagaacatcagtgtccctccacctcagaccatttgaagtaaagacaaaagaatctgaattattcttcttgcagtttattccttaaaaaaaaagcagtgattaccttcagtgaaaatatgtgaacctctctaacaagtcaaagctactgctggtttggactcaaacaattgatcatcataaaggactctgttaatatgtcctgtaatcaaaaatgttctgatgacagatttagtacctctcataagtaacaaagcagagtggcatatgaatgaagtaaattcatttctgcaaaaatgtattgcaagaacccaagagctgaggtctagccccactgagtctcccctgggc

SEQ ID NO: 424196 - DNA, 554 bp, Homo sapiens
acttttcctttttatgttgaacattagcctataatcattttgaactaaaaaagtctaaatatactgaatatcctatgatcatctccttcaagtctttactcttgtttgttttcccaagaacaaccatcatcttctagcagattatataatttagatatttcttatgaatagggcttattgcctatcatcatgccaagatgggcctctacctcataagagcagaaaccatttttttcactgaaaaacttagaatagtgtttggtttayagaaaacactcaaaaaacaacttaaaccaccttgaatattgtaagtccaaacctctaattctattctcatgggaagataaaatgtaaggataaaaacagagaaagaggaatacatttgtgcatactgattaatctttacattatgcattgcacttactggatgattaaaagccttcaaagttttagaataagctttactagttagttataccatctaatgtgatttatttttaaattatctttcattgaaaagatatttagaaatcaaagagaagaaatagtaagaa

SEQ ID NO: 424197 - DNA, 554 bp, Homo sapiens
acttttcctttttatgttgaacattagcctataatcattttgaactaaaaaagtctaaatatactgaatatcctatgatcatctccttcaagtctttactcttgtttgttttcccaagaacaaccatcatcttctagcagattatataatttagatatttcttatgaatagggcttattgcctatcatcatgccaagatgggcctctacctcataagagcagaaaccatttttttcactgaaaaacttagaatagtgtttggtttacagaaaacactcaaaaaacaacytaaaccaccttgaatattgtaagtccaaacctctaattctattctcatgggaagataaaatgtaaggataaaaacagagaaagaggaatacatttgtgcatactgattaatctttacattatgcattgcacttactggatgattaaaagccttcaaagttttagaataagctttactagttagttataccatctaatgtgatttatttttaaattatctttcattgaaaagatatttagaaatcaaagagaagaaatagtaagaa

SEQ ID NO: 424198 - DNA, 559 bp, Homo sapiens
aaatatatatgcttagccaacttgttcaacataaaactcctaccccaacttatcttcactcaaaatgcctactaatggctttggccagaggcatgcttcccagtctgcaagatagccaccttacagtctataaccctttacaaaaaaataaagtatccttcctaaatttgtaggtcctgtgattttttaacttgacacactgagtcctgtttytggctggaggtgcacttcctagcctgccagcatggccacctttataagaaatagtctcttcttttcaaatatttttttttgtaagttaccatatcttgtgatgaggatttttcacttaaatgtgtaaaataatatatggaaagtgcttagcatactgcctgatatgtagcaggtacttaaaaactagcacctgtcatattattactgatacattcacctacttcctgttttcttcaggcctctttcctaaggaatgctgaggtgttcaccagttactgaagaagaggaagtcactaaagggacttaaagtcactattacacattgtgacacttcctattatttatt

SEQ ID NO: 424199 - DNA, 591 bp, Homo sapiens
gatgttagtcaaaggaaacaaaattttacttaggagaaataagttcaagagatctatttataaaacatggtgactatgttttatagcaaggtgctattttcttgaaaatttcaacaacaaaattaaaaaaaattgagtgagccatacacctgctttacttagaaaaaacatgtcaattttttatatayactgtatactgaagattttgttaagagggtagatttcatgttatgtggtcatattttaagtaaatataaagggtactaatgcaattttcttacacggatatgttgcatagtggtgaagtttgggcttttagtgtatccatcacctaaataatgtatgtacactgtaccgattaagtaatgtctcattgtattagtccattctcacacttctataaagaacttcctgagactaagtagtttatgaagaaaggaggtttaattgactcacagttctgcaggatgtacaggaacacagctggaaggcctcaggaaacttaatcatggcagaaggcaaaggagaatcaagcatgtcttaccatggtggagcaggagagaaagagtgaagggggaagttctacacact

SEQ ID NO: 424200 - DNA, 631 bp, Homo sapiens
gggtaatgctcctggttccaaaagggagaaattagcaaaaacaaaggggatataggccccatgcaagactaaatcccagctggacagtcattaaatcttaacactccaaaataatctcctttgactccatgtctcacatccagagcatactgatgcaagtggtgggctaacaaagccatgggcagctccactcccatggctccrcagggtacagcccccatggctgctttcacaggctggtgttgagtgcctgtggcttttccaggttcatggtgcaagctgtcgatggatctaccattctaaggtctggatgacagtggccctcttcttgaagctccactaagaagtgccccagtggggactctgtgtgggggctccaaccccacatttcccctccaaactacccaaatggaggttctccgtgagggctccacccctgcagtagacttctgtctggacatccagatctttccatacatcctctgaaatctaggctgaggctcccaaacctcaactcttgtcttctgcacacctgcaggccaaacaccacatggaagccaccaaggcttggagcttgccccctctgaagcaatggcctgagctgtacccttggccctttttagccatggct

SEQ ID NO: 424201 - DNA, 631 bp, Homo sapiens
gggtaatgctcctggttccaaaagggagaaattagcaaaaacaaaggggatataggccccatgcaagactaaatcccagctggacagtcattaaatcttaacactccaaaataatctcctttgactccatgtctcacatccagagcatactgatgcaagtggtgggctaacaaagccatgggcagctccactcccatggctccgcagggtacagcccccatggctgctttcacaggctggtgttgagtgcctgtggcttttccaggttcatggtgcaagctgtcgatggatctaccattctaaggtctggatgacagtggccctcttcttgaagctccactaagaagtgccccagtggggactctgtgtgggggctccaaccccacatttcccctccaaactacccaaatggaggttctcygtgagggctccacccctgcagtagacttctgtctggacatccagatctttccatacatcctctgaaatctaggctgaggctcccaaacctcaactcttgtcttctgcacacctgcaggccaaacaccacatggaagccaccaaggcttggagcttgccccctctgaagcaatggcctgagctgtacccttggccctttttagccatggct

SEQ ID NO: 424202 - DNA, 511 bp, Homo sapiens
ctgtacccttggccctttttagccatggctggctctggagtggctgggactcagggaaccatgtgccaaggctgcacagagcaactgggccctgagccwggcccacgaaaccatttttccatcctagacctctgggtctgtgatgagaggggcttccattaaggtttctgaaatactttggaggcattttccccattgtcttggctattaacattcagctcttctttactaaagcaaatttctacagccttgaattcctcctcaaaaatgggtttttcttttctacctcatggtcaggatacaagttttccaaacttttatgatctgcttcccttttaaatttaagttctagttcagttaatttgtttatgtaaatgagtcaggcttttagaagcagccaggccaaatcttgaatgtgttgcaccagataccttcaattatccctatcaagttcaaagttccacagatccctagagcaggggcacagtaccaccagtctttttgctaaaga

SEQ ID NO: 424203 - DNA, 511 bp, Homo sapiens
ctgtacccttggccctttttagccatggctggctctggagtggctgggactcagggaaccatgtgccaaggctgcacagagcaactgggccctgagccaggcccacraaaccatttttccatcctagacctctgggtctgtgatgagaggggcttccattaaggtttctgaaatactttggaggcattttccccattgtcttggctattaacattcagctcttctttactaaagcaaatttctacagccttgaattcctcctcaaaaatgggtttttcttttctacctcatggtcaggatacaagttttccaaacttttatgatctgcttcccttttaaatttaagttctagttcagttaatttgtttatgtaaatgagtcaggcttttagaagcagccaggccaaatcttgaatgtgttgcaccagataccttcaattatccctatcaagttcaaagttccacagatccctagagcaggggcacagtaccaccagtctttttgctaaaga

SEQ ID NO: 424204 - DNA, 511 bp, Homo sapiens
ctgtacccttggccctttttagccatggctggctctggagtggctgggactcagggaaccatgtgccaaggctgcacagagcaactgggccctgagccaggcccacgaaaccatttttccatcctagacctctgggtctgtgrtgagaggggcttccattaaggtttctgaaatactttggaggcattttccccattgtcttggctattaacattcagctcttctttactaaagcaaatttctacagccttgaattcctcctcaaaaatgggtttttcttttctacctcatggtcaggatacaagttttccaaacttttatgatctgcttcccttttaaatttaagttctagttcagttaatttgtttatgtaaatgagtcaggcttttagaagcagccaggccaaatcttgaatgtgttgcaccagataccttcaattatccctatcaagttcaaagttccacagatccctagagcaggggcacagtaccaccagtctttttgctaaaga

SEQ ID NO: 424205 - DNA, 575 bp, Homo sapiens
ttttagtctatactgttacagcatattctgagcatgaatgttgatgcttctatggctgagctgttggctattgttccctttttgctattgcaaacttatgtgatgaaaaaaattccagcagtgtaaacattgtccartaaaaaccatgatactccctctgcttctccagctgacttctctacaaccactgccttattcttcaaattctggtattaacaaattgcaactacctgcatactctatgctaattttacatctccttggcttttgtacagcacttgtttgctgaatcactctttcaaccataactcagctggcccactcctatttgtccttcaactataaccccaaagtcctttttctgaacacaattatttttatcttaaactcacttataagttatcatgccttcattatttttctgtgtaattctagtattgtctagttagatacattagataggtcaagtttactacagagctagagattgatataatgatatatggtaggttaggaagagtgacataaattgatatatattgacgtatatcagactgcatattttttctaaattt

SEQ ID NO: 424206 - DNA, 601 bp, Homo sapiens
gttacaagcttggattttggagtcagatagatcaggattccattcgtggctttacaacttactatccaagtgttctcaaaaattactttactttcctctcctgttaagtgaggaaaatatcttcaataagattatctaagattgtattagacaaaataagaaaagcttttagcatgataacaagtagatttttgaatgaatgaatccccagggaagtcctacgaaaggtgggtggtatagagaagcaaggaaactgaggctcagagatgttgagcaagttataaagaaaataagcagcaaagctaggatccaaatcaagttcagtatgtttgcaatgtcaaggaagtttctattatttctgcaagaaacattagtggcattttccactccagagtttctttaaaggacatatgctggggaactccagttatttgtcaactctgtctccctagaaatctctttagattagagttatcatcatcctttggcatttcaaaccctgcacaacatgtttataattggatggtctgawaaatgatcctgcataaaccagccactaacatctttgaacttcctctgtcatttcctatgcagaattcct

SEQ ID NO: 424207 - DNA, 564 bp, Homo sapiens
atagcccaaactgagtaatttatacaggaaggagggttaattcactcacaattacgcatagctggggaggcctcagtaaacttatgatcatggaggaaggggaaacagacatatccttcttcacatggcagcaggagagagaattgcagagtgaaggggggaaaacaccttataaaaccatcagatctcataagaactcactatcacaagaacagcatggggtaatcacctccatgatctaatcaacttgcatgaggtccctcccccaataccggtggattacaattcaagatgagatttggtgtaggacataaagccagaccatcttagatagatagacagayagatagatagatagatagatagatagatagatagatagatagatagatagaatagatagatagacacagagacatacacatgtacatatagcaattcatgatccaggaggaaaatataaagaacatagagtaatccaaatagtccaccaacaaaagatgacccacatgaacattatcttgtatattcctccagtcttttcctaaaaacatgtatcacatt

SEQ ID NO: 424208 - DNA, 567 bp, Homo sapiens
gacaatatgggtttaaaaacaggaggaatggcatctcattaaatcctgttaaatgtcacctcagtcttgccaggctatatgtccaactacccagactcctctctaaactccatagcccaacgtgcaactattgacttccatgttaagcataggacacattaaattttagtaacaaatttcattatcacctatattgattacatacacttagtgcagatgctactgtagggcaatcactaagttcaacggtgactttgtttaagatctactgaattgcgcttctggtacagagcagattcacgtattcaaataactattaaagtttaaaatgtctgatactgaaatttaaaaaggcaaagtrgagttttaataggacacattacttacgttcacaagtgtctcctttttgctggtagcctgctttgcagatacattttccaatgggcactaaccattctccttctgcactgcagtgcatcctgggggcgttttccgcttcttcctctgcactgctgacacatgtccctcgaacctcgactaaagaggaaaattctgaaccagtcactg

SEQ ID NO: 424209 - DNA, 582 bp, Homo sapiens
caaatacacatatctatcatttccaaggtctatgtgatgcatagattttacatatttctctacacccagtagaagccatcttagtctctatgcaaactaagcctagccttaggaagacaacattcaaagatcacgaattaaatattcagaggaccattgtttcatttttgaattaaagtctatgtctgtttttctaaaattggtattcaaatctcttaagaactacagtgtgtattccataggttaactttttgcttccccatccctctaatgggatccttgtccagaacctggccttatgccttaggccttgttagttactgatacattgtcttgatgtggacaactgccatctgcctggatgtgaactgctcgtcaatgcctgacttttcctgccaccttttagacaactactactatgtttttctgaatctgtctgatgtcaaccatttgcagatagtaccagtcttcctgtcaaaatatttattggacaatatacaacctgcctttctaggctacttccatcacytacagatccaagcatttcccttagcaaacctaggtacatcttattgcggccct

SEQ ID NO: 424210 - DNA, 552 bp, Homo sapiens
aacgtcaccatctttttgtaagttaatctcagaagtgatacctatacttttctgcccattgcaaggcagtcactaggtcccgtccacactcaagaggagaatgatacacaaggacttgagtactgggattcaggatcattggggtcatcttaggggctgtcacccatgagtctgaagaaacaggctttagactggtcctccaagaatgatcaccagatccgtgcagaactcttcaacactgacacttctgcacttaaaaccacctgtggagcgggtttcggaatgcatctctggagcagcgattctggaatcaggaagctgaaaacaagaaccyttactccctcagctatcattgctgccactgttctcaccaagcaagaagctgaagaaaagtcagtggaagactgctgccaaaaacacaagacattttcatggtctttcctgccagaatataaagccaaaagaaaggtggtagctgtggcttaactttcaacttccaagtcttagatgatttcaagactttgaacaacaaagtccattaatatttctcaa

SEQ ID NO: 424211 - DNA, 558 bp, Homo sapiens
tggtgattgtgactggcttctttcaccttgcataatgttttcaaggttcatccaagtcgtagcatgtataaatattcaattcattcttttttatggataagtaaaatcgtattgtataccaaatttatttatccattcatatattgatgaacatttgagttgttttcaccttttagctattatgaacagtgctgctatgaacatgcatatatgtatatttatttgagtacctgtttccatttctctttggcatatattgaatggatttggatttgtttggttgcatgatattctgtatttaactttttgaggaattgccaaactattttccatagtgcctgatccrttttactttcccataagcaatgtataagagtttcaattcctccacatctttgccaacatgttgttttctaattgtcatcctagggagtgtgaagtgatagctcattctgagtttgatttgcatttccctaatgactactgatattgactatcttttcatgtgcttcttggccatttgcatatcttctttggagacatgtttattaaagtcct

SEQ ID NO: 424212 - DNA, 567 bp, Homo sapiens
actatgtcttcttctaagaattttctggttttagcttttatagaaatagatcattgatctattttgagccattttgtatgtggtgtaacatagaggtccagatttatttttttgcatatgaatatccagttatcctagcactattcttttgcatgtggatgtcctagactattctttctccagtaaatagtcttggcattcttactgaaaattaattgaccatagatgtatgggttatttttgaactttcaattctattctattagtctagatgtctatcctcmtgagagtgctaccctcttttgattactgtagatttctagtaggttttgaaatcgagaagtattggtcctccaactttgtctttgttttcagtactgttttagtcattcagggcttcaatttggaattgtaattccaaatgaattaaaaataagcttttcaatgtctgcaaaaagaagaaaaaagaaaaaaaaaggccattggaattttgatagagattgcatagaaggtctagatctctttggataatattgcctcttagcaatattatttttccatctatga

SEQ ID NO: 424213 - DNA, 567 bp, Homo sapiens
actatgtcttcttctaagaattttctggttttagcttttatagaaatagatcattgatctattttgagccattttgtatgtggtgtaacatagaggtccagatttatttttttgcatatgaatatccagttatcctagcactattcttttgcatgtggatgtcctagactattctttctccagtaaatagtcttggcattcttactgaaaattaattgaccatagatgtatgggttatttttgaactttcaattctattctattagtctagatgtctatcctcatgagagtgctacmctcttttgattactgtagatttctagtaggttttgaaatcgagaagtattggtcctccaactttgtctttgttttcagtactgttttagtcattcagggcttcaatttggaattgtaattccaaatgaattaaaaataagcttttcaatgtctgcaaaaagaagaaaaaagaaaaaaaaaggccattggaattttgatagagattgcatagaaggtctagatctctttggataatattgcctcttagcaatattatttttccatctatga

SEQ ID NO: 424214 - DNA, 608 bp, Homo sapiens
ttttggacaagtctgaggacttgtgttaatcttgtttaaaatatttggtaggattcaccagtaaagcagtagaccttggcttttctctgttgggaggtttttgattactaatttaatctctatttattatacatgtgttcagatttttttatttctccttaagtcatcagttttggtagtttgtgtgtttcttggaatttttccatttcatctaggttatctaattatttggtttttcatggtattctcttataattgttttttatttctgtaaagttagtaataatttgcagttgtcagttctgattttatttatttgtgtcttcatttttccttagccagtctagctaagatttttccattttgtgtatctttacaagtaattatttttttgttccttgattctctttactgttttcttagctctattttatgtatctctrctctaatctttactatttccttctttctgctaactttgagtttagctgcatattctttttctggtttcttaaagtgtaatattaagatatgatttgaaatctttcttctaattgcctttgtgctgttttctttgactcactggttgcttaagtgtattttatatt

SEQ ID NO: 424215 - DNA, 354 bp, Homo sapiens
ttctttacttaatcaattgattcattacctagttcagaatacatgtcatttgtcttaccctagtctaatgaaacctgctaggctttcctcaaaaatcaaatgagacactctagtcttcatgaccagcctgggagaattcgtgagaccttggactacaggcctcaggacctcagcctttatgtgctcytggaccattccaaacccattttctacagctaacttatgttatttcttccttctctgttctttgctccacctcctccctattgttactgccttctctcctatgcctatattccatgggaaatttttgggtaacctatgctgtctaactgacccacttagaacttccct

SEQ ID NO: 424216 - DNA, 560 bp, Homo sapiens
atttattttactctgtagatgtacctttaaacatgtcctattctattcacgattaaatgttagtattaatcgccatctaacagagtatgttatttatgaactttaggaactcaggcaaaatacttaatttctttgtgtttttgttttctcttatatgaattgggaataaatttatacctcaaaatttattttctaaagttggggatatcttgatcaaaaaatggcattgaaaaatatacagtatttaaaatagtgcttggcacataacaactactcacttaatattagctattgctattacaggttgagtatcctttatcctaaatgcttgggaccagaagggttttggattttgaatttttgtcagatttgggaacatttgtatacaaaataaaatattttggggatgggacccaagtctaaacacaaaatacatttattcttcatataaaccttataaacatagcctraaggtaattttatacattttaaataattttgtgtacctgttacatgaggtagggtgtgaaaatttttatttgtggcatcctgttgctgtt

SEQ ID NO: 424217 - DNA, 595 bp, Homo sapiens
aaagttcttccaaatatattgttagccaaattgcatatatattttatttttatataagaatttaaagttttgtacctgcttactttagcctaattttagcaaataagaattttaatatatcctctatcccccaaattataaaattttaatagttcattcaattgcatgagataatttaggtgactctttcaagacctcacaatttcagactattttctcaacaaatgtaagagagttgacttactttccccagggagtgtagaatacagtgtctatattacttttttgtggcattcttggaaactccaagaacctcctaaaaaaactgtctgtgttaagattggttcctaggcacacacaggtttcaatgggatttgaaaagatgcaaaagtctgcttgtctccaaaatayatccatctttactcctgccaatgtactagaaattcgcccatcaatcactgttctatattgggattaaatatgactaagatgcatatgtactctggcttaggtacagtcaacatttattcagcctttatagtgagacaggaactgtatagtaagcatgtccacatgaacgtaaatgcttcactat

SEQ ID NO: 424218 - DNA, 644 bp, Homo sapiens
gtctatattacttttttgtggcattcttggaaactccaagaacctcctaaaaaaactgtctgtgttaagattggttcctaggcacacacaggtttcaatgggatttgaaaagatgcaaaagtctgcttgtctccaaaatatatccatctttactcctgccaatgtactagaaattcgcccatcaatcactgttctatattgggattaaatatgactaagatgcatatgtactctggcttaggtacagtcaacatttattcagcctttatagtgagacaggaactktatagtaagcatgtccacatgaacgtaaatgcttcactatatatagggacttcactatcttagcctcaatcaagtgagtcaattgggcattcagctatgtggaggagttgcttctcattttcttaagagataaatgcccagttaattaatcataagatgttcctggaaacattttactgtctgattgggtggcaacagtaggtcttaaaaaaccttccctgggagcctaagcgaattacttgattccatccttttatgagcacacgtcacattggttcctaaagaatgtgagtgtcttggctctttttgactagggttatgcttctttcctgttttagttcaattcatttcacatgaac

SEQ ID NO: 424219 - DNA, 646 bp, Homo sapiens
aacaataaatcacgagagcatttcaggcagaaggaaccacatgggtagtacacagcagtgaaagagcatgscctcatgaaagaaaaataaaaccaaaggccatcaaaagtagattaaagaagcatatgattaggttaggagaacaattggcgtgttatcaaggaaaaggtgagagaagacggtgacttggactacaggaatggcagtccagatgtatggtgaagtggttagagacagcctgacggatcagcgaggctgcgggttagaaaagggaataactccccgtggagcccaaaatgacagtgtccagccatcagctggataagagtttcaatcagaaaagagagtttgaggtacagatttgacaatgataccggcaagtatagattgtaactgaagtcatgggagtggatgtgatagcccagaaagaagactagaaggaactcaacagcaaatctatctagcagagcccatttgttctgtttagccacagattacttttttcttctttctttttcttgtttcttttattatttattgaatttaaatatacttaagcaatatatgcactttctaccgggctacaaagtacatcatgacctacactatttcactgtcctatttcacacatttatgatatttgctt

SEQ ID NO: 424220 - DNA, 545 bp, Homo sapiens
acatagaacagcaaaacagcattgggggtaagtgggagtcagtatccattcagattttctagacgaaataaatttaagatgcgatcttatacaggaaatcaagagaaggaacaataaatcacgagagcatttcaggcagaaggaaccacatgggtagtacacagcagtgaaagagcatggcctcatgaaagaaaaataaaaccaaaggccatcaaaagtagattaaagaagcatatgattaggttaggagaacaattggcgtgttaycaaggaaaaggtgagagaagacggtgacttggactacaggaatggcagtccagatgtatggtgaagtggttagagacagcctgacggatcagcgaggctgcgggttagaaaagggaataactccccgtggagcccaaaatgacagtgtccagccatcagctggataagagtttcaatcagaaaagagagtttgaggtacagatttgacaatgataccggcaagtatagattgtaactgaagtcatgggagtggatgtgatagcccagaaagaagacta

SEQ ID NO: 424221 - DNA, 646 bp, Homo sapiens
aacaataaatcacgagagcatttcaggcagaaggaaccacatgggtagtacacagcagtgaaagagcatggcctcatgaaagaaaaataaaaccaaaggccatcaaaagtagattaaagaagcatatgattaggttaggagaacaattggcgtgttatcaaggaaaaggtgagagaagacggtgacttggactacaggaatggcagtccagatgtatggtgaagtggttagagacagcctgacggatcagcgaggctgcgggttagaaaagggaataactccccgtggagcccaaaatgacagtgtccagccatcagctggataagagtttcaatcagaaaagagagtttgaggtacagatttgacaatgataccggcaagtatagattgtaactgaagtcatgggartggatgtgatagcccagaaagaagactagaaggaactcaacagcaaatctatctagcagagcccatttgttctgtttagccacagattacttttttcttctttctttttcttgtttcttttattatttattgaatttaaatatacttaagcaatatatgcactttctaccgggctacaaagtacatcatgacctacactatttcactgtcctatttcacacatttatgatatttgctt

SEQ ID NO: 424222 - DNA, 559 bp, Homo sapiens
aacagaaaagtatgagatcagagctctcacaatcatagttgatattttaataaattatatgtaataaagcatagttcaatcagctagtaagccagtgttatttttcagacacttgcgtagttgctacaacctagacacagcaaagasgtgaggtcatagaagtgggtaaatcatgaccttgcccttaagtagctcacactatcctgggagtgacaacctcaaatccaatatttggtttatgtgaaaaggtagaagtgtgcacagagagttacaggtgctcaaaccgcccgatttgcaggtctcactaaccttttgccaaaacagagatctcaaaatacaggaacaaaaagaagttagaaactctaagagtgtttaaaatagcactgagcggcaaatgacatcaactttaaagtaaacagatgtatggaaagttgatcccagccctccttatatcacataccttgtactcagtttttacccagttactgcctctgagaggcattgcaaaccagttctaagaatctgcaactccctctgtaccaaatatacttaatgcaat

SEQ ID NO: 424223 - DNA, 604 bp, Homo sapiens
tacacagagttttctggaagaaaaacaaaaagttattaacagtggttttccttggaggagatatcatagacaggggatagaagggaaaagtagaaaatcttatagcttttgttttatattttcttgtgctattcctcttttctaagtactttatacttatctacattaacaagttctactatagtgtatattaatcataagagaataattactattaaggtgtatggtgatttgcaaatctcacaaaacttttatrtatattatatacacacatttgtttatgcacaataattaattataatgtttatagtctacactgaatttactgttttgtacacatacatgtataatttagcttatgcccacatgggtaatgagaaagagaaaaacagacaaaaagagaaatcaaacattacaagtattttaccatgttgtttccagttttcagtttttcttactttttaaacattactcttttccccattagaaatgaaaataaatacagtcaacaaagacaggagaaattacatcattatatataaagttcagtatgtatacttggtagatttcctttataaaataggatttaaaagaaggtagatcc

SEQ ID NO: 424224 - DNA, 532 bp, Homo sapiens
aattacatcattatatataaagttcagtatgtatacttggtagatttcctttataaaatrggatttaaaagaaggtagatccacaaaatagagtgttgtctggaagtagaggatgaaggatagtatggagctggaagggtaaaattttattccaggtttatagaaacagtgagtaacagaaaaagagctattttctacattatgtaagagacacgactgagggtgtttagaaggaaaattttgtaataaattaggaaggttcaagattcaatcatggatgtgactggagaatacttcatgtatagagaagatactcaactaaaatttaaaaaattgagggtcaatatttttaattgttaatcaaatatagatgtattaattgtttatcaaagaccttaaactgtggtaggtattcaagagagatccaacttctataggatgtgcttctacacttagtcatttataacctgggaagaaaaatgacattgaagaagctgctgtgataaagagtgatatacactcaaaatttgat

SEQ ID NO: 424225 - DNA, 566 bp, Homo sapiens
ccatgatttaatcacgccccaccaggcctctcctccagcatgtggggattacaattcgacctgagatttgggtgggaacacagagccaaataatatcaaagctcatttaatttgaaatcattcttgagagatggattcattctttgtataataaaaaaaaaatcagatttctgatactgtaagatgagagtggaggaaggagagaaagctaaccagtgatkaattcatcaaaataaggatgtcatccagtggaaaggtctctgagcttccagcccaccatctccattgacaacaatttgccactgtatattgtctactcacccagctctggagcatctgtataattaaactcaagaaacataacacatgcacatacatgtttattgctacacaattcacaattgcaaagatgtggaaccaacctaagtgcccatcgaccgatgagtggatcaaaaaaaatgtactatatatacactatggaatactactcaaccataaaaaggagtgaaatcatgacttttgtagcaacttggatggaactggaggccattattctaagtgaagta

SEQ ID NO: 424226 - DNA, 566 bp, Homo sapiens
ccatgatttaatcacgccccaccaggcctctcctccagcatgtggggattacaattcgacctgagatttgggtgggaacacagagccaaataatatcaaagctcatttaatttgaaatcattcttgagagatggattcattctttgtataataaaaaaaaaatcagatttctgatactgtaagatgagagtggaggaaggagagaaagctaaccagtgatgaattcatcaaaataaggatgtcatccagtggaaaggtctctgagcttccagcccaccatctccattgacaacaatttgccactgtatattgtctactcacccagctctggagcatctgtataattaaactcaagaaacataacacatgcacatayatgtttattgctacacaattcacaattgcaaagatgtggaaccaacctaagtgcccatcgaccgatgagtggatcaaaaaaaatgtactatatatacactatggaatactactcaaccataaaaaggagtgaaatcatgacttttgtagcaacttggatggaactggaggccattattctaagtgaagta

SEQ ID NO: 424227 - DNA, 542 bp, Homo sapiens
ttagtcttttaactttctccagtttcagttctgcctgtcactgcttgaggtgtgtattggtctactagggctgtatcgtattamaatgctggggggacctaaacaacagaagtttattttctcacagttctggaggctgaagtccaagatcaaactgctggcagggttggtttctggtgcagcctctctcctcggcttgtagacaccaccttctctctgtgtcctcccatggcctctcttctgtgtgtgctcactcctggtatctcttcctattcttacaaggacaccagtcttttggattaggatccaccctatgacctcattcaagggggcctttattacctccttcaagacactatccctaaatacagtcatatctgaggttagagcctcaacatatgaactttggggtcacacaattccgtgcatgacaaggtgtatatggaaactctgtaagtgtattaatttaaacacatctttttcacttcactcacttttctgttaattttgtatatgcctcttagctcctctttcatcttttt

SEQ ID NO: 424228 - DNA, 586 bp, Homo sapiens
agggatcctcctgcctcaacctcccaaagtggtagaattacaagtgtgaaccactgcccctggcctttattttttaattataaatttctaggaaaaatttatgctagggaaaataaatgtttgttacaagtactttttctactttttttaagttttcttagctgactttcgccgtatacattctaaaattggggattggaaaaaatttttcttccataatttctttactctttcaaccaaatcacctacaagtaccwtacaaattttcttttaaaatttttatcatttcattttgtatcagtgattagtctaactaggacttattttctgtgtaatgtaagctgagagtgtatctctgattttgttgaagaattgctggttacattaacatcatatacttaataagccattcttttgcaactgaattgcaataccaaccttgtcatattttaatttctcacatatatttatatctactgttggtccctatattctgttccatttatatacttgttcttttctgtgtgaatatcatatattcattagaatataatccaaaataaagtaagttcccccacccaatggc

SEQ ID NO: 424229 - DNA, 520 bp, Homo sapiens
tttggatttaaaaatcataattacctrttctttgaaagtttggagtaacttatctataaaattgtccttgccatgtgttgttttcatcttattcatatgagtatgggtttgtgtaaatgtaaagattgttactaataatttagcttctttaatgatataagatgattcacctttctatttattctgaattcagtttggatagtaatttttctacaaatatgttcactcatcctaagttttcagatttcagtaaaccaagttattatgatattctatgttatctttttaatatgcactgtagctaaattgtgcccccttaatcatttcttaacaaagtatttctgactgttttcttgttattctgatcaattttgtcaaaagtttgttgaactgatttttctttaaaagattcttgtacctttttgatcctctcaattatgacttcattatcattatttgttttgcattcttctatccttaagaagtcttcctaaaataagaatttaagactaaaaatttt

SEQ ID NO: 424230 - DNA, 562 bp, Homo sapiens
agcaaaaggctaatccgaggaagatcccatgatatctcatacaatgtggtcaagaaaggaggggctgccatgctggtttcatttgaatgaaggtaatttatgtgaagaataacaggagatgggaggttgtaaagaaaatagaactacaggaagaaattaatgatgaaggaaagagacaattgcaggggcaaatctttgtgttctctagaaggatgactatgctcttgaagagatgggcaatcactcattgtgacaagaaggatatcaggtagcacgagtttggcagatttgatggagaaagaatgtggaaagcctcttctggttgtctctattttctcagtaagctatcagctgagaataaggaagtggatattgaagagttgaggaaagaggaggacgtgttgcatagttactgagaaagttgactatawaacaattatccatatgtccctaaaaacatagttaaaatagataaaactttaatgggagtttgacacctccaaaatcattatcaggatgtattggcacacggctctcagaaactcctggaccaagcagacaa

SEQ ID NO: 424231 - DNA, 571 bp, Homo sapiens
tacataattgactttgaactcttcctgcttcaagtgctcaaatgtagtcttgcagcctctataccgttcttcactactcagctctgccttcttttgtgattaccttattcttaggcagacgtactccatgtagtagaaaaaaaaatggtcaagagaagctctaggcttctgatacctacagagaaaaaaaaaaatgaccctttctcactccacatctacacatgtagtgataaccttggctgaacttgtttgaatgacaacaatcacctggggcagcctggaaaaggaggtgaagaaataggattgaatgcacccaagtcacaaacctacctatggacaggatgtttagtgcattgtgaaacctcattaacaagtcatcttctacactgtccttggtgaaaattttactttccaccctatcaattattatatctgtattrtaagtattccttgttttatcctaggccattggatttttttagaagaaaaaaatgaacatgtgtagttagggaagaacaaattactatagtgaaagtaatatgaaaaactaagaagttaggatacataaaca

SEQ ID NO: 424232 - DNA, 547 bp, Homo sapiens
catgtagaacaagaaaaaaatctcaccctgactcccccaacccctaccacaattctagacaattgttcatctctacaayccaatcagttatcccagagcctgattcgaacactcaagtctgcaatcaagccagaatttcctttcccattctaccactacttattgccaccaataccttgtctaaaacattggatttttagaaatgcaaaacgtttttaaaaactggaaagtaggctttcccacaaatgcattatctataacaacatcgttagcaattttaaatttaaaaaactgttatcacagaattcatacaaactcactggggaaaaattataaaatataaataggtaaattttttataatcccactattctttaatgcagagataactattgttatcattttaagtagataaactaatatatattttctaattataaaacatgtattttcttttagaaaaatgggataaagcctatttaataacctagtttcttgcctggtagtatttcaggaggatacttacatgtcaaaaaatttaatggct

SEQ ID NO: 424233 - DNA, 547 bp, Homo sapiens
catgtagaacaagaaaaaaatctcaccctgactcccccaacccctaccacaattctagacaattgttcatctctacaacccaatcagttatcccagagcctgattcgaacactcaagtctgcaatcaagccagaatttcctttcccattctaccactacttattgccaccaataccttgtctaaaacattggatttttagaaatgcaaaacgtttttaaaaactggaaagtaggctttcccacaaatgcattatctataacaacatcgttagcaattttaaatttaaaaaactgttatcacagaattcatacaaactcactggggaaaaattataaaatataaataggtaaattttttataatcccactattctttaatgcagagatawctattgttatcattttaagtagataaactaatatatattttctaattataaaacatgtattttcttttagaaaaatgggataaagcctatttaataacctagtttcttgcctggtagtatttcaggaggatacttacatgtcaaaaaatttaatggct

SEQ ID NO: 424234 - DNA, 583 bp, Homo sapiens
aatattctaagactaggaagggagcaactcagagggaggcattccctcttatagcaaagattcatgccccacttccctgttgcacttgataggggaatggctgtggcatgtcatgtcttagcccagttttctataaagcagaggctaaggcaaagattaaggtggtaagactttatttaggagatgcaaataaaggtaaggaaaacagggagaggaggctgggaaagatgtgaaaccacatgatgccgtaagttactagctggataccatttcataaatcatgaagagagattgcaggttgctctgcaagtttggtcatttggcattayggtcttttccagcatggtctgcaaagaaggagttgtaccttatagccatccagaagaaccaaagaatgaaaacaaaagcaaaaaacaggtcctttttcctggctcctcctatctcctacttgccattggtcaaggttcactccataaggagctaacactcctgcacttctgtatttcaccaccatccagcctgttggtggcactcaggcaatcaaatctcacaccctgccagatggtataccattcaaacctga

SEQ ID NO: 424235 - DNA, 613 bp, Homo sapiens
gatgcaactcaaagcaatttaaaagcaaagagaggagattttgatggattcttataaccatatgatagactccttttacctcggacaatctcatttacaaaatcctagatggagaatttagattatttgggtgactaaggtgaggaataaatttatttgtgatctgttttaagtgcttatcactgcagagtttctgtgaaagtacattgatagaattcagatgacctcgcttaaaatttcatgaaagtcagtttctgtaagaccctgctcactgttttggcttgaaaagtcatttaamctctttgaattgcaatttttttgcctagaaaatataaatagtaatattaagtaactgatgaagtcgctttatgcaaatataatgtattagaaataataagttatgctatggagcagcactgtccaatagaacttccttcaacgacagaaataatcaatactttatgctattcaatacggtggccactaaccacatgtggctactgagcatttgaaatttggctagtaaaactgaagaactaaatttttaatgtcataaattctaactaatttaaatttaaatagttacctgtagctagtggctaccatattggac

SEQ ID NO: 424236 - DNA, 598 bp, Homo sapiens
ctgtccattttgtttttggacatttctacatgtagagacaagatctatgtttctgttattcttatgacagccttccaggacctgggaatgactrtcaaatctctcatgaggtatctcttctccaaattggatattcccatttcctttgtttttcaatataatctggtttccattctgtccactaatcttagaatacacaccattttaagatatcccaagtgtgcacagcagattggacccttatcctttgacttaaatcccaaacctagattttactacccagagctatatttctctatcgtttaaaatcatattaacctgtttggcagctacattcacattgttgtccttcatgaacttatcagcaacaatcagaaagtccatttttgcttatgacaatcaaacttaactttagcctgatgccaatcctaagatcattgttcatcatcataaattatacatggacagactctgaatacagaacttgtgctacagataagtcatgacattcaaaggacaattctactatgtacttttaattaattaccttttgggggttaaataatgtatatcacttcagaatgatgagttaaatttg

SEQ ID NO: 424237 - DNA, 359 bp, Homo sapiens
tctgagactctgccctgctcttaaactgcctctgtgacggggcttccagagatctcatcactatgctgtactcaaccatccagcaccagcttacctcatccaagaatgtctggcctggatgtgcctgtgctggtkgtacccctgagagctgctccttccctatctggatgtctccttcacctaggtgtgggtaatagtgctctctctctgcctaatctttgattcactaaagaattctgaacaaggaagattgaaggagttcagttgttgtttttgctattgttgctgatgttggttttttgttttgttttatctgtcaggaatggttgcaagtgtatctctaacccagttttagttct

SEQ ID NO: 424238 - DNA, 621 bp, Homo sapiens
tatgattacaactctcagcaaaatcagcatgcaagggacataccttaatgtaataaaagccatctgtgacaaacccacagccaacataatactgaatggagaaaagttgaaagcattccctctgagatctggaataagacaagaatacccactctcactactcctcttcaacatagtactggaagtcctagccagggcaatcagacaagagaaataaataaagggcatccaaatcggtaaagaggaattcaaactgtcactgtttgctgacaatatgatcgtttaccttgaaaaccctaaggactcctccagaaatctcctagaacygataaaagaatttagcagagtttccagatacaagatttatgtacacaaatcagtagttgttctataccacaacagcgaccaagcagagaatcaaatcaagaacttaaccccatttacaatagctgcaaaaaaataaaatacttacgaatatacctaaccaaggaatcgaaagacctctacgaggaaaactacaaaacactgctgaaacaaatcatagatgacacgaacaaatggaaacacatcccatgctcacagacgggtagaatcaatattgtgaaaatgaccatatagcca

SEQ ID NO: 424239 - DNA, 621 bp, Homo sapiens
tatgattacaactctcagcaaaatcagcatgcaagggacataccttaatgtaataaaagccatctgtgacaaacccacagccaacataatactgaatggagaaaagttgaaagcattccctctgagatctggaataagacaagaatacccactctcactactcctcttcaacatagtactggaagtcctagccagggcaatcagacaagagaaataaataaagggcatccaaatcggtaaagaggaattcaaactgtcactgtttgctgacaatatgatcgtttaccttgaaaaccctaaggactcctccagaaatctcctagaactgataaaagaatttagcagagtttccagatacaagatttatgtacacaaatcagtagttgttctataccacaacagcgaccaagcagagaatcaaatcaagaacttaaccccatttacaatagctgcaaaaaaataaaatacttacgaatatacctaaccaaggaatcgaaagacctctacgaggaaaactacaaaacactgctgaaacaaatcatagatgacaygaacaaatggaaacacatcccatgctcacagacgggtagaatcaatattgtgaaaatgaccatatagcca

SEQ ID NO: 424240 - DNA, 583 bp, Homo sapiens
aattatctgggacattacataacaataagtgtcaatccacccagaagatacaacaatcttaaaatatatagaactgattgtagataatgcaccaaataacagagctgcaaaatatgtgaaacaaaaactaatacaactgaaaaaccaaatagaaaaatccacaatttatagttggaaacttcagcacacttctctyaataactaacagaatgattagacagataagtggtttatggtagaaaaaatttaccaaaaatgatgattatgaggatcacagagataagaaacattgaggaggagcaggtatttgtagaagagggggaaagagggtgagctgggttttgggcaagttgagatattcaagaactgtcaaggtacagctggatgtctgagatggtgagaaggatagaaatagacatttgaagtcacctacgtatatgtggtaatcaaagcaatgagctcagctgagtttgtcaataacatttcatgtctgtgtagaaacaggttagcctacaaaggtcaaatatcttagagaaaacacaagtatgtgtatgtttggaaaattaaggacatattaatgcta

SEQ ID NO: 424241 - DNA, 563 bp, Homo sapiens
aagctggcagttaattcattacactgcattttcaagcatttcaaacatttcttcctaaactatattatttcctgcaaacatctacagctctagtatttgttttttaaaattatatatatgcacatatacaaatacatatatacatacatatgtgtatatacactcatctttttcctttatagacttcttgattagtaccttaaatcccaagtaacatcrtcagtcttcagaggagcatcctgtcacataacacatggtttctctgttttcacagcctcacccatgatcctggaaggaatgtcaagaatcatttctgtaactagagagatatcccaaggacgaggcttatctccttaaggaagaaatctgacttgctttcagagccttacatataaccactgtttagctatgtgaaaagaatttatatgtttgacctaattgataaagaacccctggaatgctcctaaatctctgagcaactatattccagagtgcaggaatcacttgggaattcatttgaattgtctgatcttaactgctgaagtctatccactgagaaaccc

SEQ ID NO: 424242 - DNA, 588 bp, Homo sapiens
tttttggcctttgatgtgcttgcttgctggcatcctgcatccatggttaacttgctagtgggaaatacatcattaccattctatgtcttccattttgcaaattaaacattctctcttttcactgttcttcagaaatcacagtttccggccgggcatggtggctcaygcctgtaatcccagcactctgagaagctgaggagggtgtatcacgaggtcaagagtttgagacccgtttgcaatcttgactattccatgtttgcatgctgtgtccatgcaaagaggacacctcttcctaatttgcagaaagatgccataaagcagaaaggtgtatgcttgaaaaaaaatgcaagttaaggtttttaactaggaactcagtgaattaatgctactgtgtggttgccaagagttggagagggcattcccaagcaccacgtctgagtaagggtgcttacaaaacaaagatgatttgtttttgtagttgctgtagtgtagggctagatggcttttaaggtcccttctcatttgtgctcctatgattctgagaaaaagcaattttccttaacaccagtcaagattgcaaacaccagt

SEQ ID NO: 424243 - DNA, 588 bp, Homo sapiens
tttttggcctttgatgtgcttgcttgctggcatcctgcatccatggttaacttgctagtgggaaatacatcattaccattctatgtcttccattttgcaaattaaacattctctcttttcactgttcttcagaaatcacagtttccggccgggcatggtggctcacgcctgtaatcccagcactctgagaagctgaggagggtgtatcacgaggtcaagagtttgagacccgtttgcaatcttgactattccatgtttgcatgctgtgtccatgcaaagaggacacctcttcctaatttgcagaaagatgccataaagcagaaaggtgtatgcttgaaaaaaaatgcaagttaaggtttttaactaggaactcagtgaattaatgctactgtgtggttgccaagagttggagagggcattcccaagcaccaygtctgagtaagggtgcttacaaaacaaagatgatttgtttttgtagttgctgtagtgtagggctagatggcttttaaggtcccttctcatttgtgctcctatgattctgagaaaaagcaattttccttaacaccagtcaagattgcaaacaccagt

SEQ ID NO: 424244 - DNA, 265 bp, Homo sapiens
aataagattatgtgaaagccctttgtaccctccaaratgttactgaaaaaaaaagagtttttatagaactgctcacccacatgttttgtcagtttcactcataagcataagaccctgttttttgaagaaaggacatagttgtaatgttggcaagaagtcaaaccaaaagaaattaaagtcagatattaacaatgagaagcatcattacataaatttaagttcccagaaaagtcttatatccatttcagattttcaactagtatgc

SEQ ID NO: 424245 - DNA, 583 bp, Homo sapiens
ttcactcaataaaagtctcattctaaagtgcattgtgcagaacataagcagaacattatattttattctgatattaaatgttaacagaatacttgaactggtgtctgaagtatagtgatagggaggcaaagtgtattaaaattgtcccattcattaggacatcccacagagccaactgggacaccaattctgtggcatacaacagacataagtagctacgatcattttgaggagtcagggacattcttatgcttgctttgtttttggcactgtggaatattaagtggccacctaacctcttttkcaggtgaaagacctttgtaggaggaattcaaatgagacagtatcaacttgatgctgctcctgcttagtgtacagtgatcagaagcgtgtgggcaaagactagttctaatggtaaaacacatgagtgcatcaggctagagatgctctttacctccttcaatttaaatcccgatgctatcacatttacactctctgcaattacaaatatcccaatcccaccggagaaacagaaagccagggagtcggggggaactagttaagagatgagacagcaagttgc

SEQ ID NO: 424246 - DNA, 599 bp, Homo sapiens
ccatgctgaattccttatatagtcggtcctccatatctgtgagttctacgtccatggattcaactaaccactgatcatcaaaaatagtaggaaaaaagtacyatacagatggttgcatatgtattgaacatgcacagactttttcttgtcattattccctaaaaaatacaatataacaattgtttgtataggatttaaattgtatctggtattataagcaatctagagatgttttaaagtatgtgggagggtgtgtgtaggtcataacaaatgctacaccattttatataaaggacttgagcttcagtggattttcgtatcttcaaagggtcttagaataaatcccccattgctactgagggacgattatattcatttttgcactttatcctcccaatattcctttctctttattttacggatgaggaaacaaggataggaagattaagtactttgcccagatacaatcagccaaggaacatcaaagcatgtactcagtacagatatagtaggactcaaagtcttatacttttaagcactaccacaattctgcttcctgatgaaaactaaaattagctcatagcttgaatgaaaaatat

SEQ ID NO: 424247 - DNA, 599 bp, Homo sapiens
ccatgctgaattccttatatagtcggtcctccatatctgtgagttctacgtccatggattcaactaaccactgatcatcaaaaatagtaggaaaaaagtactatacagatggttgcatatgtattgaacatgcacagactttttcttgtcattattccctaaaaaatacaatataacaattgtttgtataggatttaaattgtatctggtattataagcaatctagagatgttttaaagtatgtgggagggtgtgtgtaggtcataacaaatgcwacaccattttatataaaggacttgagcttcagtggattttcgtatcttcaaagggtcttagaataaatcccccattgctactgagggacgattatattcatttttgcactttatcctcccaatattcctttctctttattttacggatgaggaaacaaggataggaagattaagtactttgcccagatacaatcagccaaggaacatcaaagcatgtactcagtacagatatagtaggactcaaagtcttatacttttaagcactaccacaattctgcttcctgatgaaaactaaaattagctcatagcttgaatgaaaaatat

SEQ ID NO: 424248 - DNA, 599 bp, Homo sapiens
ccatgctgaattccttatatagtcggtcctccatatctgtgagttctacgtccatggattcaactaaccactgatcatcaaaaatagtaggaaaaaagtactatacagatggttgcatatgtattgaacatgcacagactttttcttgtcattattccctaaaaaatacaatataacaattgtttgtataggatttaaattgtatctggtattataagcaatctagagatgttttaaagtatgtgggagggtgtgtgtaggtcataacaaatgctacaccattttatataaaggacttgagcttcagtggattttcgtatcttcaaagggtcttagaataaatcccccattgctactgagggacgattatattcatttttgcactttatcctcccaatattcctttctctttattttacggatgaggaaacaaggataggaagattaagtactttgcccagatacaatcagccaasgaacatcaaagcatgtactcagtacagatatagtaggactcaaagtcttatacttttaagcactaccacaattctgcttcctgatgaaaactaaaattagctcatagcttgaatgaaaaatat

SEQ ID NO: 424249 - DNA, 614 bp, Homo sapiens
tattatattaaaaacccataattataaaaatggtgacaagaaatggattaaaccttgaagggtcctggttgggtgaacatgaaggagccctttagagtgctatttacataggtatacacatgtttagaaattaaatgagctatgcaattaagattttgtgtgctgtattgtatacactgcatgtctctmtttatttatttatttatttatttatttatttatttattttgagatggagtttcactcatgtcgcccaggctggagtgcaatggcgtgatctcagctctctacaacctctgccttccgggttcaagcaattctcctgccttagcctccagattagctgggattacaggcacatgccaccatgcccagctaatttttgttttttaatagagatggggtttcgccatgttggccaggctggttctgaactcttgacctcaggtgatccccccttttcggcctcacaaagtgctgagattacaggtgtgagccactgtgcctggtaacctcaacttgaaacaggaagaaaagaagggaggaagggaggaagggatggagggaaggagggaaaggaggaagagaaggagagagggcaggaatgagggaag

SEQ ID NO: 424250 - DNA, 635 bp, Homo sapiens
gaattaactgctgttttgtctttccttggagtagagttgttctgagttgctgtaacagctcgagttggtttcaagacagtgtaagctgtggtagtatggggggatacaagtttgccctaaggtcacctggataagtattcaggtttttcaggtgatgggtagggctatagagctcccaagagtttatgtcttttgtctttggctaccaggttgggtagagaaagaccatcatgtgtgggcaggattaggcatatctgaactctgactctccttggtgggggcttactgcagccacygtgcaagatgggggtgtggttctcaggccaatggagttatgttccaagggggctatggctgcctcggctgcttcatagaggtcaccagggaagtggtggaaagccagaagtgacaggcttcactaagctcctagtcagccagcaaggccaatctcacccctgctgtgctccctcaatggccaatagagctgaatttatatccaagcctctgttgtgcaagtctgagatcttggtccaggctacaaccctccccaaggagagactaaggagggctttcaggcctttccccacttcccacctactgcagcttctgtactcatatccgtacttcccattcag

SEQ ID NO: 424251 - DNA, 569 bp, Homo sapiens
ctgccatgtctccaagtaactcctagaatctgtttactttatgaacatgtgaagtggaagctctcaataaaccaaatcagctatgtggaaaaaatcaccatggaacaaccttctacacaatcctctttctgtggcaaaatgtattttgtggggaaggaccagacccagaagcatccacagcccattctcttctctacttagtggtgtagaatgttgttaaaagcttgatatttctgttttaatggaaatgggctaaatttctataccaatgtgtattgggaaatttttatattttattattttattttatatcatattttattttatttgaagcaggatctcactctatcatccaarctggagtgcagtggttagatcagaactcattgtagccttgaatttctgggctcaagggatctcctatttcagcttcccaaggagctgagaccatggtgtgcactactatacacagctaattttttaaatttttttgtagagacagagtcttgctatgttgcccagctagtgtcgaatttctggcttcaagcaatcctcctgtcttggcctcc

SEQ ID NO: 424252 - DNA, 506 bp, Homo sapiens
gctaaaattgattttttttcttgaacatttaaacatacacatatataaagggtatgtttgggtagcgattgcttccaaatgacattcttttggagaaggatgggaggttgtatcttttgaagaattttatgagccttaattttttggagagtcttaaggcttctatatgattctaaagagttagagaaacctgtggtaatccaaagagtgaaactaaagactggtgtttatcacagctttactaactaatgttccttgaaataagctatatcaatttacagatattattaaaaatgcacagaaaataaatgaatactaatacccaagcatgtgaattaaataactcaaattkcaaccttggcaataccacaatcttatggtaacattttaaggtttttaaaaatttgatattaatacatagcaaagtatttttaatgtatacaattatatgtaactacagaattcttataattatacaaaatattatattaaatatatacatataa

SEQ ID NO: 424253 - DNA, 571 bp, Homo sapiens
cattatactaagtaaaataaaccacaaagacaaatattgcatgattccacttatatgaggtatctaaagtagccaaacatatagaaaaagaaagtagaatggtggttgccaggagctgggaggaagggaaaatkagagttgtttgatgggtatagagtttaagtttgcaagataaaaacatcctgaagatatattgtgaaatattatgaatgtattcaatgccacaattatcatgttcttttggaggtgtcacgtttccttgcttttctgcttcttgtaatcttttttttttttttgagatggagtttcggtcttgttgaccaggctggagggcaatggtgctattccagctcaccacaacctctgcttcccaggttcaagcgattctcctgccttagtctcccgagtagctgggattacaggcatgcatcaccatgcccagctaattttgtatttttagtacaggcggggtttctccatgttggtcaggctggcctcgaactcccaacctcaggtgatccacctatctcggcctcccaaagtgttgggattacaggcgtgagccactgtg

SEQ ID NO: 424254 - DNA, 571 bp, Homo sapiens
cattatactaagtaaaataaaccacaaagacaaatattgcatgattccacttatatgaggtatctaaagtagccaaacatatagaaaaagaaagtagaatggtggttgccaggagctgggaggaagggaaaattagagttgtttgatgggtatagagtttaagtttgcaagataaaaacatcctgaagatatattgtgaaatattatgaatgtattcaatgccacaattatcatgttcttttggaggtgtcacgtttccttgcttttctgcttcttgtaatcttttttttttttttgagatggagtttcggtcttgttgaccaggctggagggcaatggtgctattccagctcaccacaacctctgcttcccaggttcaagcgattctcctgccttagtctcccgagtagctgggattacaggcatgcatcaccatgcccagctaattttgtatttttagtacagrcggggtttctccatgttggtcaggctggcctcgaactcccaacctcaggtgatccacctatctcggcctcccaaagtgttgggattacaggcgtgagccactgtg

SEQ ID NO: 424255 - DNA, 556 bp, Homo sapiens
gatagtgacaagaccttaaattggcatacctgtgtggcgcatgttctcagtcagctcattaccataattgtgtgtattacctgttctgaatgtctgctccagagattggaaatatattaatgcatttatatatatatatatatatattgaactggaacctaaatataagtgagaagtaaattgtccacctttgaaaatgcattcactttttccgaccacccaataaactattatagactaaataaggattaaataaatcctgttctcagaggcctgacgatgctagaacctgttaaactctttaaggcatctcaacctattcccttcatagcttactttcagactgaggctacaagtgctttctacgacatcggttccyactgtcaaaatgctgaacattccttcttccccctccagtgtgggcccctgtggtggcaccttcatcactgtactagccacgttgtgtcaggatttcctcactacatggtgagccccattcagggcatagactatgaatgtcaagaattcaccacatggtgatggccacacaacaatg

SEQ ID NO: 424256 - DNA, 556 bp, Homo sapiens
gatagtgacaagaccttaaattggcatacctgtgtggcgcatgttctcagtcagctcattaccataattgtgtgtattacctgttctgaatgtctgctccagagattggaaatatattaatgcatttatatatatatatatatatattgaactggaacctaaatataagtgagaagtaaattgtccacctttgaaaatgcattcactttttccgaccacccaataaactattatagactaaataaggattaaataaatcctgttctcagaggcctgacgatgctagaacctgttaaactctttaaggcatctcaacctattcccttcatagcttactttcagactgaggctacaagtgctttctacgacatcggttcccactgtcaaaatgctgaacattccttcttccccctccagtgtgggcccctgtggtggcaccttcatcactgtactwgccacgttgtgtcaggatttcctcactacatggtgagccccattcagggcatagactatgaatgtcaagaattcaccacatggtgatggccacacaacaatg

SEQ ID NO: 424257 - DNA, 603 bp, Homo sapiens
aggcaccatatatacatataaccttatatatgtaagtattatgtcttacatctgtggtgtggttcagaataggaggacagtactatttcaaagggagaacttcctgagtgttggagagttcaaggaggacttcctaggggaagtacgactgtgagaaaaccctataaaatggaaaagatttggagggaaaaaggatgaagaggggaactggtataggcttaatttgactacaagtggtgaaagacaatttttcaataycctttaggtaaagtatctgacaaatgaaaatatcctgccatattagaagtcaaaattacaatttcacatcaaaagacagctcattcatactgtgacagaacgcattaacttttcactctataggtgagaattcatatctggattataaaaagttgtaaatgaagttttataaatctaagatttactctacattcacataaaataccaattatgcttaacactaaagattcattcctgttgtcatcacttcaaagaaagcttacctcagcagttttctgagttgttgtaagtctgaaacactctttttctaagacatcaagcttttcaagttttgcatacagcttc

SEQ ID NO: 424258 - DNA, 592 bp, Homo sapiens
ctggagacggtgcaggtaagcagcagggcaaccccatctgtgttcattctccyggcctgggtgtggaaatctgctgacctttactgcctgcggctctttgtcagcatggctgagttcatgtgtttagacagttctgagatttctgctgattgcaaatctcattttcttctgggaagttggcaggggaaatgaagtgggaggtaggtaggaaaagtaagactgttatgtattccccacacccagaacatctctgctgcttacatgggtttatccactgaaacaaagaccagaaggatatataccaaatattaataatactgttgttattctggatggtacaacaaggggtgattttagttttctttcttgtatttttctatatttcccaagttttctgtgttaaacacatgccactattatcatcagaaaattttttaagtaaatattttattgaatttggtgagaagaaccaggaaaagggtgttttgtgtttcgctgaatatgttgcacatcggagctactgtctacaccaccatttctgtgcgagcacaccttcttctcactacatcacattacctctggaaatgcaggg

SEQ ID NO: 424259 - DNA, 591 bp, Homo sapiens
tatggggtacatcagatattttgatacagggatacaatgcataataatcatatcaggatatacggaatatccatcacctcaagcatttatcctttttttgtgttacaaaaatctacactcttttggttaattaattaattaattaattttgagacaaagtctcgctctgtcacccaggctggagtgcagtggcacgatcttgactcactgcaatctccaccttctgggttcaagtgattctcctgcttcagcctcctgagtagctgggattataggtgcatgccaccaagcctggctaatttgtatttttagtagagatggggtttcaccatgttggccaggatgatctcgaactcctgacctcaggtgatccgcctgcctcatcctcccaaagcgctggcattacagatgtgggccaccattcctggcttcttttgttattttaaaatgtacaatacattactggtggctgtagacaccttcttgtgctatcgaatactagctcttagtcattctacstaactatatttttgtaccattaaccatgccccctttctcttcactaccctttccagcctcagtaatcattgt

SEQ ID NO: 424260 - DNA, 593 bp, Homo sapiens
tgtttgtatagtttccaaaatttctcttattgttgatttctagttttattatattgtggtcagagaagatgcttgatataattcctttttttcaagaaaatgttaagacttgttttgtggcctaacatatggtctatccttgagaatgatccatgtgctgaggagaagaatgtgtattctgcagccactgggtgaaatgttcattaaacatctattagatcaatttggtccatagtgcggatttagtccaaagctctttgttgattttctgtctggataatctggccaatgctgtaagtggggtgttgaagtctccagctattattgtattagggtctatctctctctttagctctaataatatttgctttatatatctgagggctcccttgttggatgaatatatatttaaaattgttatatyctctctctgaattgattttttatcattatataatgaccttctttgtctttttttaaatagatttttgtcttgaaatgtattttgtctgataaaatatagctacgcctgctcttttttggtttccttttgcatggaatatctttttccatctctttgttttcagtctatg

SEQ ID NO: 424261 - DNA, 563 bp, Homo sapiens
ttccaactgaactttgtaataatttcaaccaagctcamattttcttgagccgaatccaagggttaaacaggaaatgctgcagatacaagcactggagctgcagccaacagtgtgtgcagacagggagaggcaagccttgaaagcgatgatagctttcttagctggaaggcttcttgcctggggcaaggtctgagccctgtgcatgggctacctgagaataaattgttggtgaggcatgacaggagcaagaccagccttgatggctgtgtgggagctgggtgagacctgtcactgttggcttcccccaacttccctggtgacctgtatgatgcagcagaggcagccataatccctttagaacataactccattggcttgaaaaccacgccccactaccccccagagtggctgctgcaagctgtgaccaaggagagtctgagctcagacccacctaaccccgcccctagctgacggtatttctctacctcttctggtagccaaagacaaaaaacataaactcctgggagctttatggccccacccattgcctgagaaacctgaat

SEQ ID NO: 424262 - DNA, 288 bp, Homo sapiens
aatagacttaattgaactaaaaagcttctgcacagcaaaagaaataatcagaagagtaaacagacaatccasagaatgggagaaaatattcccaaactatgcatcaaacaaaggactaatatcagaatctacaaggagctgaaacaaatcagcaagaaaaatataaaataattccatcaaaaagtgggctaaggacacgaatagacaattctcaaaaataggtacacaaatgatcaacaaatatattaaaaaatactcaacatcactaataatcagggaaatgcaaat

SEQ ID NO: 424263 - DNA, 586 bp, Homo sapiens
cctgaattctaaaccataaagatacaaatatctatttatgctyatccctattagtcactgtctctttagtagctgaagcataaaaaatttctttaaaaataagaagaactctaatatgagaggtcattagtcccttagagctctcggcagcatttgagtttatcttataagatggaatgtcctttcgtctcttaattatatccataaaactaatgaaactttaataagaaatctagattccattaataggttttggacatcacagacatatttgcttgtttgtttttaagtggggcagagaataaaccccaacctccaacatctatgcctgctctatctgcacgacattgacaagagcagaggccaaacgtgagcggacagattccaagaggagggtcctctcatgtagagctactctcgtgtcttactgttgggtctcattatgctacttaagagcaacacaaaatagtcttacaggttactagaaagccagaataaataaaaggaaggcttattaaaaaaaccatattcccaggaaaactctgggttaatgcctactcagaaaggaaagaaagagagatgccaa

SEQ ID NO: 424264 - DNA, 586 bp, Homo sapiens
cctgaattctaaaccataaagatacaaatatctatttatgctcatccctattagtcactgtctctttagtagctgaagcataaaaaatttctttaaaaataagaagaactctaatatgagaggtcattagtcccttagagctctcggcagcatttgagtttatcttataagatggaatgtcctttcgtctcttaattatatccataaaactaatgaaactttaataagaaatctagattccattaataggttttggacatcacagacatatttgcttgtttgtttttaagtggggcagagaataaascccaacctccaacatctatgcctgctctatctgcacgacattgacaagagcagaggccaaacgtgagcggacagattccaagaggagggtcctctcatgtagagctactctcgtgtcttactgttgggtctcattatgctacttaagagcaacacaaaatagtcttacaggttactagaaagccagaataaataaaaggaaggcttattaaaaaaaccatattcccaggaaaactctgggttaatgcctactcagaaaggaaagaaagagagatgccaa

SEQ ID NO: 424265 - DNA, 565 bp, Homo sapiens
ggcacactaattgtaaaacacttttcctgaagtagttctggtttttgtttttaacttctcattaagatttctgtggtctaaaaattgagccagtattttcattatgtagtcacaaaatttatatttgtgctactgaaacttagtgctaattagaagagacctagtacattacctatcagaaaattggttcactasgttattttaagatgttttttgtggggacttctgatatacttatctattaaatggtgcttttaaaaagagggaaagctataatgataatagcttccatttttgagggtttattttgttccaagcattgtttatgcttttcatatataatattaccttaagcctcacaacagccctgtgaggcacaggtattatcttcattttatgcatgatgatgacactaataatagcaatcgtttattgactgattactgttttcagatgaagaaaatgaggtacagagaggttaagaaatttgatttgagatcaaataggtagtgacagaagtaagatttgaacccaggacagataaatgactccaaaggaatatgat

SEQ ID NO: 424266 - DNA, 594 bp, Homo sapiens
tgttctattacctaacatcttagggtggttataaggatcaaatttttaaaaagtttgtgaaagcaatttccctacataaagacagggatttgcyattgtctttggtgtaaagcaatgtttgataactttattatgcctttcatccacatcctatccacaaacacttgttctgggttatagacctgcttctcatatttatgtttactatgtttcactacatagtaatttattagtcttctcctttatatttgcccacaacagtatagtatctttcctacaaatgatacaacctaataaatatttattcagtgttgttttagactaaatgtttcatcagtgaaatttttttatttcctaaaatggcctgagcatttactttagagtacagtttccatgaaccactttttccctctttcttctcttttcagattagaataactgttgggaatacatttttaaccaatggattgaaaaaaatcagtacaagatctatttaattgtcacagcaagtccatgatgagggctgcacaaaagaaggaggtaatttgttttcttgggtcatgaagacttttcttttctaggcagggtttagaa

SEQ ID NO: 424267 - DNA, 537 bp, Homo sapiens
catcagatgcttagcagatgctggcaccatgcagaaccatgagccaaataaatctcttactaaattactgagcctcccgtattcctttatagcaatacaaaacaggttaacacattatcctactgtacttgtatggcyttatattaagaaggtatttatgaatggatgtttctcttttaaaagaataaaacatcaaggctgagcatggtggctcacagctataatccctgcctttgggagcccgaggcaagcaaaaggcttgagcccaggaatttgacaccagcctgctcaacatggtgaaaccctgtctctacaaaaaatacataaaggagctgggcatgatggttcatgcctgtagtacttggtagtactacaagtagctacttgggaggctgaggtgggaggatcacttgagcccagaaggtgaagcttgcagtgagcggagatcatgccattcactccagccagagcaacagagcaagcccttgtttaaaaaaaaagaaagaaagaaagaaagaaagagggatagagagagag

SEQ ID NO: 424268 - DNA, 570 bp, Homo sapiens
tcattctactataaagacacatgcacacatatgtttacggcaccactgtttacaatagcaaagacatggaaccaaccaaatgcccatcagtggtagactggataaagaaaatgtggcacatatacaccatggaataccatactatgcagccataaaaaggattgagatcatgtcctttgcggggacatggatgaagctggaaacatcatcttcagaaaactaacacagaaacagaaaaccaaacaccgcatgttctcactcataagtggaagttgaataatgaggacacatggacacagggaggggaaaaacacacaccagggacagtcagggggtggggggtgaggggaaggagagcattaggacaaatagctaatgcatgaggggcttaaaacctagatgatgggttgataggtgcagcaaaycaccatggtacccgtatatgtatgtaacaaaccttcacgttctgcacttgtatcccagaacttaaaataaaattaaaaaaaaaaaaaagtgaatgcaaactaaagtctgtcacagcttctcagcaagacaatgtgtcagtgattc

SEQ ID NO: 424269 - DNA, 570 bp, Homo sapiens
tcattctactataaagacacatgcacacatatgtttacggcaccactgtttacaatagcaaagacatggaaccaaccaaatgcccatcagtggtagactggataaagaaaatgtggcacatatacaccatggaataccatactatgcagccataaaaaggattgagatcatgtcctttgcggggacatggatgaagctggaaacatcatcttcagaaaactaacacagaaacagaaaaccaaacaccgcatgttctcactcataagtggaagttgaataatgaggacacatggacacagggaggggaaaaacacacaccagggacagtcagggggtggggggtgaggggaaggagagcattaggacaaatagctaatgcatgaggggcttaaaacctagatgatgggttgataggtgcagcaaaccaccatggtacccgtatatgtatgtaacaaaccttcacgttctgcacttgtatcccagaacttaaartaaaattaaaaaaaaaaaaaagtgaatgcaaactaaagtctgtcacagcttctcagcaagacaatgtgtcagtgattc

SEQ ID NO: 424270 - DNA, 568 bp, Homo sapiens
gcttcagcttgttattataaaaagcctcaaccatctcagtaaatgcaaatgttttcaaatgaataagtttattctgcagacaattgaaactcagtgcaggacttctagaaggcaaaggagccartggttttcactgtggaatatcttccatctctcagtcagcagggttgacttggcaagagaggcagtgacaggtataggaaaggcaggctgggatctgactgaagggaggggccaaatgacgatcattaggtcagagtggaaagcaaagagcaggtgtctaagggagagccagaggcaccagctctttctcactgtgcaagggtttcaccatttaacaagtgagtcaaagtgattgatgaatatgaggattgagggttccacttcctcagaacctaccaagtgccaggtattttatactgggatcttctttcatttccaatagccctgtagggttaacaagagcccctctctacagatgaggagggagataatgagggtgctgtcctcccagccagggaagcccctcaccagttgtgattagcaggcattgagtgcattaagaaag

SEQ ID NO: 424271 - DNA, 568 bp, Homo sapiens
gcttcagcttgttattataaaaagcctcaaccatctcagtaaatgcaaatgttttcaaatgaataagtttattctgcagacaattgaaactcagtgcaggacttctagaaggcaaaggagccaatggttttcactgtggaatatcttccatctctcagtcagcagggttgacttggcaagagaggcagtgacaggtataggaaaggcaggctgggatctgactgaagggaggggccaaatgacgatcattaggtcagagtggaaagcaaagagcaggtgtctaaggragagccagaggcaccagctctttctcactgtgcaagggtttcaccatttaacaagtgagtcaaagtgattgatgaatatgaggattgagggttccacttcctcagaacctaccaagtgccaggtattttatactgggatcttctttcatttccaatagccctgtagggttaacaagagcccctctctacagatgaggagggagataatgagggtgctgtcctcccagccagggaagcccctcaccagttgtgattagcaggcattgagtgcattaagaaag

SEQ ID NO: 424272 - DNA, 584 bp, Homo sapiens
ctccgctgcttgtaattagtactatttctcacccagagggactgttgtaaatggcttcttgaggagctgcccacatcagtgtgtgcctgccacttaactgccactctgagtttgagcatcatgkatgtcccttcccctgttaggaggcagctagtggtccctgccagagatcagcagctctgatgtccagaagaatgagtgagctgcccaacagctggaggatgggtgggctaaacatctcacacacactaaggctagtgagcaagtggtcctagagtcccatggagctgagttctaatcctgccttcattgtctgctggccatgtgaccttggagaggtggcttcacttctctgagcccttctttccccagtttatatctcatagtgcgattgtgagtgacgctcacaaagttccctctaaggcctcaagacacgacatctacaattcttggccctgccatatctctgtacagcaaggtagactcgtaggcaaagggaataatatttactgagtagaaactaatttggggtagagacttagcacgcaggccctagaagaagactgcctgggttcaagtatcat

SEQ ID NO: 424273 - DNA, 596 bp, Homo sapiens
aactgcttacacattcacaactccattcaatctccacattaaacagaagaagggtaggatacatactattagcaacatttrgaggtaagaaaggcttagggaaaatgggtgatttgcccaattgctgagagttatgacaagaattcttttttgttgtttgattttttaaaaacatagtagctatgtagaatccttgagataatatagctaaaatcagtgaaaatgcaaagaacattataaactgtagaacatggccacctcaaagttgaatgaggatgtaaggcttatttgaaagatgttatagtgacactcttctagattacttatggactcagttaaaaaacaggatatgggtttcagctccaactctgcccctttctcagtataataatgagatattatttttcctggatcctcttactctgcatgaattttatcttgatgcatatgccaaagagaggcaaagaatctctttcttagatcagaaggatccagcatgtaactttgcagtgggcaacatatcttctcctctaaaggggcactcaaaagagcacctgttggcttttaaagactacctaacagcctagtgcacaggg

SEQ ID NO: 424274 - DNA, 560 bp, Homo sapiens
cttcctcttacaaaggccatgtgattctatcaggcccacctgataatccaggatcatctccctagctctaaatccttagagtaatcttatctacaaagtcccttttaccaagtaaggaacaaattcacaggtttcagggcttaggacgccagcatctttggagaggcattcttctgccacttgcagatgccttgttcagagggtaaatgcaaccagtgagtcccactccacagaggaaggggcaggagggggatgaaggaagtttcaaagcatttgacatacacatgcttatgccaggtatgtttgctgttgttgctgtggcctgagcactgagggttttggaaagcttaggtgattccatcatgctgcaaaatctgagagatactttgacagagatatgctaagagcatatgctgctgtaattgagggtaaaatctggccctgtgattccyggagatgatggatcaagagcagggtgtctttaccctggctgcacattgctatcaactggaaagatttttctttaaaaaaatgttattttgaaataagagtgcaaagat

SEQ ID NO: 424275 - DNA, 606 bp, Homo sapiens
tggttgtaatgagctagacttgcccaaagttactcagctagtaaatggcaaagctagaatttgaacttatatgtgtctggcttaaaaggccatgttctttccacttcatgttactgccaccaagtaaagaggatctcacagtctcygaggcggaagctccctctcagcttgtctggacagtgtttttcaaatccattcttggagtgtgacccatcagtgggtcatgaggtcagtctgtgggtggcattttaaataacaacataaagtaaaggtgactacaacagagtagaaaataagagtatgtcacacaagtagaaattttttatctctatatcttctctgtgctttgctaccttcatctgaattcacttatccttgtatggagataaaaatagccctcccataggcttgttatgaggactgaatggaatgaggtacataaagtgcttagaagagagactggctcatattaagcattatataaatattaagtatgtatgtatgtaaacgagtcatgatgtaaaatgtatttcttattgcagactgcaatcaagatgtttgaaaatactgaactcacatctgtagacgaggagttggcagatttac

SEQ ID NO: 424276 - DNA, 609 bp, Homo sapiens
acagtcattggctcagtggtgggcatgtgacccaagttggtcctatcagggtggacctctggacctgtgtaaggagtcctgggggacaccgcagtccagggaatgtggacagccatttgccatctcatagggcccaagaaggaggccgagatgctagaatccctgtggcatcagaacagtctcctaaacttttcattgaagatgaacaacacatttcattttttccctgasatggtttgacttaggttttttcctacttgactataatttgacacaaatgggattgtgctgtaagtgtctgtctggtaactagatttttcaggcaagaatatactgtaggcaacattccataccaatcaataaagattgaaatggaatattttgaaatggttcttctgacttcttgacatcaaaaatactgggccaaaatgcaaagctgcttttttgtcaccagtttatacatgcaacagatctccctaactccacctctaaggacccctattccatgatagagggacctacactttctactctactgcgctgaacagtaaaaatacatatttttgaacagtcttttagaactgcatgagcctttaggggatgagaggt

SEQ ID NO: 424277 - DNA, 587 bp, Homo sapiens
tcaggttgctgcagtctatagatcaaataaaacatagtattgccttattagtatttctacacctttcagtaagtagtagagtcagagaaaaccctgaaaaatgagtataaactaaagagggtaggagaatgactcaatgctgcagcacaagccctcttttggcaagatcgatgtgtgggcagaaggcaaatggctgctgagaggaaatgggccasacctggctggtcttattctatcctgtaatggcagaaagctgttcaggatggctatggcgcacagcccagggctgactcagcattgcctcttcctaacctgttgagtgggtttatagattgtgtcacaagttctgggaaaatgagaggtcaggattcctgggcccaatggctcgttaacagaggtcctgtgtgccatcaccccctccagtccttgtcccactggacttgtcccccttgtcgcactgggggagatgagggcctggaactcacagcaaaattctctctgtggcttgatgcaatcccagatcctcaccatcaacctttgtgaggctcatctgttcttaattatatctctaaatcccgaggcattac

SEQ ID NO: 424278 - DNA, 587 bp, Homo sapiens
cattggttcagtttctcccagttatttaaactttcttccatagaatggacatttagctacccaaaaacaggggccattttcctctcagtaggtgatatattggtatatgtcttaggctrcggagtaaaaaagacctgggcttccaattttgaatctgccagcaaccagctgtgtgtagttgggcaagttgctaaatatctccgagcctcagatgatttcctctagaataaatgatgacacatttacctcacctcatttagtaaggactaaatgaaatgtcaatagtagggcaaattgtggatggttgttagatgttaggtcccctcacagttgccttttttttttaagtcagtatttctccaaggtggtctctgactagttgtatcgagatagcctagggtgagtattgaaaatgtagatttccggatcaactcctaatcaaccgagttatagtctgtgagtgtgaaatctagacactttcatttgtttagttcagagaagtatccatggagccaagaagttagaaggccttaacacatatgggaactctccaagccttctcagggagtctacagtcaaagacccat

SEQ ID NO: 424279 - DNA, 587 bp, Homo sapiens
cattggttcagtttctcccagttatttaaactttcttccatagaatggacatttagctacccaaaaacaggggccattttcctctcagtaggtgatatattggtatatgtcttaggctgcggagtaaaaaagaccygggcttccaattttgaatctgccagcaaccagctgtgtgtagttgggcaagttgctaaatatctccgagcctcagatgatttcctctagaataaatgatgacacatttacctcacctcatttagtaaggactaaatgaaatgtcaatagtagggcaaattgtggatggttgttagatgttaggtcccctcacagttgccttttttttttaagtcagtatttctccaaggtggtctctgactagttgtatcgagatagcctagggtgagtattgaaaatgtagatttccggatcaactcctaatcaaccgagttatagtctgtgagtgtgaaatctagacactttcatttgtttagttcagagaagtatccatggagccaagaagttagaaggccttaacacatatgggaactctccaagccttctcagggagtctacagtcaaagacccat

SEQ ID NO: 424280 - DNA, 587 bp, Homo sapiens
cattggttcagtttctcccagttatttaaactttcttccatagaatggacatttagctacccaaaaacaggggccattttcctctcagtaggtgatatattggtatatgtcttaggctgcggagtaaaaaagacctgggcttccaattttgaatctgccagcaaccagctgtgtgtrgttgggcaagttgctaaatatctccgagcctcagatgatttcctctagaataaatgatgacacatttacctcacctcatttagtaaggactaaatgaaatgtcaatagtagggcaaattgtggatggttgttagatgttaggtcccctcacagttgccttttttttttaagtcagtatttctccaaggtggtctctgactagttgtatcgagatagcctagggtgagtattgaaaatgtagatttccggatcaactcctaatcaaccgagttatagtctgtgagtgtgaaatctagacactttcatttgtttagttcagagaagtatccatggagccaagaagttagaaggccttaacacatatgggaactctccaagccttctcagggagtctacagtcaaagacccat

SEQ ID NO: 424281 - DNA, 517 bp, Homo sapiens
acttgcccctttacttctactgaaatacttacgtgttaaatagctttcatttatgtataatatagagcttcaatatctgtccataattttattctgtcctaaatttcaagttcctataaagtgcagactctgcaatacatgagtaatcgtgctcagtaacatgcctgacaacttgccattggtgcttttaaatgataatgatgatggtgaagctcaaattcctcaccctgtcattccataccttycatcatccagccccgtaaccgactccccttcctacccccatcatttagtttcaacatcctatataacagccaaactggcctgcattccttagacatcccatctctgctgtcttaagctgtttcttttatctgcatatccctttcgcctttcttctctccctgagtgtctaaatccactcctgagtgtttctctggagggtcaactctaatactgttccccatgatatccttccagattccttgtgcaggaatgacctggtgtctttgctctc

SEQ ID NO: 424282 - DNA, 487 bp, Homo sapiens
ggctgtaataatttacatttccaccaataatgtcaaatattcactttcaatggttacattacttaaacaatcgcctataaaaataagtaaatcgagkataagaattcgaggctttataatcaagggtatcataaatcggacaataaaaaatactagtaagcaattcaattctcttaaagtttaacatgttttttacataagcaattttctaacctagaactaagacaataaatgtgaaataactgtcttagtcccttctgtgttgctacagctgcatacctgagactgggtaatttatgaaaaacagaaaataatttctcacaattctggaggctgggaagtccaagatccaggtatctgatctggtaagggccttcttgttacatctcaacatggcagaaagcaaaaagttaagctaacatgctaaactttttgtggaggctctttttttttttttttgagacggagtctcgcttatcaccagtct

SEQ ID NO: 424283 - DNA, 533 bp, Homo sapiens
agaaaataaggatatacacaataaacattacactaatcaaaaagaaacatacaaggtctaggattaataaagagaactgtgagttgggtgttaagagtcctgaaattcaaaggtataattgcccaaactagctaaataaagtgggtcaagttattctattatggatctcagtttcctcatctttaacatgaagacaagggatcagatgtgctcygattcttcctgctctaaaattctatagttctgttacttaaaactgagaagccatctaacttctttaccaaagtgctatctggttgaggcctaccaccacttttccctgatttattattcaccaaacagaaacatcgcattttccaggcacagcaccatcttacactaactagaaaggactagattcaaattcagacaaataaccactttcaaatgactaatgcttcttaggcagaatctttgttacaaactgcttcatacctctgctataccatatccaactgggcaacagtataacacacacaaaaaagtatattact

SEQ ID NO: 424284 - DNA, 572 bp, Homo sapiens
tcacaactgaaaacattaattttgttgaaacctactcggtcaatcttatcacagtctattcctcattttccattcataatctgcaagtgctttccctgttttggcctaaactgggtttccacaagtccgattcctgaacgcagatctaaacaagaccacacaaagctctaacatgtacactaagaaacctccaaaaatcaaacttgaagaaaagcagttaggtccaacagaagaggccagaatcattcttatctattaaaaaaaaaaaaaaacaactggaaatctccaagatcacacatttcagaagccttcaaatatatmattttcttttacataaaaatttttcattacctttgttattttcttgctagaattcaaagtttgcaaacaatgggagtaaagggaaagtgcagaatcccagaaatactctcaaagggggtgaggaatgggagaaagggaactttcaaataggcaaagaaacattctagcttttggtgacaacttacataatcttaaacagagaaacccacaagccaagaaacatttctcaaactaaagaaataaggcaatac

SEQ ID NO: 424285 - DNA, 593 bp, Homo sapiens
tgctggtgcttctgttctggcacaatcatctggacctttctctggcagaagccagagcccctccttcttacttgctctctctttctctctttttgtctcaggttccagggagttgggctacttctgaggacatccactaggcatgtttatagcagcttttttggcaagggccccaaactgtaaacaacccaagtgttcatcaacagataaatggatcaacaaatcatggtacatcaatataatggaataccactcagcagtaagaatgaattrgttactgatacacatgacaacatgggtgaatacaaaaataattatgctagtgaaagaagctagatcctgcccccaccaaagaacaaactctcatttatatcaaattctagaaactgcaaactaactgatagtgacagaaagcagatcagtgttgccttgggatgggttgtggggggcaggcaagggcaggaagaatagattacaaagggccacaagaaaacttttggggagtaaagaataatgtgtttgttatctttattgtggtaatggtttcagggcatatacttttgccaagacttataatgtacagtttcaatatg

SEQ ID NO: 424286 - DNA, 611 bp, Homo sapiens
gataatgaataaatccaaagaatccataactcaattaaaaaaaaaacactatatgaagagtcttacatttactttttaaagtttttgataaacttaatgagaggctagattcaagcaaagaagattgacagttttaactaaaaccattcaaaaactgctatcaatggggtaattaatgtaaaaattgacatataaaatatgggttttaaaagtagtaattacagggaaagcatttytaaatgaaagctgaaatccaggtttttttttttcaagtacagtacttgaatgtggaagactactactttttaagagtctccacaaaaatggacttttgagccagtgtaaccagtatacagaaaagtcaaatcaagaccataagcagtacgattatttttagtcaaggactaagcacagagggacagcttacctcaaaagaaaatcaagagactgatatgaggacctccatttttcaagctgtgaaaatttttaacatgatgagtttaggaagatgcaagttcatatagtaaccaatttgggttctacagatcaaagtgtagtttgaatagaatccaaaggtaaattatggccaataaaggatttaggatgccaat

SEQ ID NO: 424287 - DNA, 608 bp, Homo sapiens
actttgcttggaatctgtgctgacgctaacaaattagcccagaaaaaaaaaaaaatttcagatttgggcccctgaaaaacggtgtccttcttaaatatctgcaaaaaagtcacaacatcaggagccatagaaagttgttatttctccatcattcaaaaaatcaaacatctcccaacattatttatgctaagcataaaatgaaggtcagtattgatattcattcactatacttcaaatcctaaacaagaaaattcaacctttatgtttattcaattgctaatctattcagtgtcaattgttgtggaagaactaagaactagactagtgctgcttataatgtttttaattagaacagacttggaccaattctacttagaaatttacccttagaagaggtgaaagatattaactggcatcttttcagcacaggtcagtgcygaaaagaacacaacctataacccttaggccttgcagttgaatgttaacaagtgaaaagcaatctccttggatgtatccaagcgattttaatataaatttctgcatacctaggtagaaagtactttagaaataaatctaccttttccctcacttgtaagaaaatgtggtag

SEQ ID NO: 424288 - DNA, 641 bp, Homo sapiens
tcttgttccaatatttccctagagaactttgccatctactaaggtatctgtgtactggataaagaaaaatacccaggccttctagggatcataagatatactgtctattaacctgttcagatcccaagagacccaaaatgctgctatgatctrcttttcagagtagggacttatggagctagagtattaaatggagtcttggctcaagtttaccagggtttaaggctgtttgaaactgaatttggctcctgtgaaagttgatttttttcttgtttaatcttgttcctattatattcccttttaaatgtcaattcaaagttcaggaagttcaccagccccatcactcctcagtggttcatgatctatatatttgctctttacctcggtgtgtctcaacttcttgactttttggtaatatcttccggaattgtcagattctccttgggagctaattactcccaaataccaggacaacatcacaggttagttgcttttcctgaatactaattctttgttaaagtctgatgccttcgatctgatttttttccaatatttttgtagtttttctagtgattactagtctgtgggctgactaaaaatttctagctcactattccccaaagagaaactctaattagtat

SEQ ID NO: 424289 - DNA, 641 bp, Homo sapiens
tcttgttccaatatttccctagagaactttgccatctactaaggtatctgtgtactggataaagaaaaatacccaggccttctagggatcataagatatactgtctattaacctgttcagatcccaagagacccaaaatgctgctatgatctacttttcagagtagggacttatggagctagagtattaaatggagtcttggctcaagtttaccagggtttaaggctgtttgaaactgartttggctcctgtgaaagttgatttttttcttgtttaatcttgttcctattatattcccttttaaatgtcaattcaaagttcaggaagttcaccagccccatcactcctcagtggttcatgatctatatatttgctctttacctcggtgtgtctcaacttcttgactttttggtaatatcttccggaattgtcagattctccttgggagctaattactcccaaataccaggacaacatcacaggttagttgcttttcctgaatactaattctttgttaaagtctgatgccttcgatctgatttttttccaatatttttgtagtttttctagtgattactagtctgtgggctgactaaaaatttctagctcactattccccaaagagaaactctaattagtat

SEQ ID NO: 424290 - DNA, 641 bp, Homo sapiens
tcttgttccaatatttccctagagaactttgccatctactaaggtatctgtgtactggataaagaaaaatacccaggccttctagggatcataagatatactgtctattaacctgttcagatcccaagagacccaaaatgctgctatgatctacttttcagagtagggacttatggagctagagtattaaatggagtcttggctcaagtttaccagggtttaaggctgtttgaaactgaatttggctcctgtgaaagttgatttttttcttgtttaatcttgttcctattatattcccttttaaatgtcaattcaaagttcaggaagttcaccagccccatcactcytcagtggttcatgatctatatatttgctctttacctcggtgtgtctcaacttcttgactttttggtaatatcttccggaattgtcagattctccttgggagctaattactcccaaataccaggacaacatcacaggttagttgcttttcctgaatactaattctttgttaaagtctgatgccttcgatctgatttttttccaatatttttgtagtttttctagtgattactagtctgtgggctgactaaaaatttctagctcactattccccaaagagaaactctaattagtat

SEQ ID NO: 424291 - DNA, 641 bp, Homo sapiens
tcttgttccaatatttccctagagaactttgccatctactaaggtatctgtgtactggataaagaaaaatacccaggccttctagggatcataagatatactgtctattaacctgttcagatcccaagagacccaaaatgctgctatgatctacttttcagagtagggacttatggagctagagtattaaatggagtcttggctcaagtttaccagggtttaaggctgtttgaaactgaatttggctcctgtgaaagttgatttttttcttgtttaatcttgttcctattatattcccttttaaatgtcaattcaaagttcaggaagttcaccagccccatcactcctcagtggttcatgatctatatatttgctctttacctcggtgtgtctcaacttcttgactttttggtaatatcttccggaattgtcagattctccttgggagstaattactcccaaataccaggacaacatcacaggttagttgcttttcctgaatactaattctttgttaaagtctgatgccttcgatctgatttttttccaatatttttgtagtttttctagtgattactagtctgtgggctgactaaaaatttctagctcactattccccaaagagaaactctaattagtat

SEQ ID NO: 424292 - DNA, 584 bp, Homo sapiens
tctaattagtatactttaactaaagtaaatatcttaaaacataatatatacactaaatgggacgtaaatcataagggtttagcttgatgaaagtgttacaaattgaacatatctaataaataaattaaatattatgagaacactgtagggttccattgtactgcctctcaggtattgcatttataaatataacttctatcctgacttccaccaccatcattgtgacctttccttgatcattatataaattgaatcatactgtgcttggcctgtatctctacatatcatgtctatgagaatcttattttctttttgtttttcttcagtagactttatttttagagcatattyaggttcacagaaaaaatacacagaaaatatcaaattccgttgtggcctccctctcctgcacagtttttcttattattaacattctgaattattgctgtacattttttatttattaaaccaatgttgacacattattattaacctaagtccatatattttacatttgggttcatgctacatattttcagaactgcaaaatgtcatagtcacaattagagtattatacagaatag

SEQ ID NO: 424293 - DNA, 593 bp, Homo sapiens
acagccaggtgagtattttggaaagactaaatatgaggaagaaaataaaatcaaaaattctagaagtcttattcatttggatttgcaagtgtctctaagttgctgcttatatttaaattcaccaaaatgaatgtaatgcattatgagtgggcttatgctagaggtactctgaagaactctgatcaagtagtctaacactcaaagtaaaagctttatccttacatgaatatactcacaaatatatgcattttaagtggttcgagttaaaataaaacattttagtatatgagtcatctttttyattttcaactctgtcggactttggattaatcaaccaattacctggtcctgttgggcagatgtgaggattctattgtttatttttaactatgtaaaaaagtatctttctatagatgagaatagaaatgtaacatgcaaaaggaagtgtgctgatattgtgggtgtatggtttattagttttcatttaaaactaagtccatatgattttataaactgttctacaatttaagaaagatgtgtatgcagttacaactcttgtttgtccaagttattcctcaaccccccagatgcct

SEQ ID NO: 424294 - DNA, 318 bp, Homo sapiens
caataagcacacctcaaagaaaaagacaattatctctctctgtcaccacagaaacactaaggaaaaaatattctgaaacaaaggttccagagtgctcccacaatgagcagaaaagtgagacacatggacaattatctcccaacagctaattatgtaccttgaaactaagggactctaacatcctttattacatatttttctgttacagacatccctctstatccatagggattggttccagaactcttacagataccaacatttgtgaatgctcaggtacctaatataaaatggcatggtagttgcataaaacctatg

SEQ ID NO: 424295 - DNA, 384 bp, Homo sapiens
atacaattttgcttggccatttaacattgtctagcacaaatctgctttgacatagggaagttgaaacttttatatggacaataagcacacctcaaagaaaaagacaattatctctctctgtcaccacagaaacactaaggaaaaaatattctgaaacaaaggttccagagtgctcccacaatgagcagaaaagtgagacacatggacaattatctcccaacagctaattatgtaccttgaaactaagggactctaacatcctttattacatatttttctgttacagacatccctctgtatccatagggattggttccagamctcttacagataccaacatttgtgaatgctcaggtacctaatataaaatggcatggtagttgc

SEQ ID NO: 424296 - DNA, 553 bp, Homo sapiens
ctgccctgccagcaactgtctgtttaacctctgactggtgtcaccgttgttattgatatttgtaggcaaggataattatttcaaaacaaatatgtaattctcttaattttttttctttaaaaaatttgccttcctttacctccctgagtatgcacatcgtttactattgcatatatattcccattgcaatgctctattcycaaataaatatctttttcttttagagagcctctttttctgtttgttatttaggtagacattctgcacatatttggcaaaaacttacacgctgttgaaactgaaaccaagacctcttcctctatcttccatctctcaggcacaactcaatttctaactcagtctttggcaatactaatattcctttctggtaacataattttgactggattactgttctcatgttttaggcctaacttgtttaaaaatttgatgagtggccgggcgtggtggatcatgcctgtaatcctggcactttgggaggctgaggtgggcagatcacaaggtcaggagatcaagaccatcctggccaaca

SEQ ID NO: 424297 - DNA, 576 bp, Homo sapiens
ttttctctgtgtgatggaaattgtgtgtgtgcgtgtgtgtgtgtgtgtgtgtgtgtataaaatgtatgtccagacagatagctagatatatcttagaagtaaaaactaataaactaataattaaaatatttataaacttctctacaattaaacatggattacatatcaacaaaaattacatctttatttttaaatgtttttcaaaaatgtagtgagaagcgtggctttacagctgcatctatttatttatttatttagtattttggcaattctctttaatgtctggcttaataagaaaacagctacattttcatatctgctttggcatccaatctgatgcaatatcatattccatgtagtctctggagaacaacataaaatcatgagaagaatagaattaaaaatttaacctggtagtattgttaggatttattgggaactatggaccctcagaaaaggagtcagggacctcaaagtrccctgggtcatatcttatgaatgaatggcctaggggtgaaagaaaaatatattaaacattcttcacttattacttagaatattcctaaagagacatta

SEQ ID NO: 424298 - DNA, 468 bp, Homo sapiens
gaagtgcaagtttcagagatgttataaatttggagcggtgacaaatttaaaaaataacacttaaagaataatagtgattatarttttatttgaaaggttcataaaggcataatagccaagtaatttatttacacagagcatctgtagcaaaattatctgagatgccagatgtgcagccataaagtcagaagaaaaaaataaaagaagcaaatgagagatacaaggtatctaaaattgaaatgacgtgttttcactctcaaaactagcataagatataaaaatgtatttaacagagatctgaaaaaacaatttctgatttcaaagatgccattgccaggggatttcttctactctgagctataaacaaaaatgctgatgacacagttcactcatttcttactttaggactattttacttttttttttttttgacacatggaagagtttttgagagtagctacaatgttt

SEQ ID NO: 424299 - DNA, 527 bp, Homo sapiens
ttataatgtgacaggaataaagcctcacatgtcaatgataattttgaatttaaatagattaaattctacacttatgagatatagaatggctaaatggataaaattacataatccaattatatgctgcttacaaaaatctcaccttactggtaaatacacataaagatagaaactaaaagaatgtaaaaagataagccacacaaatggaaaccaaatactagtaggagaaggtattcttatatccagtaaaacaaacttttagtcaagaacactagaaaaagacaaataatataatgataatcaatccagcaagargatataacaattttgaaaatatgtgcatgcaacattggatcacccagatccataaagccaatattactaaatcagaagggagagatttagtgcaatacaataatagtgaaaacttcaacccctgactctcagcattaaatatatcatatagcaagaaaatcaacaaagaaacaatagctttacatcagactttaggccaatgggcctaagag

SEQ ID NO: 424300 - DNA, 527 bp, Homo sapiens
ttataatgtgacaggaataaagcctcacatgtcaatgataattttgaatttaaatagattaaattctacacttatgagatatagaatggctaaatggataaaattacataatccaattatatgctgcttacaaaaatctcaccttactggtaaatacacataaagatagaaactaaaagaatgtaaaaagataagccacacaaatggaaaccaaatactagtaggagaaggtattcttatatccagtaaaacaaacttttagtcaagaacactagaaaaagacaaataatataatgataatcaatccagcaagaagatataacaattttgaaaatatgtgcatgcaacattggatcacccagatccataaagccaatattactaaatcagaagggagagatttagtgcaatacaataatagtgaaaacttcaacccctgactctcagcattaaatatatcatatwgcaagaaaatcaacaaagaaacaatagctttacatcagactttaggccaatgggcctaagag

SEQ ID NO: 424301 - DNA, 584 bp, Homo sapiens
gtacacatttacactaacagaaggcaacccacataatagctgttttcagtgccccatataaaccaatatccaacccctcaggtaaatttttattttcaaaaaaacatttagcgaagaatcacattccactccaactatcacctttagatatctcttcccaaatctctcccctagattgccagcctcctactccttcaattgatcctactttctcttcctcaaaccaaaagctttttttaaaatagattcaacaggcacatgtgcaggtttgttatatagatatattgtgtgatgctgaggtttgggcttctagtgtactcatcacccaaacagtgaacattgtacccratagataatttttcagcactaacctccctctcaccctccctcatttggggtcctcagtgtctgccatttccatctttatgtccatgcgtacccactgtttagctcccacttgtgagaacatgtgccaatcctgaatctctaccagagtaccacttccgttactcactccatcttatgctgagcattccgtttctcccacatatcatggaagtctaaagtgcttacccacactcaat

SEQ ID NO: 424302 - DNA, 573 bp, Homo sapiens
ctagtaaaggcttacttcctttgtgaagtcatcaagcccactctgatctctcttctgagttcattctgttctttcctttgttcttcctttaggaaacatttactagggacaacttttgagtgtcagaccctgtggacacaaagaaaaagcttgggttcctgccttcaaggggctcacagttgagtggggaagacagacacgtaaatgaagaacaataacagactgtgctgagtactggaatggaagtgcagcaggaactcagaagaggtcatcactggaggggccacctctgggaaggcttcaccaaggaagtataattggagctctgtcttgatgttcaaataagagctgcagagagggtgctatcgagcagcacataatcacttaattacatattgctttgtattcttcttcgattgtttagtwtgcttgtcttgacttctccgtgaggctaatcagctcaagatcagggacaggcctagcactctctgttctcccagagcctaacagtggccctggacaaacaccatgtgttcagaaaaggcttgttgacttgaagcagattaacaatcc

SEQ ID NO: 424303 - DNA, 623 bp, Homo sapiens
gcctcccaacccaaagctttcctgattccctctgtccacatctgctttgcccagcgcaagcccctcagactgctgcccacttgtggattctttctaaaacaggtgacacrccccaactctcctcctcctctgctctgaggtagcctctgccccattataaatgaagtaaaagtagagatgaggccaaagctggaagcagtgagtctgaaaggagaaatggaggagaataaggaagacgcaagttgggaaactgaaagaagagagaggggtcctcaaaaagagaagtttcctctgtcatgtttcatggtggacattggatgttgtaattctggggaatttttcataccaacatgtactcaggggtcatagcctctggttggcaagattgtgtttaaaacgtgcaaattccctctggcattattctgagacaagctttggggtcaaatatatgtggattcaaatctcaaaacactttccagctatgttaccataggcaaaccacttaactcctcagaacttcagtttccccatcttctgatctatctgatgtagtaaacactcacaaatattagtgtcctatgccccttattactgattccctactgggctcctagagactgtcc

SEQ ID NO: 424304 - DNA, 623 bp, Homo sapiens
gcctcccaacccaaagctttcctgattccctctgtccacatctgctttgcccagcgcaagcccctcagactgctgcccacttgtggattctttctaaaacaggtgacacaccccaactctcctcctcctctgctctgaggtagcctctgccccattayaaatgaagtaaaagtagagatgaggccaaagctggaagcagtgagtctgaaaggagaaatggaggagaataaggaagacgcaagttgggaaactgaaagaagagagaggggtcctcaaaaagagaagtttcctctgtcatgtttcatggtggacattggatgttgtaattctggggaatttttcataccaacatgtactcaggggtcatagcctctggttggcaagattgtgtttaaaacgtgcaaattccctctggcattattctgagacaagctttggggtcaaatatatgtggattcaaatctcaaaacactttccagctatgttaccataggcaaaccacttaactcctcagaacttcagtttccccatcttctgatctatctgatgtagtaaacactcacaaatattagtgtcctatgccccttattactgattccctactgggctcctagagactgtcc

SEQ ID NO: 424305 - DNA, 623 bp, Homo sapiens
gcctcccaacccaaagctttcctgattccctctgtccacatctgctttgcccagcgcaagcccctcagactgctgcccacttgtggattctttctaaaacaggtgacacaccccaactctcctcctcctctgctctgaggtagcctctgccccattataaatgaagtaaaagtagagatgaggccaaagctggaagcagtgagtctgaaaggagaaatggaggagaataaggaagacgcaagttgggaaactgaaagaagagagaggggtcytcaaaaagagaagtttcctctgtcatgtttcatggtggacattggatgttgtaattctggggaatttttcataccaacatgtactcaggggtcatagcctctggttggcaagattgtgtttaaaacgtgcaaattccctctggcattattctgagacaagctttggggtcaaatatatgtggattcaaatctcaaaacactttccagctatgttaccataggcaaaccacttaactcctcagaacttcagtttccccatcttctgatctatctgatgtagtaaacactcacaaatattagtgtcctatgccccttattactgattccctactgggctcctagagactgtcc

SEQ ID NO: 424306 - DNA, 490 bp, Homo sapiens
agtttaagatgcatttccttccttgattccaataggctgggcatcacttgaggtggggtctccacacccacagcccctgctttccacaagtttttgccaagcagatgtcctgtcttcagattcaataaatgagaactgagtggttgagctttcaccaaatagtctctttccccattctcagcaacttctctttcagccaaagacttctgtcagagacttcttctgtcggtcaagacaacccccacatctcattcctgctcccatggtcctgcctatcgctcttgtattcttcatcctgcctctccctctcccrgcccaggtttgcccccacaacttctctcaggtttatatgcccttctcttcttgtgtctcctgattggcttgttcatcccatcagcctggatgcccacagcagcctccttaatgacctccctgactccagccccctctctcctcgactccttccctgttaccctataatgaaattatc

SEQ ID NO: 424307 - DNA, 541 bp, Homo sapiens
catgtattatcctggagaataaatgactctcaagtagaacaaatgactctcaagtaaaataaatgagtgcacaggcaaaaaaagacagcttcaggaagaacttccgggggtagcagtaagtgggagtggtacttgctgagggaacgtgctgatcatcactgtagctatgactggctttgttttagggaaaggatcactagttcagtcttagaggagaaagaaggtgaatatctctgtttctgtctctttcgccactcaggctggtcttcagrattctgtctctggtatttggccggctgggactgttttggggaaatagcaccctctagaggaaagagtatgttttattttgcgggggtgccccggggtggtggggtgcgcaacagatgatttccagagctttggctcgattccttccccaggggcctggccagctttggggtggagtgtagctgattgtttatccgcttctgactctggccaccgcagagaacaaagctgcctggctgtgggaggtggcacaacagctgggagcagcaga

SEQ ID NO: 424308 - DNA, 541 bp, Homo sapiens
catgtattatcctggagaataaatgactctcaagtagaacaaatgactctcaagtaaaataaatgagtgcacaggcaaaaaaagacagcttcaggaagaacttccgggggtagcagtaagtgggagtggtacttgctgagggaacgtgctgatcatcactgtagctatgactggctttgttttagggaaaggatcactagttcagtcttagaggagaaagaaggtgaatatctctgtttctgtctctttcgccactcaggctggtcttcagaattctgtctctggtatttggccggctgggactgttttggggaaatagcaccctctagaggaaagagtatgttttattttgcgggggtgccccggggtggtggggtgcgcaacagatgatttccagagctttggctcgattccttccccaggggcctggccagcttkggggtggagtgtagctgattgtttatccgcttctgactctggccaccgcagagaacaaagctgcctggctgtgggaggtggcacaacagctgggagcagcaga

SEQ ID NO: 424309 - DNA, 587 bp, Homo sapiens
ttctgactctggccaccgcagagaacaaagctgcctggctgtgggaggtggcacaacagctgggagcagcagataacagctggaggtggcagatacaaaggctggcaaccacaggcactacagctggaggtggcaatcacaacagccagaggcaacaaagaggctagcagtggccgaaatctccagtacccttgagtctagagccttaaccctgggatgtgtggtcttacatacagcgtaccatagtggcacctkctgagagcatgaggtccaagagaatgaacctggggcacacaaaagcagttgctacaattaaaaagttctggaccaggagctgggagacctggattctggttccaactttaccactaatctacttggggcaaagctctctgagccttagcttctatggtgtctttcttacctacctcatggtgtgaggatcaaactatatattttataaattttaaagtgagaaggaattatagactaatattttgggaatgataagcaaggcttttcttgggccctaagagcttccattctccaagatatgtagaatctcccctcaacataaacaaagctag

SEQ ID NO: 424310 - DNA, 544 bp, Homo sapiens
tgttaccaattgtaataatgatagatgtcatttatgaaatgcttacacaagaaggcccttttggatattagtcctagtccttatagcatattttgcaaggtggtgtcatttaacagaagagaaacttgaggttaggcaggttaagtaccttgcccaaggccacacagtttttaagtggcttaggggtgacttcagcccaggcttgtctgtctgtccccaaagccccaaatcttcctacacctcactgtccctcctcccaagcctctccaccctgtaaactcagtcattcaacaaatattgattgggccaggccttgtactgggcactggagatgccatggtaaacaaggtgggcctgctcccctgccctcagggaacatagttctatatgttagggatacatttcataaacaagtcataaccaacccccagtatgagtatgatgagaggggtcttmagggaggtgaggtatcctctcttaccctgtggcctggggctgggaaggagctgggggcaggttggcgttgagaactgggttggtgtct

SEQ ID NO: 424311 - DNA, 577 bp, Homo sapiens
aactttctctacttcccactcaattttgctgtgaaccagaaaattgctccaaaaaaagtatattttttaaaatgcaaacaaaacccccaaaactgcattatcctgcaaaaaaaaaaaaaaaaaaaaaaaaaaagcaaacaccttggctgtggaccctacccaggtatccactctttatgggaaacaaaagttaacatcatagtgtgggaaaactaattcctgaaagcctagtgcagactttgcagaatccagtggagaaataggcaccaggtggaaactgagcagcccctctatgacaaggactctatttcctgagggaagtgggaggagagaagactggggcagaagaggaagtaaraaggtacctttttgggaacttttcatggctacccaggccttcctcagcctctatcctattctatcaccccaagagggcctcctcttagaaggaaagatttcccaccctgtccccaagaagttccctgtgagaccctggaaggctggtagtggtgagcccacaggccctggagtggaagggaaatcaggagcctcataagactacaattaaaatgtccat

SEQ ID NO: 424312 - DNA, 587 bp, Homo sapiens
aaggctgtgtgcagagctgagaggggcccagtgaggtttaaaggtggagagacccaggtccaaatgtcaacaccatgcctatgcccctgctaaaccttctctcagtgtggggtgcttgtgcagtgcctccttgcatctgtgtgttatgaatgctctatgccccaggtatttctttgttgtccactttttagcaatcrtgtattgaataccaattatgtgtcagctgctttatatatgttcgatgtgctatctgatgtaattctgaaagagtggtgtaatcatgcagggctgctgaatgtggccacacacgttgcatcctgaatgaccccaggaggtgcattttcataactacagtgttagtgtctccccctgtggttgtgcaaggcagagattctgtttacattcaccattttacagttgagtacatggaggctctcttggttaagcaagtaacccgaggtcacataagaagtcaggaggagtcagaattccaaaccagggcaggggcaatagatgagtaatgccataaatatgtgatgagggcaagtgtgactttgttcctcgtgtcatgaagattgagtgtggtt

SEQ ID NO: 424313 - DNA, 587 bp, Homo sapiens
aaggctgtgtgcagagctgagaggggcccagtgaggtttaaaggtggagagacccaggtccaaatgtcaacaccatgcctatgcccctgctaaaccttctctcagtgtggggtgcttgtgcagtgcctccttgcatctgtgtgttatgaatgctctatgccccaggtatttctttgttgtccactttttagcaatcatgtattgaataccaattatgtgtcagctgctttatatatgttcgatgtgctatctgatgtaattctgaaagagtggtgtaatcatgcagggctgctgmatgtggccacacacgttgcatcctgaatgaccccaggaggtgcattttcataactacagtgttagtgtctccccctgtggttgtgcaaggcagagattctgtttacattcaccattttacagttgagtacatggaggctctcttggttaagcaagtaacccgaggtcacataagaagtcaggaggagtcagaattccaaaccagggcaggggcaatagatgagtaatgccataaatatgtgatgagggcaagtgtgactttgttcctcgtgtcatgaagattgagtgtggtt

SEQ ID NO: 424314 - DNA, 590 bp, Homo sapiens
tacagtacttttttttttttccctttccttatgaggtactgcttgtagctatagattctcattttggaaactattttatttaaaatcgaaaggttagtattaaagcaattccacagtaccaacagaaaaaaactaagatattttaaaacctgtaattaaacttggtttttatcctcctaaagtgctagttttgtttatattaaaagaagtttttcaaaccaagttaatataaccattagcataataattataaatgctatgtagcaatatgaagaaaatgctgttaggtgaacaaaagcaaaaatttttactgctgaagagaattcatatctgaggaataactgtattttataggtctattgaaggtttgcctttaaataaaatgaagggattttaaaataaggaagcatggctatagtatgataaaagctgagcactgtattatttagayattccaatgaaaaatcaattatgatacactcaaatataaatgagtcacttttccaaacactaataatatccagtataattttaaaaaatcaactttattcctttcatacagcagaaaaatacatcacacagaaactatt

SEQ ID NO: 424315 - DNA, 597 bp, Homo sapiens
ctgggaagcatccccacttaccccttttctctccaattcagtctaataaatccaaataaataaatttattgcctaaattgatttcaaatctgtcctttttcattttcacagccaatgtgttggtttaagcccttgtatcttgcctctggaaaacggcaaactatttttctggcataagtattcccctcygccttatcaactattgttcacaccaacaaaagttattaaaatacaaatctgataccagtttactctttataatcctttaattttgtcccctgcatacagaataaagttcaacttcttatgaaggtatataaggccctctattatttggcccctgcttacctaatcatcatcttctctcatcataacccagctatctgatttatcttagatggccatactctcatgcctctgtgcctttccactaacttttccttttgcgagagaaaaggccttctctcaaccatttgcctacttactataagcattaactcctacataagcaagtggtgatatttacctgacctgccaagtggttatgccctccttctaagagctttcattgcatacatgtatgttttgtttatagca

SEQ ID NO: 424316 - DNA, 435 bp, Homo sapiens
gggaattatccaacacttaggaaaatgataaagtatttattttgccaggcagaacatggtggccttaacatgctcatgcatagctcatgcagtgaatgctagtgagcttgacttccaatcaatggacaccatttgtaatgcagaaatgtaagctttggaaaaataaaacatatttaaatgatttaagatttaagtttgcactacatgagatggaaagataattttccctcaatagcaaaaactgaatgtgatgaataaatatattcacataggcactaactccctgtcacactcagagtgagattaagttgacacactttagaagtaactattaaaatgttaaggttttaaataaatgtgtgaatgygtgtgtgtgtttgtgtgcacgcgtgcttgtgtgtattaagatggaactaaagagtaaatgtgaagagc

SEQ ID NO: 424317 - DNA, 514 bp, Homo sapiens
  misc_feature (1)...(514): n = A,T,C or G
nnnnnnnnnnnnnnnnnnnnnnnnnnnnnnnnnnaaatgcttttcttgatggagataacaacaaacaatctcacatggcccataccctctttaatcagcttcattattttctctattttgtactatgtgaatcctttttctttctaatttttactttctttttttttctttttcatattaaccaggttttgattactgaagattccactcactgaactccttgtgtatcagaaagtgagagattttctgtcwtcctggaaaaccctttatttatcaaggactccgccatcctcttaagctccaaagctgcctcttccttcccagtctcggcacagacactgctgacacgcctctgaccacgagcatgtggccaggtctccagatccatgcctagcccaaggatctcaggacataattttctctacttggagtttggtgagaactacgaatttcttaacgtcatattgactgcttaaaatgaaaaatcctaaacctgtggaggtcaagggtgaaa

SEQ ID NO: 424318 - DNA, 514 bp, Homo sapiens
  misc_feature (1)...(514): n = A,T,C or G
nnnnnnnnnnnnnnnnnnnnnnnnnnnnnnnnnnaaatgcttttcttgatggagataacaacaaacaatctcacatggcccataccctctttaatcagcttcattattttctctattttgtactatgtgaatcctttttctttctaatttttactttctttttttttctttttcatattaaccaggttttgattactgaagattccactcactgaactccttgtgtatcagaaagtgagagattttctgtcttcctggaaaaccctttatttatcaaggactccgccatcctcttaagctccaaagctgcctcttccttcccagtctcggcacagacactgctgacacgcctctgaccacgagcaygtggccaggtctccagatccatgcctagcccaaggatctcaggacataattttctctacttggagtttggtgagaactacgaatttcttaacgtcatattgactgcttaaaatgaaaaatcctaaacctgtggaggtcaagggtgaaa

SEQ ID NO: 424319 - DNA, 450 bp, Homo sapiens
gctaatggtggttcaatattattcatctgcctcttcctacacattggctgagactgatggaactccatattgtcatagagcttatgttgctggggcctggagggtggataggggaggtgggtggtgcacaggtagtaaacaagatgattacatggaatttatatccaatgatgattaagtactatggggtagcagctatattttgaagatagagctgactggattcctaagagtttggataaagcacaggagggaaagagaagggctgaggataactctgccagttttggtccagttaactaaaagatgaagtataccatttactgacatgagaaagacwgtgaaaatagtaaattgaggtgagggtagggcagagatcgggagcttaattttgaacctgttaaatcggtaccgctattaaattctccaaggagtaatatctggaccaac

SEQ ID NO: 424320 - DNA, 317 bp, Homo sapiens
gagccaaggcttgaacccagatctgcctgacctcagaccccatggcattcatcattcattcattcattcatcaggtcactcattcagcaaacactttctgagccctcactggatgcaggcacccttctaggcaaaggaatcccatggtgttacaagatagacccagttccctgccccagtggaactgatattctactgcagggaaaagaaaataaaycttgagtgtacagcatccattgctgcgaagggctgtgaagaaattaaagcagcgtgagagggcagagagcagtgaggggccagaacatggcagtgtctgt

SEQ ID NO: 424321 - DNA, 596 bp, Homo sapiens
aacaaccagatcccatgagaacgctatcatgagaacagcaccaaagggatggggctaaaccattgcaaaaatttatacttccatctgctgtgcatgagaatatggatgatttatcattattttaatttgcatttctatggtttctggtaaggttgaacatgtgtcaaccacctctctcatgaaggaggatccccatgatccaatcacctcccatcaggccccacctccaacactgattacaagtgaacataagatttgggtggggaagtagatctaaaccacatcattgtttccctggcccctcccaaatctcatgtccttctcacatttcgagatatagttgtgccttcccaatagtcccycaaagtcttcactcattccagcattaactcaaatctccacagtccaaagtgtcatccgagacaaggcaattctctcccgctatgagtctgtaaaatcaaaagcaagttagttacttccaagatacaatggcaataaaggcattggataaatactctttccaaaagggagaaatcaaccaaaagaaaggggctacaggccctgcacaagtctgaaacccagcaggccagtcatta

SEQ ID NO: 424322 - DNA, 595 bp, Homo sapiens
  misc_feature (1)...(595): n = A,T,C or G
nnnnnnnnnnnnnnnnnnnnnnnnnnnnntatggcacatctccttgcacaaagaaagctctgcatatgagctctaatatattaattgagccctttactatgtatcaggtgctttacgtatgttatctcatttagtttttaaaatgractttattttctatgatagttttagcttcacaacaaagttgagggcaagtgcagacagttctcatatactcccactcccacacatacacagactccccatctatcaccattctgcaccacatggtacatttattacaatcattgatctgcattgacacatctttatcactcaaagttcacagtttactcttggtcttgcacattcttagttttgaccaatgtattctgatatataaccaccattttagtgtcatctgccctaaaaatctgcttctgtctgtcaatccctctgtgcaccctgactctgacagggtcagatagttggaatcacactgtatgtagcctgttcatgtcgacttcttgcatttagtaatatacatttaagcttcctccatgtcttttcatggcttgatagcacttttttttcttttagcactgaataatatttc

SEQ ID NO: 424323 - DNA, 551 bp, Homo sapiens
tggctcaggcctgtaatcctagcactgtggaaggccaagacaggcagatgacctgaggtcaggagttcaagaccagcctggccaacacggtgaaaccccaactctactaaaagtaaaaaaaattagcagggcatagtggcaggcgcccataatgccagcaacttgggaggctgaggcaagagaatcacttgaacccaggaggcgaggttgcagtgagccgagatcacaccactgcactccagcctgggcaacagagcgagactctgtctcaaaaaacaaaaaaaaagaagaggggcagaaagatattttgggaggaggtaagacagccctggtggcaataagggagtagctgtctctatatacgctgaagactagggaggataagtgactcattcagggtcataaaacaaatgagtgaggcactcagacaggaacccagggaccccctttcaggcactgctctggctgtgttattagcagaaaagacttmtttttgacctcttcacgcctcctcaccccttcccagtgcccaaggggaaccataaagttac

SEQ ID NO: 424324 - DNA, 545 bp, Homo sapiens
aacctggaactctttctgaacatttagggtcaagggtgggggttagggagagacgacctgccatgcccaagcaggcctgcttggtacaatgtatgttctctcccccaacagtacctacttcttaaacaaacactgagatccccagaggcgggcccgatcagagaggaaccccgcgtgtkcctagaacatggggaacaggcctgtgagagggaccagtcacaaccaagcgcaccactggaggaccagtcctacagagacaggaccactggagagctagaacaggaggatgactcctgtcacagggtcaaatcaccccacagatccccaggaagtttggccactacacaaaaaaacattgctggggctaagtgcagagaaccatgctacagcaagtctggaccaccgtcgtctataccatcaaacagccaggccttgggggacaggctcaccaaagggccagacgatggaagacagacctttggagggacctgcctgctgcagatgaaaatcctggaggaccagacccccagaggtttaaaacctag

SEQ ID NO: 424325 - DNA, 556 bp, Homo sapiens
tttctaaaatgcaaacttaactatgtcactcacctcttcaaatccttattcaatggctcagttagaatatgacccaatgtccctgttatctggctcctttatttctagctttgtctcccacaatacattcaatatttccccatgttccagactcacgccaaaatttacttacgtccaaacattttatactagtgtttctcaatcttttatactcagtactcttcaaatttatttgaaattataaattaaaaaaatttttttgaaatatcaatataattgcctgttatatggcttttaaataagatattttgacttctgatgtacacaggtcagcaccctcataatttacatrtcccctccaaatatatagtaattatagatataaccacgcagatataccaggttttagaggacagatgagcatctctgtgaaccaaaagttaaaagagaaaaaaaagtcaagaataagtagaaaaaaaaagccctgagcctagtgggctccagattgaaaatcaggccacagtaaccaggagttttgctcttaaaggaaaaaagt

SEQ ID NO: 424326 - DNA, 510 bp, Homo sapiens
aaacgtctccagggcatgtcagagaccttcacagcatcccctccctgtaggcctgggaggaaaaaatggtttcattggccaggcccagggcamtccccagctctgtacagcctcaggacatggtgccctgcatcccagctgcttcagttccagctgtggctaaaaggggccaaggtacagctctggctatggcttcaaaaggtgcaagccccaagccttggcaacttccacatgatgttagtcctgcgggtgcacagaagtcaagaactgagcattggaacctcttcctaggtttcagaggatgtatggaaacacctggatgtccaggcagaacttttgctgtgggtagggagagctctcatggagaacctcttgctagggcaatgcagaaggtaaatgtgggtttggagcacccacacagggtcctcactgggggtgctacctagtgtagatataagaagatggccaccatcctctagaccccagaatggtagatccaccaagagctta

SEQ ID NO: 424327 - DNA, 510 bp, Homo sapiens
aaacgtctccagggcatgtcagagaccttcacagcatcccctccctgtaggcctgggaggaaaaaatggtttcattggccaggcccagggcaatccccagctctgtacagcctcaggacayggtgccctgcatcccagctgcttcagttccagctgtggctaaaaggggccaaggtacagctctggctatggcttcaaaaggtgcaagccccaagccttggcaacttccacatgatgttagtcctgcgggtgcacagaagtcaagaactgagcattggaacctcttcctaggtttcagaggatgtatggaaacacctggatgtccaggcagaacttttgctgtgggtagggagagctctcatggagaacctcttgctagggcaatgcagaaggtaaatgtgggtttggagcacccacacagggtcctcactgggggtgctacctagtgtagatataagaagatggccaccatcctctagaccccagaatggtagatccaccaagagctta

SEQ ID NO: 424328 - DNA, 605 bp, Homo sapiens
tactattagaaggaaaactaacaaacagaaagcaatggcatcaacattaacaaaaagaacacccatgcacatgtatacatatgtaactaacctgcacaatgtgcacatgtaccctaaaacttagagtataataataaaaaaaaaacattaaaaataaaaaaataawaaaaaaaaagaacacccatgcaaaaaccccatccgaaggtcaccaacatcaaagaccaaaggtagataaatcatgaagatgaggaaaaacccgtgtaaaaaggctgaaaattccaaaaaacagaatgcctcttctcctccaaaggatcacaactcctcgccagcaagagaacaaaaccgtacagagggtaagtttgatgaattgacagaagtaggcttcagaatgtgggtaataacaaaatcctctgagctaaaggagcatgttctaacccaatgcaaggaagctaagaatcttgataaaatgttacaggaactgctaactagaataaccagtttagagaagaacataaatgacctgatggagctgaaaaacacaggacgatagcttcatgaagcatacatgagtatcaatagctgaatcgatgaagtggaagaaagga

SEQ ID NO: 424329 - DNA, 540 bp, Homo sapiens
gccccatacctgaaggcctgagccatcctagcaccagagccctcaggcttcttgggcctgtgatctgcaccagtgtgcccagcagctggaggtgggtggcgggggttgggggtacagagagacttctaggcaggattctgaggtgggagaagtaggtgttccacagagcaggattggaggagctcaggctttgcagctctgcccacaagatctgccttcctttcccagcacccactcgctcattcacccagatgctgtcagaatcttctgtaatcctggaagattcctgattgagaggcaaagtccttactttccccctaaaagcctatcatttgcacacacatttacctgtgttctgctgaggtagggaagagccctccctcaccactgtcagggcataagagacaaagcaaggccatagcccaagggctcaggcacggcagttggggrcagagggggcattacttctccacgtgcacgcacacacgtgcacacacacacacagacacacaacttgaagcctgaagcctgaactctccc

SEQ ID NO: 424330 - DNA, 536 bp, Homo sapiens
gacttgattctatgagatgcctgttcctatcatttttccattttttattgggttatttgattgtttctcaccaagttgtagttctttacacattcttgatgctgatcatttgttgtgtgttttgtgaatatctgcccccattccgtaacttgctttttactttgtttaagcttggctctactttcaaaagttcttaattttaatatagtcaaaactattttttctttggtggtaaatrcttttcatgtctttaaaaaaatcttccctttctctaaggtttgaaggatactagcttaacttcttccacaggtttcagaatttttaaaaatttaagtccttaatctatctaaagttgatttgtccatagtgtgaacacagaattagtataaactctaaaatgtttaaaccttgattgatgattaacaacttgagatctaaagatagactttggttgacaaaatctctatgaacatatttgtggggagaagtttatagtttacatcagattcttaaagggttcatgatttttaaaaggt

SEQ ID NO: 424331 - DNA, 528 bp, Homo sapiens
ttggaaacatcgttttgggggctgtaggttaggaagcggagatcatggggtctcggaagaaggtttggtcgtgaactgtcagaaaggaggcgaaagctgtgcacgtggaacaaagtgaacagtgcaagttgtatgggaggtagtttaaatatcgaggcgatgaaaaaaggctgctagaattgggcttactcgaaaggaagtgggcctcagaagataatattagttaaaagaagtagaggagaacatggatgttattctaagtaaaacsaataatatgaagaatacaaggtcgcgggacgaggaaggaaactagccagcctgacaggaaggtttattcgagaaatacgggggttagataggatgagtttttggaaactggcaaacgatttagccttttcaaggctttaggatagggaaagctcatttgaaaagattagtcggtagtattatgacgtttaaatgaaaagagtgaaaaacatggaggcggaggtgctaggtggaaaatcagtgcagtaatccagtgataaa

SEQ ID NO: 424332 - DNA, 627 bp, Homo sapiens
aaacaattgcataatgttatcagttactatagcgtaagcactctctaaatcttggctgctataataatatttttttattaataattcaaaggttattaaatggttttgagcctgaagagctgggaaaattgtgtcttagtgtcagaagaaaagagaggggtaccagaagtaaggtaggcttggttatagacatgttaaatgtgaaactataaggtattcaagtggagatgttcagkaaatattggaaactctataattagtattcatgtaggtggaaaggactggaaatagacagatgggagtccctggacctaggcatgctatatgaattctccaaggaaaacactgtagaaggaggtggtagatggccaaagacagacaaacataaggaacaactacagagtctggaggaataagaggaattgggaaagaattaatcaaatggcctaggctaagagcattatcaccatgttaatattatctttccttgattttaaattggctttatgttggttcctgtgagagaagcaatgaggccagtaagtgattattaccagaaaatattatcagagagttgagattgaattttttttgtgttagactaaaacagcatttgataattagaaa

SEQ ID NO: 424333 - DNA, 627 bp, Homo sapiens
aaacaattgcataatgttatcagttactatagcgtaagcactctctaaatcttggctgctataataatatttttttattaataattcaaaggttattaaatggttttgagcctgaagagctgggaaaattgtgtcttagtgtcagaagaaaagagaggggtaccagaagtaaggtaggcttggttatagacatgttaaatgtgaaactataaggtattcaagtggagatgttcagtaaatattggaaactctataattagtattcatgtaggtggamaggactggaaatagacagatgggagtccctggacctaggcatgctatatgaattctccaaggaaaacactgtagaaggaggtggtagatggccaaagacagacaaacataaggaacaactacagagtctggaggaataagaggaattgggaaagaattaatcaaatggcctaggctaagagcattatcaccatgttaatattatctttccttgattttaaattggctttatgttggttcctgtgagagaagcaatgaggccagtaagtgattattaccagaaaatattatcagagagttgagattgaattttttttgtgttagactaaaacagcatttgataattagaaa

SEQ ID NO: 424334 - DNA, 614 bp, Homo sapiens
atattctcaatgatagacaattttcatccgttgaaagtagaacttagttttggaaaaaatcactgaagtttagagtgtttaataccacttggggtccaaacgaaacagctgtgagtctaaaatagtaataaatcttgcatttgtagagtgttctatcttttccataaactgtgtggtctttttttcaacaaaactagggatttacggaaaggttgtttcctgtgttataaatctatgagggacagacacttgagatccagtgttctatgtactttacactaacactgccatgtaatgagactaattttcttgataacggaaaacagcttcaaaactattttaagtagggacattgcaggactaaatttatatccttctgaggtgaatactttaaacaaayctagattatccattctatgtatatttttcaaactggtttactgagagtttttgtttcttcttgatgctagataatagtataactagaacttttcattagttattatttctgcctatgttagtcgatggtaggaattttcacataaggtttgtggcagcagacccaaaagatcagtgaaaggggctagggagaaccacgtttttcttaattttta

SEQ ID NO: 424335 - DNA, 477 bp, Homo sapiens
  misc_feature (1)...(477): n = A,T,C or G
acagcatttaaagaaaaaaatgacaaaaaattcaaatttgatgaaaataatraactcacagaatctcaactaagaagctcaatggagcccagacaagataaatataaagaaaaccacaccaaggcacatcataatcaaaacttgaaaatcagaaatcttaaaagcatccagagaaaaaaatattacatacagagggacaaagattagaatgaaaagaaactttctcatcagaaactagcagccaaaatcaagtggaacatttttaaagctaagaagaaaaaagaaaaccaaccacttatcaggttagaactctaaacccagggaaaatatattccaaaaataaaggtgactgatatatgctcaatgtgtataaaaacattatgctaaatgaaggaagccagtcacaaaaacaacagattgtgtaattttatgtacattaaatgtccagaatagncaaatctatagagacagaaagta

SEQ ID NO: 424336 - DNA, 606 bp, Homo sapiens
  misc_feature (1)...(606): n = A,T,C or G
ggaatcattctgcatccatggatggatgaatggataaagagatgtggtatatgtgcgctatgaaatactatttggccttanaaagaaaggaaattttgacattcatgacaacatagatgaacccagaagacattatgctaagtgaaataaggcacagaaagacaaatatgacatgttttaacttatatgtagagtcgaaaacaatcaaattyataggaacagagagtagaacagtggtcaccagaggctagggagtgggaggaatgggaagatgttggtgaacggatacaatgcttcagttaggaggaacaaataagtatttcttaaaaaaagtcttcaatgcttaataaatcagaccattctaagttaaattatttgccttaaaagttgctattttaataaacctttgattaaaaaaatgtggtctttgctttccaaacatatacgtattttttttttaattgttgagacttctttggccaaccagtttggtcaattattattttttaaacattttgagtgtgtttgaaaagtgtaagtatcctctacttgttggacgtataattctttacatatattttagaccaagttgttaattatattgta

SEQ ID NO: 424337 - DNA, 549 bp, Homo sapiens
gaatactacacagccataagaaagagtgaaatcatgtccttttcagtgacatggatgcagctggagtccattatcctaagcatattaatgcaggaacagaaaaccaaataccatatgctctcacttataagtggggsctaaacactgagtacacatgtacacaaagcggcaaacagacactggaacttacttgagattagaggatagggggaggatgaggactgaaaaactatcaggtactatgctcactacctggatgacgaagtcatttgtacaccaaaccccagtgacacacaatttacccatgtaacaagcctgcacatatggcccctgaacctaaaatgaaagttggaaggaaaaaaagaagttgtatgctacataaagaaaataatctccagaatgagtttactttctattttttgaattattttaactctaagaagagctttataaatctatgtgctataataaagaacttttgaaattttcaaataataataatagtagtgtattgaggaggttggaaagaaatcggaaccctcacacagc

SEQ ID NO: 424338 - DNA, 547 bp, Homo sapiens
gtggtggtcagcaaaggttttctggaataattgtggcctggactgaaacctgaagaaagtgcatgaataaaagcagtttaatcaaacattgaggagtttggatttcatcctgaaagctatcaggagcctggaaggattataagtaagaagtgacatgattgggtttttattttagatctctatctcctggatggattggaacaagggagtcctgagagctgggagatgaaatgtgaggccatcacaatycagggggaaacattgaggggacttgggtgtagagataaggggatagatttctttgctattaagaatgtccaatggactggacatggtcctaagaatctaaaaaaaaagaaatataattgccttttggaggttaaaatttgaaattagcataggatggaagagaaaagatatgcaaagttagctttaagacacaacgttactcccaggccagtaagtgctgatagtaagctccttatacattaacttatccaagataaaatgtcaaccgaaagtgtagggaatcggcaatgaaaaagag

SEQ ID NO: 424339 - DNA, 597 bp, Homo sapiens
atgaacaggttacatttcatgcttatgttgaaagccccagtgtctaacagcttactttgatcagggtgaacagcacctgtggttatctgccaaacgctactgatccctcctgtcctttgtagagaatcttaattgcattagcctgctgggcatgatgcaaggatacagtacagtattctggaatgctctagtttcaaggacttcctcatttttagcacacataaaaccaatctcttaaacattaaaaagacatacttagtgccctgataacacatygctaaatcctatatctaaaatgggatttgaataacaatgctacaacatggtcctgtcctctctgtcccttaggctcttatttagcttcatattccaggaatatcccaggatccagctttcacctgtaatgacaaaactgcgataggccccaagaaagagaaaaaagctaatgcgagcactggagatgagctgggtgtgatatgacagtcctacctttaactaatagtctggtgaccacaaacactgccttaataaggccctgcacttaaatgtcaattttatttttgtttcctgcccagtcagttggaatcaaatgatagt

SEQ ID NO: 424340 - DNA, 597 bp, Homo sapiens
atgaacaggttacatttcatgcttatgttgaaagccccagtgtctaacagcttactttgatcagggtgaacagcacctgtggttatctgccaaacgctactgatccctcctgtcctttgtagagaatcttaattgcattagcctgctgggcatgatgcaaggatacagtacagtattctggaatgctctagtttcaaggacttcctcatttttagcacacataaaaccaatctcttaaacattaaaaagacatacttagtgccctgataacacatcgctaaatcctatatctaaaatgggatttgaataacaatgctacaacatggtcctgtcctctctgtcccttaggctcttatttagcttcatattccaggaatatcccaggatccagctttcacctgtaatgacaaaactgcgataggccccaagaaagagaaaaaagctaatgcgagcactggagatgagctgggtgtgayatgacagtcctacctttaactaatagtctggtgaccacaaacactgccttaataaggccctgcacttaaatgtcaattttatttttgtttcctgcccagtcagttggaatcaaatgatagt

SEQ ID NO: 424341 - DNA, 560 bp, Homo sapiens
tcttgttagcctctctgcctgactttatcactaagatgggtaaaatttctttctcctctgattagtctattactagactgatggcatgactacttctggcttccccacttttcttatttattgggaaccatgactatcagagccaaagtttcaggattaagctaaaataacacaagccacaarttttgttcagtttattttataacagcagggtccaagtcatattttgagcaccttaatgcaagttacaagtacccagaggatgtgcactcaaatacacactaaggcatttgtaaatgaaagttctacaagacatcagcaaagcttgtcttgctgaaagtagaacttcactgaaacaaatgattgccattcatttaaaaaatatatggagatcttaaaactatcaaggcagccccctttgaaaagtaatgacaatgtcagttattcctttccaggcagaattgaaatgtaggctagagtgtaagtcttctcatagaaacagagaaaatcattgttctaaaatacttttcacctctttttttcctcgagtgcaaattgca

SEQ ID NO: 424342 - DNA, 560 bp, Homo sapiens
tcttgttagcctctctgcctgactttatcactaagatgggtaaaatttctttctcctctgattagtctattactagactgatggcatgactacttctggcttccccacttttcttatttattgggaaccatgactatcagagccaaagtttcaggattaagctaaaataacacaagccacaagttttgttcagtttattttataacagcagggtccaagtcatattttgagcaycttaatgcaagttacaagtacccagaggatgtgcactcaaatacacactaaggcatttgtaaatgaaagttctacaagacatcagcaaagcttgtcttgctgaaagtagaacttcactgaaacaaatgattgccattcatttaaaaaatatatggagatcttaaaactatcaaggcagccccctttgaaaagtaatgacaatgtcagttattcctttccaggcagaattgaaatgtaggctagagtgtaagtcttctcatagaaacagagaaaatcattgttctaaaatacttttcacctctttttttcctcgagtgcaaattgca

SEQ ID NO: 424343 - DNA, 560 bp, Homo sapiens
tcttgttagcctctctgcctgactttatcactaagatgggtaaaatttctttctcctctgattagtctattactagactgatggcatgactacttctggcttccccacttttcttatttattgggaaccatgactatcagagccaaagtttcaggattaagctaaaataacacaagccacaagttttgttcagtttattttataacagcagggtccaagtcatattttgagcaccttaatgcaagttacaagtacccagaggatgtgcactcaaatacacactaaggcatttgtaaatgaaagttctacaagacatcagcaaagcttgtcttgctgaaagtagaacttcactgaaacaaatgattgccattcatttaaaaaatatatggagatcttaaaactatcaaggcagccccctttgaaaagtaatgacaatgtcagttattcctttccaggcagaattgaaaygtaggctagagtgtaagtcttctcatagaaacagagaaaatcattgttctaaaatacttttcacctctttttttcctcgagtgcaaattgca

SEQ ID NO: 424344 - DNA, 560 bp, Homo sapiens
tcttgttagcctctctgcctgactttatcactaagatgggtaaaatttctttctcctctgattagtctattactagactgatggcatgactacttctggcttccccacttttcttatttattgggaaccatgactatcagagccaaagtttcaggattaagctaaaataacacaagccacaagttttgttcagtttattttataacagcagggtccaagtcatattttgagcaccttaatgcaagttacaagtacccagaggatgtgcactcaaatacacactaaggcatttgtaaatgaaagttctacaagacatcagcaaagcttgtcttgctgaaagtagaacttcactgaaacaaatgattgccattcatttaaaaaatatatggagatcttaaaactatcaaggcagccccctttgaaaagtaatgacaatgtcagttattcctttccaggcagaattgaaatgtagkctagagtgtaagtcttctcatagaaacagagaaaatcattgttctaaaatacttttcacctctttttttcctcgagtgcaaattgca

SEQ ID NO: 424345 - DNA, 600 bp, Homo sapiens
aaacattcaatctgctgtctccatcactgaactagttctactctcactaactctacccttgtaatagactatgccaagcacaattaaactaacattttgtgaatgacaattatactaagtcctttcaccaatagtatatagtctcactgaaacataaatatccttctttgttgagggaattttaggtggtgaatcagagatgattgtacacatctattcccaactctatatccaggcttcatgttggtgtttgaaattggccatggaggagtaacaacaccatataaactggcaaatgctacaaataaagccctcttcctaccccaagctccagagccagagatttaacatttatcagtacacaraactggttttatccttattttatgcaaaaagaaactgagattctaagagtctagttacctgcccagttacagagccagtactcaagtgttttgactctaggtcaagtgttatttcccttataggacactcttgggtccttgctctgtgtcaggctttgcaccaaatgttttacatggattttctcttctaagccttaaaacaattctgcaaaggaagtatgattgttattctcac

SEQ ID NO: 424346 - DNA, 615 bp, Homo sapiens
tttggtaaaatcctttattatccagaatggtgttgttagggcatgaatttgttcagcctgtgacagtttctggctgatatgaaaatatttatgggaaggctgctaccttattaaaaattatgaacatacttgagagaaagactatggggagaatgaagtccctagataaggcttccagcaggggtcagggagtcaggaaaggatgctgtaattgtaagatctatacagacttgcaattgtgcctggagcaaacactttcctggattaaagaaaaaatgtgaagagtagatgagacacatatatatgaatactacataagacatggagctcgtctcaccacttattagttattaatatgtgaccatggttagtggcttattcccattttacagatatgtatgtcaaggctcagagcggctaactccaacctcatggagatgctgtggggattaaatttttgagcatkcatatatgtgtgctgctaaaaacccctctcgcatctctgtcagtaccattaattctctgagtcccgacaaaggcattccttgtaggttctgtttatcacacatgtaccccatgtcctctcatcactcatgcttagtaagcctgagttag

SEQ ID NO: 424347 - DNA, 594 bp, Homo sapiens
tgtcgttcatccaggcattactattcagtgttaatcccttactttcgagctgtttaaatagatttcaaaattaatgactgcagaagacagtaattttattcttttttcaagatggtttttaatttctggcctgagaacaagcttataaatggcagaccaccttagacttgtgatctctctgcaagctggtgatgatatgacagttatcaattaaaaagtgaggaagtaagagacttagagcagaaacatgtagagcagaaacaagggttttacagtcatgaatatgaccttactgtttttttcccggttgtcttggcaagcattcayggatgttttcctgatgtggaaatttgaaataattttttcacacagatagagggagtagcactggacagtaaatatattcaacaagagggcaaactgatacataaaggttgggatcctgagaagagaggaaatgtagaagctttctttgagaagagctttaaagaaagtatttcaactttttgttgatagctgttagtccagaagagccaaccatttttgtttagttactcattttttaaagtgacaaagaaatatgcacatattgtg

SEQ ID NO: 424348 - DNA, 552 bp, Homo sapiens
atccactggaaactagactgcccaaaaggtaatacttacccaagcttcattttaagtttggagaggccaaggccctatcttcccactttctccttctgttcctaacctctcactgccccctttccactaatgggttaattgaattggctctttggtaaccctcaggacccagccctctttcggaggggattgtctaaggtgtaagctttttcatgcatttgtcttctccagtccttatcaccctactgatctgtgttactccccgccaatttatgcccaaatttccttctgaactccctgaaccaaatcacaatgagaaacttctacatcttcattttacatgctgtctccactayctgcattgttgtggctcaattccttcagttctatcattctctgccctttttaatacctccctcatttgctgaagaccttattcctgttcttcagcatgcttcactatgccttaaatgtgccatccttctggtttcttatcacattgcacccacttgtttgctgtgcattcatttcaacaattatttattgattact

SEQ ID NO: 424349 - DNA, 590 bp, Homo sapiens
ttcccatttaatagtgatacatgtgtagagccctcctttaacaatgatttgcatttttgtctgtaaagtgcacttttgttgttttgacaaattattttagcatttagattgaactagatgacattgccatttttataggtcaaaatgatcaattactgacaatgtcatctgtttcaatgaaatagattgatattatcagcaactgatagcctaggagtgttttctcttgaccagtaactggcaacatgactctttccagcttactatacatctggctttcttgtagcttactggtgatttgttaatatccagctatggagaagtggaaaaattaaaatttaaaaagcatgccttaagaaaaacatttattattgcttttctctgtttatatttttgtagacactgtactgagtatatttrtctggattctctagtttaatgtagaacaaatattttacaaggtagaaactcctctctttgccattttgtagggaataaccacagagacagtaggtcacttgtttaaggtcacatacagctagtaagtaggggagccaggatttgattctagggactttggccccatggcc

SEQ ID NO: 424350 - DNA, 603 bp, Homo sapiens
ggataggggagagaaaggaaatgaaragaagtttgtcaatgtgtacaaaagcacagttatgtagacagaataagttctagtatttgatagtacaataggaaaattaaagttactgataatctgttgtgtatttcaaagtagctagaagagaataattataatgttcccgacacaatgcaaagataaatgtttgagttgctgaatatgctaattaccctgatttgatctttacaaattgtatacatgtatagaaatactactttgtatgccataaatatgtacaattatatgtcaattaaaaataatagtaaaaaactaaaaattaatgaaagatattccattttgttcttacctctatttgttcaattattttttcatcttctggcacactaggatctataacaatgacaatatcttcaaagccattattattcagcttaatgaaggaagtatttgactggtgcagcaggcacagaactaagaggaaaacaaaacctctgaataaccccattgttcctctctagttattcctggctcaaatgttggtttgttcaagaggcttttcttttctttctctttatatacgttcctaaaacttaccag

SEQ ID NO: 424351 - DNA, 603 bp, Homo sapiens
ggataggggagagaaaggaaatgaagagaagtttgtcaatgtgtacaaaagcacagttatgtagacagaataagttctagtatttgatagtacaataggaaaattaaagttactgataatctgttgtgtatttcaaagtagctagaagagaataattataatgttcccracacaatgcaaagataaatgtttgagttgctgaatatgctaattaccctgatttgatctttacaaattgtatacatgtatagaaatactactttgtatgccataaatatgtacaattatatgtcaattaaaaataatagtaaaaaactaaaaattaatgaaagatattccattttgttcttacctctatttgttcaattattttttcatcttctggcacactaggatctataacaatgacaatatcttcaaagccattattattcagcttaatgaaggaagtatttgactggtgcagcaggcacagaactaagaggaaaacaaaacctctgaataaccccattgttcctctctagttattcctggctcaaatgttggtttgttcaagaggcttttcttttctttctctttatatacgttcctaaaacttaccag

SEQ ID NO: 424352 - DNA, 623 bp, Homo sapiens
aagactcccctgagcaattcagccagtcatttcacttctctgaacttttgtaccctttttaccataacaggaaatcttctagatccaggatttaggagttgagattttgaatatccatatgagagaattttcttgctggaaaataccttagagaccatctaattcaaccactgatgttacagatgagaacactgatgtccaaggaaggtaactgacttaatggcaaaacttaaactggagacatttgacttttagccccatgtgatctcttctcatggcttcctgctcaccagcgctgcaccaacctctccttactctctctagctgctgcttctgctgctgctatttgtacatcagctgtgccctgagcttaaggcatccctttcttcttagaagctgtaagcttagcggatgctacagaaatattctaacatatggctcttacatttaaatatttckctttgtataatcagaagaattgaaaaagccacaaggagaaatagcctttgaacaaaattgctttgaagagagtttgtccaaagaatgttatgccaggagaaagtacttatagatttatcaattcatagtctaaaatccattcttttttatatataagaaatcct

SEQ ID NO: 424353 - DNA, 486 bp, Homo sapiens
aaattacaaggcatactaaaaagcaaactacaatttgaagaaagagaggaaggatcagaaccagacacggcagggatattggaatcagaccagaaattttaaacaaaaatgattaatatactaatggacaaaggaaatagcatgcaaaaccagatgggcaatgtaagcagagaggtggaaatcctaagaaagaatgaaaaaaaatgctagagataaaaaaacattgtaatagaaatgaaggatactctggtgtgcctactagtagattggacacaatttatgaaacaatcactaaggttgtggctatatcagtacaaacctccaaaactgaaaagcaaagagaacaaacaatgaaaaaaaatagaaaagartgtccaaggattgcaagacaactacaataggtgtaacataggcatgatgggaataccaggagaagaaagagagaaaggaatagaagtcatatttgacacaataaagactgagaat

SEQ ID NO: 424354 - DNA, 549 bp, Homo sapiens
ctcagttaaaaccacgaaaggcaggaaaagagaggaagacaaaaatagcaacaaaagaaaacaaatagaaaaatagcaaggaaaacaaatagaaaaatagtaacaaatatggtagacagtaatccaactacatcaataatcactttgaacatcaatggtctaaatgtaccaattaaaagacagagattgtcagagtgaatcaaaaaacaagatccatctagatattgtttacaagaaactccctttaaatataaagacaygtaagcttaaaagtaaaaggatagaaaaaacttaggaaactagaaaaaaagggaaaatttaatctaaactgtgcagaataaaagaaataagtagaacaaaaaacaataacatttaaaacaggacattaatagagaaaatcaatgaaaccaaaatctggttctttgaaaagaacaataaaactgataagtctgtagccaggctaagaaaaaagagagaggacataaattgctaacatcagaaattaaataaaggatattactacagatcccatggaccttagaaggataa

SEQ ID NO: 424355 - DNA, 593 bp, Homo sapiens
aatgtaccaattaaaagacagagattgtcagagtgaatcaaaaaacaagatccatctagatattgtttacaagaaactccctttaaatataaagacacgtaagcttaaaagtaaaaggatagaaaaaacttaggaaactagaaaaaaagggaaaatttaatctaaactgtgcagaataaaagaaataagtagaacaaaaaacaataacatttaaaacaggacattaatagagaaaatcaatgaaaccaaaatctggttctttgaaaagaacaataaaactgataagtctgtagccaggctaagaaaaaagagagaggacataaattgctaacatcagaaattaaataaaggatattactacagatcccatggaccttagaaggataataaggaaatactatgaacagctttatgcccacaatttgataactagatgaaatggaccaattccttgaaagtcacagtcagccaagactcacacargcacaaatggaccattggaataggcctgtatctgttaaggaaattgaatcaataattaataacttcctacagaaagcaacaagtccagatgggttcactggtgatttata

SEQ ID NO: 424356 - DNA, 473 bp, Homo sapiens
aataggcctgtatctgttaaggaaattgaatcaataattaataacttcctacagaaagcaacaagtccagatgggttcactggtgatttatacccaacatttaagaaagaaattaaaccaattcttaacaatctctttcagaggatagaagcagaggkgtccaactcattctatgaggcaaatgttattctaaaaccaacaccagacaaagacattataagaaaaagacaattacagaccaatatctctcatgcaaaagtcctcaacaaaatattagtaaagtggatcaaaaaatgtataaaaagaattacacaccatgaccaaataagatttaccctaggtttttatccctttatacaaggttgattcaacactggaaaatgaattaatctaatcatcacatcaataggataaaatgggaaaatcacatgatcatatcaatagatagaaaaaaggatttgacaaaccaaaca

SEQ ID NO: 424357 - DNA, 533 bp, Homo sapiens
ccaccagttccagatacaaagagatacctcatacaacaagtagascagtactactggtactatttactggtatcaatagttgcaatactactgtcgctgctaactcactgcactccttgtcgatcagcgaaaggccttgattcctacttacaaagaatatagaagctcctagacatgaactccattaaatgcttgccttcatgactatttccttaatcaccagagaacactgctcattacgtttgtaaagggtaatgtctgtgcacttgtgctctttatcttccattctctctaaataccttgatgttctatttgtctcctctcttttttatgtcctcttctctactggtttcctactcctctccctggccctcaccacccaccaacatagaaaaatgatacaaacctttcttagaaggttaaagaaagtgcagtaacttggatatattgttacatctgaagaacaatttgaaatacttgtattgctagatctctctgtaatattttaggttgttgctgatcatccctatttg

SEQ ID NO: 424358 - DNA, 533 bp, Homo sapiens
ccaccagttccagatacaaagagatacctcatacaacaagtagaccagtactactggtactatttactggtatcaatagttgcaatactactgtcgctgctaactcactgcactccttgtcgatcagcgaaaggccttgattcctacttacaaagaatatagaagctcctagacatgaactccattaaatgcttgccttcatgactakttccttaatcaccagagaacactgctcattacgtttgtaaagggtaatgtctgtgcacttgtgctctttatcttccattctctctaaataccttgatgttctatttgtctcctctcttttttatgtcctcttctctactggtttcctactcctctccctggccctcaccacccaccaacatagaaaaatgatacaaacctttcttagaaggttaaagaaagtgcagtaacttggatatattgttacatctgaagaacaatttgaaatacttgtattgctagatctctctgtaatattttaggttgttgctgatcatccctatttg

SEQ ID NO: 424359 - DNA, 533 bp, Homo sapiens
ccaccagttccagatacaaagagatacctcatacaacaagtagaccagtactactggtactatttactggtatcaatagttgcaatactactgtcgctgctaactcactgcactccttgtcgatcagcgaaaggccttgattcctacttacaaagaatatagaagctcctagacatgaactccattaaatgcttgccttcatgactatttccttaatcaccagagaacactgctcattacgtttgtaaagggtaatgtctgtgcacttgtgctctttatcttccattctctctaaataccttgatgttctatttgtctcctctcttttttatgtcctcttctctactggtttcctactcctctccctggccctcaccacccaccaacatagaaaaatgatacaaacytttcttagaaggttaaagaaagtgcagtaacttggatatattgttacatctgaagaacaatttgaaatacttgtattgctagatctctctgtaatattttaggttgttgctgatcatccctatttg

SEQ ID NO: 424360 - DNA, 641 bp, Homo sapiens
aatattgactttttacacagaattgtttatgtcacttattgttgatgaattaaattaaaatacgatagatattttttctatagtagcttttttgtggttaatggtttaaatcatttcaggtggtgatttttttttttcttttcaaacagagaacgagctgggtaaggtggcttacacttgtagtcacagcattttgggaagctgaggtgggagaatcacttgaggccaggagtttgagaccagcctggggcaacatagcaagatccctgtctctgttatttaaaaaaaaaaaagatagaaaagtggtaagaatttaaagcatctaaagccacttttgggattctgattcaaagtctcactaggttctcaaaccatctagcccacagtgacaaagattagcaagatgtcagttctcctgatttaagaatctattcagcagtaaaacagaacaacaaaacaaaaaactccaactaactagacaactatgttatgttaaattagcaaatttgattgacacacattatccaatgttaaaacagaaaaacaaaacagacaagcaagctaggccatttaactacatactttaagttagtaaatttgatggaygcacagtcataaaaattccaaagtcaatagctatg

SEQ ID NO: 424361 - DNA, 514 bp, Homo sapiens
taaggccattgtgggtcaatgatggcataaggcaaaaatttggcttattttatcacctatgacaatacagatccatttcgcaataaactttcctataacccagagtacataagaatgttttttctttgttgttctctactttctatcttatctatatgttaacatttacctcttcttctccaaagtcacatggtatgcatctctggtttactaccatatcccatgctacattttactgagttcacccaaatgggaaattaaaatctcagtgagtgacttattgaaaaatttccaggcgaaatccatggtaaccatgttctacgaagttgggacctcartctcatttgtcacaaagtggccttctcatcagctaagtgcttggtttggttttgtaacatttagaaaaggactccaaactgacccttgcagagcttatagcttgcagtgaacgccaagaatgagttctcagacgattctagctgagcggagcgggggaccacccttctgagagaga

SEQ ID NO: 424362 - DNA, 514 bp, Homo sapiens
taaggccattgtgggtcaatgatggcataaggcaaaaatttggcttattttatcacctatgacaatacagatccatttcgcaataaactttcctataacccagagtacataagaatgttttttctttgttgttctctactttctatcttatctatatgttaacatttacctcttcttctccaaagtcacatggtatgcatctctggtttactaccatatcccatgctacattttactgagttcacccaaatgggaaattaaaatctcagtgagtgacttattgaaaaatttccaggcgaaatccatggtaaccatgttctacgaagttgggacctcagtctcatttgtcacaaagtggccttctcatcagctaagtgcttggtttggttttgtaacatttagaaaaggactccaaactkacccttgcagagcttatagcttgcagtgaacgccaagaatgagttctcagacgattctagctgagcggagcgggggaccacccttctgagagaga

SEQ ID NO: 424363 - DNA, 587 bp, Homo sapiens
ttaccagccaccccaacatccatgtctgtcttactttctcagaagtttccccagttgccacagatacataagaaaccgattctctgcagttgcatgggcttccacrgctgcaagcaggatagatgcctgttgatccaatctctttagctgtccccaggtaatgttaggtgacttctgagtcatcattgtcattattggttgattctccgacaggtcctagtctcgagaacagagccccatattcccccttttttgtttattaagatatattttaagagtttgatgagcttatttaacaatggcctgactggctgagttagaaggaataccagttttgtgttgtatgtaccaaagttgcaatgcatatgcaaattgagcactaagatagtaaggtccattatcagttattatagtgtgtggaaagcttagagtcataatagagttaaacaaattagcaaatgcatctttagtttttttctcccgtctggggggtagcatgtgtcaggcctgtataagtgtccatggtaacgtggagaaatttaaaacttccaaaggatggttactgagtaacatcagtttgccagata

SEQ ID NO: 424364 - DNA, 482 bp, Homo sapiens
agggtcaaggtttgtgagcttgcttgcagactgtatttccaagtgccaacctgaccaaaacacatgtaaacatttccaatgaataacttcaggtgacacagacctgacttcaatgtcacgtacrggaaaaccctctgatataagcatgttggaagcatatctaagaagaggtgtgcatgtttgatactctgtcagccacggggagcttcagtgtgtttgaactaactatatcattcccattgtcaagaaaattccacggcgggtgggagggggatggtgaggtctgaaagctatatgcttattgttgccttggttttataagagatgagtctctgagataaaggaaataacttttatgatcccaaaatgtcgaggatcattttgcatcttgattactatgtaatttaaaggttctccatttagtacctggacaaaatatcacctatttcctttgtctttacttgctgacatactgagtgatt

SEQ ID NO: 424365 - DNA, 530 bp, Homo sapiens
gcatgtttgatactctgtcagccacggggagcttcagtgtgtttgaactaactatatcattcccattgtcaagaaaattccacggcgggtgggagggggatggtgaggtctgaaagctatatgcttattgttgccttggttttataagagatgagtctctgagataaaggaaataacttttatgatcccaaaatgtcgaggatcattttgcatcttgattactatgtaatttaaaggttctccatttagtacctggacaaaatatcacctatttcctttgtctttacttgctgacatactgagtgattttcattggatggakattttttttcctcgttctctctttgattcaatactgactctccttttagcaaccaccaacatttaaaatgctacaattattctgtaaaaactttattttatcttgttgaattatgagaaagaaaaaaagctgactccataccttagcaatgcctgggatttggaggtaggccattttggtgtttttgtccactacaaagccaccttgc

SEQ ID NO: 424366 - DNA, 568 bp, Homo sapiens
cttctctgtttgtctaagccttacccatccttcaaaattcaaatattactttctccatgaaggtttctctgctgtccatctcatttaccagttgtaaaaaatctccccttcctctgatctcctataggattttatttctatcaatccttcgacattcatcatattgtgcttcgccctatatttattggtatatgaagctcatcttatttattagactatgaacccttaaggggactcactgtgacttattttttacccacgcatggattgtctgaattacctaaytgctaagtcaggtagtattgcaggccctgtggagataaatgacataagccaaggccagcttgtttggaatagaatgagggagctgcagagtgggagtgaggtaaggaaggattaacaaggcttttttagaaaatgtgattttgaggattatctcctaggtagttattgtctcagagttagcacctattagaagacagagtgggctggtcatagagccagatttcctagtttcacaggtagatcacaagctggcaagtggagaaagcgaagggctattagatct

SEQ ID NO: 424367 - DNA, 568 bp, Homo sapiens
cttctctgtttgtctaagccttacccatccttcaaaattcaaatattactttctccatgaaggtttctctgctgtccatctcatttaccagttgtaaaaaatctccccttcctctgatctcctataggattttatttctatcaatccttcgacattcatcatattgtgcttcgccctatatttattggtatatgaagctcatcttatttattagactatgaacccttaaggggactcactgtgacttattttttacccacgcatggattgtctgaattacctaattgctaagtcaggtagtattgcaggccctgtggagataaatgacataagccaaggccagcttgtttggaatagaatgagggagctgcagagtgggagtgaggtaaggaaggattaacaaggcttttttagaaaatgtgattttgaggattatctcctaggtagttattgtctcagagttagcacctattagaagacagagtgggctggtcatagagccagatttcctagtttcacaggtagatcacaagctggcawgtggagaaagcgaagggctattagatct

SEQ ID NO: 424368 - DNA, 558 bp, Homo sapiens
ataagatccaaggtcctttgcctcatcaccctgaagccacatgagcttctcccaccccacacccagactccaccccagggggcatcctaaattccactggtgtactgcacwctctctctctctcgctcatctgaatggaagatgcagaatcagaggttctctcttcaccaccacgccatctggcattagtcatctcccctagggtcttgcacagcaagggtttggtacagcacatcagtgatttcattgtctgttttcctcccttatttgctcccttagtcaaagcttgggtgggtgacaggggtaataaaacacagatgcacgcaggcatctggagaagtgtttcatagctgactgtgtatgcaatagaaaccactttcagggaactgatattcaaagtggaccaaaatggtcagagagacagaaagcacttgaggaaatggtcaagcccattgtccacatcaggccatgtgagctggaaactacatattcctgctgccacatgggaaactggaacagcactattgagtgtgatgtgcccaaatagcaggcttaggg

SEQ ID NO: 424369 - DNA, 593 bp, Homo sapiens
agggtaaggggaaggaagacaggactttatccttgacttgcacacccagcttgtcccagagataatccactgctcactgatgatttctctaaactttgattctcccttggagcacttggagtaaaagcctcactaaattcataagaatctgggggagggggtgagaacaaggtacttacagaatcaacatgttgtgcaaacattatagaagccttctccgtctggcgggattggagaacaaactcacatcctttttcatagagtcctgtwactttattgaatgtgcatcttttggtgtaacagctgcctccctgacacttctttactacatttgtaccagtaatacctgctgaacatctgaaaatataggaaggttagatgtttaggtgatgtcgtcatttcaaagggtcagagtctatgctcagtttctgacagattgcctttctgtgattttcctctcatgatccaagaaacaaggacatcccatcatagcaaaagtgttaaattgtcatcagagtcatttctgtttgccagaaagtatctgaggggattgcaaaaatggtatcagaatgtatttctacgcagcagaaaag

SEQ ID NO: 424370 - DNA, 511 bp, Homo sapiens
tctttactacatttgtaccagtaatacctgctgaacatctgaaaatataggaaggttagatgtttaggtgatgtcgtcatttcaaagggtcagagtctatgctcagtttctgacagattgcctttctgtgattttcctctcatgatccaagaaacaaggacatcccatcatagcaaaaktgttaaattgtcatcagagtcatttctgtttgccagaaagtatctgaggggattgcaaaaatggtatcagaatgtatttctacgcagcagaaaagccaagtctggcttagggctgttgttagcattaatacagactaagtcctcaggcacctttgaatctattcccttcatccctagcaggtcaagagccctcttttatttcccacaaaagatttgctgacatttcttgtttgtttgttttctgattagtttatttcacatggtttttgtagagttctggtatgttcataggtattttaaatgtttccatgtattaggtatttatgactttt

SEQ ID NO: 424371 - DNA, 549 bp, Homo sapiens
tgttcataggtattttaaatgtttccatgtattaggtatttatgacttttgttgctattatagttggaatgctttccccctacaccttattgtttaattgtattttttaagtatataaccatgcatgaccggtatagaaaatttggaaaatggcaaaaagcatgaagaaaagaaaaaaacatgtctcaccatcagaaatgagctactgttaccaagttgaagcatttttcactttgtatatatcaacataacactcactgcacagatagctttgtttcctgctttaaaaaaaacttagcatatttaattttttaatattattatttaatatttttcaaaatgtggctgcgtgtggtgactcacacctgtaatcccagcactttgggaggctgaggcgggtggattgcttgaggccagaaatttgagaccagcctgggcaacatggcgaaacccaactctaccagraatacaatgaaaattaggtgggcatggtgttgcgcacctgtaatcccagctactcgggaagctaaggcacgagaattgcttgaa

SEQ ID NO: 424372 - DNA, 538 bp, Homo sapiens
aaagcatttccctcttagttttagctgtttgttgttgtacaagaccttcttcaatggtatagatacccctgccaggacaggaagtcttcttcctttcccttctgctacataagaggtagcaagaaatctctgaaaggatcccttgaattgggactgataaaatgcaaggttttctcccatcagaaggtcagggttgttcttatatcagagatttgcatctggggctccttttaggatcacagggaagggggttcctattaggagaataaaaggagagtctgactcgtgccaagggtaaaatcaggcaaaggatctgtgcatctcacaatatctgtcaaatgtagctgactctgccttactatagaactaaataattttcagtgacataatccacagcagtacatatcaatttatcatttatcagttgccaacagtatatcactctgagttatgtgcattgcattcattatcttatctgacacaagaatcctaatggttaacttkttattatttccattttacagatgaagaaactgag

SEQ ID NO: 424373 - DNA, 577 bp, Homo sapiens
ttggcaatagaaagttggggtcagggctggcgtggggcagggaatggctcaggtctctattccagaatggcagagagcagcctttgccatgggcagctgcatgcaaagactgcccatccaccacagcgctcaccgagtgtgagtgtggccagctccacaaaarttcactccaagaccagagcaatagctccaggagcctgcctgcttcttggtcctgccttccttttttcacagagcatggcatgaccaggcacagaactgtgtccaaatctgtccttcccaggccctcctatgctccactctcccccaatctactaccagctcagcctcctgcagctgcgatcccagaatgctctttccaaaatgttaagaatggatagcacccaatcgtgtctctcacactaaagcaagtcagttcatctttctgagcaggctggctgaggggcaaacacgctatacagatggagcccactaagcaccttcttctccagcttatttctgtttatttctgcatccaacttccctggcgtggaatggtttcctttaatataggtccatgctacatgttccactaaaa

SEQ ID NO: 424374 - DNA, 545 bp, Homo sapiens
tttgtgtgttttcactttgacatggctgttttgatgcctgacgcttccattacatcatatggatcttgccagaatggttgctttaaatacttcctagttttacttgaataccaaccatgtgcctgattctcatttcaatggcaggagggattcaaatgaagcagaaggcaaggagattaatgawctcaaggggactggagagttttgccaagagctggctaaggaaatacattcaccatttcagaacgcatactacctccattctttgtttgacatttcctggtttagagcttcagattacttgctggagacatgtttaaaaatggaaaaagatcccactgcaaacacagaaatatggtctatccacgttaaaaaggtcattttgatcatttccccctgctgtgttgtaaaatgaattttctgtctgtttcacttggcgaggggaggaagtgatatttgttgctcactgatcagaaaggccctcacccaactgctgtgagcagtcataccctattttctttttcagatggtctgagggattgtta

SEQ ID NO: 424375 - DNA, 600 bp, Homo sapiens
atcttacttgatggctgttcatggcacttctctcaatctctgccttctgctacctgcctccctccctagaaatgtataagctccacagatgagtaataactttatctgtcttggccagaacatttatgtgtgatggggacagagaaacatgcaataaaaatgtgttgaatggatgaaaaaagaaaaaagtaccgatataatttcccaagggtctattcttccagtaaacacacytaagatgttagccccctaaatgcatctccaaatatgtacaggtcacgcatttagattatccttaaatggtaatgccataagaaataattaaaggaagttacagatataactcttcatttattatttttaagcatctactcaacacttatatgccagaccatataaaaggagaaaagaagatgagcatgtttctgtccctgcttctgataaactcacaaggtcatgggggactgtaataattaatattaatttagctttttacagttttcaaaaatattttccaaaattattacacttgaaaataagggcatatagccaacctgggagatttaggggagtatctatcttgtttctcttggaaatatc

SEQ ID NO: 424376 - DNA, 591 bp, Homo sapiens
tgtctgcatgtaccatggtttatccatttgcccactgaaggatgtctaggttgcttccaagttttgggaattataaataaagctgctataaatatccctgtgcagtgttttgtgtggacataagttttggagatctgtatttttaacaagtgatccagagacagagttggggccactagaccagataatcatttgtccagaggctgagaggggacaggaagactctctagtccagaaattctagggttccatgactgttgtatgtagctcttggatcaggctctggtttggactaggtgttaactttcttctctctgggatccttcccatcccccaacagcaaaatcactcttttggccaaatgttcagtgtcgatgtctattgctagcatgaaattgcctaatataaagagcaagttttctcgggctggagggagagtgggctgaccagtttttccaagtccaggactgacagggatcaaatcctagctctaccatccattacwtttgtgacattgagcaagtaacttaaccattcaatgacttcatttttccttcagtaaaagttgctgatagtagtacctatctcctg

SEQ ID NO: 424377 - DNA, 448 bp, Homo sapiens
attgactatataccatttcattcaacttactaactttagattgcaygatgtaattccaatagatatttaggcttcctagaaaatactcattttaacattgtagccatcaattcatgtttctacaaaaagaacactactatgtaaccaacaattagtctaaaatgggaattaaagaagaggcaacaaccaaaataaattgaaatccacatttattgatgagagatatatacacaaaagttaaaacacttagtgaaatattggattcacaggttatttccagtatataaagaatatccagttattttacacgtgaaatgttacagtaatcagtccacattgtaagaaagcttagaaagctaaaggcgaaaacaaaagacctcaactacccaaaatgtgcttcatcaacaaggcattttctagtagcatatatgagaaacaattcaaaaat

SEQ ID NO: 424378 - DNA, 582 bp, Homo sapiens
agaggaagtctatgaatatatataagaagggaacctaagctagcctgggactcagaaatgggcttcytgagaaagtgatgtttaaattgagacctgaataatagagtaggagttggtcaaataaggagggggtttatttatttttatagagatgaggtcttgctccatcgcccaggatagaacacagcggtgtgatcatagctcactgcagcttcaaactccaaggcctaagtgatcctccctcctcagcctcccaagtagctgggattataggtgtaagtcactgtgcatgggtcaaggaaggggtttagagaaggcgagagggttcaggcaaggacagaaatatacaataaaagggtctgagataaatctgtagagtgctatgggcacacagagcaggaatatcctcaaatcctcctataacttgaactatcaccttgacggtgaccagatctgtctttagccttgacctgcctccagggatcctgagcacagacatctcaaactcaacatgtcccaaaacaagcttatctaccctcaagcttactcctcttcttatgttctcttccacataatggcacc

SEQ ID NO: 424379 - DNA, 582 bp, Homo sapiens
agaggaagtctatgaatatatataagaagggaacctaagctagcctgggactcagaaatgggcttcctgagaaagtgatgtttaaattgagacctgaataatagagtaggagttggtcaaataaggagggggtttatttatttttatagagatgaggtcttgctccatcgcccaggatagaacacagcggtgtgatcatagctcactgcagcttcaaactccaaggcctaagtgatcctccctcctcagcctcccaagtagctgggattataggtgtaagtcactgtgcatgggtcaaggaaggggtttagagaaggcgagagggttcaggcaaggrcagaaatatacaataaaagggtctgagataaatctgtagagtgctatgggcacacagagcaggaatatcctcaaatcctcctataacttgaactatcaccttgacggtgaccagatctgtctttagccttgacctgcctccagggatcctgagcacagacatctcaaactcaacatgtcccaaaacaagcttatctaccctcaagcttactcctcttcttatgttctcttccacataatggcacc

SEQ ID NO: 424380 - DNA, 597 bp, Homo sapiens
caacagaaaatcattaattacagcaagaacaagaagatttacagttaaatgaaaaaagacaatgaatcaatgycaacatcaagatacaagagaagttagaattatctgacaaaatattaaatcactcatggtaaaagtgcttcaatgagcaattacaaataaatttaaaacaagtggaaaaaatagagtatcagcaaaaaggaaaatggaagatttaaaggagaaccaaatgggaattttagaactgaaaagtgcagtcaacaaaattaaaaattcaatggctgaactcaacagaagaattgagaggaaaggaaatacagtcatgcagtgcataccatttcaattaacgacagaccgtatataagacgtggtcctatatgattataatggagctgaaagattcctattgcctagtgacattgtagccagtatactatcatagcataacacatcattcatgtgtttgttgtgatgccagtgtaaacaagtctgctgtgctgccatttatataaaagtctaacacatataattatgtacagtacatcatacttgataatgataattaacaactatgttactggcttatgtatttactat

SEQ ID NO: 424381 - DNA, 597 bp, Homo sapiens
caacagaaaatcattaattacagcaagaacaagaagatttacagttaaatgaaaaaagacaatgaatcaatgtcaacatcaagatacaagagaagttagaattatctgacaaaatattaaatcactcatggtaaaagtgcttcaatgagcaattacaaataaatttaaaacaagtggaaaaaatagagtatcagcaaaaaggaaaatggaagatttaaaggagaaccaaatgggaatkttagaactgaaaagtgcagtcaacaaaattaaaaattcaatggctgaactcaacagaagaattgagaggaaaggaaatacagtcatgcagtgcataccatttcaattaacgacagaccgtatataagacgtggtcctatatgattataatggagctgaaagattcctattgcctagtgacattgtagccagtatactatcatagcataacacatcattcatgtgtttgttgtgatgccagtgtaaacaagtctgctgtgctgccatttatataaaagtctaacacatataattatgtacagtacatcatacttgataatgataattaacaactatgttactggcttatgtatttactat

SEQ ID NO: 424382 - DNA, 489 bp, Homo sapiens
cttagtcgggtatttcaggctcagggcctctcatgaggttgcactgtagatgtgagccaaggctgccgtcatctgaagactggactagggatggaagctctgcatttgggatcatactcatggctgtggcccggaggcctcattttttcacccttgggcctctccrtggggctgctgccaacagggcctccctagaaggaatgacccaagaagaagaaagaaagaccaagctagaaaccaccgtgtctttcataacccaatatcaagaatgaagaagcactcttctgtgttcttttggtctcgcagaccaaccctggtaccatgtggaaggaaattacacaagagtgtgactatcaggaattgaggatcactggggcacctggaggctggagtctacaggtactttatggcgagtcatggcgatggtgaggaagcagctactttcatcacaggtaaaaactgatacacaaaacacacaaacagagagga

SEQ ID NO: 424383 - DNA, 643 bp, Homo sapiens
ttttaaaacacacacacatgctcgcgcttgcacgctcacacacacacacgcgcatgcacacacacacaygcacacacacacaacctgtggtcccagatactcaggaggccaaggcaggaggactgcttgagcctgggagggcgaggctgcagtaagccgtgattgcagcactgcactccaacctggaccacagagccagatcctgtctcaaaaaaaaaaaaaaaaaaaaaaaaaaaaaaagaaacccacattgtgtgttttgttttgttttttgatgcttaaattatcccacatttatccaatggattcacctttgatacatcattgtatgtctttgagctctcctttcttttaatgggaaatgctgcttagaagccaagaactaagctcgtatgctaccagctccgaggcatccctgcttttaaaaccctctgagtaggtaaagctaggatgtgtgtgtgtctgtgtgtgtgtgcgtgtgtgtgtgcatgtgtgtgtgtgctttaaatccctgttttattactatttcctggaaaattcacgaagacatggtttcttatcctttttgattttatgtgtgtataggtatgtatatgtttgcactaataacattaacagttatttattctaaaagatacattaa

SEQ ID NO: 424384 - DNA, 643 bp, Homo sapiens
ttttaaaacacacacacatgctcgcgcttgcacgctcacacacacacacgcgcatgcacacacacacatgcacacacacacaacctgtggtcccagatactcaggaggccaaggcaggaggactgcttgagcctgggagggcgaggctgcagtaagccgtgattgcagcactgcactccaacctggaccacagagccagatcctgtctcaaaaaaaaaaaaaaaaaaaaaaaaaaaaaaagaaacccacattgtgtgttttgttttgttttttgatgcttaaattatcccacatttatccaatggattcacctttgatacatcattgtatgtctttgagctctcctttcttttaatgggaaatgctgcttagaagccaagaactaagctcgtatgctaccagctccgaggcatccctgcttttaaaaccctctgagtaggtaaagctaggatgtgtgtgtgtctgtgtgtgtgtgcgtgtgtgtgtgcatgtgtgtgtgtgctttaaatccctgttttattactayttcctggaaaattcacgaagacatggtttcttatcctttttgattttatgtgtgtataggtatgtatatgtttgcactaataacattaacagttatttattctaaaagatacattaa

SEQ ID NO: 424385 - DNA, 643 bp, Homo sapiens
ttttaaaacacacacacatgctcgcgcttgcacgctcacacacacacacgcgcatgcacacacacacatgcacacacacacaacctgtggtcccagatactcaggaggccaaggcaggaggactgcttgagcctgggagggcgaggctgcagtaagccgtgattgcagcactgcactccaacctggaccacagagccagatcctgtctcaaaaaaaaaaaaaaaaaaaaaaaaaaaaaaagaaacccacattgtgtgttttgttttgttttttgatgcttaaattatcccacatttatccaatggattcacctttgatacatcattgtatgtctttgagctctcctttcttttaatgggaaatgctgcttagaagccaagaactaagctcgtatgctaccagctccgaggcatccctgcttttaaaaccctctgagtaggtaaagctaggatgtgtgtgtgtctgtgtgtgtgtgcgtgtgtgtgtgcatgtgtgtgtgtgctttaaatccctgttttattactatttcctggaaaattcacgaagacatggtttcttatcctttttgattttatgtgtgtataggtatrtatatgtttgcactaataacattaacagttatttattctaaaagatacattaa

SEQ ID NO: 424386 - DNA, 606 bp, Homo sapiens
aggtttggttccagactgccacaataaaatgaacattgcaataaagtgagccatacaaatyttttggtttctcagtgtatataatgctattaagtgtgcaacagcattatgtctaaaaagataatgtacataccttcattaaaaatactttattgctaaaaagtgctaataaccatctgaacctatagcaagccataatctgtttgctgggggaaggtcttggcctcaatgttgaaggctgctgactgatcaaggtggtagttgctgaaggttggggtggctttggcaatttcttaaaataaagcaacactgaagtttgctgcatcaattgactcctcctttcatgaaagatttccctgtagcatgcaatgctgttttatatcattttacccacagtagaacttctttcaaaactgaggtcaatcctttcaaaccctgctgctgctttatcaactaagtttacgtaatattctaaatcctttgttgtcgttttaacagtgttcacagtatcttcaccaggagtaggttccatctcaacgaaccactttatttgctaatccataagaagcaactccttatacgcattcaagttttatcatgagattg

SEQ ID NO: 424387 - DNA, 572 bp, Homo sapiens
gtgctaataaccatctgaacctatagcaagccataatctgtttgctgggggaaggtcttggcctcaatgttgaaggctgctgactgatcaaggtggtagttgctgaaggttggggtggctttggcaatttcttaaaataaagcaacactgaagtttgctgcatcaattgactcctcctttcatgaaagatttccctgtagcatgcaatgctgttttatatcattttacccacagtagaacttctttcaaaactgaggtcaatcctttcaaaccctgctgctgctttatcaactaagtttacgtaatattctaaatcctttgttgtcgttttaacagtgttcacagtatcttcaccaggagtaggttccatctcaacgaaccactttatttgctaatccataagaagcaactccttataygcattcaagttttatcatgagattgcagcaattcaatgacagctacaggctccacttctaattctagttctcttgctgcttttaccacatctgaggttactttctccactgaaatcttgaacccctcaaagtcatccaggaagactggaatca

SEQ ID NO: 424388 - DNA, 432 bp, Homo sapiens
ggctttggcaatttcttaaaataaagcaacactgaagtttgctgcatcaattgactcctcctttcatgaaagatttccctgtagcatgcaatgctgttttatatcattttacccacagtagaacttctttcaaaactgaggtcaatcctttcaaaccctgctgctgctttatcaactaagtttacgtaatattctaaatcctttgttgtcgttttaacagtgttcacagtatcttcaccaggagtaggttccatctcaacgaaccactttatttgctaatccataagaagcaactccttatacgcattcaagttttatcatgagattgcagcaattcaatgacagctacagkctccacttctaattctagttctcttgctgcttttaccacatctgaggttactttctccactgaaatcttgaacccctcaa

SEQ ID NO: 424389 - DNA, 594 bp, Homo sapiens
aaataacatatagatcaaagtaaaagtctcaagagaaatgtaaaaagtaatttgaactaaataaagataaaaattactttaaaaagtggaagaaagtgaaagcattctttaaaagaaaatgtatagcatgaaatgaatgtattagaaagatgaaaaatgtaaatcaatataatatttcaccttaggaatccagaaaaaggtgtacaatttaaccctatagcatgaggaaaaaatgtaatgaataaaatgagagcagaaatcaatgaagttgaaagtaaaaaaatagagaaaataaaataacatctaagtaaatagagatatagtccrtgttcatgaattggaggatttaatattgttaaagtgtctgtttttttccaaattgacctataaattcaatgcaatactaataaaagtctcagtgagccactttgtaactatgaataacctgactctaacatttatatggaaagtcaagaaacatagactagtccacacaacatttaaaaaaaagaacagatttggagacatttatgcgaggaggagaatgttgagtatgtgaaatacaggaatttctctttaagatggtgaaactat

SEQ ID NO: 424390 - DNA, 594 bp, Homo sapiens
aaataacatatagatcaaagtaaaagtctcaagagaaatgtaaaaagtaatttgaactaaataaagataaaaattactttaaaaagtggaagaaagtgaaagcattctttaaaagaaaatgtatagcatgaaatgaatgtattagaaagatgaaaaatgtaaatcaatataatatttcaccttaggaatccagaaaaaggtgtacaatttaaccctatagcatgaggaaaaaatgtaatgaataaaatgagagcagaaatcaatgaagttgaaagtaaaaaaatagagaaaataaaataacatctaagtaaatagagatatagtccatgttcatgaattggaggatttaatattgttraagtgtctgtttttttccaaattgacctataaattcaatgcaatactaataaaagtctcagtgagccactttgtaactatgaataacctgactctaacatttatatggaaagtcaagaaacatagactagtccacacaacatttaaaaaaaagaacagatttggagacatttatgcgaggaggagaatgttgagtatgtgaaatacaggaatttctctttaagatggtgaaactat

SEQ ID NO: 424391 - DNA, 594 bp, Homo sapiens
aaataacatatagatcaaagtaaaagtctcaagagaaatgtaaaaagtaatttgaactaaataaagataaaaattactttaaaaagtggaagaaagtgaaagcattctttaaaagaaaatgtatagcatgaaatgaatgtattagaaagatgaaaaatgtaaatcaatataatatttcaccttaggaatccagaaaaaggtgtacaatttaaccctatagcatgaggaaaaaatgtaatgaataaaatgagagcagaaatcaatgaagttgaaagtaaaaaaatagagaaaataaaataacatctaagtaaatagagatatagtccatgttcatgaattggaggatttaatattgttaaagtgtctgtttttttccaaattgacctataaattcaatgcaatactaataaaagtctcagtgagccactttgtaactatraataacctgactctaacatttatatggaaagtcaagaaacatagactagtccacacaacatttaaaaaaaagaacagatttggagacatttatgcgaggaggagaatgttgagtatgtgaaatacaggaatttctctttaagatggtgaaactat

SEQ ID NO: 424392 - DNA, 202 bp, Homo sapiens
taaaactataaaacttttagaaggaagcacagacgtctatcatcatgaccttgaattagtcaaagttcccttaaatgagatactggaagcacaaaggatcaatttgactttatgaaaattaacgtttttatgcttcaaagggcagcaccaagaaaataaagacaaaagccacagggtgsaaggaaatttaagaaaacaattt

SEQ ID NO: 424393 - DNA, 549 bp, Homo sapiens
aaatagaaccaataccatgtccatcaactattaaacagttaaataaaatgtggcatcttcatagtataacctataatttggcaacacaaaggaatgaagttctgatactggctaccacatggctgaaccttgaaaacattacatcaaaagaaagcagccagtcatgaaggaccacatcatatattgttccatttataygaagtgtccagaataggcaaatctatagtgataggcctgtgttgatcagaggctgactagggctgaggggtttggaagcaagaggagtgactgatgttgggtactgagtttcttcttagggtaatgaaagtgctctagttgtgatgatagttgctcaactccaaatacaccaaaatccatttaactgtatggtctatataggtgaattttatggtatgtgaattatatctcaataaagcagtttaaataacaagggccggggtgcagaacatatgggaactctgttccatcttgcattaggctgttcttgcattgctataaggaaattcctgaggctggacaatttattaa

SEQ ID NO: 424394 - DNA, 592 bp, Homo sapiens
cctcttgttagcagcatagtgcatcaatgcaattgtacccagatataattctattgtatttaagccagaaaaatcaaaactacctactaatgcacattttttcagcttgaatttttaatttaactgactcctccaaattgagcaaatgatgcatagrtgcgtgtccagattcaatgatcaaattcttcaataaaaagggagggtggatgggaaggcagttccagatgagtcctatcagaatctaagatttgcagattctgtctaatgttactgtggattttcttccactttatgtcaagttactaaaccttatataagggtagagtaattaagccagcctagagaaattataagcacattgtcagaacacccacgccaaagtccaggaatgactgtcagcaattttggatcccagactgttacacttgctttccttggcaagctctaatcaatgagccagccacagaggatcgaaggcaactgtgatgaaatgccaccttatgaagtaattggcttcatggatctgcccagatgaatcataaaactattcatcaatatcctcagttgtgcagcagtgagctgttacatggtt

SEQ ID NO: 424395 - DNA, 560 bp, Homo sapiens
ctccaaattgagcaaatgatgcatagatgcgtgtccagattcaatgatcaaattcttcaataaaaagggagggtggatgggaaggcagttccagatgagtcctatcagaatctaagatttgcagattctgtctaatgttactgtggattttcttccactttatgtcaagttactaaaccttatataagggtagagtaattaagccagcctagagaaattataagcacattgtcagaacacccacgccaaagtccaggaatgactgtcagcaattttggatcccagactgttacacttgctttccttggcaagctctaatcaatgagccagccacagaggatcgaaggcaactgtgatgaaatgccaccttatgaagtaattggcttcatggatctgcccagatgaatcataaaactattcatcaatatcctcagttgtgcagcagtgagctgttacrtggttagctcaaggaatactctgatcaggaaagcttattgtacgattcatttggcaacctattaatcatcttcaccttagaatagaagagggtaggaaaagga

SEQ ID NO: 424396 - DNA, 484 bp, Homo sapiens
aagctctaatcaatgagccagccacagaggatcgaaggcaactgtgatgaaatgccaccttatgaagtaattggcttcatggatctgcccagatgaatcataaaactattcatcaatatcctcagttgtgcagcagtgagctgttacatggttagctcaaggaatactctgatcaggaaagcttattgtacgattcatttggcaacctattaatcatcttcaccttagaatagaagagggtaggaaaaggaacaaataccatcatcaccattaagccagggctagcaggcacgaacttctctgctaatatagatgcaaaatctaaatgcacttacaatgttttcctgtcaagaatataggtgttacacttttctattcgaaatttgtatttccctcagccttgatttattgttgtccataaaaatttacrtgaatattggaaaaagtggctgtacatgtgctgttgtctataaggtaatgttat

SEQ ID NO: 424397 - DNA, 660 bp, Homo sapiens
cattttgcttcagaaggacgttacctgaactggcacatttttgatattttaaagtatgtgtaaattccatattctaaaactggtattgacaacttagatctaactttgaagctgaaacacagagaggaagacttctccatatcatgtatttcacgccttcctttgttcttcactcattcattcatttagtcttgccatgaagacaacgagaatggaaaactaatgcttcatggtgtaggcccaagggtggcatttagggaaattttatggaaagttcatttgatttgggccttgaaggttgtttgaaaattcaacatttggtgatggagaaagggaatgacagggaatgaargagacatgggcacagaaatatttaggacaggccctctggggtgtgatcaggaatggaaacgatgaggccatgaatgggtgctaaggatggagccaaggtcctggagcctcgtgtcccttgcagggaatctgcaggatcactggatggcagaggggcctttgcatggactccagcagtccagtggccaggtcagccgtgcggtgaccatgtgggcctaacataaccctcatcttcactggactccagacagacttctttctgaccttcctttgcttacagcattaactttagaaagacttgaaattgca

SEQ ID NO: 424398 - DNA, 660 bp, Homo sapiens
cattttgcttcagaaggacgttacctgaactggcacatttttgatattttaaagtatgtgtaaattccatattctaaaactggtattgacaacttagatctaactttgaagctgaaacacagagaggaagacttctccatatcatgtatttcacgccttcctttgttcttcactcattcattcatttagtcttgccatgaagacaacgagaatggaaaactaatgcttcatggtgtaggcccaagggtggcatttagggaaattttatggaaagttcatttgatttgggccttgaaggttgtttgaaaattcaacatttggtgatggagaaagggaatgacagggaatgaaggagacatgggcacagaaatatttaggacaggccctctggggtgtgatcaggaatggaaaygatgaggccatgaatgggtgctaaggatggagccaaggtcctggagcctcgtgtcccttgcagggaatctgcaggatcactggatggcagaggggcctttgcatggactccagcagtccagtggccaggtcagccgtgcggtgaccatgtgggcctaacataaccctcatcttcactggactccagacagacttctttctgaccttcctttgcttacagcattaactttagaaagacttgaaattgca

SEQ ID NO: 424399 - DNA, 660 bp, Homo sapiens
cattttgcttcagaaggacgttacctgaactggcacatttttgatattttaaagtatgtgtaaattccatattctaaaactggtattgacaacttagatctaactttgaagctgaaacacagagaggaagacttctccatatcatgtatttcacgccttcctttgttcttcactcattcattcatttagtcttgccatgaagacaacgagaatggaaaactaatgcttcatggtgtaggcccaagggtggcatttagggaaattttatggaaagttcatttgatttgggccttgaaggttgtttgaaaattcaacatttggtgatggagaaagggaatgacagggaatgaaggagacatgggcacagaaatatttaggacaggccctctggggtgtgatcaggaatggaaacgatgaggccatgaatgggtgctaaggatggagccaaggtcctggagcctcgtgtcccttgcagggaatctgcaggatcactggatggcagaggggcctttgcatggactccagcagtccagtggccaggtcagccgtgcggtgaccatgtgggcctaacataaycctcatcttcactggactccagacagacttctttctgaccttcctttgcttacagcattaactttagaaagacttgaaattgca

SEQ ID NO: 424400 - DNA, 574 bp, Homo sapiens
gcaccacagggaacagcggggaaatgaaaaatcctgaaggaaataccaggcaggagaatttatttaaaatccagccaaaattcactaaaacctaaacagtgcagtcttctggaaatggaaagaggttgctcagggacaagcataggcatgagattcagggcagcctaggggagaagtggccatcagcggcacccaaggccaaagggacctagcttagtggatccactrctagataggaagacaagattaaagactgcatcattatcttgggtatgaacatctggaggtggatctgttcaaaaaccagatggacttgcatttctgccggaagttctgagtcagtatcaggattaagtattaccatttaggaattactctcagaaaggcaataacttaagttatgaaactagatggagcttctaaaactataacgagaaagaagagagcttagtttgtaaatttgaagaagtatactcagaggttaggaatcagaagtaaaataggatatggagataagaaaaggtgactaccaggtcagactagggcactattatacatttaaagggaatagaga

SEQ ID NO: 424401 - DNA, 574 bp, Homo sapiens
gcaccacagggaacagcggggaaatgaaaaatcctgaaggaaataccaggcaggagaatttatttaaaatccagccaaaattcactaaaacctaaacagtgcagtcttctggaaatggaaagaggttgctcagggacaagcataggcatgagattcagggcagcctaggggagaagtggccatcagcggcacccaaggccaaagggacctagcttagtggatccactactagataggaagacaagattaaagactgcatcattatcttgggtatgaacatctggaggtggatctgttcaaaaaccagatggacttgcatttctgcmggaagttctgagtcagtatcaggattaagtattaccatttaggaattactctcagaaaggcaataacttaagttatgaaactagatggagcttctaaaactataacgagaaagaagagagcttagtttgtaaatttgaagaagtatactcagaggttaggaatcagaagtaaaataggatatggagataagaaaaggtgactaccaggtcagactagggcactattatacatttaaagggaatagaga

SEQ ID NO: 424402 - DNA, 574 bp, Homo sapiens
gcaccacagggaacagcggggaaatgaaaaatcctgaaggaaataccaggcaggagaatttatttaaaatccagccaaaattcactaaaacctaaacagtgcagtcttctggaaatggaaagaggttgctcagggacaagcataggcatgagattcagggcagcctaggggagaagtggccatcagcggcacccaaggccaaagggacctagcttagtggatccactactagataggaagacaagattaaagactgcatcattatcttgggtatgaacatctggaggtggatctgttcaaaaaccagatggacttgcatttctgccggaagttctgagtcagtatcaggattaagtattaccatttaggaattactctcagaaaggcaataacttaagttatgaaactagatggagcttctaaaactataacgagaaagaagagagcttagtttgtaaatttgaagaastatactcagaggttaggaatcagaagtaaaataggatatggagataagaaaaggtgactaccaggtcagactagggcactattatacatttaaagggaatagaga

SEQ ID NO: 424403 - DNA, 556 bp, Homo sapiens
gccacctcttcctcctttttttcttgtcctaaagtagtgatctcattggccacttgtctctcatggctaagctacaaaatggaagaggcttgttggatccaaaacggattttgcaggagtaaaggataaatcttaattttgttaagatgctgatatttctggtacgaattgttctcataaaggtggtgtatcttttagaaaatttacttgagcaaaggagaacttatggaagaaatgagaggaaaggcaaaatagtaataataataccaaacctgtgtctgaaagcacaggaggcagagcagcagccagaccttgagtgtcaggaggcactggagagtctcatcagagtggagctgttgggatgaatcagccatggtgtttgttcttagtcctgcaccccttgacccaaaaktccatgtcctggaagaagcatctgtttggcctcatctgagccctgggaatcatcaggcagaacatcaactgcaaccaggctgcgcacagagggtgattgtcttaaaggaagccagaagcctatgcactgaccactgcacatcct

SEQ ID NO: 424404 - DNA, 570 bp, Homo sapiens
ttctggtacgaattgttctcataaaggtggtgtatcttttagaaaatttacttgagcaaaggagaacttatggaagaaatgagaggaaaggcaaaatagtaataataataccaaacctgtgtctgaaagcacaggaggcagagcagcagccagaccttgagtgtcaggaggcactggagagtctcatcagagtggagctgttgggatgaatcagccatggtgtttgttcttagtcctgcaccccttgacccaaaagtccatgtcctggaagaagcatctgtttggcctcatctgagccctgggaaycatcaggcagaacatcaactgcaaccaggctgcgcacagagggtgattgtcttaaaggaagccagaagcctatgcactgaccactgcacatcctgctggtgatggagggagccgcccaacagaagcatggcagaggaaaaaagctgagaactgagaatatttgcttggagctaagtggaagtccaaggatggtctattgtaaagtagaagcagatagaaggatgtcacaaccaataacctctttgtttttagtaagcaagcagg

SEQ ID NO: 424405 - DNA, 570 bp, Homo sapiens
ttctggtacgaattgttctcataaaggtggtgtatcttttagaaaatttacttgagcaaaggagaacttatggaagaaatgagaggaaaggcaaaatagtaataataataccaaacctgtgtctgaaagcacaggaggcagagcagcagccagaccttgagtgtcaggaggcactggagagtctcatcagagtggagctgttgggatgaatcagccatggtgtttgttcttagtcctgcaccccttgacccaaaagtccatgtcctggaagaagcatctgtttggcctcatctgagccctgggaatcrtcaggcagaacatcaactgcaaccaggctgcgcacagagggtgattgtcttaaaggaagccagaagcctatgcactgaccactgcacatcctgctggtgatggagggagccgcccaacagaagcatggcagaggaaaaaagctgagaactgagaatatttgcttggagctaagtggaagtccaaggatggtctattgtaaagtagaagcagatagaaggatgtcacaaccaataacctctttgtttttagtaagcaagcagg

SEQ ID NO: 424406 - DNA, 585 bp, Homo sapiens
ccttgagtgtcaggaggcactggagagtctcatcagagtggagctgttgggatgaatcagccatggtgtttgttcttagtcctgcaccccttgacccaaaagtccatgtcctggaagaagcatctgtttggcctcatctgagccctgggaatcatcaggcagaacatcaactgcaaccaggctgcgcacagagggtgattgtcttaaaggaagccagaagcctatgcactgaccactgcacatcctgctggtgatggagggagccgcccaacagaagcatggcagaggaaaaaagctgagaactgagaatatttgcttggagctaagtggaagtccaaggatggtctattgtaaagtagaagcagatagaaggatgtcacaaccaataacctctttgtttttagtaagcaagcaggtgtaaaccaaaaataaaattctaagrcccccaaccatttgaatggacttcttccttagccaggactcttttgaagtttaacctgaaagactggctcaggccttgatgggaagtgggggtgggacatgcctcatgatacatcaacacagactttaagtcagataagaaac

SEQ ID NO: 424407 - DNA, 625 bp, Homo sapiens
caaagactctgaagatacaggcaacgttattaagatcttttccccttgatgctagctagataggttactgttttctcttaaaaaaaatctatctgtctatgtgrtattatttcaaatagtctttgaaaaatgtaatttctgggaaaggttttgttttggtttgggttttgccttgaggaacagggagctgctaattctcaaccatggctagggtgcccatcaactgtgaagtggactggaggctcctccaagcccccttttctctcactgtggtcacctcctatgcctcgtgctgacctctgacattctcctgacaacacatgcaagagcctctcggtgaccctcaaccaccatctaccagtctaaggaattgtgcaggccctaatggtttcctactcctcaccagctaattaaccttctgttggttaaggttctgttggttaaccttctgttggttaaggttctgctggttaaccttctgttggttaagccaatgctctagacctatttttctccctggagagcaagtgtgtacagtggtgtgaaggatataaccatatgttcaaaacaaataggcatattagaagcactgttgcctgagaaacatagggcaatgtgtttttcc

SEQ ID NO: 424408 - DNA, 625 bp, Homo sapiens
caaagactctgaagatacaggcaacgttattaagatcttttccccttgatgctagctagataggttactgttttctcttaaaaaaaatctatctgtctatgtggtattatttcaaatagtctttgaaaaatgtaatttctgggaaaggttttgttttggtttgggttttgccttgagraacagggagctgctaattctcaaccatggctagggtgcccatcaactgtgaagtggactggaggctcctccaagcccccttttctctcactgtggtcacctcctatgcctcgtgctgacctctgacattctcctgacaacacatgcaagagcctctcggtgaccctcaaccaccatctaccagtctaaggaattgtgcaggccctaatggtttcctactcctcaccagctaattaaccttctgttggttaaggttctgttggttaaccttctgttggttaaggttctgctggttaaccttctgttggttaagccaatgctctagacctatttttctccctggagagcaagtgtgtacagtggtgtgaaggatataaccatatgttcaaaacaaataggcatattagaagcactgttgcctgagaaacatagggcaatgtgtttttcc

SEQ ID NO: 424409 - DNA, 522 bp, Homo sapiens
agagcctctcggtgaccctcaaccaccatctaccagtctaaggaattgtgcaggccctaatggtttcctactcctcaccagctaattaaccttctgttggttaaggttctgttggttaaccttctgttggttaaggttctgctggttaaccttctgttggttaagccaatgctctagacctatttttctccctggagagcaagtgtgtacagtggtgtgaaggatataaccatatgttcaaaacaaataggcatattagaagcactgttgcctgagaaacatagggcaatgtgtttttccacttgattatatttttccataaatacaattttaacatgtttttcttctaggcttaaatataaaatcccatctagcttaccctttagctttccttaaagtcaaaaaataggctatataaagcacacacagacacacacacatrtatgtttctatatgttgagctatccttagaggatagattccctaaagggtaattattagttaaggggcataagggtttac

SEQ ID NO: 424410 - DNA, 541 bp, Homo sapiens
actcatttgagtattaatgtatttgagttccttttctgtgaactgagagagttgctcaacctacagtagactttatgtgagcagaaaaataaagcgtgttggttctgtcctggccagtgcaatcagggcaagaaaagaaacctttgtgggtttttatttaatccatcgagacctcagatttaatttgtaatcatagtaatacacagattatgctgaaaaatctaatcttttggtcattcttttgatgataatctgtaaatgtaaaactcttaatttctttatatctgaaagtttctttatttacccttatcttgattaatagtttatctgggtatagattgataaatgtttattgtttagcaatctgaagtttttattctcttctagcttctcttgtgcttgattaaaaacaacctctgrcaattaattgttatttttttaagtaacctatttttcttatgactgcttttgagatttccttgttatctttgggatcccactgtttctttacaatcagattaattgggactgatattattta

SEQ ID NO: 424411 - DNA, 448 bp, Homo sapiens
ttaatttttcatcaaaacataaaacaagtaattaaacagtaaaaagtgataacgtgtaattataagtaatattctgagcaggataaggcaatggttgtcagctaggacagttctgtaacatatgggacatgtggtgatgtctagagacacttttggttgtcacaactgggtgaaggtgttaatggcatctattgggtggagaccaggattgttgctaaaaatcccacagtgcagagaccagctcctcacaacaaagaattattcagcccactatctgccaggtatcagtagygtcaaggttgtggaactctggaataagaaatagcagatcacagggacatgccttctcccttttacatgttcctccaagacagggcaccagacatcaggcacatcttaaaaccctggagagtgagaatgaccatcctggtgtttggaaagcagctgt

SEQ ID NO: 424412 - DNA, 513 bp, Homo sapiens
atagcacatcctttctttttggtgagcaaagctagaattaatgagtccccatgctgaggccacgcctggtggctgtagacagtggtgctgaggctgtcactcactggcagagtcaacggagatttggtgcttcctttgtgaatggaaaatatcttaggcccccaaatcactaagctaaagggaaaaatcaaactgggaaatgcttagggcaaacctgcctcccattctattcaaagtcacccctctgctcactgagataaatgcatatctgactgcctcctttggagaggctcgtcagaaacttaaaagaatgcagccatttgtcccttatctacctatgctctggaasccctgtccctcttcgagttgtctcccctttccagatccagaccaaaccaaaatgtgctccgaccaccttgggcacatgtcatcaggagcttccgaggctctgccacaggcgcgcatctttaagcttggcaaactaaactttctaaataaactgagacctgtctc

SEQ ID NO: 424413 - DNA, 567 bp, Homo sapiens
tcacaccatctacaattaatggtattccagtcctttagtttttattccttttccttgtttttctgcattactagggcatccagagtcatgatgaataatgtgataatcagcctccttcgatttcaatatggaaattaaccccaagatcccaaatcaacctgactgcatattagaatcatgttggggaacttaaaataatgctgatggctgagccccatccacacagatacttaatgagacggggcattaatgtggtttaatatttccctaggcaattcttattcatagctagaattaagaatctcttccctagattatagagattgtacccctcctccctttcttacacctagatgtcacatagcataggtatgcaaactgccttttcgttctctctgtttcttattgcacttggggaatttgtttcctttcttgcataatcaattgtacatttaaaagcacatttktcatatttaatataccatttcttgattttgtaggtaacgggatgtaaaggtatctatgccatcagatgttccaaatcaaaaatctcttcacagacttcgt

SEQ ID NO: 424414 - DNA, 528 bp, Homo sapiens
aaaatatatttcgtgcatttcaaaatttcaaatcaatctttcttttactctacccatctatttaattttccggcttgatttttttttttaatgtttcaaacaaaaagtgaaagcgaaaactttggttttgttaaaaatagttatatacttcagagagtatttaggcttttgggttcaaaaagaaaaaaaaataaagcaacaaaatgggatttggtgtctagagctccctgtatgttggagtgattttaggtcagacctaaactcaagtgccagtggaaatcagaccaayagtgaaatgaatgcactgggcctattggtggctaaccggccggcacttagcttctctcaggaaggccacctttacatggcttgtagctgttgctttgtgaaaatccgttgcagcttgtaaagattttcagtttttcaagagaagccaaacatcgggttttggcaactctatcagacagttcttagttgcaggtaacagaatccagtggagctgatttaagcagaaatgaattgattatt

SEQ ID NO: 424415 - DNA, 583 bp, Homo sapiens
attagggtgctgtacttcattcattcattcagttaggtacacttcattcattcattcagttagccagtcagccacactcattcctttattcatgctgctatgtgccaagtattgtcctgggcactggagataatgaaaataaaaacagcccctgtccataatgacatcatagtctaatgaagatgacagggcatatttaaataattgcttttgtgagataaatgctaacatatgttcagtcactttttcaaccaacagacattttctgagtgcttgccattgtgccaaccttgtgctaaatgctgggcttcataccatgggcaagactggcctgggtccttttctcgtggaggccrtggtctgcgtaggaggcacttcaccctccaagtacacacagggaaagaataactgctctgtctggtcttaagggagggcttccaaaacgaagttcttgaaggaagccttgaaaaaagagtaggaagtactcttgttccagtagttctggcagaagaatgggaaggaaattccaaggaacagaatgtgtgttacttggaagcatgtgacaatgtggtgtgtctgtgtc

SEQ ID NO: 424416 - DNA, 647 bp, Homo sapiens
tgcaaccctggacactaagctaccacctgaatgttcgtgggtgcctgttgtctactcaggatccacaccatgggcaccactgtccccaaggagggaaggtagagccctcccagggttctcagcctcagtattactgactcactctgttgatagcctgtcctgtgcagtgtaggatgtttagcaacatccctggcctctgcccactagatgccagtagctccccctcccacattgtgacaaccaacattttccctgggtatcaccaaatgtcccctgggtgggggcaaaattgctcccaggtgataatcactgctctttagaaccaacatattattaaaagaccagagaaagacatgatcttaattcctaattctatgtaaaaaaaaaagaaaagtgaatgtatgtgcatgcccatagctataggaaytgatggctaaggtctatggagcacactcttatgctccccaaggttaaagaatttccatgaggagacagtggtgtgacagagacactcaaaggagggtttagcctctttcactcagtgtactctgcaatgattaaattgattataataagaatgtttccatgttatcagttgtttaaagaagttcaaatatgccctactcttatggccaaaggtatttgta

SEQ ID NO: 424417 - DNA, 590 bp, Homo sapiens
atgtgtgggggttgaaatttggtttgaaagaaattaaaagtgtatgtataggagtttaacgagaaatcaattattctaaccaagaaactttgagtcctgacatgtctcagcatcgccaattgttatgtgatatttttacagacatggaatctaaaggctggaaggagtttgaacatcaagctattcatctacaaagatcaaactgatttcttctgacttttcactaaggtgtcgctgaaataagatttatcaggctatcagttttgttatttctgaaaggcattgcaaaacatccttcgaggatctgaattaattttgcaataatgagatcatatcagactatatatctgatattttagataacactggccagtgcttttggttatgttgtcatttttggctagatagtaacatgtattagcaaggccaaaatgygaatacatttcacaaaaacacacattcttagccctgctcctctaacttggaataattttcatctcagtgagatattggctaggactttgattccaaaacaagtaaaattgaagcctatttctcttttcccctctgttctttattttttttctttg

SEQ ID NO: 424418 - DNA, 560 bp, Homo sapiens
ctatgtcccagggacacagcagggaaataaactgaattcatgcttccatggaactcatatttcaccatgggaaagtcacaagcatgcatgtgaagtgctggagacacaaaaaagcatgtatcagtgtgaagaagaagaatataaatcccaggtactgtattagatcgtagaggttctattcaaggaaggcctcaccacagaaatgccattgaggagagaagagaggaaactagccttggaaatgcgggatactggcattcttcaggacagaaggagcagcacactyaagggcatgaaataggaaacgtgttttatttaaggaagaagatcaggctcattaccactcactgcacaaaggaaagagtaatgaggttcagacttacgctggccaagtaagtaagcaatgaggtttatgttttattttaagggcactggaagcctctgaagtatttgtgctccaaaaggatgcctccggctcagtttggagaataaactacatgagtcaatataacccacctgtggaataacagacgacttctgaattgtgagtttaattcata

SEQ ID NO: 424419 - DNA, 560 bp, Homo sapiens
ctatgtcccagggacacagcagggaaataaactgaattcatgcttccatggaactcatatttcaccatgggaaagtcacaagcatgcatgtgaagtgctggagacacaaaaaagcatgtatcagtgtgaagaagaagaatataaatcccaggtactgtattagatcgtagaggttctattcaaggaaggcctcaccacagaaatgccattgaggagagaagagaggaaactagccttggaaatgcgggatactggcattcttcaggacagaaggagcagcacacttaagggcatgaaataggaaacgtgttttatttaaggaagaagatcaggctcattaccactcactgcacaaaggaaagagtaatgaggttcagacttacgctggccaagtaagtaagcaatgaggtttatgttttattttaagggcactggaagcctctgaagtatttgtgctccaaaaggatgcctccggctcagtttggagaataaactrcatgagtcaatataacccacctgtggaataacagacgacttctgaattgtgagtttaattcata

SEQ ID NO: 424420 - DNA, 612 bp, Homo sapiens
aggtataaaccctaccctctgggaggtgctttacccaggaagaagcctgaattctccagtcagctttctgacctcctcagccttctctcacagcacagccttgcacacagttccagcttcggccacgctctgctaattgatctcttttctgtatttgttttttgatgagatgagtagaaatggcaattcactgtaacagtagtaagttttttaaatcaataaggaatcccgctgtgtgctaatttggaataaataacaaagcaaatgggacatgatctcggctcccagagaacctgcagtgaggcagaggaaaacggaccaaggcctgcccttgctgggacttgtctgagcatcttctgagtgtctcagcagtagcattcactggttctgtgcagtgggtgccctktgatgcccactgtatggggtaaggagtgaattacacctgcattgcaaatgactccaatacaaaacccatagtagataactctgtgaattattagtgagtgaacaaatgagggaatgaatacgggaaacagtttttcacaatggcaagagcataagtttgaaatggaccagcccacacctgactaggttgctgtgaacttgagcggc

SEQ ID NO: 424421 - DNA, 612 bp, Homo sapiens
aggtataaaccctaccctctgggaggtgctttacccaggaagaagcctgaattctccagtcagctttctgacctcctcagccttctctcacagcacagccttgcacacagttccagcttcggccacgctctgctaattgatctcttttctgtatttgttttttgatgagatgagtagaaatggcaattcactgtaacagtagtaagttttttaaatcaataaggaatcccgctgtgtgctaatttggaataaataacaaagcaaatgggacatgatctcggctcccagagaacctgcagtgaggcagaggaaaacggaccaaggcctgcccttgctgggacttgtctgagcatcttctgagtgtctcagcagtagcattcactggttctgtgcagtgggtgccctttgatgcccactgtatggggtaaggagtgaattacacctgcattgcaaatgactccaatacaaaacccatagtagataactctgtgaattattagtgagtgaacaaatgagggaatgaataygggaaacagtttttcacaatggcaagagcataagtttgaaatggaccagcccacacctgactaggttgctgtgaacttgagcggc

SEQ ID NO: 424422 - DNA, 612 bp, Homo sapiens
aggtataaaccctaccctctgggaggtgctttacccaggaagaagcctgaattctccagtcagctttctgacctcctcagccttctctcacagcacagccttgcacacagttccagcttcggccacgctctgctaattgatctcttttctgtatttgttttttgatgagatgagtagaaatggcaattcactgtaacagtagtaagttttttaaatcaataaggaatcccgctgtgtgctaatttggaataaataacaaagcaaatgggacatgatctcggctcccagagaacctgcagtgaggcagaggaaaacggaccaaggcctgcccttgctgggacttgtctgagcatcttctgagtgtctcagcagtagcattcactggttctgtgcagtgggtgccctttgatgcccactgtatggggtaaggagtgaattacacctgcattgcaaatgactccaatacaaaacccatagtagataactctgtgaattattagtgagtgaacaaatgagggaatgaatacggkaaacagtttttcacaatggcaagagcataagtttgaaatggaccagcccacacctgactaggttgctgtgaacttgagcggc

SEQ ID NO: 424423 - DNA, 518 bp, Homo sapiens
gttaatcattttagagttttatagtcttcagaaaagatgtccacaaggaagaataggccatgctcctagtgttacttagaaaaagaaaaggsgaaaaacaatatttgaatggagaacagaagagagaaataaacatttgagttggttttgatttaacaggacaaattgaataacaaaattgtttaaataaactagcaacaactcccattctccatgccacacaacacacatacacaatggtgaagatgtggcacttttttttggatttgatctatcccagtataaattactaaattagcaaatcacatcttttttaaaaaaacttatggaaataatatagtgttgacatatattttagttaccccattcatcaggcttctaatgtcctactgtgggctgtaaactcaaatccatgggaaggtaaatagagcaggcaacagaggcaggtgcacctgtgaatgctctgcatgtgtggtgatgactctggaaagcacatcctctctaaaagggaaagcagt

SEQ ID NO: 424424 - DNA, 552 bp, Homo sapiens
cccccaccctggatgggccctggaggccgcagcctctgactgcaagggcactcatcaggaccacttagaaaattaatcaaaccagctcaaactagcttaagcaaaaaggcgatttactagaaagatattatagaggttgagagacttgttagaggagttgagcacctggccttaggatggaatgaaccaggacattaaagaacctgagggttctttctgtaactacaaacttgaaaagtgatataactcaccttttttttcctccctttccttctttggtccctctcaattctgctactctctgtactggcttgattctctcttactgaagattggattgggggtaaggagaggccaccaatagatatgaccttaaacttcagattcaccgttaaagaataggctcttcactggagaygtgaaaaagccaaaggctgattactgtggttgctggagatagaagatttgggaccagcttgggtcacatgcctgttcgccaccccccaaaccaccaacccctccctgacacacactgactgacgctaatcactg

SEQ ID NO: 424425 - DNA, 593 bp, Homo sapiens
gcaattaataagaatccaacaagagcaactcctaggagccacttctgccagagagctgggggttgcaggtggatgtcaccagaaacatctggtaggtgctgagctaggaaaccctattgcttgagtttcactctcccctgtaccactccacagagctacccttgtggggacttgaatgacataatacaatgaarttttaactttgagacaggaaaccaggtagcattgaaggttctgaaattctgggcaaagatctaaccaacaataataacaaaacccaccttgaatctcaactgatccttgaggctgggacccacactgatggctgggcatctgtaaaggagatgaacacaaggccctgggagttctggggctgcatgagccctgtgtgtcctacctgcagggatgatagcagggcacctctgatgatgcactgtcatgggataaatgcccctccggactcagtggtcactcagggattgtgctggcaagtgatgcaataggtatatgtcatagctttttaatgagcaccatcggccagtagcttacagctgtgtctgagtgccagcagtgaagctggtgcctgcagaggc

SEQ ID NO: 424426 - DNA, 441 bp, Homo sapiens
ggaaaggacattgaaatgactcaaatacatatgaaaagatgcttactttcactcttacgagagaaatgtgaattaaaacatatttttatctgtcaaattaacaaataaattttaaaaaggagayttgataatatgccatgttagcaaagctgaaagaaaacaagtacttaatacattgccaaggcagtactcacgacactgataaaccttatgtggagtaatttttataacagtacccatcaaaatcacaaaggcatatctgctttgacctggtagctttactcctaggaatttacattagaggatgtacaagcaagcatggacgataaagtttgaacatgatatcattacagcattgtttgtaattagctaaagattagaaacaacctaaaatattcaacaatcaggaactggctaaagagattgtggtatacaaccttt

SEQ ID NO: 424427 - DNA, 604 bp, Homo sapiens
tttaaaacctctagaaggataaacaagaaaactaaaaacagtggtttcctgttagtaggatgggaagagggcaaatggttaaatgcattatgttgtcaaaaagaagtatataatttaaaaaaaacagcaacaactagaaagagtgggggcagttccaaaaaaataagaaccaagagcrtcagtatgaccatccagggtgttctctgatgagctcagtttttaaaagcatgtatagaaaatggacagagaggcacatacccaaggctgaatgccaaataaggtcaagagcagcctccagatgaaataagccttgaacaatgtcaagggcaaggacattttttttcagtcattgtgagggagtatataacaaggaaggtcaatgtcactgtgaggggtagagtgagatggcaggatgctagctggtgacagacagaaaggagaaccacttccctattatgaccctactgcctctcacatggggatcctttaagtcctgcttgtacttgggactctgaacttcatccatgtccaaaaccaggcaaaggctgccctcccatgtgggaaaaattattctctcgcttgtgactctctggattcattgact

SEQ ID NO: 424428 - DNA, 429 bp, Homo sapiens
gagttggaagtacttctatattgcattatagctggttcattagggaataattttatgttagggtgaattttgcttttctatacaacttcgtaactacagagactgcaataagaaagttgtaaaagtgcgttcaagaaagaggatgcattttaaaaatcaaatggttacataaaatcaagcaaaactaatagctaatacagtggatrgccgtattgagatttaaaaacatattgacaaggttgaaatgatcagcctaagccaggaaggggagatttaacaagcattccttttataggtaattgcatttgataggtatatgcattacctatttaagtataaatgtccagtgtaggttggacctgtggcttgtctgtagtgcttacaggaaacccttggttttgtaatcacctgacagtgtaatcgcctgca

SEQ ID NO: 424429 - DNA, 627 bp, Homo sapiens
caatttacattagcaccaaaataaacaaaatacttctatataaatataacacaatatgttcaagatctatatgaaaaaacaacagaactctgataaacactataaaagaaccaaataaatgaaaagatattccatgttcacgaacagaaagacttaatattgtcaagatgtcatttcttcctgacttgatctacagattcaacacaatcccagtcaaaatcccagaaagttattttataaacattgacaaattgatcctaaaatttatatggaggagaaagacccagaataaccaacacattattgacagagaagaacaaagttagaagcctaacactaccctacttcaagatatactgtaatcaagacagtgtcaaattggtgatagacaaataaatctataaaacagaatagagaggccagaaaaagacacacacaaatatagtcagctgatctttgacaaaaaagcaaaagcaatacaatggatcagagatagtatttttacaaatggtrctggaactagacatccaacatataaaaaaagataaatctagacacagacccctatacctttcacaggagttaactcaaaatgaatcagaaaactaaatatagaacacaaaacta

SEQ ID NO: 424430 - DNA, 545 bp, Homo sapiens
ttaatctgtatgactgcaatggctctatagttaactactctgtaatactacttcatactaaattacatatttcatttaaattttgagtcttgacttttccttctccctcgccatgaccacatccagtcagtcattaagtcctgttagttttcctctgaaattgttcttccaaaatcacatcttctcctatctctaacattgctgcctctgttcaggctgttattatctgaggactaaacgatcatgatgataacctaactgttctcctaatcttcacatctgcctttccaattaatcttccaaacaaagactgaactttytaaaaaataaatctaataatgttaaatttcttaaaatccttcaataacctttctaataaagagacaaaaccaagaatccatcattcactcatttattccacaaatatatgaactcttactatgtactgggcaccaagctacccaatggggatgtggcagaaaacaaaacggacatggtccttgccttcatgcaatgcaatttagtgcaagggtttcaggttataa

SEQ ID NO: 424431 - DNA, 545 bp, Homo sapiens
ttaatctgtatgactgcaatggctctatagttaactactctgtaatactacttcatactaaattacatatttcatttaaattttgagtcttgacttttccttctccctcgccatgaccacatccagtcagtcattaagtcctgttagttttcctctgaaattgttcttccaaaatcacatcttctcctatctctaacattgctgcctctgttcaggctgttattatctgaggactaaacgatcatgatgataacctaactgttctcctaatcttcacatctgcctttccaattaatcttccaaacaaagactgaactttctaaaaaataaatctaataatgttaaatttcttaaaatccttcaataacctttytaataaagagacaaaaccaagaatccatcattcactcatttattccacaaatatatgaactcttactatgtactgggcaccaagctacccaatggggatgtggcagaaaacaaaacggacatggtccttgccttcatgcaatgcaatttagtgcaagggtttcaggttataa

SEQ ID NO: 424432 - DNA, 559 bp, Homo sapiens
acatctcattctatgattatattaattaaagttcctttaaggtaaacaccatatctaagctttcttttatgtgcaacagcatatgtgtaagagagtcctgytgaataaaaaattgtcactggcatggagtatgcacagcctcattgcagagtgatggtgaaattaaaggggaaagtaagaaaggtgaatggagtcttcatcaaacagcagagaagtcattacaatatcactaacataaaatgagaactctaaggcagagttccccaacccttttgatacaaatgaccagtttcatggaaaacaattttttcatgggccagggggtgggggatgatttctggatgatgcaagcaaattacgtttaccatgtactttatttctattattattacattggaatatataatgaaataattatacaactcatcataatctagaatcagttggagtcctgagcttgttttcctgcaactagaaggtcccatttgggagtgatggaacacagtgacagatcatctggaaagcccatcgggatggaaaacccatcagactaacagca

SEQ ID NO: 424433 - DNA, 559 bp, Homo sapiens
acatctcattctatgattatattaattaaagttcctttaaggtaaacaccatatctaagctttcttttatgtgcaacagcatatgtgtaagagagtcctgttgaataaaaaattgtcactggcatggagtatgcacagcctcattgcagagtgatggtgaaattaaaggggaaagtaagaaaggtgaatggagtcttcatcaaasagcagagaagtcattacaatatcactaacataaaatgagaactctaaggcagagttccccaacccttttgatacaaatgaccagtttcatggaaaacaattttttcatgggccagggggtgggggatgatttctggatgatgcaagcaaattacgtttaccatgtactttatttctattattattacattggaatatataatgaaataattatacaactcatcataatctagaatcagttggagtcctgagcttgttttcctgcaactagaaggtcccatttgggagtgatggaacacagtgacagatcatctggaaagcccatcgggatggaaaacccatcagactaacagca

SEQ ID NO: 424434 - DNA, 559 bp, Homo sapiens
acatctcattctatgattatattaattaaagttcctttaaggtaaacaccatatctaagctttcttttatgtgcaacagcatatgtgtaagagagtcctgttgaataaaaaattgtcactggcatggagtatgcacagcctcattgcagagtgatggtgaaattaaaggggaaagtaagaaaggtgaatggagtcttcatcaaacagcagagaagtcattacaatatcactaacataaaatgagaactctaaggcagagttccccaacccttttgatacaaatgacyagtttcatggaaaacaattttttcatgggccagggggtgggggatgatttctggatgatgcaagcaaattacgtttaccatgtactttatttctattattattacattggaatatataatgaaataattatacaactcatcataatctagaatcagttggagtcctgagcttgttttcctgcaactagaaggtcccatttgggagtgatggaacacagtgacagatcatctggaaagcccatcgggatggaaaacccatcagactaacagca

SEQ ID NO: 424435 - DNA, 559 bp, Homo sapiens
acatctcattctatgattatattaattaaagttcctttaaggtaaacaccatatctaagctttcttttatgtgcaacagcatatgtgtaagagagtcctgttgaataaaaaattgtcactggcatggagtatgcacagcctcattgcagagtgatggtgaaattaaaggggaaagtaagaaaggtgaatggagtcttcatcaaacagcagagaagtcattacaatatcactaacataaaatgagaactctaaggcagagttccccaacccttttgatacaaatgaccagtttcatggaaaacaattttttcatgggccagggggtgggggatgatttctggatgatgcaagcaaattacrtttaccatgtactttatttctattattattacattggaatatataatgaaataattatacaactcatcataatctagaatcagttggagtcctgagcttgttttcctgcaactagaaggtcccatttgggagtgatggaacacagtgacagatcatctggaaagcccatcgggatggaaaacccatcagactaacagca

SEQ ID NO: 424436 - DNA, 619 bp, Homo sapiens
cttgctcactgctagggcagcagtctgagatcaacctgggatgctgcagattggcagaggaggggcatccaccactgttgaggcttgagtaggtggttctatgctcacagtgtaaacaaagcatcaaggaagctcgaactgggcagagcccaccacagctcagcaaggcctactgccgctctagattctgggggcagggcatatttgaataaaaggcagcagacagcttctgtgacctaaacgtccctgcctgacagctctgaagagagcagtggttcttccagcatgatgyttgagctccaataacagacagactgcctcctcaagtgggtctctgacccccgtgtagcctgactgggagacacctctgagtagggtccgacagacacctcatacaggtgggtgcccttctgggatgagccttccagaggatggatcaggcagcaatatttgctgttctgcaggctctgcaggtgatactccggcaaacagggtctggagtggacctccagcaaactccaacagacctacagctgaggggcctgtctggtagaaggaaaactaacaaacagaaaggaatagcatcaacatcaacaaaaaggacattcacatcaaaacc

SEQ ID NO: 424437 - DNA, 619 bp, Homo sapiens
cttgctcactgctagggcagcagtctgagatcaacctgggatgctgcagattggcagaggaggggcatccaccactgttgaggcttgagtaggtggttctatgctcacagtgtaaacaaagcatcaaggaagctcgaactgggcagagcccaccacagctcagcaaggcctactgccgctctagattctgggggcagggcatatttgaataaaaggcagcagacagcttctgtgacctaaacgtccctgcctgacagctctgaagagagcagtggttcttccagcatgatgcttgagctccaataacagacagactgcctyctcaagtgggtctctgacccccgtgtagcctgactgggagacacctctgagtagggtccgacagacacctcatacaggtgggtgcccttctgggatgagccttccagaggatggatcaggcagcaatatttgctgttctgcaggctctgcaggtgatactccggcaaacagggtctggagtggacctccagcaaactccaacagacctacagctgaggggcctgtctggtagaaggaaaactaacaaacagaaaggaatagcatcaacatcaacaaaaaggacattcacatcaaaacc

SEQ ID NO: 424438 - DNA, 619 bp, Homo sapiens
cttgctcactgctagggcagcagtctgagatcaacctgggatgctgcagattggcagaggaggggcatccaccactgttgaggcttgagtaggtggttctatgctcacagtgtaaacaaagcatcaaggaagctcgaactgggcagagcccaccacagctcagcaaggcctactgccgctctagattctgggggcagggcatatttgaataaaaggcagcagacagcttctgtgacctaaacgtccctgcctgacagctctgaagagagcagtggttcttccagcatgatgcttgagctccaataacagacagactgcctcctcaagtgggtctctgacccccgtgtagcctgactgggagacacctctgagtagggtccgacaracacctcatacaggtgggtgcccttctgggatgagccttccagaggatggatcaggcagcaatatttgctgttctgcaggctctgcaggtgatactccggcaaacagggtctggagtggacctccagcaaactccaacagacctacagctgaggggcctgtctggtagaaggaaaactaacaaacagaaaggaatagcatcaacatcaacaaaaaggacattcacatcaaaacc

SEQ ID NO: 424439 - DNA, 619 bp, Homo sapiens
cttgctcactgctagggcagcagtctgagatcaacctgggatgctgcagattggcagaggaggggcatccaccactgttgaggcttgagtaggtggttctatgctcacagtgtaaacaaagcatcaaggaagctcgaactgggcagagcccaccacagctcagcaaggcctactgccgctctagattctgggggcagggcatatttgaataaaaggcagcagacagcttctgtgacctaaacgtccctgcctgacagctctgaagagagcagtggttcttccagcatgatgcttgagctccaataacagacagactgcctcctcaagtgggtctctgacccccgtgtagcctgactgggagacacctctgagtagggtccgacagacacctcatacaggtgggtgcccttctgggatgagccttccagaggatggatcaggcagcaatatttgctgttctgcaggctctgcaggtgatactccggcaaacagggtctggagtggacctccagcaaactccaacagacctacagctgaggggyctgtctggtagaaggaaaactaacaaacagaaaggaatagcatcaacatcaacaaaaaggacattcacatcaaaacc

SEQ ID NO: 424440 - DNA, 572 bp, Homo sapiens
tcctggcatctttgtttacactgtgagkaaaaaaacgcctactgaagcctcagtaatggaggacgtccctccccccaccaagctcgagcatcccaggtggacttcagactgctgtgctggcagtgagaatttcaagccagtggatcttagcttgctgggctctgtgggtgtgggatccactgagctagactgcttggcgccctggcttcagcctcctttccaggggagttaacagttctgtctcactggcttttcaggcaccactgggatatgaaaaaacttctgcagctagcatggtgtctgcccaaatggtcacccagttttgtgcttaaaacccagggccatggtggtgtaggcaccccagggaatcctctggtctgtgggttgtgaagaccattggaaaagtgtagtatctgggccggaatgcaccattcctcatggcacagtccctcagggcttcccttggctaggggagaaagttccttcatccattgtgcttcacacataaggcaacaccccaccctgcttctgctcaccctccatgagccacacccactgccaattcgttggca

SEQ ID NO: 424441 - DNA, 572 bp, Homo sapiens
tcctggcatctttgtttacactgtgagtaaaaaaacgcctactgaagcctcagtaatggaggacgtccctccccccaccaagctcgagcatcccaggtggacttcagactgctgtgctggcagtgagaatttcaagccagtggatcttagcttgctgggctctgtgggtgtgggatccamtgagctagactgcttggcgccctggcttcagcctcctttccaggggagttaacagttctgtctcactggcttttcaggcaccactgggatatgaaaaaacttctgcagctagcatggtgtctgcccaaatggtcacccagttttgtgcttaaaacccagggccatggtggtgtaggcaccccagggaatcctctggtctgtgggttgtgaagaccattggaaaagtgtagtatctgggccggaatgcaccattcctcatggcacagtccctcagggcttcccttggctaggggagaaagttccttcatccattgtgcttcacacataaggcaacaccccaccctgcttctgctcaccctccatgagccacacccactgccaattcgttggca

SEQ ID NO: 424442 - DNA, 572 bp, Homo sapiens
tcctggcatctttgtttacactgtgagtaaaaaaacgcctactgaagcctcagtaatggaggacgtccctccccccaccaagctcgagcatcccaggtggacttcagactgctgtgctggcagtgagaatttcaagccagtggatcttagcttgctgggctctgtgggtgtgggatccactgagctagactgcttggcrccctggcttcagcctcctttccaggggagttaacagttctgtctcactggcttttcaggcaccactgggatatgaaaaaacttctgcagctagcatggtgtctgcccaaatggtcacccagttttgtgcttaaaacccagggccatggtggtgtaggcaccccagggaatcctctggtctgtgggttgtgaagaccattggaaaagtgtagtatctgggccggaatgcaccattcctcatggcacagtccctcagggcttcccttggctaggggagaaagttccttcatccattgtgcttcacacataaggcaacaccccaccctgcttctgctcaccctccatgagccacacccactgccaattcgttggca

SEQ ID NO: 424443 - DNA, 450 bp, Homo sapiens
  misc_feature (1)...(450): n = A,T,C or G
atgtcagaatatgatacatttacccaatcctctacctaataactctaattacagtttcaaaattgttatcatttgatcaaaatctcttcaaagctgaatttactttttttaaacatgaggactttaaaatctttaatatttcatcaatgagtagctataacatgtcttacatattaccactaagcagtttttggtagatagtattttaattctgtgtaacttcttgtaagtcaggcgtttagataatatgagcactttcactgattatgttaaacttcatttatccagagtccactsatttgtaaaccagaaggtgtcaagtatgagtattaaaaatatatctgttaagcacactgttaccctgagcaaggtgaggtgtattctttctgcttaataggatgactaaaaaaattgactntggagggtgctntgnggctctgaataccaaca

SEQ ID NO: 424444 - DNA, 498 bp, Homo sapiens
ttaaagccataataaaaacatcccagcaagaaagagcctgggacctgatggcttcactgctgaattttaccaaacatttaaaaaaaactaatactaatcctattcaaattacttcaaaaaatagaggagggaatacttccaaactcattctatgaggccattattaccctgawaccaaaactaaagatacatcaaaaaagaaaaccacaggtcaatacctctgataaatattgatgcaaaaattctcaacaaaatactagcaaatcaaatccaacaacaaattagaaagatcattcattatgaccaagtgagatttatcccagggatgcaaaaatggttcaacatacactaatcaatgtgacaattgcatcaacaaaatgaaggataaaaatcatatgattattttgactgatgctggtaaacatttgataaaattcaacaactctttgtgacttaaaaaatgggtgtagaaagaacataccccaacataataaaagc

SEQ ID NO: 424445 - DNA, 498 bp, Homo sapiens
ttaaagccataataaaaacatcccagcaagaaagagcctgggacctgatggcttcactgctgaattttaccaaacatttaaaaaaaactaatactaatcctattcaaattacttcaaaaaatagaggagggaatacttccaaactcattctatgaggccattattaccctgataccaaaactaaagatacatcaaaaaagaaaaccacaggtcaatacctctgataaatattgatgcaaaaattctcaacaaaatactagcaaatcaaatccaacaacaaattagaaagatcattcattatgaccaagtgagatttatcccagggatgcaaaaatggttcaacatacactaatcaatgtgacaattgcatcaacaaaatgaaggataaaaatcatatgattattttgactgatgctggwaaacatttgataaaattcaacaactctttgtgacttaaaaaatgggtgtagaaagaacataccccaacataataaaagc

SEQ ID NO: 424446 - DNA, 602 bp, Homo sapiens
aagtgaagtaagccaagcacagaaagataaacttcacatgttctcacttatctgtgagagctaaaaattaaaacaattaaattcgtggagatagagactaaagtgatggttatgagaggcctcagaggttagtggcaggggtgrggggttgagtagtgggaatggttaaagagtaaaaaaatagataacataaataagatcaagtatttagtagcataacaccttgactacagtcaagaataatgtattttacattttagaataactaaaagaatataattggaatgcttgtaacacaaagaaatgattaatgccttgaggtgatggatgtccatttacccttatgagattattacacactatatgccagtaccaaaatatctcatgtaccatataaacatatgtaactcctgtgtacctgtgaaaaataaaaattaagaagagaaaagttagaggacctgagacagcctcagaaatgcttagtgcttgctgggactgctggtataagcttttctgattctcataaaaatcctctgagagctaaactttccattcttccatagtagcaggaagagagaccctaaaataataaaacaggatgg

SEQ ID NO: 424447 - DNA, 565 bp, Homo sapiens
gtggagacatcatacattctgattttaaattatattacaaagatttagtaatcaaaacagtacggcactggaataaaaaaaaaacatatagaccaatggagcagaatagagagcccagaaataaacctacacatatactgtcaaataatttttgacaagggcagcaagaacacgcaacagagaaaggatagtctcttcaataaatggtgttggaaaaactggatatccacatacaaaataatgaaattggagccttgtcttacaccactcacaaataaaacagttcaaaatagattagagatttaaacataagacctgaaacataagactcctagaaggaaacatagagaaaaagcttctcgatattggtcttggcaatttttkgggggtatttgacatcaaaagcacagacataaaaagcaaaaataaataagtggaactacatcaaatgaaaaaacttctgtgcaacaaaagaaacaacaaaataaaaaagcaaccatggaataggagaaaatatttgcaaaccatatatctgataaagggttaatatccaaattacataaga

SEQ ID NO: 424448 - DNA, 589 bp, Homo sapiens
aaccatatatctgataaagggttaatatccaaattacataagaatctcctatgactcaatttttaaaaaaarccaattcatttaaaaatgagaaaagaaactgaatagacacttttccaaagaagatttacaaatgggcaaaaaatatataaaaaggaacttgacatcattaattatcaggaaaatgcatattaaaactacaataagatatcactttatagctgttagaatggctattaccaaaagacaagagagaaagcattggtgagggtgtgaagaaaagggaactctggtacacagttggtgggaatgtaaattggtatagctattatggaaaacagtctgcaggttgctcaagagaattaaaaatagaacaaccaaatgatccagcaatcccacttctgaggacataaacaaaggaaatgaaatctgtatgtgaaagagtatctgcactcccttgttcattgcagtattattcacaataaccaagatatgaaaacaatcttagtgtccatcaattggtgaatagattaaaaaaaaatgcggtacacatatacaattgaatattattcagcttttaaaaagaaga

SEQ ID NO: 424449 - DNA, 589 bp, Homo sapiens
aaccatatatctgataaagggttaatatccaaattacataagaatctcctatgactcaatttttaaaaaaagccaattcatttaaaaatgagaaaagaaactgaatagacacttttccaaagaagatttacaaatgggcaaaaaatatataaaaaggaacttgacatcaytaattatcaggaaaatgcatattaaaactacaataagatatcactttatagctgttagaatggctattaccaaaagacaagagagaaagcattggtgagggtgtgaagaaaagggaactctggtacacagttggtgggaatgtaaattggtatagctattatggaaaacagtctgcaggttgctcaagagaattaaaaatagaacaaccaaatgatccagcaatcccacttctgaggacataaacaaaggaaatgaaatctgtatgtgaaagagtatctgcactcccttgttcattgcagtattattcacaataaccaagatatgaaaacaatcttagtgtccatcaattggtgaatagattaaaaaaaaatgcggtacacatatacaattgaatattattcagcttttaaaaagaaga

SEQ ID NO: 424450 - DNA, 619 bp, Homo sapiens
cctattgaatttattttgttcaaatgaacacaaaggaaaattttccatagataggcatggatatctgttgctccaaagctgaactcttttcttctttcactccacttaactcatgttttstaagggaacagaaaaatccccctgtgtaaattctttgttctccttttcttcttcttccaagttcttttctttgctactttatgctttctcttctttcagatttaacccttccccacgatctgctttttctccttccctgactcacttaatccctcccttctccaactccttccaccgcaatgaccaaccatcatagccagcctaaggtcaaccatgaaaggaaaatttgctcttcagcatatcgtgttctttgacacaccttttatcccctcacttcaccacagttggtacacaataaggtgtgatagggcctgataaatatctaattcctcgtatgccaatagccacacaaccttgaacaagctatttaatctttctgtgccttggtttatacaaaaagacttgttctttaatacaagtgctcatctttgcattcaatctcgtggtttcctgaaattacagctgccttctggttgaaattgaccttagatgtagcctc

SEQ ID NO: 424451 - DNA, 619 bp, Homo sapiens
cctattgaatttattttgttcaaatgaacacaaaggaaaattttccatagataggcatggatatctgttgctccaaagctgaactcttttcttctttcactccacttaactcatgttttctaagggaacagaaaaatccccctgtgtaaattctttgttctccttttcttcttcttccaagttcttttctttgctactttatgctttctcttctttcagatttaacccttccccacgatctgctttttctccttccctgactcacttaatccctcccttctccaactccttccaccgcaatgaccaaccatcatagccagcctaaggtcaaccatgaaaggaaaatttgctcttcagcatatcgtgttctttgacacaccttttatcccctcacttcaccacagttggtacacaataaggtgtgatagggcctgataaatatctaattcctcrtatgccaatagccacacaaccttgaacaagctatttaatctttctgtgccttggtttatacaaaaagacttgttctttaatacaagtgctcatctttgcattcaatctcgtggtttcctgaaattacagctgccttctggttgaaattgaccttagatgtagcctc

SEQ ID NO: 424452 - DNA, 633 bp, Homo sapiens
aacaaactctgttttactccttactaatccagtcagaaattcaaactcttctctagtttatacaaagaagtctattcttacaaaatgacttataagtttagcaattcactaaagatgtgcccagtcaagatggtgtgtctcatcatccctgtaaagcaactcattagtgcatggccctttgctgtccttcctccacaacttgtcagctgccacaaatttctctttctgcttcccatagagtaacttcagtcccttctttgaaaccttgatgccagccagcaccagagccccaaaagagtgagtctctgcccaagagaaatgatagttgacaactgctaagagagcaaatgttctcctaagacacaaatacaggataaagcaacacagatttttttatgtaagagaagagggaaaaaacaggtatttagtagctagagctgaagtccatgggtctgtcatagacactggcctagagcatgacagtgatcaatgcrgaaagtgcagtcaagcggggaggaagaaagtcagtgaaggagagaaaggtggaaaggactgtggtgatctacagtttgctaaaggctcatagaactcaggcaagacatatgtcatccttctaccctcattttcttacct

SEQ ID NO: 424453 - DNA, 576 bp, Homo sapiens
gggctctgttaataaagacagagcaattcatgaccatcagtaatgtgtgtgccctcatgtcaatcacaatagcaggtctgacttttgcaagtctatttgcacttggtcctaatgatgagagatttttttagtctctttatagcaagagtcaaaaaactttttcagtaaaagattagagagtatgctttacaggccatactctctacaacaattattcaactctgctgttgtagtgtaaaaagagcacataccatatacatgactgaccattgctgtgtttcaataaacctgtattkacaagaacagacagctgtccagatttagctcacaggctgtagtttgccaacccctgcattaaacaatcagtttgtaactccaacatgctcctaggatggctgacccatagttcacagcggggcatgaatagagatgaggacttctgaattagtgtcatgctcatgcactcactcatatttactctcaacataacaccctgtgttggtttcaagttggcttcaaattctctgaaacacttcccatgaaaaggtgaaatatagcctcttctcttgaatggag

SEQ ID NO: 424454 - DNA, 592 bp, Homo sapiens
attgtgtcaatggtagcttcccaaatgaaattccagcatgctttcagactcaggcaccacagggatgcaggtggatgagaaaaagctcaatttaaattgagttagaaacttctggacattactttcactgaataaccttgtagtaaacccatctaatgaaaatcagatctcattcagagcagggaaatttgctttcctggatgaaactaaattggtcccataagatctattaccccaagagctaaaggtcctgtctacacagcactaaataaagtggtcaatgaatttagccaaaatccctaaaaaataacaaaatattctcttaaaatttaaatccttttagggaacatattgrataggttgattcatatttgttaatgggtttcaggcacacttgttccttgatcaaataaatatactgctaatgaacagatatgtttgagtgttttctgtgtgttcagtcagaactgtattgagtcagaaagagatatgctaggtgtataattctgatgcagtaaaaaaacaacaagtttacatgacttctgctattcattatatgttatgatgcaatataacacttgcatgtttggaa

SEQ ID NO: 424455 - DNA, 595 bp, Homo sapiens
gacttctgctattcattatatgttatgatgcaatataacacttgcatgtttggaaatttgggtttttttctcttttgatggaaaaaacaaatctaagtcatttccattttaattaccagaactagcataatgaataatgcatagtaagttcttaaagagtgtgtgtggcatgaataaacaagtgaataaatgaacgaatatttttcaggcatatggggcccattaagctgagagttcatagtaacaaaaacactctgtcaagtactattacacctagagattgctccattttcaccaaaatccatgttttcttctccttgagtatataggtaatccccctttttgcagcctcccttgcattggatstggccctatgatgagatctagccaatggaatatgagtgaaagaggtatgagccacttccaggtctcactcataaaactgtccatgctcctccccttcgagctaattggaattgagacaagcacagtgaacttgaagttcacacgtatgtgatagcagagcctcatcaacctgagaccctgaatggcagtggagacttctcacaatcccagaagatatgtttattattat

SEQ ID NO: 424456 - DNA, 387 bp, Homo sapiens
cctgaatggcagtggagacttctcacaatcccagaagatatgtttattattatcccaactttaccaatgagaaaactgagtcagagaagttaatcatagataataaggggcagtaagggacctgaactggagccacttctgcctcagtcatcatattcttcttcaaaaatactcagaagctttaaaggagcatctgaatcattggcctataacctctcccagatgaccgttcccataacctgaaattaaagtaatgatttttttcaatatgccattttccrtctgtccccattcacttgctccctcccttctaacagatcatttgcccctgcaagtgcatatcatgatggcacacccacttagtgagactcccccagaactgccata

SEQ ID NO: 424457 - DNA, 575 bp, Homo sapiens
acaaaatcttttcagtaacttcataagcattatatttgctctaaatatcagagctgatacccagccatttggacaagtattatattcccatattctaccctcggcttccatcttccccaggatatctgctgctctagagtcacaatactaatggcacagaaacatttttgagtcaagaaaatctaaatgaaattgggtgtgcttaggtttcataaatggtgtttttaaaagtttatttagagatagagtctcgctatgttgcccaggctggactcaaactcttgggttcaagtgatcttcctgcctcaacctcccaagtagctaggattataggcattcaaacaaaatgttaactgctgaaaatattgatatttcttatatcattgttttacaaaagtctttagataaaaaagtcccccaaaaatatrgatggttatggcacacgtatcccaaaagtaaatttgattcagccctggaacatactctctacttgaacctcaactatatgtaaaaatacagataaagatatggtcagtggacagacttttaattttaaaattattttatttgccatt

SEQ ID NO: 424458 - DNA, 575 bp, Homo sapiens
acaaaatcttttcagtaacttcataagcattatatttgctctaaatatcagagctgatacccagccatttggacaagtattatattcccatattctaccctcggcttccatcttccccaggatatctgctgctctagagtcacaatactaatggcacagaaacatttttgagtcaagaaaatctaaatgaaattgggtgtgcttaggtttcataaatggtgtttttaaaagtttatttagagatagagtctcgctatgttgcccaggctggactcaaactcttgggttcaagtgatcttcctgcctcaacctcccaagtagctaggattataggcattcaaacaaaatgttaactgctgaaaatattgatatttcttatatcattgttttacaaaagtctttagataaaaaagtcccccaaaaatatggatggttatggcacacgtatcccaaaagtaaatttgattcagccctggaacatactctctacttgaacctcaactatatgtaaaaatacarataaagatatggtcagtggacagacttttaattttaaaattattttatttgccatt

SEQ ID NO: 424459 - DNA, 575 bp, Homo sapiens
acaaaatcttttcagtaacttcataagcattatatttgctctaaatatcagagctgatacccagccatttggacaagtattatattcccatattctaccctcggcttccatcttccccaggatatctgctgctctagagtcacaatactaatggcacagaaacatttttgagtcaagaaaatctaaatgaaattgggtgtgcttaggtttcataaatggtgtttttaaaagtttatttagagatagagtctcgctatgttgcccaggctggactcaaactcttgggttcaagtgatcttcctgcctcaacctcccaagtagctaggattataggcattcaaacaaaatgttaactgctgaaaatattgatatttcttatatcattgttttacaaaagtctttagataaaaaagtcccccaaaaatatggatggttatggcacacgtatcccaaaagtaaatttgattcagccctggaacatactctctacttgaacctcaactatatgtaaaaatacagataaagawatggtcagtggacagacttttaattttaaaattattttatttgccatt

SEQ ID NO: 424460 - DNA, 471 bp, Homo sapiens
catcaagcccagttatgagtctagcagcataatttatgtgagacatgagtcaactgtggtctagtttacgcattctcaacagagagaaaattggttgatggtggggcacgaaaaaattcttagatattacaatggtttgtgttcttccaaagcttcgtcctatctgaaaaaatattatttctcaatgtttaatttctctcactagggaaaaaataattttaattaaattaactaattcacagacataaattttaattttattccatttttcttctcagagaggcaacaatgaatggagtttgagaaacattggtctggatytagaaagaaaacgagatgtagctttactaatgacatttcttttttgcattttgtaatgaagattgtctttagtgtctcagttgccatttcagcattcttttctcttcctgtggagtccctggtcccaagttctgacacacaatttttttt

SEQ ID NO: 424461 - DNA, 513 bp, Homo sapiens
tttgcttgttgatttaagttccttatagattatggatattagacctttgtcagatgcatagtttgcaaatattttatcccattctgtaggttgtctgtttactctgttaatagttcttttccttgcagaagctctttaatctaattaggttccacttgtcaattttttgttacaattgcttttggaaaattaaccaagaattccttgccaaggccaataacaagaagggtatttcctaggttttcttctagaatttttatagtttcaggtcttacatttagaattttaatgaatcttgagttaattttgtatatggtgaaaggtaggaaggtaggggtccagtttcgttcttctgcctatgactaaccagttatccctgcaccacttattgaatagggagtcctttcccatttgcttgtttctgttggccttgtcaaagaccagatggctgtaraggtgtgaatttatttctgggttctcgattctgttccactggtctatgtgtctgttttt

SEQ ID NO: 424462 - DNA, 648 bp, Homo sapiens
gataacaagagaatacagtcaggcacatggtcagccagattgctaggggccactcagacaacagtagagaaaagaactgaatatctgtgttgacaagttgtgctggtgaccaaaatactcctgagatgtctccttcctagctccagatcccatcccagaacaagcccttctccagaggcaaagcttccacctctcccactcgtctatagctttttgaacatatcgaacaaagatgtaaagggtgtactagttaagctcttgttgaattcctataacaatattggaaagaatatacaacacttcaacgcagacaaatgatgacaaaccaccgagagggctatgggaatgaatgttctaaaagagccaggaaccaggaagctctgcttcctggaatcaaatacaggccaaaaaacattctcacctggtagcctcaaacatatcacatgrttagaagatgctgccaaaaactgagatcaaaagaatggagagaaggaggggaagagagacccaatattttcccctaggaccaaggtaatggcacttagtagcgtgacccactctatggcaccttagaaacaaaaggtcaccatccaagtgcaaacaaacttctttccctgctgtgactgcatttcataacttttgttgcac

SEQ ID NO: 424463 - DNA, 264 bp, Homo sapiens
tccattcccttctgctactgaagaacactgaggtctacagaggcttgttaacttgctcaaggttacatactacatgataatctgatagggaagccaccctcacgtatcatcttacatctttttattaatatctgactcattttaattgaaataaattaaaatttaacaggaaattatatatcacaacaataaagaaaaaccagtatcacttgccrtaaatagaaggtagccaaaaaataaataaactctatgaaaaacaaacaa

SEQ ID NO: 424464 - DNA, 551 bp, Homo sapiens
tgatgcaccttcaaggggctgtgtaaatttagacgccaagtacactattgcttccagaaactgcttccaatagaaaattttataggcatttgaaagcctcatgggtgagtacctgaaaatatcacagttggtcaaaaaacatatgtgtttcaactttttctaacttgctttggtgttagcttataaaaactcataggtgtatattggactcattaaattgagggacttgtaagcaccagctcgatcaaggcagrgtgctgacaggcattatacattatgcaagcttccccacatcactctgccaatatgcttccattttaatccgaaacattcccagcttgtcaaatactaggcatccctggaacacataaaaccaatcatgccacctcatgcagaggttctctgatgtggacagatttccactagagactgtaaggaacctcaaccacattttcacatgttacttcaaatcgatccaaacttctctcttcacagttagtataatcaccatagtgactgcaggaaaagtaggtagaagaagagtccaaagc

SEQ ID NO: 424465 - DNA, 551 bp, Homo sapiens
tgatgcaccttcaaggggctgtgtaaatttagacgccaagtacactattgcttccagaaactgcttccaatagaaaattttataggcatttgaaagcctcatgggtgagtacctgaaaatatcacagttggtcaaaaaacatatgtgtttcaactttttctaacttgctttggtgttagcttataaaaactcataggtgtatattggactcattaaattgagggacttgtaagcaccagctcgatcaaggcagggtgctgacaggcattatacattatgcaagcttccccacatcactctgccaatatgcttccattttaatccgaaacattcccagcttgtcaaatactaggcatccctggaacacataaaaccaatcatgccacctcatgcagaggttctctgatgtggacagatttccactagagactgtaaggaacctcaaccacattttcacatgttacttcaaatcgatccaaacttctctcttcacagttartataatcaccatagtgactgcaggaaaagtaggtagaagaagagtccaaagc

SEQ ID NO: 424466 - DNA, 570 bp, Homo sapiens
ggcagcagtttacaaatgaaacagcaacattcagaagttacccaatatgctctaaaaaggggagaaaccctcaattgcccacccctttcccagaaaattcataaataactcaccccttgtttaacttataatcaagaaataactacaagtataatcagctgagcagcccacgccactgctctgcctatagagtaaccattgtttcattccttcactttctgaataaacttgctttcaatttaccctaaggacatgcccaaaattatttcttatgtgaggtttaagaactttctcttggggtctagattgggacccctttccagtaacaatatgatccatccattctacttcttacagatttacccaagaaaaagaaaagcatatgttcatacaaagatttgtaaacaaatgtctatagcaactttattcataacagmcaaaaactgtaaacaacccaactatccattaacaggtgaatgaataaagaaattgtggtatatacatacaatggaacactatttagcaatataaaagagtgaaccattgatacacagtacaactctgatgaat

SEQ ID NO: 424467 - DNA, 602 bp, Homo sapiens
tagatgaaccaacattgacacatcattaccacccaaagtccatatttttagattagagttcactcttggcatttgcattagtccattcttacactgctataaatagctayctaagactaggtaatttgtaaagaaaagaggtttaattcactcatagttctgcaggcttaacaggaaccatgactgggaggcctcagaaaacttacaatcatggcggaaggcaaaagggaagcacatacatatttacaaaggtggagcaggagagaaagagagagagtgaggggggatgtgccacactttgaaaccatgagatcttaagagaactttatcactatcaccagaacagcatgggggaagtctgccccaccatgatccaatcacttcccactaggtccctcccctgacacgtggggaattacaagtcaacatgagatttgggtgtggacacagagccaaatcttatcagtgttttatatcccataagcttgagcaaatgaacaatgacatgtattcatcattgcagtatcattcaaagtagtaccactgctctaaaaatcctttgtgctctatttatccctcccccatcccaatccatggcaaca

SEQ ID NO: 424468 - DNA, 674 bp, Homo sapiens
cttgagctgcactaacaaaagaaaggaattcactggtgcctttagtgttggtattcagagccccaaagcaccctccaaagtcaatttttttagtcatcctattaagcagaaagaatacacctcaccttgctcagggtaacagtgtgcttaacagatatatttttaatactcatacttgacaccttctggtttacaaatgagtggactctggataaatgaagtttaacataatcagtgaaagtgctcatattatctaaacrcctgacttacaagaagttacacagaattaaaatactatctaccaaaaactgcttagtggtaatatgtaagacatgttatagctactcattgatgaaatattaaagattttaaagtcctcatgtttaaaaaaagtaaattcagctttgaagagattttgatcaaatgataacaattttgaaactgtaattagagttattaggtagaggattgggtaaatgtatcatattctgacatgattttcaggataactaaaatgagcactgaacacagaaccctgtcaggcacatcccacagacccatccctggtagcattttataccaaggcaaccatcacaaatcaccttagccagattttataccaaggcaaccatcacaaatcacctctgtctaacaaagcaccttttacgttttaa

SEQ ID NO: 424469 - DNA, 550 bp, Homo sapiens
aaactccttggggagatggatttgaggtttccttctatttcctcctttggcagctctatgattaaacctctttatcttctgcaacctgctgtcttagtatattgacttgccaggtatatcaggcaacagacctattgtggttacagtggtggggcagtggagaagtttggaaaaccaaaagtgaccatgtgtttaaagcccagcagtccctaaattcacccagaccagctctaactatgctcaagccttagacagagaggaaaacacattctatacttagaatactgcttttagaaatccattgttgtcctctgaacatgactaagaagtattaggagcccatttatttagcattatcaagaattaattattgaatacaacagaagaattattgcctttacatcatcaaatattcattagatactattcagacctatagttacacacacaaacttacayacacaaaatgctttgttccacctcacaaatggctatttcccaatagtcttcaaagtaataagaaaaattagcattgtcacctacaggtagc

SEQ ID NO: 424470 - DNA, 597 bp, Homo sapiens
gttgttctgacattgtctattactttttaggctagctttttctaacacagactgaagaaaaaatgggaaactttttattaaatgcaacttctcattcactcctctgacatccatatccaagcctgattttatttctaaaatagcacagactttttcagctcatctcattccttatagaaatgcccattccataaaaggaaaagtaagacagcagcaaaattccgaaagataatttgggcatagtggtttctgaacagaagccaacatgatgaacaccaactggacttttccaactctccctccctctggaagtctatttattctgcactgactggaaaccattcagcagtgttggatctgtgaccttctcctacacctcttcaatgcaggaggacattaaaacacaagctgcaaatccagccagagggaaacggctgccctggacctgaggcctctttcatattcaaagactgayttcaattgactgggggtccatataaataatatatttctcaaccaaaagagcttccctgagcaattattctcatcagaaaagtttctatgaggtgccaagagaattattttaagaaatgtttt

SEQ ID NO: 424471 - DNA, 543 bp, Homo sapiens
ctcataaaactcaacaaaaagataataaacaacccaattcataaggacagaagatctgaaaacctccccaaagaaaacccaaactctttatggattgtacataagcatatgaaagatgctcaacattacatgttattaaggaattgcaaattaaaataacaacgggctatcactatatcactattagaatggctaaaatacaaaaacaatactagcaataccaaatgctggtgagggtgcagaacagtagaaactctcattcatttattgctggtggacatgcaaaatggtgcagccactttggaagacagttcaaaagttttacaaagctaagcatgctcttaccgtaagatttggcaatagttcctctaggtatttacttgattgagctgaaaacttatgtccwcacaaaactaaatgtagtctcaccataggatctagccattatgctcattggtatttacccaaataagttgaagaagttatgtccacacacacaaaaaaaactgcatatgaatgttttagcagctctattcataattg

SEQ ID NO: 424472 - DNA, 593 bp, Homo sapiens
ttattctgtacaatgcctgggattgggtgttaaggcaattggaagccattcattgatatgtatcatgttagcttaacaatctacacatcgattctgcttgatcaacctgcatgcctgagcacacagatcaggaacaaagggcgggagaagagagtgaagagttggtatttgcattacccagggccttcaggaacacttgtgcagaatcaattgcagcaactgttagtcatcacaggttaccctggaggactgatctgctttatagagtagggtgtcagtgaagatgttcacagcagtaagcacaatggcggacgttttcgtagctagctctagtcacctaggcagggaacaactaggcctggagagtcagggaagggatttacaggtgsctctgtatttcaggaagctctcccatgatctgcaaatgactttcccttacactaagaaagttggggcttatttggttggcaaaatgatcaacaagggtccttttgccaaagtcatagaagggctgggtctccccatgggtgaaaaggcaagtacacattgacaaatagatccaactctcatgcctatccattatctgatatgat

SEQ ID NO: 424473 - DNA, 461 bp, Homo sapiens
ttgtccgcaatggagcatgtgcactggcatggaatggtacacaaggattatgcattttttttcttctcaggcaggaaaagccaccaaagcccccaagtttatgaaacccttgacatgtcaatcactgacagtaagcccagcataggctctatagctaaatgcaaactaagggaagatcggtgttcttgagaagtttctcactgagtatgccatccaggggaaagcaggcaccagctcacagggctcacagagctgacccaagagtaaccaattcttcctctccttacagtgtttaggtagaaacttacattttgtgaaaactatgattgtagtttagaggaaaactttaattttcttataaacaaaatatataaaagtcataaaatgtggcactgatatktgtgggagggatttctgcaaatttttgtgggcataatgatttggaggaaactctaattgag

SEQ ID NO: 424474 - DNA, 489 bp, Homo sapiens
ttgaagcttagaggtctgcagtgaggctttcagaggagcctggagactgcctgtcagtcttgctgtgtgaatccttgagaatttacagctttcaggacatggacccagctttgagtccttccaggccagtcatgctcactaggggtaattttatatagtccaagatccaagaccccagatactgacgctctgttttttctggttaccattgtcactcgggaagctttgcargccctcagttgaggaccaaagggcctctcacttccgcttccttccctggacccttggctatccaggtggaccggcagacagctttttcctactgaaccatgattgcataaagcaggggctgtcctctccccttacatgtaacgatcagcaaaggctgttctacttactgactttgtataaatagacaaattgtgcaagaaaaataacaagaacaataataataactgatatctaatggagcacttatgatgtgttcca

SEQ ID NO: 424475 - DNA, 577 bp, Homo sapiens
cttcctcctcagtttcccttaaatatatcatttcacttccttaaactgtctagaattctgctaattaaacatttatttgacccccttttcaattctaccactggaaaaattaaggactactaatcattgatatggtcatgtgtagaaattccatcaaattgtttgcctgctaatatctagagggaaacagctgctggtaggatactcaatgctaaacttgcagtttcagggaaaggaaaactatataattgttgtagtccaaaagccccaaggataacagagctgsggaataagcaagggtgcacaaaaggtggtagggaagtgacggctccagaaagcacatccatttggaagttccagtggagttaatcttgtaccctgcaaaggatgaagaaatcttctatctccttcacttcctcctgcaccatacgtcccccatttccacaacctagaacacatggtagtataataggcattttgagtctactaatagctagcattaagtatatttgattgggtttgtctaaaaactgctatggcatttatagcattatatggagaaattagcaaaagttcc

SEQ ID NO: 424476 - DNA, 577 bp, Homo sapiens
cttcctcctcagtttcccttaaatatatcatttcacttccttaaactgtctagaattctgctaattaaacatttatttgacccccttttcaattctaccactggaaaaattaaggactactaatcattgatatggtcatgtgtagaaattccatcaaattgtttgcctgctaatatctagagggaaacagctgctggtaggatactcaatgctaaacttgcagtttcagggaaaggaaaactatataattgttgtagtccaaaagccccaaggataacagagctgcggaataagcaagggtgcacaaaaggtggtagggaagtgacrgctccagaaagcacatccatttggaagttccagtggagttaatcttgtaccctgcaaaggatgaagaaatcttctatctccttcacttcctcctgcaccatacgtcccccatttccacaacctagaacacatggtagtataataggcattttgagtctactaatagctagcattaagtatatttgattgggtttgtctaaaaactgctatggcatttatagcattatatggagaaattagcaaaagttcc

SEQ ID NO: 424477 - DNA, 577 bp, Homo sapiens
cttcctcctcagtttcccttaaatatatcatttcacttccttaaactgtctagaattctgctaattaaacatttatttgacccccttttcaattctaccactggaaaaattaaggactactaatcattgatatggtcatgtgtagaaattccatcaaattgtttgcctgctaatatctagagggaaacagctgctggtaggatactcaatgctaaacttgcagtttcagggaaaggaaaactatataattgttgtagtccaaaagccccaaggataacagagctgcggaataagcaagggtgcacaaaaggtggtagggaagtgacggctccagaaagcacatccatttggaagttccagtggagttaatcttgtaccctgcaaaggatgaagaaatcttctatctccttcacttcctcctgcaccatacgtccccmatttccacaacctagaacacatggtagtataataggcattttgagtctactaatagctagcattaagtatatttgattgggtttgtctaaaaactgctatggcatttatagcattatatggagaaattagcaaaagttcc

SEQ ID NO: 424478 - DNA, 577 bp, Homo sapiens
cttcctcctcagtttcccttaaatatatcatttcacttccttaaactgtctagaattctgctaattaaacatttatttgacccccttttcaattctaccactggaaaaattaaggactactaatcattgatatggtcatgtgtagaaattccatcaaattgtttgcctgctaatatctagagggaaacagctgctggtaggatactcaatgctaaacttgcagtttcagggaaaggaaaactatataattgttgtagtccaaaagccccaaggataacagagctgcggaataagcaagggtgcacaaaaggtggtagggaagtgacggctccagaaagcacatccatttggaagttccagtggagttaatcttgtaccctgcaaaggatgaagaaatcttctatctccttcacttcctcctgcaccatacgtcccccatttccacaacctagaacacatggtagtataataggcattttgagtctactaatagctagcattaagtatatttgattgggtttgtctaaaaacwgctatggcatttatagcattatatggagaaattagcaaaagttcc

SEQ ID NO: 424479 - DNA, 592 bp, Homo sapiens
cttcccacatgtcatgggtgaccatcatcctgtgaaactccacagcctggtcccaagactcttaatgttccatgagttatggctacaggtatattgcctcagattagtggtgcagagggcttatggggctgactggattctactcagggcaacaggtcaggatcaaatagcccaagaggacagttttgggcacattactgtcccttacctctctacacatgcaggtgcatctccaaatatgatgcctttgcaaatacactttatattcccagtatactgcaaaagttaaaagatataacttgccacagtaaccagctacaattaatatcaagaatgtttatatttaacttaagccctctttcttcattacaagtcctaactatagacacctctactcagtagagatgaaccagcgatgcatmattttctattacttctcaatacagatcctttacattcaaggattttattttcaaatacatttaaaagttgccatacattaaaaagacttaaagaaaagatacactgagagtaccttcagcatattgtgggaacacggtgatgaaccactgtttccaagtgatgaacttct

SEQ ID NO: 424480 - DNA, 592 bp, Homo sapiens
cttcccacatgtcatgggtgaccatcatcctgtgaaactccacagcctggtcccaagactcttaatgttccatgagttatggctacaggtatattgcctcagattagtggtgcagagggcttatggggctgactggattctactcagggcaacaggtcaggatcaaatagcccaagaggacagttttgggcacattactgtcccttacctctctacacatgcaggtgcatctccaaatatgatgcctttgcaaatacactttatattcccagtatactgcaaaagttaaaagatataacttgccacagtaaccagctacaattaatatcaagaatgtttatatttaacttaagccctctttcttcattacaagtcctaactatagacacctctactcagtagagatgaaccagcgatgcataattttctattacttctcaatacagatcctttacattcaaggattttattttcaaatacatttaaaagttgccatacattaaaaagacttaaagaaaagatacactgagagtrccttcagcatattgtgggaacacggtgatgaaccactgtttccaagtgatgaacttct

SEQ ID NO: 424481 - DNA, 609 bp, Homo sapiens
tccactgattatgtgtctgtttttattccagtaccatgctgttttggttactgtagctctatagtatagtttgaagtcagataatgtgattcctccatttttgttttttggcttaggatagctttagccattctgggtcttttgtggttccatgtaaattttaggattctttttctatttctgtgaagratgtcattggtattttgatagggattgcattaaatctaatagctttttggtgaagtctttagatttttccaaatataagattatattacctgcaaacaaggataatttgacttcttcctttccaatttggatgtcctttatatctttctcttgtctgattgctctagctaggacttccagtattacgttgaataacagtggcaaaagtgggcatccttgtcttccagatcttagaggaaaggctttcagtttttccccattcagtatgatactagctgtgagtctgtcatatatggctttttttatgttgaggtatgttccttctatctccagtttttttttttgaaggtttttatcatgaagggatgttgaatgttatcaaatgcatgcttagcatcaattgaaatggtcatatggttt

SEQ ID NO: 424482 - DNA, 591 bp, Homo sapiens
tactgcttttgctgtatcccataggttttggtatgttgtttttccattaccatttgtttcaaggaatttttttaattttctcttaatttcttcattgacccactggtcattcaggagcatattgtttaagttccatgtgttagtatagtttccaaaattcctcttgttattaatttctcgttttattcccttgtggtcagagaagatgcttgatattatttcaattttttgaatgttttaagatttgtttgtgacctaacatatggtccatccttgagaatgatccatgtgctggggaaaagaatgtgtatkctgcagcttttggatgaaatgttctgtaaatagctattagatccatctggtctatagtgcagattagatcttatgtttctttgttgattttctgtctagaagattcgtccagtgctgaaagtggggtgttaaagtctgtagctattattgcattggggcccatctctctctttagctctaataatatttcctttatatatctgggtgcctcagtgttgggtgcatatatatttataattgttatatcctcatgttgaattgacccctttatcattatat

SEQ ID NO: 424483 - DNA, 591 bp, Homo sapiens
tactgcttttgctgtatcccataggttttggtatgttgtttttccattaccatttgtttcaaggaatttttttaattttctcttaatttcttcattgacccactggtcattcaggagcatattgtttaagttccatgtgttagtatagtttccaaaattcctcttgttattaatttctcgttttattcccttgtggtcagagaagatgcttgatattatttcaattttttgaatgttttaagatttgtttgtgacctaacatatggtccatccttgagaatgatccatgtgctggggaaaagaatgtgtattctgcagcttttggatgaaatgttctgtaaatagctattagatccatctkgtctatagtgcagattagatcttatgtttctttgttgattttctgtctagaagattcgtccagtgctgaaagtggggtgttaaagtctgtagctattattgcattggggcccatctctctctttagctctaataatatttcctttatatatctgggtgcctcagtgttgggtgcatatatatttataattgttatatcctcatgttgaattgacccctttatcattatat

SEQ ID NO: 424484 - DNA, 611 bp, Homo sapiens
tgaaaaagtctaccaagacacatcataaaatgtcagaaccctgtgataaatgggaatagctgataaacttccagttaatacaggtttcctacaaaagataaagaaaggaattgtatcagaattctatgytacatcaccagcaacttgaaggcatttgagcaatgccttcaaaatctgagaaaaaagtatttccaacctaaaattctatacccagtcaaatagaatcaggtatgagagtaaataacagctttggacatgcaaagtgtcagcatacttacctaccatgtaccctttctcaggaaaacttcttaaagagagaaattataaataaattatggtatatttctatagagaaatattatatgtgaatgaaagtgaataaattttagctataagcaacagcatggaaaaatcaaaggaacatgatatggctagaaaatacaagtcacagtacaaaattgcagttacgtttgcttcactgtggtaatcatttcactgtctatacgtatctcaaaacgtcatgttgtacatcttaaatgtataacattttataaaaataaagaaaataaaattaaaaccaagaaacagaagaatatatacaatatgattcc

SEQ ID NO: 424485 - DNA, 531 bp, Homo sapiens
atttagcagggtaggtattcagctaattagggagtaaccagagaaaggagaagcccaatgcaaggaaatccaaaaaactatacacattgtgaagggagaattattcatggaaatagcttaaagaaaaaaaaacaataaaaaattcaggaaactttggacacacctttagaaatgcaaaatgctctggaaagtctcagcaatataattgaacaagttgaagaaagaaattcagagctcgaacacaaagtctttgaattaacccaattcaacaaagataaagaaaaaataataaaaaaaaatatgaacaaagcctccaagaagtctgggattatgttaaatgaccaaacctaagaataatcagtgtatcttagaaagaagagaattctaaaagcctggaaatcatatttgggggaataatcaatgaaaacttccycagccagctttgtgagagacctaaacacccaaatacaagaagcacaaagaacacctgggaaatttatcacaaaaaaatcttcacctaggcacattgtc

SEQ ID NO: 424486 - DNA, 554 bp, Homo sapiens
caaaaacaaaaaacaaaaccaaaaaagtatataggcaacaaagagcacgatgaaagcaacagtacctcacatttcaatactaacaataaatgtaaatggactaaatgctccacttaaaatatacagaactgcagagtggatctgaacgcaccaaccaactatctgctgccttcagaagactcacctaacacacaagaactcacataaacttaaagtaaagggtatatatgtatgatggaatrctatgcagccataaaaagggatgaattaacagcatttgcagtcctgcctgagattggagactattattctaagtgaagtaactcaggaatggaaaaccaaacatcatatgttgtcactgatagttaggagctaagctatgaggatgcaaaggcgtaagaatgatacaatggactttggggacttgagaacaagagtgggaggggagcaagggacaaaagactacaaatatggtgcaatgtatactgctcgggtgatgggtgcaccaaaatctcacaaattaccactaaagaacttactcatgtaactaaata

SEQ ID NO: 424487 - DNA, 554 bp, Homo sapiens
caaaaacaaaaaacaaaaccaaaaaagtatataggcaacaaagagcacgatgaaagcaacagtacctcacatttcaatactaacaataaatgtaaatggactaaatgctccacttaaaatatacagaactgcagagtggatctgaacgcaccaaccaactatctgctgccttcagaagactcacctaacacacaagaactcacataaacttaaagtaaagggtatatatgtatgatggaatactatgcagccataaaaagggatgaattaacagcatttgcagtcctgcctgagattggagactattattctaagtgaagtaactcaggaatggaaaaccaaacatcatatgttgtcactgatagttaggagmtaagctatgaggatgcaaaggcgtaagaatgatacaatggactttggggacttgagaacaagagtgggaggggagcaagggacaaaagactacaaatatggtgcaatgtatactgctcgggtgatgggtgcaccaaaatctcacaaattaccactaaagaacttactcatgtaactaaata

SEQ ID NO: 424488 - DNA, 527 bp, Homo sapiens
tctctgctttttctgcctcacttgggcatcagtctgcctcaacatgctgtagcccaaactctcttcaatttcccacttacctcctttccagtagtgtctactctcagtgtgaagtgtaactccaacatgctagggtaaggtgggggtgggagcaaaatcaaaggggtgagaaagaggaatgaaaggtggcatgtgatgcacaatagaaattgtttcttctgggtaactacatgggcttaaatttgtagatataatttygattattatgaataacaaagaaaaataaaaatacttgcttcatctttgctgcattttggacatattttaggcattgatgcctcagcttataatgtaaaatgaatttatagacaatttttatacaacaatgatacaaattttattttttgtctacaaagatgaaattttttcaagggaataaccttggcatgtcccaggctcagattgaatttccaagtggactatcagtaagtcaacaacttcctgagcatgtgctgtgtatagagatg

SEQ ID NO: 424489 - DNA, 634 bp, Homo sapiens
gattattatgaataacaaagaaaaataaaaatacttgcttcatctttgctgcattttggacatattttaggcattgatgcctcagcttataatgtaaaatgaatttatagacaatttttatacaacaatgatacaaattttattttttgtctacaaagatgaaattttttcaagggaataaccttggcatgtcccaggctcagattgaatttccaagtggactatcagtaagtcaacaacttcctgagcatgtgctrtgtatagagatgggcctgtatcagcaatatttatgaaattaaaagaatagataaagagcttgggaccaaataaaaaagcagatcaaaagcaaatttgcaacatctacaaaagtaaaaacgagcaaaacttaaatgtatatatgatcaacgtatttgttcatcttttattattttccacacatatacacataacagtctcagttacacatagaaataagtaagaattatagtggggtgggggagtagtaattcaagtggcctctaagcatcttcttacctagtaattctcccttacctctgatataagaatctaatagaataattcactatttaaatactatgcattggctaagatcatacttttctaatgaaatggc

SEQ ID NO: 424490 - DNA, 634 bp, Homo sapiens
gattattatgaataacaaagaaaaataaaaatacttgcttcatctttgctgcattttggacatattttaggcattgatgcctcagcttataatgtaaaatgaatttatagacaatttttatacaacaatgatacaaattttattttttgtctacaaagatgaaattttttcaagggaataaccttggcatgtcccaggctcagattgaatttccaagtggactatcagtaagtcaacaacttcctgagcatgtgctgtgtatagagatgggcctgtatcagcaatatttatgaaattaaaagaatagataaagagcttgggaccaaataaaaaagcagatcaaaagcaaatttgcarcatctacaaaagtaaaaacgagcaaaacttaaatgtatatatgatcaacgtatttgttcatcttttattattttccacacatatacacataacagtctcagttacacatagaaataagtaagaattatagtggggtgggggagtagtaattcaagtggcctctaagcatcttcttacctagtaattctcccttacctctgatataagaatctaatagaataattcactatttaaatactatgcattggctaagatcatacttttctaatgaaatggc

SEQ ID NO: 424491 - DNA, 634 bp, Homo sapiens
gattattatgaataacaaagaaaaataaaaatacttgcttcatctttgctgcattttggacatattttaggcattgatgcctcagcttataatgtaaaatgaatttatagacaatttttatacaacaatgatacaaattttattttttgtctacaaagatgaaattttttcaagggaataaccttggcatgtcccaggctcagattgaatttccaagtggactatcagtaagtcaacaacttcctgagcatgtgctgtgtatagagatgggcctgtatcagcaatatttatgaaattaaaagaatagataaagagcttgggaccaaataaaaaagcagatcaaaagcaaatttgcaacatctacaaaagtaaaaacgagcaaaacttaaatgtatatatgatcaacrtatttgttcatcttttattattttccacacatatacacataacagtctcagttacacatagaaataagtaagaattatagtggggtgggggagtagtaattcaagtggcctctaagcatcttcttacctagtaattctcccttacctctgatataagaatctaatagaataattcactatttaaatactatgcattggctaagatcatacttttctaatgaaatggc

SEQ ID NO: 424492 - DNA, 634 bp, Homo sapiens
gattattatgaataacaaagaaaaataaaaatacttgcttcatctttgctgcattttggacatattttaggcattgatgcctcagcttataatgtaaaatgaatttatagacaatttttatacaacaatgatacaaattttattttttgtctacaaagatgaaattttttcaagggaataaccttggcatgtcccaggctcagattgaatttccaagtggactatcagtaagtcaacaacttcctgagcatgtgctgtgtatagagatgggcctgtatcagcaatatttatgaaattaaaagaatagataaagagcttgggaccaaataaaaaagcagatcaaaagcaaatttgcaacatctacaaaagtaaaaacgagcaaaacttaaatgtatatatgatcaacgtatttgttcatcttttattattttccacacatatacacataacagtctcagttacacatagaaataagtaakaattatagtggggtgggggagtagtaattcaagtggcctctaagcatcttcttacctagtaattctcccttacctctgatataagaatctaatagaataattcactatttaaatactatgcattggctaagatcatacttttctaatgaaatggc

SEQ ID NO: 424493 - DNA, 617 bp, Homo sapiens
agtagtaattcaagtggcctctaagcatcttcttacctagtaattctcccttacctctgatataagaatctaatagaataattcactatttaaatactatgcattggctaagatcrtacttttctaatgaaatggcatatactaaatgctcaataaatgtgagattctctaccaccagtatttgttgtagattctttctgttttacttgatattactggatagtatccagtatgcttggaatgttgacaccactcctacattctagacatgaaaaacaaaggatctctgtttccaaggatagacattacggatagaatttttttcttccatggaacaataatcattttagtacagaaaaatagtcttcggccagagttacaaatgaatcctgacctaaatttattggattgagaaatgagccttcctggttattttgcccatgaagagaaaaacaatcaaaacaaaataagatgaaactacttggtggaggcaagacttctggaatagcagagtcaggacctccagaaatccattcttctatgcaagtcatgaaaatactggcaaaactatcaaaaccaacttttttgatctctggaaagtgatcaaaggcttacaa

SEQ ID NO: 424494 - DNA, 617 bp, Homo sapiens
agtagtaattcaagtggcctctaagcatcttcttacctagtaattctcccttacctctgatataagaatctaatagaataattcactatttaaatactatgcattggctaagatcatacttttctaatgaaatggcatatactaaatgctcaataaatgtgagattctctaccaccagtatttgttgtagattctttctgttttacttgatattactggatagtatccagtatgcttggaatgttgacaccactcctacattctagacatgaaaaacaaaggatctctgtttccaaggatagacattacggatrgaatttttttcttccatggaacaataatcattttagtacagaaaaatagtcttcggccagagttacaaatgaatcctgacctaaatttattggattgagaaatgagccttcctggttattttgcccatgaagagaaaaacaatcaaaacaaaataagatgaaactacttggtggaggcaagacttctggaatagcagagtcaggacctccagaaatccattcttctatgcaagtcatgaaaatactggcaaaactatcaaaaccaacttttttgatctctggaaagtgatcaaaggcttacaa

SEQ ID NO: 424495 - DNA, 617 bp, Homo sapiens
agtagtaattcaagtggcctctaagcatcttcttacctagtaattctcccttacctctgatataagaatctaatagaataattcactatttaaatactatgcattggctaagatcatacttttctaatgaaatggcatatactaaatgctcaataaatgtgagattctctaccaccagtatttgttgtagattctttctgttttacttgatattactggatagtatccagtatgcttggaatgttgacaccactcctacattctagacatgaaaaacaaaggatctctgtttccaaggatagacattacggatagaatttttttcttccatggaacaataatcattttagtacagaaaaatagtcttcggccagagttacaaatgaatcctgacctaaatttattggattgagaaatgagccttcctggttattttgcccatgaagagaaaaacaatcaaaacaaaataagatgaaactacttggtggaggcaagacttctggaatagcagagtcaggacctccagaaatccattcttctatgmaagtcatgaaaatactggcaaaactatcaaaaccaacttttttgatctctggaaagtgatcaaaggcttacaa

SEQ ID NO: 424496 - DNA, 625 bp, Homo sapiens
tcttttgttagtttttaggaagggctgtactgtgggagtagacctttgttaatccacctcttgtagctagatgtaactctgtatttagtcactggaatgttggaagaggaagaagaagaagggtaaagggagggctgtttgcttgtatctccatatctagaagatggttttagattacaactgtaggtctatatgtgcatttctactaaaattcctgtgtttattatggacaaagttcattattttgcaacatttaacctttatagatgtcctgaggtgacaatgtatgataaaaaaatagagctagtgaattgrccaatttataactattttttgctatactttatagaaaagatgaatcttggacatggaattgttaaaccacctctaaccagtgtatgtcagaacttgttaattaggttagcagcagaggggcaggaggaagtataaaggcagagacatatgtagatgtgtttatatttacattttgacaatagccatccatgcatgcacatctcttttggctgtactgcaggaatacattaagtaattcaatggaaacataccttcttgttaatattttaatgttatagatctgatcatgaattctcttagaaacaatata

SEQ ID NO: 424497 - DNA, 625 bp, Homo sapiens
tcttttgttagtttttaggaagggctgtactgtgggagtagacctttgttaatccacctcttgtagctagatgtaactctgtatttagtcactggaatgttggaagaggaagaagaagaagggtaaagggagggctgtttgcttgtatctccatatctagaagatggttttagattacaactgtaggtctatatgtgcatttctactaaaattcctgtgtttattatggacaaagttcattattttgcaacatttaacctttatagatgtcctgaggtgacaatgtatgataaaaaaatagagctagtgaattgaccaatttataactattttttgctatactttatagaaaagatgaatcttggacatggaattgttaaaccacctctaaccagtgtatgtcagaacttgttaattaggttagcagcagaggggcaggaggaagtataaaggcagagacatatgtagatgtgtttatatttacattttgacaatagccatccatgcatgcacatctcttttggctgtactgcaggaatacattaagtaattcartggaaacataccttcttgttaatattttaatgttatagatctgatcatgaattctcttagaaacaatata

SEQ ID NO: 424498 - DNA, 570 bp, Homo sapiens
gtaggtctatatgtgcatttctactaaaattcctgtgtttattatggacaaagttcattattttgcaacatttaacctttatagatgtcctgaggtgacaatgtatgataaaaaaatagagctagtgaattgaccaatttataactattttttgctatactttatagaaaagatgaatcttggacatggaattgttaaaccacctctaaccagtgtatgtcagaacttgttaattaggttagcagcagaggggcaggaggaagtataaaggcagagacatatgtagatgtgtttatatttacattttgacaatagccatccatgcatgcacatctcttttggctgtactgcaggaatacattaagtaattcaatggaaacataccttcttgttaatattttaatgttatagatctgatcrtgaattctcttagaaacaatatacttagtgtactctgttgctttctgtttaattttaaattgagcattaagggaaggctggtttgaggtaactctgccaatacttttatctagagacccgttgtgatttttgtcttctgtgaaatttttg

SEQ ID NO: 424499 - DNA, 377 bp, Homo sapiens
taactctgccaatacttttatctagagacccgttgtgatttttgtcttctgtgaaatttttgtcccaggaaaggtgagattacatttttttctaacaaattgagttggtatagtatatttttgattatcaaaacacagtaaacattcacaatrtttgaaaaagtatgatacatactgtacaatctcaatctcataaaatttggatgttgtatctataaacacacacgacctagatggatacatcaaactgtaaaccgcttgtgactgtgaataattttgttctttgattctgatgtctttcagtttcttatactgcacatattaacttttaaaaagttaaggattttttaaataaataaatacatacaagaaaattc

SEQ ID NO: 424500 - DNA, 509 bp, Homo sapiens
  misc_feature (1)...(509): n = A,T,C or G
nnnnnnnccctcatttctcatggtatgaaaggagaggaaatctgctattgaaggagaaaagaaatcattccaaaaccttattgaacttctaaggcccatgggctggcctgcatacagatcacaattataagaagaccctatcaaagagcaagttggatctcacccaataactctttcccgcaggctctccacaagtwataccctaaaggctgccagcagagctgagagagatccttcccaggtacctgagatatcctaaaacttaaggcaggcaacttcagaaggctggaggtaagaggagctgagagaaatctctccgaggcatttcaagcttcacagggtacaatgcagctaacctcctaatgttaaaggcagagtgagagggcacagagagactgcctatgatgcaaaaagtagtatccaaaaaaattgcagtggaactatagactagagacagaattcccatggttgagaaagctggtgactttgctggaaaacacaaagatatc

SEQ ID NO: 424501 - DNA, 601 bp, Homo sapiens
attgcattccttgctgattttaaagagaatcagagtggtttatgaaggccctttaggaagtgaaagtaaaactcttcatttgatttaacactggtgtatatatatatgtgtgtgtgtgtacatatatatatatataaaacttttgcaaagattggcccaaatcaaaaagttatttgaaaacagggacttaaaaaaaaaaaagtggaggccaggcgtggtggctcacgcctataatcctggcactttgggaggctgaggcgggaagatcatgaggtcaggagatcgagaccatcctggctaacatggtgaaaccccgtctctactaaaaatacaaaaaattagctgggcgtggtggcgggtgcctgtagtcccagctactcgggaggytgaggcaggaaaatggtgtgaaccccggaggcggagcttgcagtaagcagagatcacgccactgcactccagcctgggagacagagcgagactccgtctcaaaaaaaaaaaaaaaagtggaaaatattattgttgtttttatcattgaccacagacctctggggggtggaacagaagaatattctgcattaaaatcttattagtgatttataag

SEQ ID NO: 424502 - DNA, 677 bp, Homo sapiens
tgggcatttctatgtcttctttggagaactgtctattaaggtcctttgctcatttttaaattgagccatttggttttttgctactgcgttgcaggagtctccatgcatttttgttattaacatcttaccagatatatggtttgcaagtattttctcccatcctgcaggttgcctcgtcactctgttgtttcctttgttgtgcagaagcttgctagtttgatgtaatcctgcttccctatttttgcttttgttgcttatgttattggtgtcatatgcatgaaatcattgcctagaccaatgtcatttaagcattttccctaggagtattacaagttctagccttacctttaagtacttaatccattatgagtttatttttgtttatagtgtaagctaggggtccaattttattcttttgtaggtggatgtgcagtttttccaataccatttgttaaacaggcaatcctttccccrttgtgtgtttttggcacccgagttgaaaatcagttgaccatatacgcttgggtttatttctggactttctattctgttccattggtttacatgaggagacttcaaaaagactgtagaaaactagaattaaaagataaaagtaaaaaaataaactttatttcccaacataagctccatcaaattaaagacatttttttgtaagc

SEQ ID NO: 424503 - DNA, 569 bp, Homo sapiens
cgatctcctgaccttgtgatccaccagcctcggcctcccaaagtgttgggattacaggcatgagccattgcacacagccaagaatggagaatctttcccagtcccaattttaggggaaaaagatttaatatttcactactgagtatgagtctgttgactttttatatgtaacccaaatcagattgaagaagtttctttctcttctgagattgcaaaaagtttttgtcaaaggtaagtgttaaactttgccatatacgtttcctgcatctatgaaaataatcagagtgggagtggccaagatggccacctagaagcagcttaggtgtatggctctcaaagagagaaacagaaggggtgaaatctagagaaccccagtaagatactccatgagaacatcatccacaagacatataatcatcacgttctccaaggtcaaaatcaaggaaaaaaatgttaaaggcagctagagagaaaggccaggtcayctacgaaagaaagcccatcagactaacagtgaacctctcagctgaaactctgcaagccagaagggattggggaccaatgttcaa

SEQ ID NO: 424504 - DNA, 442 bp, Homo sapiens
ctctctcagtgccactgaaatggtttacacaggtatctaaaagaggtctgatttttataattcaatttataagaccaatactatctaagaaacccccaataatagtatgttattctgaaatagaaatgtgttgagctttggaaaaaagcaaagataaaacatctgaaaaaaattgtgataaatagttcatttctttgtgttgttacccaaaagagaaacagaaattatgtcaaatgagaaaaataggagcttgacaaataataaagacaaaaatctacagtgttaaaaatctattattaakcatgctgactcctggattgcatctacataatttgagggtaaaagtgtggtatttatttaaataataaaggctgtttgtttctacatattctatgactttatttaatagtgtttgatgagaaggacaagaagaaaattagca

SEQ ID NO: 424505 - DNA, 610 bp, Homo sapiens
gacataagtaaatggaaaaataatctatattcatagattggaagaatcaatatccttaaaatggccatactgcccaaagtaatttacaaattcaatgccattcttatcaagctagaaatgtcattttttacagaagtcagaaaaactattctaaaattcactgggaaccaaaacagagccaaaaagccaaagcaatcttaagaaaaagaacaaagcttgaattrtcacattacctgacttttaaatatagtacagatctattgtaagcaaaacagcatggtattggtacaaaaacagacacatagactaatagaacagaatagagaacccagaaataaaaccatacacctacaaccatcagatcttcaacaaacttgacaaacacactatggagaaaggaatccctattcaataaatggtgctgggataactggctatccatatacagaagaatgaaactggacctctcttgatatggtttggctgtgtccccacccaaatctcattttgaattgtagttccaataatcctcaaatgtcatgggagggaccaggtggagataattgaatcatgggggcagtttcccctatcctgttcttgtgttcataag

SEQ ID NO: 424506 - DNA, 464 bp, Homo sapiens
tacaacctgcccataaacacacacacaaaaatgctcattatcgctaatcatcagagaaatgcaaatcaaaatcacaataagataccatctcataccagtcagaatggctttcattaagaagtcaaaacataatacatgctggcaagtctgcaaagaaaaggggacaattatacactgkgggtggcaacgtagattagttcagccacaatggagagcagtttggagatttctcatagaaccaagagttgaattaccatttgacccagcaatcccattgctaggtatatatccaaaggaaaataaatcattctaccaaaaggacacatgtatgttcactgcagcactattcagaaaagcaaaaccatggaattaacctaggttcccatcaattatgaattggataaaaaaaatgtggtacatatacaccagggaatactatgtagccataaaaataataaaattat

SEQ ID NO: 424507 - DNA, 464 bp, Homo sapiens
tacaacctgcccataaacacacacacaaaaatgctcattatcgctaatcatcagagaaatgcaaatcaaaatcacaataagataccatctcataccagtcagaatggctttcattaagaagtcaaaacataatacatgctggcaagtctgcaaagaaaaggggacaattatacactgtgggtggcaaygtagattagttcagccacaatggagagcagtttggagatttctcatagaaccaagagttgaattaccatttgacccagcaatcccattgctaggtatatatccaaaggaaaataaatcattctaccaaaaggacacatgtatgttcactgcagcactattcagaaaagcaaaaccatggaattaacctaggttcccatcaattatgaattggataaaaaaaatgtggtacatatacaccagggaatactatgtagccataaaaataataaaattat

SEQ ID NO: 424508 - DNA, 464 bp, Homo sapiens
tacaacctgcccataaacacacacacaaaaatgctcattatcgctaatcatcagagaaatgcaaatcaaaatcacaataagataccatctcataccagtcagaatggctttcattaagaagtcaaaacataatacatgctggcaagtctgcaaagaaaaggggacaattatacactgtgggtggcaacgtagattagttcagccacaatggagagcagtttggagatttctcatagaaccaagagttgaattaccatttgacccagcaatcccattgctaggtatatatccaaaggaaaataaatcattctaccaaaaggacacatgtatgttcactgcagcactattcakaaaagcaaaaccatggaattaacctaggttcccatcaattatgaattggataaaaaaaatgtggtacatatacaccagggaatactatgtagccataaaaataataaaattat

SEQ ID NO: 424509 - DNA, 654 bp, Homo sapiens
ctgcggacttatattgggggagagagaggagaggggagctgaaaaactacctattgggtactacgctcactatctgggttatgggtttggtcatgtcccaaacctcagcatcatgcaacatactcatgtaacaaacatgcacatgtatgccctgattctaaaataaaatttgaaaaagaaaatgaaatttccagtgagtgtgtaagggggaatactaaaaatgaaaagtcaaaccaatggagtagaacaaatattaaaatccataattcataaaactttaatttaaaaaatgcatatttaatagaaacattatttataaaaggtgggtgggagaagaaatcaatcttacttattgaaaaggaatatattacatatgaggacaaaaactcagaatgatcaatagtcaaactaacagatttgcagtgggagggccaggatccttttgcatccagtctttagaaggattaaagattagacagatattacacctttcaacagcaacattctatatctgaggaaaatttaacaacrtatttccctaagagaaaaattcctcaagaaaccaaggtattacagaagaattgacatgaggtgtagtggtgagcattaagcacatgtgtgtaaaactgataataagggtaaaggttattttta

SEQ ID NO: 424510 - DNA, 590 bp, Homo sapiens
ttaattgtggacctacaaaataagtattgttatmtactgtacacttaaatgtttatgtaactaatttaccattctttgcagtgtttcatatgcctaattattaatctttagaaagattctactcttattgagaaaattacaaaggtgattctcatagaaattatcttttgagctgtggcacttttgaaaacctgaaaatcagttaaattcaggctcagggctgaatctggcacctaagtcacaggtttcaatagagctaggaatattaaaatgataaaaatgcccttgatgcttaccttttaacaacaacattaatgacagcaaaaggtaggctccttaagtgattttttaaatcttccaatccattttgaagacacatctaatgtccaagtaaaatctaaataattgagatcactgataaggtttggctctgtgtccccacccaaatttcatctggaattgtaatccccacatgtcatgggagggacctggtgggaggtgattgaatcatggaggcagttgcccacttgctgttctcatgatagtgagggagttctcatgagatctggttgtttgataaatgtctcttg

SEQ ID NO: 424511 - DNA, 590 bp, Homo sapiens
ttaattgtggacctacaaaataagtattgttatctactgtacacttaaatgtttatgtaamtaatttaccattctttgcagtgtttcatatgcctaattattaatctttagaaagattctactcttattgagaaaattacaaaggtgattctcatagaaattatcttttgagctgtggcacttttgaaaacctgaaaatcagttaaattcaggctcagggctgaatctggcacctaagtcacaggtttcaatagagctaggaatattaaaatgataaaaatgcccttgatgcttaccttttaacaacaacattaatgacagcaaaaggtaggctccttaagtgattttttaaatcttccaatccattttgaagacacatctaatgtccaagtaaaatctaaataattgagatcactgataaggtttggctctgtgtccccacccaaatttcatctggaattgtaatccccacatgtcatgggagggacctggtgggaggtgattgaatcatggaggcagttgcccacttgctgttctcatgatagtgagggagttctcatgagatctggttgtttgataaatgtctcttg

SEQ ID NO: 424512 - DNA, 590 bp, Homo sapiens
ttaattgtggacctacaaaataagtattgttatctactgtacacttaaatgtttatgtaactaatttaccattctttgcagtgtttcatatgcctaattattaatctttagaaagattctactcttattgagaaaattacaaaggtgattctcatagaaattatyttttgagctgtggcacttttgaaaacctgaaaatcagttaaattcaggctcagggctgaatctggcacctaagtcacaggtttcaatagagctaggaatattaaaatgataaaaatgcccttgatgcttaccttttaacaacaacattaatgacagcaaaaggtaggctccttaagtgattttttaaatcttccaatccattttgaagacacatctaatgtccaagtaaaatctaaataattgagatcactgataaggtttggctctgtgtccccacccaaatttcatctggaattgtaatccccacatgtcatgggagggacctggtgggaggtgattgaatcatggaggcagttgcccacttgctgttctcatgatagtgagggagttctcatgagatctggttgtttgataaatgtctcttg

SEQ ID NO: 424513 - DNA, 533 bp, Homo sapiens
accagacattaaacctgacaggaccttgactttgaacttcccactactaaaactatgaagaataaattcatattctttataaattacccagtcagaggtattttagtatagcagcacagacaaaaacagatgaattggacataattgggcatatgaacagcccctatgcctgccaccacagctaatgtgtccaagagctcatggagtcagcactgagttgaacaaagattattttggctgggcatcatcagatagctgagtcattctgtctccttggttgcttcatgcctyttttttttcagggaatgctctcttcttggcatgtgatacaaagatagtcatacttcatgcaggtccccataactccatcctgtttgtcttagtgattttggactattataacaaaatactataaactaggtggcttataaacaatgtatttctcaaagttctgaaggctgagacattcaagatgaaggattcagaagatttggtgtatggtgaggacatgcttcttggtccataggcagcaa

SEQ ID NO: 424514 - DNA, 533 bp, Homo sapiens
accagacattaaacctgacaggaccttgactttgaacttcccactactaaaactatgaagaataaattcatattctttataaattacccagtcagaggtattttagtatagcagcacagacaaaaacagatgaattggacataattgggcatatgaacagcccctatgcctgccaccacagctaatgtgtccaagagctcatggagtcagcactgagttgaacaaagattattttggctgggcatcatcagatagctgagtcattctgtctccttggttgcttcatgcctcttttttttcagggaatgctctcttcttggcatgtgatacaaagatagtcatacttcatgcaggtccccataactycatcctgtttgtcttagtgattttggactattataacaaaatactataaactaggtggcttataaacaatgtatttctcaaagttctgaaggctgagacattcaagatgaaggattcagaagatttggtgtatggtgaggacatgcttcttggtccataggcagcaa

SEQ ID NO: 424515 - DNA, 607 bp, Homo sapiens
gtgattttggactattataacaaaatactataaactaggtggcttataaacaatgtatttctcaaagttctgaaggctgagacattcaagatgaaggattcagaagatttggtgtatggtgaggacatgcttcttggtccataggcagcaaccttcttgctatataatcacctggtggaggagttagggagttctcaagggtctcttttatatgggcactaaccccattcatgagggctccatctttatgacataatcacccaccaaaggcactatctcctaataccattagattgggggaaaggatttcagcatttgaatttgtgggggatacaaacagtctatagcactattttaaactataactttatygttattcagatatggtgagaccaacatatcaatgaatgattaccactgaaaacatgttgtattcacaaatttcaacagaaggggccatgccatgccatgggaggctacaaaaggaagtactggggttagtcaggtggtagaaggaggagagaaactggcaagagcttttattgtgctttccttgtgaaggaacatgtgagacagtataagcaggtatagaatagtctgttttgaa

SEQ ID NO: 424516 - DNA, 607 bp, Homo sapiens
gtgattttggactattataacaaaatactataaactaggtggcttataaacaatgtatttctcaaagttctgaaggctgagacattcaagatgaaggattcagaagatttggtgtatggtgaggacatgcttcttggtccataggcagcaaccttcttgctatataatcacctggtggaggagttagggagttctcaagggtctcttttatatgggcactaaccccattcatgagggctccatctttatgacataatcacccaccaaaggcactatctcctaataccattagattgggggaaaggatttcagcatttgaatttgtgggggatacaaacagtctatagcactattttaaactataactttattgttattcagatatggtgagaccaacatatcaatgaatgattaccactgaaaayatgttgtattcacaaatttcaacagaaggggccatgccatgccatgggaggctacaaaaggaagtactggggttagtcaggtggtagaaggaggagagaaactggcaagagcttttattgtgctttccttgtgaaggaacatgtgagacagtataagcaggtatagaatagtctgttttgaa

SEQ ID NO: 424517 - DNA, 535 bp, Homo sapiens
atacgctctgggattgaatagcaccttggcaaaaagtatgtgcaatgattcatgataggtagtaatttgatcttggtaccaagatctccttatggttggtgctacaaatctataatcaaaaattgtctactcccttaccctggcttgatggcttatagggttctaagctctgaatccttgcctgtggaactacctcaccatctttatgggtaaataagtgactcatggatctttcttcgctgcctagtttcaatcttattacttkgataatgtaaaggaaggtacgtggtgtactccaaatcaagactggtttgaaacatcctgagtttgctgtctatatttcagctattcctttgtcagattagctttgttgcctaaccttttggtaagatttggtcctgggctcttggatcctgccacccagagtcttggcattattgtacccaacacttgcctctttgagaacagcagaataggtggatatcatgacaggaataaaaactactatatgcagagtgaatacaatgtttcagaa

SEQ ID NO: 424518 - DNA, 590 bp, Homo sapiens
tatatattaatttcttgactttcagtttaacctggagatgaacagtataatggtcaatacacagtttttgcagctgggcaaaagtagatttaagttctggcaccagcaccaactggtgtgtaacttgggtctaattacttaatgtctgatatggttagtctttgtgttccctaaaatctcatcttgaattataatcctcataatccccaggtgtcaagggagagaccaggtggagttaattgaatcatagggccggtccccagctccccatgctgttctggtgatagtgagttcttatgagatctgatggttttacaaggggctcttcccmcttcgctctgcatttctcctttctgccacctgtgaagaagttgtcttatttccccttcaccttctgccatgatcataagtttcctgaggcctccccccagccgtggtaaactgtgagtcaattaaagctccttcctttataagttacccagtcttgggcaattctttatagcagtgtgaaaacagactaatacaatatctcaatctgagactgtaaatggaaagctcttaacaggacttgtgaatcaatgaagagtaag

SEQ ID NO: 424519 - DNA, 576 bp, Homo sapiens
tcaatacacagtttttgcagctgggcaaaagtagatttaagttctggcaccagcaccaactggtgtgtaacttgggtctaattacttaatgtctgatatggttagtctttgtgttccctaaaatctcatcttgaattataatcctcataatccccaggtgtcaagggagagaccaggtggagttaattgaatcatagggccggtccccagctccccatgctgttctggtgatagtgagttcttatgagatctgatggttttacaaggggctcttcccccttcgctctgcatttctcctttctgccacctgtgaagaagttgtcttatttccccttcaccttctgccatgatcataagtttcctgaggcctccccccagccgtggtaaactgtgagtcaattaaagctccttcctttataagttacccagtcttgggcaattctttatagcagtgtgaaaacagactaatacaatatctcaatctgagactgtaaatggaaagctcttaacaggacttgtgaaycaatgaagagtaagtgttcagtaaacacttagttgtgttactatttcataatg

SEQ ID NO: 424520 - DNA, 393 bp, Homo sapiens
cctgatttctcggcaggtcagataacttacttttggcttagtgacatggaactttatagcatgagtgactccattttgttttggtctgttgggtctagtgcaggagttcagtccaaaccaatagtctcctatatattttatttaataagctctaatggtctgaagattttgcagttcattttttaattttcacccacataacccatatttactaatttaaaaaaatggmtatacattatttatcagtatttgtacagctgtctaaatgactttatgttgatgtgtgttgctactgtcaagttcatattagaacttctggggaagcaaggaccatatcttatttgtttggtaccagaacctaatccattgaaatatgttgtagaaaaaaaaaat

SEQ ID NO: 424521 - DNA, 567 bp, Homo sapiens
agtataatttgtggagttttgctgattgattaaatatgaggcatgagaagaaggagagaaaggaatgaaatatgtctaccaggaatatgggttgaaccattgagtagatggtggtgcaggtgcaatttactgaagatctgggatgaacaggttttggagtgaagatccaagtccacttttttatgtattaaatttaagatacattttagacattaggagacatttgtggccactatgacatataaggctttagcttatttgagaggttcagactggaaatatctatttgagtagttagtattttatgtgcaagccatataattgaatgatattacatagagaaaaagtgtagagtgagaaaaggaraggatcaaagactaagcactatagaatgcctacatttttattgtaattattattattattattcttattctgagacagagtttcactcctgtcgcccaggctggagtgcaatggcacgatctctgctcactgcaacctttgcctcccgggttcaagcgattctctgcctcagcctcccaagtagtttggattacaggcacg

SEQ ID NO: 424522 - DNA, 571 bp, Homo sapiens
taacaaatgtggacagctttgtagccagcactagaatcatgatatgaaacattttcatcacccctaaaagatccctcatttacagccaatcccttttttccatcccagccctgccagccgcggatccactttctgtggctatcattttgtttctagaatttcatatgaatggagtcttacagtatgtgatcttctgtgtctgacagattcacccatgttgttacktgtatgtgtacttcattcttgtttttatttgctgatgagcattttatgacttgtttcattcacaagttgatggacatttgggttatttccagtttttacctatcacaaataaagctgctatgaatgttcctgtacaagtttatgtgaatacatgttttcatttctcttgggtaaacatttaggtgtaggatggctgggctatataggtggtgtatattgaaatatatgagaaattgccaaactgttttccaaagtgagtatatcattgtgcattcccaacagctatctatgggagttccagtggctccacatccttgccaacatgatcagtctttttcattttcgc

SEQ ID NO: 424523 - DNA, 605 bp, Homo sapiens
gagatttttgcatgaaaaaatatggtctttttctagtcaggaagtagaaataatgtactttgaattagtaaacatgttccagggatgtgctagattttaacatctgctaaatcattttttgcaactctgtggggtgggtgctgttgtctctttttcacaaataaaggtatctggacttaggcttctatggtctttccccaaaacacagatagcagaggaggcaaatccaggcttgcctttccccagagcaattgcttttttgacattctgtaaaatttttttccctaaaaatccttgttagtatgggaaggccaacagtacttagagtatcaaatgagacaaaattcttcctgcttaccccagatgtgacctaagaatcactctcaacacagcatctaagtagccactatcgattaattagtactagtatgcagattgaaaattatttgccattctgtctgcaaagsctgcaagtgtggactttattactagaccataaggttcataccctaacccactctctcagcaaagtagctccaatgaagaggggatggtaatgcagagacctaaggcacgaagacccactgacctgaagaagcaagggt

SEQ ID NO: 424524 - DNA, 564 bp, Homo sapiens
ggggcggctacccccatgctgctgttctcatgataatgaatgagttctcacgagagctgatggctttataaggggctttttcacyttttgctctgcacttctcctttctgctatcatgtgaaaaaggacatgtttgtttccccttctgccatgattgtaagtttcctgaggcctccccagccctgtggaactgtgagtcaattaaacctctttcctctataagttactcaaactcgggtatgtctttattaccagtgtgagaatggagtaatacagaagggatggtgaatgtggcaagttccatgactgacaagcccatgttaggaggcattagtgtaaagaagatgctttatctaattaactaaatccatccatcatgctgctattaaaatctctgacccttctttctttctcatttaactcatgtaattacttcaattacacatttcttcaattattataattatgtattatttgtgttgaagtcattcttagccggtacaacattggcaacataatctctgtttccttcctgtctttatattcaatttcagtgtctttata

SEQ ID NO: 424525 - DNA, 450 bp, Homo sapiens
tatatatatatatatatatatatatatatatatatatatatatatatatatgatataatagaaaatatctgtttagcacaaaaaaagactaatggatgaattgagagacataactgatttgacatatagcaaacaaatagaaaaatgtcagaaataagttctttttatcaattactatgttaaatatatatagattagactcttcaattaaaaaaataagtaaaatggataaaaattatgattcaattttatactgtctacaagaggcttggatacacaaattgttggaaaatgaaaggctagaaagagatattgcatgtaaatagtatccaaaaraaagctggagtagccatagtaatattgaaaaaaaaaaaaacaaaaatcgttattagagacaaggaaggacattatgcaatgataaaagtatcaagggcaaaacaattataaaca

SEQ ID NO: 424526 - DNA, 562 bp, Homo sapiens
cacatgccatcatgcctggctaatttttagtatttttagtggaaatggggttttgcagtgttggccaggcttgtctcaaactcctgacctcaagtgatctgcccacctcakcctcccaaagtgctgagattacaggcgtgagccaccattcctggcctggttctttcttaaaatggccttttcatcttccatctcctgtattattttattatatttcttagaatccttggatatgattttgactttctattgaatctcagtgatctttgatatggtttggatttgtgtttccgcccaaattgcatgtcaaattgtaatctccagtgatggagacagggcctgatgggatgtgattggatcatggaggcgggcctcccccttgctgttcttgttagagtgagtgagttctcatgagatctgcttgtttaaaagtgtgtagcacctcccccttcacgctcttctttctgttctggccattaaagatgtgccagcttctcactttccaccatgattttagtttcctgaggtctccccagaagcagaagcctgtacattctgcaga

SEQ ID NO: 424527 - DNA, 563 bp, Homo sapiens
agggtctcaaatgccgatccatctgaccacaaacctgtgctctccaccggtatagtatcctgggtatcctgccttctttgaggctgatagtgaataagtttcctggatgtgactgattggagggtgggggctgatgacagaagagaatgatccactgtagtctggaggaatccagcattgataagccaaaaatatttcttcttattctacaactctctggagagcattggcaatatgtcttgcatttttaaagtacttatggtagattgcattaacaactctaactcttaacgccttcctacatccatgtcctttaccatagaacatttcagtttcattcactgcagattccccagtgtgacttattttggccagtgggatgctagcatggcatgatgtgagcaaaggactgagaagctcytgagtgactgagtttgctctcttatacttttcatttatcagtggacaaagatctctgggctagcctactgattccagaaggaggatgagtgacatgtggactagagctgatttgtcctattgagccctacctaggtcagttg

SEQ ID NO: 424528 - DNA, 611 bp, Homo sapiens
tcctatcaggcctgcaagtgcatctgacataactctgattgtcccatatcagtgctatgagagtccagccagtttctgtgattgtggggtagaaggcaatcccggccaatgggttagctctgtttcactcagcaggctcttcagctaaaatagcttaaagggccactcaaggggcaaaggcgaagaggacaaaagtgtagtttggcaaatcagcaatcctattgaaaaccatttccagtggttttggcatcaagggaagatgtgctgtgtggaagggcctgacatgcctgaagcaactgtagtggctctctaaatagtaaaaaaatttagaaaataaggctgggtgggcaggaaatgtagacaccttcaaattactttaacttctctggttctcttgccagattgatttctttcattaggggaagttacttccatctacataccattctagcctcaggaggtaagagactgatttagtagtsttaatttagaagtgtcctgagttttcaggaatttattctttaatatttgaatgcccatatgtgacacttggattaatcgacttgatttgggtgtaagtcttttgtgagttaatgcctcaagttaagtcg

SEQ ID NO: 424529 - DNA, 539 bp, Homo sapiens
gaggcttgtaagttgcctgcatcacagagctgatgactttgctttagtggccagccattctttgcttgcctagtttgttaaaatccttcaggtcgtagagtaatttcctcaggaaattctcataccagagcatacttgtaatggcatgstgagcttttagctctcatcgtgctgcaatgaagggtgactcatgtcttcctgctcaatttgtaaaccccatgaaggtaggggctgtatctctggttcacgcctttgtgaccaataactagtggcagcacctggcttgtggtaggtgctcagtaaatgtttatttaaatagtactcttatctttacaaagaaatgtctgaatgacatgatccataggttcctgcgaattctgtgtttctggtgataatgtttagaccaagcaaaagacttcagtaggacttaacgttcccagtcactgatgctatgggaagggcatgattgctggtgatgtgggttttggtctttgtcataagtcgttctgaggcctttctacttttatgcaggcccaggc

SEQ ID NO: 424530 - DNA, 539 bp, Homo sapiens
gaggcttgtaagttgcctgcatcacagagctgatgactttgctttagtggccagccattctttgcttgcctagtttgttaaaatccttcaggtcgtagagtaatttcctcaggaaattctcataccagagcatacttgtaatggcatggtgagcttttagctctcatcgtgctgcaatgaagggtgactcatgtcttcctgctcaatttgtaaaccccatgaaggtaggggctgtatctctggttcacgcctttgtgaccaataactagtggcagcacctggcttgtggtaggtgctcagtaaatgtttatttaawtagtactcttatctttacaaagaaatgtctgaatgacatgatccataggttcctgcgaattctgtgtttctggtgataatgtttagaccaagcaaaagacttcagtaggacttaacgttcccagtcactgatgctatgggaagggcatgattgctggtgatgtgggttttggtctttgtcataagtcgttctgaggcctttctacttttatgcaggcccaggc

SEQ ID NO: 424531 - DNA, 539 bp, Homo sapiens
gaggcttgtaagttgcctgcatcacagagctgatgactttgctttagtggccagccattctttgcttgcctagtttgttaaaatccttcaggtcgtagagtaatttcctcaggaaattctcataccagagcatacttgtaatggcatggtgagcttttagctctcatcgtgctgcaatgaagggtgactcatgtcttcctgctcaatttgtaaaccccatgaaggtaggggctgtatctctggttcacgcctttgtgaccaataactagtggcagcacctggcttgtggtaggtgctcagtaaatgtttatttaaatagtactcttatctttacaaagaaatgtctgaatgacatgatccataggttcctgcgaattctgtgtttctggtgataatgtttrgaccaagcaaaagacttcagtaggacttaacgttcccagtcactgatgctatgggaagggcatgattgctggtgatgtgggttttggtctttgtcataagtcgttctgaggcctttctacttttatgcaggcccaggc

SEQ ID NO: 424532 - DNA, 539 bp, Homo sapiens
gaggcttgtaagttgcctgcatcacagagctgatgactttgctttagtggccagccattctttgcttgcctagtttgttaaaatccttcaggtcgtagagtaatttcctcaggaaattctcataccagagcatacttgtaatggcatggtgagcttttagctctcatcgtgctgcaatgaagggtgactcatgtcttcctgctcaatttgtaaaccccatgaaggtaggggctgtatctctggttcacgcctttgtgaccaataactagtggcagcacctggcttgtggtaggtgctcagtaaatgtttatttaaatagtactcttatctttacaaagaaatgtctgaatgacatgatccataggttcctgcgaattctgtgtttctggtgataatgtttagaccaagcaaaagacttcagtaggacttaaygttcccagtcactgatgctatgggaagggcatgattgctggtgatgtgggttttggtctttgtcataagtcgttctgaggcctttctacttttatgcaggcccaggc

SEQ ID NO: 424533 - DNA, 607 bp, Homo sapiens
acctcccatttccttcccgtagggcttggagaatgtttgcaaccctttcatctttagcatgggtgctgttcacttcgcccttggaaatacttctctctctagatcyggataggaaatggggcatcgtcttcccacagagacaagcaggcaagcctatttcattgcatagagttttgccatgaattggcataaagacaattgggggaactaaaatagtaattagagagcagtgataaagtttaaaataacctttgtccattgtcaggacacaaatcagtttccagtttctgcccatgattctggaattaggctttctagaccctaatcctagcttttggaacctcaattcatcatccttgaaatgggggggtggtgtcacagtatctattaggttaaaacatataaaattgtcatttttgtaggtcaaaaagggtcaaatctcgacaatttcatgtagctcaacttaatatatcataggattgctgtgtagatgaaatgaataatgcatgtaaggcacttgtcataatgcctgtcccaaaagtactcaatacatgcaagctatgatgatcctaatgatttttatctgagacagtgactgaggtcttat

SEQ ID NO: 424534 - DNA, 583 bp, Homo sapiens
tccacagctatttattgagtacctaccagatgtcaaagtttatgttagacaatggataacatggtgaccaagtcagatatagtacctgggagcttacagtctactaggagagagagagatcaaatacataatctaaataaaaaatgtaaaattgctgttgtggtattatgaatgagaatatatggtgtatggtagcaagaaatacagagctttcatcaagtttctgaatgttgggcatagctgccaactagcccacaccatgcttttgagaaaattaggtaaaagatgtcttaggatgtgcacttctgtgttaggatataggaattggtgagtggagtgtgactagattctacccatcattttaccctcagccagatgatcttgtgtagggtataacctgcacaaatgtacacagcatctttggttcagaggaggcttcctcaaggaaatgatattagcagttatcatatgacagagagagaagctaamtgtgattatgtgaaaatgtgtgcttatattcagtagaattgagaaagtggtgctccagagaactgtgtgtggaaaggcccagcggcaggaagaa

SEQ ID NO: 424535 - DNA, 542 bp, Homo sapiens
aaaaaagaaagcatattcctctcattgaaatggctttaatcttatgtcttgaaaaacaaaaagcttgatagtattttgtaaggggcatttggctcctttttgaaactttctttccaaagggccatcacattggtggaaaatggtacctgagtcatatgtgatcaaaatgccactcccaagtactttattttcaatctctaaatttctcctctgatagaagaaagcttttttcctgcctcattaagattcattttattggaatatcttattaaatacattttttgtatatatattactgtaatcaaatatctcaacctgcgttcaacagtggagtcttcctgtactgggtcgatggctttttataatgtggctttgtagyacaaaagatacagcggcctgtgtggcaccattaccagccctcgtgaatgaagtcctgaccaggtctggaaaaaagcctggtcctccagcattactccagataatgtagcttctctcatattccgtctctatttctcctatagttaaataaaataaatgtgttc

SEQ ID NO: 424536 - DNA, 633 bp, Homo sapiens
atgagatgaaagccgagacccattggtaattcttcctgagtaaacttaactcttggcaagaatactaggtttctaacccttttcttttttaaacgtgcttcctatataccttcagccatttcttttttatttattttattttacttcaagttctgggatacatgtgcagaacgtgcaggtttgttacataggtatgcatgtgccatggtggtttgctgcacctatcaactcgtcatctaggttttaagccctgcatgcattagatgtttgtcctaatgttctctctccccttgcccccaaccccatgacaggccctggtgtgtgatgttcccctccctgtgtccctgtgttctcattgttcaacttccacttatgaatgagaacatgcggtgtttggttttctgctcctgtgttagtttgctgagaatgatggtttccagcttcatccatgtccctgcaaaggacatgaactcattcttttttgcggctgcgtagtattctrtggtgtatatgtgccacattttctttatccagtctatcattgatgggcatttgggttggttccaagtctttgctattgtaaatagtgctgcaataaacatacatgtgcatgtttctatagcagaatgattt

SEQ ID NO: 424537 - DNA, 609 bp, Homo sapiens
cagtcacataaggtagatactgtttttatgttcatttcaaagatgaggaaactgatgtgcaaggggattgactgacttatctgaagtctcacatttatttatttttaattttttcttttgctgtgtttttgataataaattttcacatttagaaacaaatttttgtacaagtgagaactcatgaaaatagactttctctgtggtttggagtggttcaaatgcattgcttcctggaggcaaggctgttggtgaaatgatttcttgggctctttccctctacggtgtgtgaaaatggctctgggcatggtgccacacatgcagggacctggcagaagcctccttcattgtcaaggcttcacccctgcctcatgcccggggtactagaagaggtgctatgcacaaacaagcttytggagagcagcctgattaaatattgagcacacactagtgaaagtcatgggaactttgtcatgggctttgcagggttttcttggctatatttataatgcaagaaatgatgaagttatatttatttaatctttattttgaggtttctgtcaatccagattgctcatttgatttttctccccatggacttaattctattgt

SEQ ID NO: 424538 - DNA, 580 bp, Homo sapiens
ataaatataatcatggctcatccatcttttgtgaaaacaaaagaacttctccaattatgttttcctacttctttttctcataattaaaatcttaaaatatcactgtactttttytcttttccattcacttttctgcctgttgcatctgcctgctgtccccaccaaggtaaggggtagtctcctaattccagtactcaacagacaatttcagccttcacctcatttgctttctttgagcatctgacactcttcacaaagccttatctccatcactgtgggacctcttagattcatctctctccttcctgtactcttcttccagctactgctaaaattccgtcatagtcactggtgcctgctactcttaatctctccctggaatacttatcacagattctgtagataaggcttatatgcttgtaagggagcctcctgaaatagagacacgttattttgtacacgtgcattttttcctagccaaagtattctctcactcaatagtgttcattttcacaaatatttatgaaggaaataagtcattaaaaataagccacaaagatctttgtgaaataatattagg

SEQ ID NO: 424539 - DNA, 580 bp, Homo sapiens
ataaatataatcatggctcatccatcttttgtgaaaacaaaagaacttctccaattatgttttcctacttctttttctcataattaaaatcttaaaatatcactgtactttttctcttttccattcacttttctgcctgttgcatctgcctgctgtccccaccaaggtaaggggtagtctcctaattccagtactcaacagacaatttcagccttcacctcatttgctttctttgagcatctgacactcttcacaaagccttayctccatcactgtgggacctcttagattcatctctctccttcctgtactcttcttccagctactgctaaaattccgtcatagtcactggtgcctgctactcttaatctctccctggaatacttatcacagattctgtagataaggcttatatgcttgtaagggagcctcctgaaatagagacacgttattttgtacacgtgcattttttcctagccaaagtattctctcactcaatagtgttcattttcacaaatatttatgaaggaaataagtcattaaaaataagccacaaagatctttgtgaaataatattagg

SEQ ID NO: 424540 - DNA, 580 bp, Homo sapiens
ataaatataatcatggctcatccatcttttgtgaaaacaaaagaacttctccaattatgttttcctacttctttttctcataattaaaatcttaaaatatcactgtactttttctcttttccattcacttttctgcctgttgcatctgcctgctgtccccaccaaggtaaggggtagtctcctaattccagtactcaacagacaatttcagccttcacctcatttgctttctttgagcatctgacactcttcacaaagccttatctccatcactgtgggacctcttagattcatctctctccttcctgtactcttcttccagctactgctaaaattccgtcrtagtcactggtgcctgctactcttaatctctccctggaatacttatcacagattctgtagataaggcttatatgcttgtaagggagcctcctgaaatagagacacgttattttgtacacgtgcattttttcctagccaaagtattctctcactcaatagtgttcattttcacaaatatttatgaaggaaataagtcattaaaaataagccacaaagatctttgtgaaataatattagg

SEQ ID NO: 424541 - DNA, 565 bp, Homo sapiens
aacatctgtgtaaccatcgctttaaaatggacaaactaaaagttgctttattaaattctgacaaccctcaaacaaagtgaatacaattcaaggtgacacttactgtcaaggaaatcttgcttcttccaggacagtgtttttcaacactctgcacattgcaatcacctggggagttattttttaaaatacattgaaaggttataatttaattggtttgaggtgggatctgattgtaggtatttttttaaagctctcccagaggttctgatgagctgccacggttgagaaccaccacagtaggtgggtgagcaggcacctccagcttccagaagacccagcgaggagcttgactgggaagtgcagaccccagctttgcagcactgactgtcagagccaataataagcaaataaggaacaataaagtaagaaaaatagctcaattagcactaaaaatcagtgaggtaaagtagatccattctacagttagaagttcttaatcacaattgtgtcatgtctatagtaattttgggtaaattaaattragtaaaaatgctctgttgtttat

SEQ ID NO: 424542 - DNA, 529 bp, Homo sapiens
aagaggcctttttttttttacatgctttgagttcatgcactgtgggaacttaatacatgtttagtaataacttggaaataagaagaacttggaaataagagctatggaaatcaacatgcctgagcaaatagattttggatttgtttgaatgtaaataagagaatactcaggcagctcttcatcaagagctccttactgtcacactctccatccaatctctccctcttgcttcttagagcatcacttatcaatgacaaagcttgaacagcaatcagcaattctggtttcatgaagtggagtaggcttgatcgcctttccagctgagctcagagttaatagctgacaaaggcacaggccaacatatactaaacaagtaaattgtataatttcttttgttttcagaatgtstaagtattgtaacaagtattgaaccagataattcatctgggataaataaaattgtttttatgctaagatttagtttacaattgaccctaggtttagccagtgaatggtagccatatacagt

SEQ ID NO: 424543 - DNA, 559 bp, Homo sapiens
taagctgcccctttcctggacatcttgaaggacacttcagtcagaattgaagatgactttgtatagcccccaatccaggatgcatgactgttcactcatcgctgaaatccacttgtccaccaggaaaaggcaagctgtgtcagcatgccataactttctttttgaagaggaagaagagatgaatctgtccagttgttatggcaaagggaatttagaaaggtggatgcaagcatcccacatgaaatttgggaagcagagaaaaaagatggccttctgatctttaacagtgcttttcatggtgaagaaatattcagaagctttagtgcctatatgctcgtgaagacatagacttttgactttctaactcaatgttttcctttcagttatgttttatattgtagtctgataatgttttctactaattgcacattggtctccaattcctttcaaacaattctatgctttatttgagaagccttgcctcttttttttttaagcatcatctcctcatatgtaaaagtgaggttttaaaaaaaakgtaagaaaaattatccaaaaa

SEQ ID NO: 424544 - DNA, 630 bp, Homo sapiens
ataatgctattacacattaatagaatatagtatagtgtaaccctaacatttttcactggtaaaccaaaaactgtggctgactctcttgggaatgggcttttttgagatggcctggatccaaacccacattatctctgaagtatgcctgtgcatgcaaaaggttggcaacacagagcatgcacttggtacacactgcacagcattgatactgctcaggccattcaagcttaggctccaggctcagtaacttcctttcccggtaaccagagaaaattgcttttctacattaaatttacatgaaacaaagcagcaagtgtatatgacgcctgaaataagtaagtactgaagctccgatatgccatcttctattttttttgcaatcaaattgcatggggttattatcattatgtgataaatttggtaagagactcctgagaaggaaaccaccaaagaaaatgatcatcactttgaggttcaaaaaataaacaaagcgaattctctgacttcacttacttagccaaaggttctcaacttccatctgctccttccyctgcccagtcagttctgaagcagagctacagtagctgaggatatcagcacaaccacctccaacagaggccaccctgttta

SEQ ID NO: 424545 - DNA, 589 bp, Homo sapiens
caaattggatttaagaaaacagtattcattcttctgctgtttttaagagatctatctcacatgtaatgaaacccataggctcaaagtaaagggatggagaaaggtctatcattcaaatggaaaacaaaaaggagtaaatgtcactattcttgcatcatataaaatatactttaaaccaaaaacagtgaaaaaggacaaaaaagggcattacataacaataaagggttccgttcaacaagaagatttcactgtcgtaaatatatgtttacccaacattggagcacccagattcacaaaacaattacttctggacctaaaaaaaaaaagacttaacgcagccacacaataatagtggtggaattcaacaccccacttacagcatttgacagctcattgagacagaaaactaacaaagaaattctggaggtaaattcaacacttgaccaactagacctaatagacttctaacagaatacygcacccaacaaccacagaatatacattcttctcatctgcatatggaacatactgtaagattgaccacatgcttaaccataatgcaagtcctcatgaattaaaaaacatcaca

SEQ ID NO: 424546 - DNA, 589 bp, Homo sapiens
caaattggatttaagaaaacagtattcattcttctgctgtttttaagagatctatctcacatgtaatgaaacccataggctcaaagtaaagggatggagaaaggtctatcattcaaatggaaaacaaaaaggagtaaatgtcactattcttgcatcatataaaatatactttaaaccaaaaacagtgaaaaaggacaaaaaagggcattacataacaataaagggttccgttcaacaagaagatttcactgtcgtaaatatatgtttacccaacattggagcacccagattcacaaaacaattacttctggacctaaaaaaaaaaagacttaacgcagccacacaataatagtggtggaattcaacaccccacttacagcatttgacagctcattgagacagaaaactaacaaagaaattctggaggtaaattcaacacttgaccaactagacctaatagacttctaacagaatactgcacccarcaaccacagaatatacattcttctcatctgcatatggaacatactgtaagattgaccacatgcttaaccataatgcaagtcctcatgaattaaaaaacatcaca

SEQ ID NO: 424547 - DNA, 571 bp, Homo sapiens
tgtctgcaatgccccatgaaaggcctctaaactctggcctcagtgaaatcaatcactctcctgaagttgtcctcaaatgtgcaggtttcttttgatgccagtgtgcaggccaggaatgcaaagaagaaagaggcagacctctgaatgttatgaatttcatcttataaataaaagattatttcacacaaccctctgatgtgatgacacagggagaagcaactgccttggagatggtcacttgctattcccaatgtcgacagcttgaacttcttcatgtctttaagaaatgcaagcactatgcatataatgggtcccaaaaaaatccacctcctgtgagccaagttggaagggcaggaagcaagtatgtgttaactttacagaaataacatgtttatataagaaagtgatttctgcagcctagtccaaacacactgccrctctggagatgagcaatccttaggaagtttcaagtccattgttagtgtatgagtcaggttagccttggttatgctaatgtgacaaagagctcccatagcgaagtggctggaaacaacagtattaatttcctgct

SEQ ID NO: 424548 - DNA, 571 bp, Homo sapiens
tgtctgcaatgccccatgaaaggcctctaaactctggcctcagtgaaatcaatcactctcctgaagttgtcctcaaatgtgcaggtttcttttgatgccagtgtgcaggccaggaatgcaaagaagaaagaggcagacctctgaatgttatgaatttcatcttataaataaaagattatttcacacaaccctctgatgtgatgacacagggagaagcaactgccttggagatggtcacttgctattcccaatgtcgacagcttgaacttcttcatgtctttaagaaatgcaagcactatgcatataatgggtcccaaaaaaatccacctcctgtgagccaagttggaagggcaggaagcaagtatgtgttaactttacagaaataacatgtttatataagaaagtgatttctgcagcctagtccaaacacactgccactctggagatgagcaatccttaggaagtttcaagtccattgttagtgtatgagtcaggttagccttggttatgctaatgtgwcaaagagctcccatagcgaagtggctggaaacaacagtattaatttcctgct

SEQ ID NO: 424549 - DNA, 385 bp, Homo sapiens
gcagtgacatgatctcgcctcactgtagccgccacctcctgggctcaagtgattctcttttcagcctctcaagtaactgggattacaggcacctgccaccacacccggtaaatttttgtgtttttagtagagacgaggtttcaccatgttgggaargctggtctcaaattccttacctcaaatgatccacctgcctcagcctcccagagtgctgggattgcaggcgtgagccaccgtgcctgggctaatttccattttcatttcaaacatgcactcctatggaaagaaaaattacatgaaggtatagtaaaaatcactctaaatttagtaacaatcataaaatttacctcttagtacatttgatattttaaaatttacaattctt

SEQ ID NO: 424550 - DNA, 510 bp, Homo sapiens
tgtgagtgagaaaagttattcttcaagcaaatgtgagaaatactcaggtcttttwagttaaacctgtgacaagatttaccagatcctgccttttcctatgtttctcattttaaaagcataactattaatacaaggagctggtgagctgcgggatttctctctgacatgtctctgacatgtggagcacaggaacagatgtgtcaaccatggtatggaatccgaatcatgtcatagagttgaagggcaagtgggatcttaagacctggccataggcaaatgatggtatatttccaaatcaacctttacttaaggagctattgactgcatgggccactattccacctccaccctctcagagcatttgaaggagtggggccagcccaggggttgatggataagtcataatcagcacaggaggtgggctaggaacacaccacacagctgctggccaggcttcaggggaggagcatttgcaaagccagaaaaatgacctcctggctactagtgcag

SEQ ID NO: 424551 - DNA, 661 bp, Homo sapiens
tacccaatgtgtagtcttttttccctcaccccactctcacccttttcccccaagtccccagattccgatgtatcattcttatgcctctgcgtcctcatagcttagctcccacttatgagtgagaacatacaatatttagcttttcattcctgagttacgtctcatagaataatagtcttcaattacatccaggtggcwgcaaatgccattatttcattcctttttatggctgagtagtattgcgtggtatatatatactacattttctttatccactctttgattgatgggcatatgggcttgttccatatttttgcaattgcaaattgtgctgctgtaaacatgcatgtacaagtatcttttttgtataatgacctcttttctttggggtggataacaagtagtaggattgctggatcaaacggtagatctacttttagttgttaaaggaacctccacactgttttccatagtggttgtactagtatacattcccaccaacagtgttaaagtgttcccttttcaccacattcacaccaatatctattattttttattttttttattatggccattcttgcaagagtaaggtggtatcacattgtggttttgatttgcgtttccctgattatcagtgatgttgagcatttttccatatgct

SEQ ID NO: 424552 - DNA, 575 bp, Homo sapiens
ctgtcctaatccagtgcaggagagggacaggcacactatcaaggcatcaaggtgctgacaagggtgctgatgaaggcagccagtgcgacgagggcgctgatgaaggcagccagtgcgacgagggcgctgatgaaggcagccagtgggacragggtgctggtgaaggcagccagcacgacaagggcactggtgaaggcagccagcgtgcgagggcgctggtgaaggcagccagtgcaggagttcctggagtccaggtcaccggaaaggtgggagagaggaccacagggggagctgcatccaagatgggtttgcaggccttgggggagctcaacagtggaggcagctgtgcaagccccagaggcaggagtgagtgggatggttggcacgctgggcatcagggtggtttgggtgccagtgccgggatggagggtgaacagacaatgaagggccttcagcctacgctgaagagagcctgcatcctgaagggctttatgaaagagaaaaaatggtgtcctacatgtttgagtcgaaaagttgatgagtggatcaggaggtgaaatcagaggcaggaggaa

SEQ ID NO: 424553 - DNA, 615 bp, Homo sapiens
aagcttacttaaagttgcaaatgggttagatctaaaaacattcagaatgtaatcattgatttttagagctacaagaaacagtaagttatctaagaaggctaattctccagccccaaaatactctgttataaatgaggaaaaggagagcaaataatatgacatagaacatttgttgtaggccttgaagtaacttttttgggaagaaggacattatagctatgcattatgcttggattttaaactaatcatataattgcagaaatattatatcatatctgttcttcttccataagtggcatagtttagttattctatatatgttcatttatttaaattccatcacccacarttttattcttttatttggaaataattccaaatttacagaaaagttgcaagaataaaaataataccaaaaacacctataacacctgttacccagattcacttcttgttagcatcttatcccacttagtctatcacgtgcaccctcatcctttgctttataaagcagcaaaaggtgaattacgtatctctaggtccttgacccccaaaggcttcagtgtgtacttcctataagagaatttcttatatagatatagtactggtatcaac

SEQ ID NO: 424554 - DNA, 565 bp, Homo sapiens
catatttgatccattaaaagggccaatgagagtcccctcaacctggctcctgcatcctgatggcatgcccccatcacttctaaacacttccttactttctggcttaataaggtgctttgggctcatttgtacctactttgttccaggccctggggtcagccatttctcagaagaacactggttccttttaatggaattatagaccaagacacaggtactaggtgtgctcattgctgctggggtgtcttttcctcctggcccttgcagcagacagatctaagcaataagtgcatgtacatgcatgcacacatacacacacaaacacatgcatgtgcacatatacatacatgtacttattttggcaatcaagagccatttatttgtctatgtctctttcatcacagtgaaatccctggttcccaaaaacatcaatgtatttactcacttgctgaatcctctagtgcatctagaatagtttcctaatcgctcgcccatgccaccacaacaaaacactctactcaataaaggtcaggacgtgttygcaactcctccccctaatttcttt

SEQ ID NO: 424555 - DNA, 521 bp, Homo sapiens
ggtttttttgttcatttttatcctaaccactgtaaactcactgtttaattctagaaatgttatttcacctttctgaatcttatcttctacatctgtaaaatgaaagggctaaactggttgatctgtaagattctttctggtcctaaaacattttgattcttcgtgtaacctatgttaggttggtggtgagtgcactaagagagtggaaaagaatttcactccccatatttgaagatcctcagcaaaaataaattttttaaaaatgaaactttaaaaaaagagaactagtacagctccctaaagtcattttgaagatcatattttccacctaggaggtgtgmgaccagccacctttgattcaatggaaagtatttagatttttttcttgcctttccataagatctcgaattttttagtgtaatttttgagtgcagaatctcgagattttgaattttgggtgtagttggctaacaaacaaaggctgaaaaggaagaatggaagggagggaggaaagaagggag

SEQ ID NO: 424556 - DNA, 539 bp, Homo sapiens
taatctaggagggttgtatatttccaggaatttatccatctcctctaagttttctagcttatacacataaaggtgttcatagtagccttaaataatcttttgtatttctgtgttatcagttgtaacatctcccgtttcatttctaattgagcttatttgaatcttcgctcttcctggttaatctcgcaaatggtctatcaatttcatttatctttcaaataaccagttttttgtttcatttatcttttgtaatgtttttttcttgtttcaatttaatttagttckgctctgatctttgttatatcttttcttctgctaggtttggatttgaatgtattctgtttctccagttccatgaggtgtgaccttaggttatctatttgagctcttttagactttttgatgtaggcatttaatgctacgaactttcctcttagcaccacttttgctgtatcccagaggttctgataggctatgtggctattatcattcagtttagaagaatttttaaaaagaattttttaatttccattttgatt

SEQ ID NO: 424557 - DNA, 625 bp, Homo sapiens
ccattatgccactgggctatccactgttttactaaaagtttgcagcttagattgttagaagattttgcgcctttgggaaatcatctctaacttttaaaggatatcaaagagaaatgagattagcttttaagctgaatttgctggaagacacctataccatttagcaaaaatatacctgtattttcatactctggatgcagctagagaatttacactatggatgaagttcttataaatctctaaaaaagaaagaaaaatctttgctatttcaagtatgctctgtagttctataaaaattaatgatactcttcatagaaaacatgatgctttaggcacatgtgtttttactctaaaacttctttctgtaactaaatgcaattagttgtcacatgcccctgatttactcccatctacaagcaccacaaattgtgctaggatgtacatagaatgcacaattagctataattcctgctgaattggggtaggggaggagtttctccccacaaaatttycagcaaagcatcttctgagaactgcaatagataactgacaaattccagctacaaatcttggaaactgtactattaggaagcagcactttaactgatggtctggtatttccaaa

SEQ ID NO: 424558 - DNA, 554 bp, Homo sapiens
catgacattttcagtcttttaatatccttttattgagtccctttcgtctcatcttaaagctggagccacttgagctagaagagctgaaatgcatttttgttgttcactctgttcttgttttgcctaactgactgggccttcacgggctcatcccccgggttcttagtgggaggcatcttgctgtctctgtcactgcaacaaagatattgcttgttgcaaaataagaaaatgttccctctgccatggctctgtctggagtagagaaatacctatcactagtcctcctgggttgaactcccaagctcattccaagtcaccctagaagtaatggagggcagcaaagcttccaagtgtttatctcccttatagattcaaatgggtattcttggccaagattattacatgtgtgtggcatttgccatatatacatacacacacatatatatatacacacacgtatwtatatatctctctctatatatacacacacgcacacatatacacacatcacccagacatatatatgtaatattatatatttatgtgtgtgtgtg

SEQ ID NO: 424559 - DNA, 615 bp, Homo sapiens
cattttccagtgatatgtctattttttcctaagtaatatgttggcttgggtcttccataggcttaaactctgacaaaacacrcaacatagatttttgctacgtaggcaggatattaacaagctgctttaatacggcaattagctattttgtttttcccctctatcttgactgttctggaagggcttaaagtttaaactgtctttgccctctatgaaaaggagaactggcttctgattaattaaagctctgggtttgatggtaagaaggatttctttttttcacaagagacttaaaagaacagaaatttgtatctccgttcaaaatgcaggcagaaaagaggaggatttgtcccaggctagaaaatattccctcaggctgaggtggagcgtggggaagaagtagagagctgcaacactctatagaagaaaggactgtgaaaatgtataggtagaaggcctcatgggtgaccttgccaggactcctgcacctcacatatggcatgaaagccaccaaggacaccatgaggggcagtgttcaaatgttcacaaatgggaagggagctgagcaccatccttcattcctgcaagcgtggccatcattggccttgcaagccc

SEQ ID NO: 424560 - DNA, 470 bp, Homo sapiens
ggattttcccatttcctgataaatgataaattcaaagtaaatagtcccataaagcttttcttcattcaaattatttgaatcttacagataggtagaaaaaaaatcactgtatctgaaataggtttgctatcccttagagtttaaacaaataatgcaggtattataaatttccttcaactctcaaggcaaatgtctccaaatatccagagtcctgacaccatcatcttttcattttcagtgaagagcatgtgcagttttcccacccctgaygctataactggctggcacataaaacccacaggtacctgcaggcaactgattataaagacacctcctttccctaatgtattgattcccactgcaatctgcctgcatctactgtacttcttggaaattgctcttgcaaagattgctcatgaccttgcagaatcaatccagtgaacacattttggtcctactttacttggcat

SEQ ID NO: 424561 - DNA, 544 bp, Homo sapiens
atatgctgaaggctgctctgcctatggagtagccattcttttgtttctttacttctctgataaacttgctttcacttaaaaaaaaaaaagatatgytgaaatcctaaccccaggtacctatgaatataaccttatttggaaatattttcagatgtgatcaaaaattgatcaagttaagatgaagtcatacaggattatggcaggctctaaatccaatgactggtgtctttacaaggaggctgagatttggtgaccagaaacacacagggaaaaagtctatgtgacaatgggggcagagatgagagtgatgcagctacaaggcaaaggacacaaaggattgccagtagctaccaaagttaaggaaaaggcagggaaggattctttctaaagccttcagggaaaatgggccctgctaacattttgacttcagacttttaagctccagaactgtgagagaatatatttctgttattttaagccactcagtttgtggtactttgttatgacagccacaggaagctaatacaagtgccatgtgtgctca

SEQ ID NO: 424562 - DNA, 555 bp, Homo sapiens
gtttttaacgactacccttatccaggtcagggactggtgtagaaatgactgtgaaacccaattctgtccaatgagatgtgagagaagtttgctggagtcagggatgctgggaggggggaatcttctaagaaacttgtctttattcctaacagagagccataggaagaggtagtgtctcatctgcctctggacattgtctggtctggatgtgagatgtaaaactgctgcagccaccatgccacttgaggaagaaagactccccaagatggcagagcagagaaatggaagaactcaggcccttgatgacatctttaagccaatgaatcaaactattttgaagcctgctctacttggagacttaataataagtaataaatttccttattatttaggccagacgttatgttagtttcatctcraggcattcaaagtgccacaccctgcttaaattccactgtagaaatggcagacctatgatgaaattaaaaatctagtaatagctgtgtcactgcctatagtggacatgtacttttctgtctaaagtttctttgacat

SEQ ID NO: 424563 - DNA, 500 bp, Homo sapiens
ccctggctgcaaatctcccttcctgggagaaactgcaactgtagcagctctcttcccactccaggctgtgataaatgagagcccaattccagcatctattgctgagatgttctccagcagtaagtgctgctggaaaggctgtgaaggcccctacctcactccagaacaggtgcttcagtctctggccggagamtaaaatgtctgtgttgccacactgctgagtcatcacaaaatggctgattttgcatgcacccatatttaaaaaggtatcctgctcttggtcacaggtctgggaaaatgtctgcagcatttcctggtgtctttccctcacaacgtctccaagccttcccctaagttagctttaggggttgggaaaaacaaagtactgtcccttggtctgggttgcttggatccccagtggaaaagtaagtcacagagagaggctagaggctctctgcctctctcatatactggggctttactcacttcatcagccagtt

SEQ ID NO: 424564 - DNA, 547 bp, Homo sapiens
gtccaacagagacatattaggtttatttggtatgttagaactatacaggaaacattgtcaaatgtaaggtggtgtttacctttgtttgagctatagatctatctatagatgtactgttaatatgtgtttcaggattgtatgagattcctgaaattctgatatgctttaatatatgttgtcagtatgtcacagaaataaccaaattttctggtcaattgtgtatttaattatggcctaaaacttttgtcatccacagttgttttgctttgattcttctcaaaagcagcttgcaatcagccacagaccagagcttgctttttttgggagagttcatgaaaaggactcttgaatgcaggtttctaataactttggaggttgtgccattgaactacaraaaaaacttccaggacttcaaatttaaaggtggatgtgttcacaaagattgctaacccaatatgaaacagagcaggtgtttagcatggactgagctaataatggaggactgaaataaatttttatggctttttgtgtgtttgtttaaaacatt

SEQ ID NO: 424565 - DNA, 547 bp, Homo sapiens
gtccaacagagacatattaggtttatttggtatgttagaactatacaggaaacattgtcaaatgtaaggtggtgtttacctttgtttgagctatagatctatctatagatgtactgttaatatgtgtttcaggattgtatgagattcctgaaattctgatatgctttaatatatgttgtcagtatgtcacagaaataaccaaattttctggtcaattgtgtatttaattatggcctaaaacttttgtcatccacagttgttttgctttgattcttctcaaaagcagcttgcaatcagccacagaccagagcttgctttttttgggagagttcatgaaaaggactcttgaatgcaggtttctaataactttggaggttgtgccattgaactacaaaraaaacttccaggacttcaaatttaaaggtggatgtgttcacaaagattgctaacccaatatgaaacagagcaggtgtttagcatggactgagctaataatggaggactgaaataaatttttatggctttttgtgtgtttgtttaaaacatt

SEQ ID NO: 424566 - DNA, 591 bp, Homo sapiens
aactctagcattagattaacctttgattgttgggtggccatgtgttcacctatgatatagagctgcctatgataaccctcctcagcatgaagcagccagagatattgacaaccagattccccaggattgaggaatttactaacataaatataaaagagggactgaaaccagcccaattgtcccacataactgatatttatgatttctttggaataaacatagaaattgaccctcacaattttaaaacttgagaaacttatatttgtcttaatctgagttgctttcccaggaaaccaactatcagttctgccacagagtatcaaggaactgaaacttaccakatcaccacatttggataatgagacaccaggccccttgcccatcatgactgcctaaccaaccacctgcttcctgttgaccaactcctctaccttaccccttcctaattcctgttttccctacacagttacatttcttccctgctacatcaactcctaattttagtcagttgaggagatggatatgagactgatctctcatttccttggctgtagcacctgaatgaagccttcttccctggcagtactcatt

SEQ ID NO: 424567 - DNA, 548 bp, Homo sapiens
tgtatttttcttgttaaaaataagattgacaatctttttatgtttaaaagccatttacatttccttttttgaatccatctgttcagatcttttgctcattttgtttcagtgaaggtttttttttttttttgccttttttctcttctgtttttttttttttttttttttttttaaagagatgggagtctcactatgttgcccaggctggaatgcagtggccattcacaggtgtgatcatagcacacaacagccccgaactcctgagctgaagtgatccttctgcctcagcctccaragtagctggtgctacaggcacatgccgctgtgtctagcttagtgggttgttttttttttctttcttttcccaatagatttgtatattctagggaaattagtaccttattaaattagttacaaatatttcttcatttgtttaatgcctttggtcctggaagtttttcatcttggtttttcattttaatagagtctaatttatcattcttttatggcttctgggttttgtgtcataggaaggccttcacttcaaa

SEQ ID NO: 424568 - DNA, 582 bp, Homo sapiens
gaactaggaagtgctgtaattttagaagcttctaaaggaatgcaaattctttttggccaaatgtgactcacaatacaaacacaggaacaattgtttacttctgtaaattctaagatggtgcaggtttggtcagaaatgtaattaccttagggccagactagaataacagttaaataaaaactggaagagaagatgtttttatagaaattaagttatgggagagtaagatayatatccagaaagcaggtttctgcctttcagaggagaatattttcttaaagtttgtgaaagggtgcaaggggcaagggttggattggttctcagaccactgaggggattggcaggagactaaagtatggaaccactggggtgctggaactcacccacatgggcttgggagagccaattattatactgggattacaggtgtgagctagactgcctgacctaaaattttgttttttacaaagtaataaatactcaaaatttatcactccctaattatttaactacatttttactattatctgtgccattgaggttatttatgtctatttgtattaatggtaggaatgctaaaaa

SEQ ID NO: 424569 - DNA, 612 bp, Homo sapiens
ttgtataatttcaaaatcataccttgtacattgaactctcttggtttaatttgtcctcttttgttcacagaatatatttcrgtgtattctatttacaaattttattttatattattttattttattttattttatttttgagacagagactcgctctgtcacccagtctggagtgtagtagttgcaccatctcacctcactgcaacctctgccttgtgggctggagcaattctcccacttcagcctcctgagtagttgggctgcaggcacatgctgccaagcccagctaatttgtatttagtagagacagggtttcaccatgttgaccaggctggtcttgaacccctgagctcaggcaatccaccctcctcggcctcccaaaatgctaggattacaggcgtgagccactgtgccaggccacaaattttatttttattaactataatttgctaacaggctcaaaagctgaagttttttttccttggtgggattaatagtttttcaaacctatggtgatattctctcccaatgaaccccttagagcactggaacatctgtgagccagaagtcctcctacaccctcactgagaattattgaaggcatttccctcc

SEQ ID NO: 424570 - DNA, 627 bp, Homo sapiens
tcctggtgactccaccccattcttccagtgttcttgtgggcccttagtctgagccacttgacattgatttatttcccttactgcacgtgtgttaagggacagaagttttcaccgtaggcatggttaggcaagccccctctgcacaatgacctgggtgggtcggagactctctgggtacccttccttatctgcctaggcatttggctgtctcctgcctgtatcattcccccctctaaagaagtacatctaacagccattagaataaggataaggatgatgattgaccttaactgctttctgctgacagggggtgctgttttcraataacagcagtcagatctccctcagaggcctatctaagggtctctggtaaaagggggccatcatttgaggctctagttgcatgattgtttggagttcaatggcctaaaggcaggaagagacaaaccaggttattagaagacatgtatcaaaacaaaacaaaaggtaaaggtaaggagagctcaaaaattccaaggctaccagcatgcccagataactggtggctatagttacacctgctaagatttgggtgcatggggcttggctttggtgagctcccttggtcttattttcccaaaaaaagaa

SEQ ID NO: 424571 - DNA, 604 bp, Homo sapiens
tgtactattttggaacagatattaatattattcactaaaatataacctgaagaatattaaacatcattttggcaatcccatgtacctaaagacatcaggtaatcctgtctaccctctttggatgcttcaggggccgtctgtagcatccaaaaactaggggtcaggacggacaacttgaagccaaaatttggttttgggaagcctattaaatatgttagtggtttaaaacacttgatgctatgaaatagaattccagattaccatcagttagttattttgccaaaattacatcacaaaaatttttaaaccaggcaaaaatctttgctcattaagagggaagacttagcttttcctaacaatttgtctcctgtcttctctttcatttccttaggagtccatctgcaaggcaaatgaaaatctttcattattctttactattacattaaaatcttgtacaagtkagagaacgtcaacttttacccttacattagtttactattaatgtcaacccaattttttaaatgaaaccttatggacaattctatccagtcttaaccagtttgaccatgaggtgagattcatataaatcttttataacccttta

SEQ ID NO: 424572 - DNA, 671 bp, Homo sapiens
tcaatgatcaatttacagaaaaaccatataatacccttttgaatttagtcaatgttgacacacagaatttcttttgcaagattaatttttagaaactttccataacttttttaaacctttagcttcatcttacctaayttaaaacaatcctttaaccctaggcaaaaatttacatttccatgctgtcttacaatcttttactaaaaacacattttactgttcttacacactttgcatgtaaatctattttcagtggtctcaatcacatgttataatggtatatcttaccaatttttaattttaatgtaaaatttggcaatttgttttagttatgcactaggcatcaataaagtttgactccttccagcatagttaagggtgtggttaattccacatgtccccaggccttagcaattgtgaggctggcaagtggaacagttctcaacagctaaagaagcaatttataaccttaaaacatttagcaaacgtaggatctgagctgtataatttagaacacctatttacattttaacaacatttgcattttaccaataatcattaagactgtttttatttctcaaagattaaagtcacatgaagtaaaaggcattaaaccttttatttttccctcaaaaaatatttgatctaatcacttatttttctttaggaca

SEQ ID NO: 424573 - DNA, 622 bp, Homo sapiens
gtctcctgtctctatcactagcatatagtggacacttaatatattgtaatgataatcataacatcaacatataatagaaatcaccattaccattgttgtcatcatcatcatccagccaattcttgaataatatttcgattgtcatcctgcttactagctatcaacaccctagtctttcatgatgcatctaattgttagaaagttccttcacgtctagttacaactttacctctctgtaatgtttattcattaattctaattctgttttctgtagtgagaccaatcatattctttaacccattactataacttttcaaatgtttgcatagaagaaggatatgatttcagagatgatatagaccccattaatttcaagccctttcattttatacaagaaaaatctgaggctcaaaatagttcaatgacttgaaagccagtctacgtgtttatcactgtcwacccttttccagaaaaaatttgaagctccctcaaccattttctaattgacatgacatccagggtcttcgtcctttgttcattgcttattgaacatgctcctgtttgtcaatatctctcttaatatgttgcatccataatctcacacaaaactctaaatatggtt

SEQ ID NO: 424574 - DNA, 657 bp, Homo sapiens
tgcttagtggttaggagctcaggcttgaggtcaggttaaaaaagggcttgttgagatctttgagatggaaccaaataagaaatagaacccaaaaaggtaaggccaatgggaaacaaacatatctgcatgactgatagagctgatgttggagtatttgacatgtctgggagctagtgagctggagctacaacccaggatttgacagaccttcccagacagtcacaggcagctctgggctattgcagatcttctcccaagaagcaaggccttaacctctaagttatctcaaggctgagagcatctgaggacrtgtgcttgctgggtcaactctcaagagagaaggaggaaggggctggttagtataaattatccctccaaacttatcagtcaggtgtttgctccttcatcatcgcagtggaaggatgagagagatgaagaaggccaggttaaacgatgttcctccacatgcaaggagatatgaataggaaatagaagttcttaacttgtttgaaatctctgctccactatttacacgttatatgataccgtagaagctacattgcctgtttgccccttaattttctcctctataaaatggaggaaataacaatatatacttcatggtttgcataacttgacatttatcaagtgttgtta

SEQ ID NO: 424575 - DNA, 434 bp, Homo sapiens
agagccttgaggcagggtgtgggtgaaaagctcactctatgctagctggcaaatctctgtgttaaatacattgagggcagatattaacagagrccatggcacccaatttctcagaagtttcaccatttcctccaacatcagccagtgatttcataattagacactccattccccagactgcttgggagttatctatagatctcacttggaaggtagtacttaacttagaggcacccgccagtctgggacattctctggcacttgctgctggaaaaggatttcgacaagtggcatcttttggaccagtggaataatcagtaaattggaacaccattttaatgttattgtagttgctgtttctcctagtacacagagatgtctttaagaaaaagtcaggaaatagcccttcttatttctgtcaatgaaagtcaagt

SEQ ID NO: 424576 - DNA, 594 bp, Homo sapiens
taattttcagaactaataaagtcaattttttttaattcraaaacttttcctatttaaaacaattcacataatgaatgtaaaggatttttaacatggctctaaatttttctagaaatccccctccattttgttggaggtttgttataatagtcccaatatgcaataaacaagttacaagttacaaacaaaaggataattcttgatgccaaatataatagtaacaactagttttgtctgatgtaatattacaaataggccacgtttattattctgccctcgtttatcaaatattttgtatcttgtatgtagtattttcggaatttgtgataatggaattatgctgcaaatcctctgacaaaattataaaaagctttgttcagaacaagagtaacctctgctggattgtgattgtcttttgaaaatccagaacaaaactgagaatcttctctgtttttacagagaaagagcaactgctttgtttacttggagataatctgtgttcattttttgaactaaactaagactcctaatgaataatatgctggtgtcctgaagaacacattatctaaatgataatgtaacattttactgtca

SEQ ID NO: 424577 - DNA, 481 bp, Homo sapiens
acattggcaactttcatgagttcaaagataaaatatgtcaggagcaatggagtgagatttttggaaggataaggactgtgatcatagtaggatattgaagctgtttcaggtgatgatgccttagggtacgaacctgggagtggatcaaggcaaaggctgctggagaaaagctcagagttgagatgtttcaagaatatttagagctgtaacctaagaaacaaaaattactttttaagtgaaattttttatttatctagaatcaggagggtttttttcctgcccacaactcagctgaaatgatgatgcaattactttagtgaatatctcaattatcaacttagacctgttagttgttctttaatcartgttgctatgcagaaatgttcatgattgtcctacataaggcaggctaactcataaaacaaataaacccaaaaatgtatcacggcctaagcatgatagaagaaatggtatagactat

SEQ ID NO: 424578 - DNA, 471 bp, Homo sapiens
cttaaatgcattgagtagtcactgtgagttgagaagaagtaaatagattatcaggcaaacaggtaatcaaaagctagtccagaaattcgaaaaggactcctgacaatgtcctggaagaatcacgtggtattataagataccgctcaaaggatagggaaagatggccaaagtacatcaaaatattattttytttattaaacaaaaataaaattgtatggaccataaaacggatatggagagttccaattttaatatgtacagctttatttggattaattgaaaggtgtactacctcctacaacctggtaaaattgcattccatattaaaattacagtacagtaaaccataaagtttacctataagactgaaaatgacagatctagaatgaataaggaaaatataccacagctgacagagagaatatatgacttgaatgtgaatttcctgcctacgcaaaagaaggtttactc

SEQ ID NO: 424579 - DNA, 601 bp, Homo sapiens
ggaaatttgtgtttcagtcatcaaattatgtactgtgtttttcattaatgagataaaatgtaaatatcattaagttttcatagattttaaaactcagcattggtataaagatattcattgaaatattcagctactctacaaatttatagtccacttttaattttccaaggaagaccgggatatataaaataaataggtaatccctaagcatcattttactctaaagttttagattttaagctcattaaaacattgaccaaaatggcaagcagataattgtactgctaagctcagtgttttttcaaaccatacgatgtgacacattagagggtcgtcaaatcaattcagccaaccaagagtcacattaaacaaaatgaaacaatagaatagaatatcattgtacatataagagcacatcagagacaaggggtttcttttggggacaacgaaaatgttctaaaattagattgtggtgattattgcacaactctgaatattctaacagcactgaacygtgtactttaaatacgtgagtttatggcaggtgaatatatttcaataaaacttctaaaaatggagggaaaagtaaggatcatttcag

SEQ ID NO: 424580 - DNA, 601 bp, Homo sapiens
ggaaatttgtgtttcagtcatcaaattatgtactgtgtttttcattaatgagataaaatgtaaatatcattaagttttcatagattttaaaactcagcattggtataaagatattcattgaaatattcagctactctacaaatttatagtccacttttaattttccaaggaagaccgggatatataaaataaataggtaatccctaagcatcattttactctaaagttttagattttaagctcattaaaacattgaccaaaatggcaagcagataattgtactgctaagctcagtgttttttcaaaccatacgatgtgacacattagagggtcgtcaaatcaattcagccaaccaagagtcacattaaacaaaatgaaacaatagaatagaatatcattgtacatataagagcacatcagagacaaggggtttcttttggggacaacgaaaatgttctaaaattagattgtggtgattattgcacaactctgaatattctaacagcactgaactgtgtactttaaatamgtgagtttatggcaggtgaatatatttcaataaaacttctaaaaatggagggaaaagtaaggatcatttcag

SEQ ID NO: 424581 - DNA, 601 bp, Homo sapiens
ggaaatttgtgtttcagtcatcaaattatgtactgtgtttttcattaatgagataaaatgtaaatatcattaagttttcatagattttaaaactcagcattggtataaagatattcattgaaatattcagctactctacaaatttatagtccacttttaattttccaaggaagaccgggatatataaaataaataggtaatccctaagcatcattttactctaaagttttagattttaagctcattaaaacattgaccaaaatggcaagcagataattgtactgctaagctcagtgttttttcaaaccatacgatgtgacacattagagggtcgtcaaatcaattcagccaaccaagagtcacattaaacaaaatgaaacaatagaatagaatatcattgtacatataagagcacatcagagacaaggggtttcttttggggacaacgaaaatgttctaaaattagattgtggtgattattgcacaactctgaatattctaacagcactgaactgtgtactttaaatacgtgagtttatggcaggtgaatatatttcaataaaacttctaaaaatgragggaaaagtaaggatcatttcag

SEQ ID NO: 424582 - DNA, 601 bp, Homo sapiens
ggaaatttgtgtttcagtcatcaaattatgtactgtgtttttcattaatgagataaaatgtaaatatcattaagttttcatagattttaaaactcagcattggtataaagatattcattgaaatattcagctactctacaaatttatagtccacttttaattttccaaggaagaccgggatatataaaataaataggtaatccctaagcatcattttactctaaagttttagattttaagctcattaaaacattgaccaaaatggcaagcagataattgtactgctaagctcagtgttttttcaaaccatacgatgtgacacattagagggtcgtcaaatcaattcagccaaccaagagtcacattaaacaaaatgaaacaatagaatagaatatcattgtacatataagagcacatcagagacaaggggtttcttttggggacaacgaaaatgttctaaaattagattgtggtgattattgcacaactctgaatattctaacagcactgaactgtgtactttaaatacgtgagtttatggcaggtgaatatatttcaataaaacttctaaaaatggwgggaaaagtaaggatcatttcag

SEQ ID NO: 424583 - DNA, 560 bp, Homo sapiens
ttaaccattttaagctccctaccaaatttaccatgctttctcaaccagagtgctgattttgtttctataaaagaaagcagaagcattaaattcatcacaattttggaaaaatataaaaagtagagtaaaatcatttcatcccagtgacataccattcagaaatctagcccttagtaccatgcctggcaagcagcacctgagaaattgctgccaattgtaatacgtctaatgtttagatgtcctgaaatattttataatgtgaaacagccaatcatagtgtcctttggagtaaaggcaattgctctgtacatataaaaaataatttcttgttaagatgcacagcaatagtagaattagagtataaaatttcagaaatatattggggtacacatcccaggataatggatggttctgttgtgccacagacatgctctgagcattggctcccccsgcctgtaagagagtggtattgaaagagaaaactggacagctcagaaccctctgtgtcatctgcctgtaaaagcaaaacctgaacaaaaaaatactgtgttcaaagataa

SEQ ID NO: 424584 - DNA, 560 bp, Homo sapiens
ttaaccattttaagctccctaccaaatttaccatgctttctcaaccagagtgctgattttgtttctataaaagaaagcagaagcattaaattcatcacaattttggaaaaatataaaaagtagagtaaaatcatttcatcccagtgacataccattcagaaatctagcccttagtaccatgcctggcaagcagcacctgagaaattgctgccaattgtaatacgtctaatgtttagatgtcctgaaatattttataatgtgaaacagccaatcatagtgtcctttggagtaaaggcaattgctctgtacatataaaaaataatttcttgttaagatgcacagcaatagtagaattagagtataaaatttcagaaatatattggggtacacatcccaggataatggatggttctgttgtgccacagacatgctctgagcattggctccccccgcctgtaagagagtggtattgwaagagaaaactggacagctcagaaccctctgtgtcatctgcctgtaaaagcaaaacctgaacaaaaaaatactgtgttcaaagataa

SEQ ID NO: 424585 - DNA, 584 bp, Homo sapiens
ttttatatatagagattgggattccagagtcatcttataaggagaaagtattttctaacatataatcaaaattccttccctttagtttagatcagctttgtccaatacaaatataatgcaagtcacatatgtaattataaatattctagttggctcattaaaaaaagtaaaaacaagtaaacgtaactttaatagtatattttaatattttgataacatatcaaaatgtcacttcaacatgcaatctgaataaaaattataaagttattttatattctttttttcacattaattcttggacgtyctgtttgtattttacatttatagcatagcttaatttgcaaactaagttttcatagaaaatatttgatctgtatttagatttcataaaatttacaggcaaaatagttgatttacatacttgttctaaaatactcaaaaatattttaatatattatacgtgattcataatatatgaatcaaatattagttttaaaatttaccacaagttaattaaaactaaataacattaaacttttggttcctcggtcatactaaccacatttcaagggctccgtagtcac

SEQ ID NO: 424586 - DNA, 584 bp, Homo sapiens
ttttatatatagagattgggattccagagtcatcttataaggagaaagtattttctaacatataatcaaaattccttccctttagtttagatcagctttgtccaatacaaatataatgcaagtcacatatgtaattataaatattctagttggctcattaaaaaaagtaaaaacaagtaaacgtaactttaatagtatattttaatattttgataacatatcaaaatgtcacttcaacatgcaatctgaataaaaattataaagttattttatattctttttttcacattaattcttggacgttctgtttgtattttacatttatagcatagcttaatttgcaaactaagttttcatagaaaatatttgatctgtatttagatttcataaaatttacaggcaaaatagttgatttacatacttgttctaaaatactcaaaaatattttaatatattatacgtgattcataatatatgaatcmaatattagttttaaaatttaccacaagttaattaaaactaaataacattaaacttttggttcctcggtcatactaaccacatttcaagggctccgtagtcac

SEQ ID NO: 424587 - DNA, 589 bp, Homo sapiens
ggcctgggcaggttccggagcagttagcattggatccaggaatgttctgcttgagatttccttgggatatcagcttggttgaattgtcctgtggaaatggacttgactgcatccatcaggggatccagtgggagcaagagtcaacagcactctgctggatattggagaataagaaaggatgacaagatttggcctttgccttcaggaaatttacaatatagccaggaaattatccaaattgaccaatatttattaaccacttactgtatgccagttctrtactagatatgggaagatttaacaaggaataagaagagatgctttctctgatggagttcataaaacaggagggagataaacacatgcacagcaaatgataatagatactagagagttatacctgagcagcagtggcatagagtgagtagacaagcctatgaaaccttcacctatatcaagctgcctcaggcatttttaagagagaaggtgcctttgggaaatggaaactttagtgcactctgaaagatggagcaagaagaggtatcccatgtgagaagagaagcctaatgtaagaaggcctggagattga

SEQ ID NO: 424588 - DNA, 589 bp, Homo sapiens
ggcctgggcaggttccggagcagttagcattggatccaggaatgttctgcttgagatttccttgggatatcagcttggttgaattgtcctgtggaaatggacttgactgcatccatcaggggatccagtgggagcaagagtcaacagcactctgctggatattggagaataagaaaggatgacaagatttggcctttgccttcaggaaatttacaatatagccaggaaattatccaaattgaccaatatttattaaccacttactgtatgccagttctgtactagatatgggaagatttaacaaggaataagaagagatgctttctctgatggagttcataaaacaggagggagayaaacacatgcacagcaaatgataatagatactagagagttatacctgagcagcagtggcatagagtgagtagacaagcctatgaaaccttcacctatatcaagctgcctcaggcatttttaagagagaaggtgcctttgggaaatggaaactttagtgcactctgaaagatggagcaagaagaggtatcccatgtgagaagagaagcctaatgtaagaaggcctggagattga

SEQ ID NO: 424589 - DNA, 589 bp, Homo sapiens
tatggtgtcttatcatacatctaataaggtatgaaacatgagagttgagagaaaaaataaacctcataaaactcatatcatagtccagtcctgaaaactttactrcttttgcacattccatattctgcactgctggatgtattgcaatgctataaaagcaatggttagctaccagtaaggactttaaaaaatcttaatatttctatggcaaatgtgatcacctcaaatataaaccaaagactatgaatttcaggcttaattgcataagtaactccctcaaactgtgttcccctatgacttcttttctaactttttctcccctggataggaacatatgatgggtatccttggagacaaagggcaggaaaccatttcaaggcatttagaattgtaagatacgtgcctggttcccactttgggcacacaaagtaaatgtgtcttgggtaaataattatttctctgaatctcagttccctcaatagctctcagaattgttgggattaaattcgatgtaaaaaacatacaacgattcaaaatacatatgaagatagaggtttaaaatttgtctatatgaaaaatcagactggac

SEQ ID NO: 424590 - DNA, 589 bp, Homo sapiens
tatggtgtcttatcatacatctaataaggtatgaaacatgagagttgagagaaaaaataaacctcataaaactcatatcatagtccagtcctgaaaactttactgcttttgcacattccatattctgcactgctggatgtattgcaatgctataaaagcaatggttagctaccagtaaggactttaaaaaatcttaatatttctatggcaaatgtgatcacctcaaatataaaccaaagactatgaatttcaggcttaattgcataagtaacyccctcaaactgtgttcccctatgacttcttttctaactttttctcccctggataggaacatatgatgggtatccttggagacaaagggcaggaaaccatttcaaggcatttagaattgtaagatacgtgcctggttcccactttgggcacacaaagtaaatgtgtcttgggtaaataattatttctctgaatctcagttccctcaatagctctcagaattgttgggattaaattcgatgtaaaaaacatacaacgattcaaaatacatatgaagatagaggtttaaaatttgtctatatgaaaaatcagactggac

SEQ ID NO: 424591 - DNA, 589 bp, Homo sapiens
tatggtgtcttatcatacatctaataaggtatgaaacatgagagttgagagaaaaaataaacctcataaaactcatatcatagtccagtcctgaaaactttactgcttttgcacattccatattctgcactgctggatgtattgcaatgctataaaagcaatggttagctaccagtaaggactttaaaaaatcttaatatttctatggcaaatgtgatcacctcaaatataaaccaaagactatgaatttcaggcttaattgcataagtaactccctcaaactgtgttcccctatgacttcttttctaactttttctcccctggataggaacatatgatgggtatccttggagacaaagggcaggaaaccatttcaaggcatttagaattgtaagatacgtgcctgsttcccactttgggcacacaaagtaaatgtgtcttgggtaaataattatttctctgaatctcagttccctcaatagctctcagaattgttgggattaaattcgatgtaaaaaacatacaacgattcaaaatacatatgaagatagaggtttaaaatttgtctatatgaaaaatcagactggac

SEQ ID NO: 424592 - DNA, 589 bp, Homo sapiens
tatggtgtcttatcatacatctaataaggtatgaaacatgagagttgagagaaaaaataaacctcataaaactcatatcatagtccagtcctgaaaactttactgcttttgcacattccatattctgcactgctggatgtattgcaatgctataaaagcaatggttagctaccagtaaggactttaaaaaatcttaatatttctatggcaaatgtgatcacctcaaatataaaccaaagactatgaatttcaggcttaattgcataagtaactccctcaaactgtgttcccctatgacttcttttctaactttttctcccctggataggaacatatgatgggtatccttggagacaaagggcaggaaaccatttcaaggcatttagaattgtaagatacgtgcctggktcccactttgggcacacaaagtaaatgtgtcttgggtaaataattatttctctgaatctcagttccctcaatagctctcagaattgttgggattaaattcgatgtaaaaaacatacaacgattcaaaatacatatgaagatagaggtttaaaatttgtctatatgaaaaatcagactggac

SEQ ID NO: 424593 - DNA, 548 bp, Homo sapiens
tcttacacaatatgtttaaatttaaagagatgttatttaataaaccacttgtctgaatctccaaattccaggtttcaaagtgtgttcaatcctagaacagcctgggtaggctaccttaatcaactttctattatcttatgtgyccaaatttctccaaaattgtcttctacaaaaaggcaacaccttatatttgagtcctttcaaagtttcatattacatgggcctctttgaagaacaaagaactgctccaggaagacacttcagcttgaaataacctaaaaatcaatgcagttttgatagaaaaaaagaagagtcatttaatcaaacagtcaagagggaagcaaagaaatgtaatgcagatttagttctcattcttgaagggacacatgacctcataatttctaatgttagaaactgttataagcaagccttttaaagattactttaaaaagtagtagtattatgtctgcccagaatatataatctgaattcaatcacaaggaaacatcaaaccaactcaactgacagacattctgtaaaataactgg

SEQ ID NO: 424594 - DNA, 596 bp, Homo sapiens
cttgtttacaatgcatttttgttagcaagaatgtgaattaccaaaatacccaaagtatataaaccaaatatttaaaacaaaattgacatggtggggaaccattaaaaattaactgcataatgatgaacactatacaactttagcatattcacaatggttaatgtaatcamattccaagtatgtccactcttggcagacactgcaaacattaatgccagaaaacattattctttttcaaaacattaactccacattcaaattctgatagttttaagttttaaaatcctttggcagtgggttttaacaattagttggttaataaaaaatatcgggcaggataaactaaaacgattcttctgtttcagccacacacagaatcattagaagccaccatattttggaattaaatgtggtattccagaacatgcattctctccctgctgaatttcagcagacattcccttcttttactggttcaggcaatatagctctggatccttgggacactgcaagggcactagggccttgcctctgcagccatgccagatcctgtggccacatcagcttgcagaggtgcctcccacccttccaccctt

SEQ ID NO: 424595 - DNA, 527 bp, Homo sapiens
tgcttttggaagctgacacgattgagaggaagcctgcaaacctgagtggcctcatcctgggagacattcatacaatctgaagaactggattaattattaatgattgtgtgtagtatatatttcacacacatgtttatggcagcacaatttgcagtcgcaaaaatatggaaccagcccaaatgaccgttgaccaacgagtggataaagaaaatgtggtatatatacaccatggaatactactcaaccatgaaaaggaacwaaataatggcattcacagcaacctggatggagttggagaccattattctaagtgaagtaactcaggaatggaaaaccaaacattgtatgttctcccttataagtgggaactaagctatgaggacataaaggcataagaatgataaattggactttggagactcgggggaagggtgggagggggatgaggaataaaagactacacattgggtacagtgtacacttctctggtgatggatacaccaaaatctcagaaatcaccaccaaat

SEQ ID NO: 424596 - DNA, 527 bp, Homo sapiens
tgcttttggaagctgacacgattgagaggaagcctgcaaacctgagtggcctcatcctgggagacattcatacaatctgaagaactggattaattattaatgattgtgtgtagtatatatttcacacacatgtttatggcagcacaatttgcagtcgcaaaaatatggaaccagcccaaatgaccgttgaccaacgagtggataaagaaaatgtggtatatatacaccatggaatactactcaaccatgaaaaggaacaaaataatggcattcacagcaacctggatggagttggagaccattattctaagtgaagtaactcaggaatggaaaaccaaacattgtatgttctcccttataagtgggaactaagctatgaggacataaaggcataagaatgataaattggactttggagactcgggggaagggtgggagggggatgaggaataaaagactacacattgggtacagtgtacactkctctggtgatggatacaccaaaatctcagaaatcaccaccaaat

SEQ ID NO: 424597 - DNA, 514 bp, Homo sapiens
ctggaaaaaaaaaagaggtattggtaaatttagaaagacacctgaaacatgcatagctcagctctttgtctttcttttgggagccagcctccgttgtgaggactcgcttaggtttgggcctcctaggattgagtgggcaaatgttaattctgtggtttagccagtaggcccatttgggttctacacttccagctgaacttaattagtaatgacttctattcttactttcttactcaaattgctcatcactgggtaggtaagaggggtgctattaattgggagcccctcttggagactacagctttcacaggcacgcaagtaacttgaactttgttattatgatgatttgccagccaatttttctatcatcttatccacctggatcaaggtacagcctggacttaacaaaaagcagcrtattgagctaaggagtaaacgtactattctcaccactagagaggagtgtagttgttatcggagcttcctatcagaatctgttgactcaggtttgtgt

SEQ ID NO: 424598 - DNA, 615 bp, Homo sapiens
gattcaacatatacaaatcaatcagtgtgctacatcatatcaaaagaatgaaggatcaaaagcatatgatcattttaattgatgctgaaaaagcatttggtaaaattcaacatccttttatgataaaaaccctaaaaaaaaaaactggggatagaaggaacatacctgaacataataaaagccatatataacctacccacagctagtattatactgaatggggaaaaactgaaagcctttcctctaaggtctggaacatgacaaagatgcccacttcaccacygttattcaacacagtactggacatcccagctagagcaatcagacaagagaaagatattaagggcatccaaattgtaaaggaggaagtcaaatcatccttgtttgcagatgacatatctcacatgctgagaaacctggagactccacaggaaaactagcagaactgataaacaaatttagtaattcagtagtagcatttctgtatgtcaagagtgaacaatctgaaaaagaaatcaagaaagtaattccatttacaatagctacaaataaaattaagtatctaggaattaaccaaagaagtgaaagatctctgtaatgaaaactataaaacac

SEQ ID NO: 424599 - DNA, 615 bp, Homo sapiens
gattcaacatatacaaatcaatcagtgtgctacatcatatcaaaagaatgaaggatcaaaagcatatgatcattttaattgatgctgaaaaagcatttggtaaaattcaacatccttttatgataaaaaccctaaaaaaaaaaactggggatagaaggaacatacctgaacataataaaagccatatataacctacccacagctagtattatactgaatggggaaaaactgaaagcctttcctctaaggtctggaacatgacaaagatgcccacttcaccactgttattcaacacagtactggacatcccagctagagcaatcagacaagagaaagatattaagggcatccaaattgtaaaggaggaagtcaaatyatccttgtttgcagatgacatatctcacatgctgagaaacctggagactccacaggaaaactagcagaactgataaacaaatttagtaattcagtagtagcatttctgtatgtcaagagtgaacaatctgaaaaagaaatcaagaaagtaattccatttacaatagctacaaataaaattaagtatctaggaattaaccaaagaagtgaaagatctctgtaatgaaaactataaaacac

SEQ ID NO: 424600 - DNA, 604 bp, Homo sapiens
gtgagggatgaaaaactacatgttgggtacaatgtatactacttgggtgaaaggtgcactaagatctcagacttcaccactatataatttatccatgtaaccaaaaaccacttgtaccccaaaaggtattggaaatatatatatatttcctatatatatatatattgcaatataatatatataattccaatataatatgtattccaattcatatattccaatataatatataatatatattataaaaatggctaaaaagcatgtgatagatattcaacctcacagcaaccacagaattgcagaataaaaataaattatcaatttttcttctatcaaattggcaaagataaaaacatttatagttgggaaaaggtacaggtaaacttctattttcatgaattgttggttggatgtaaatggataaatttctagaaaagaatgcgttattaaatctcaaaattgaaagagaaaatatacctctaatttatrcatcaaatttatctgaggatattattgtttaactaaccaaagatatgtatgcaaaaggctgttaacagcaagttgggacataatactactaatacatttctaagtgcctgcactg

SEQ ID NO: 424601 - DNA, 478 bp, Homo sapiens
tggctgggtatggtggtgtgcacctgtartcccagctacttcggaggttcaagtaggaggattgctggaggtcaggagtttgagagcatcctgggaaacatagcacgactgtcccctaaagaaaaaaaactttaaaacctatgttgtattcttttttaaatatccttgaaactggtaaccagaagcctggggaagcagtataaattatccttcattagtaaaacagaaaaaattccctcttaatagagagcaaaaatacaaacaaaaaattaaattggcatgttttctcagttgttactggttggttataaaaattgcatctgagcaatttttcttgggaatgggtggaggtgagggttggctaagaagagagacagaaaacagaggagaaaagtcacccatatgtaaagagacaaaggtctctcctcattgagatagaaaaaaaaattgcctgcaaatccttttatgtgatgaaagc

SEQ ID NO: 424602 - DNA, 478 bp, Homo sapiens
tggctgggtatggtggtgtgcacctgtaatcccagctacttcggaggttcaagtaggaggattgctggaggtcaggagtttgagagcatcctgggaaacatagcacgactgtcccctaaagaaaaaaaactttaaaacctatgttgtattcttttttaaatatccttgaaactggtaaccagaagcctggggaagcagtataaattatccttcattagtaaaacagaaaaaattccctcttaatagagagcaaaaatacaaacaaaaaattaaattggcatgttttctcagttgytactggttggttataaaaattgcatctgagcaatttttcttgggaatgggtggaggtgagggttggctaagaagagagacagaaaacagaggagaaaagtcacccatatgtaaagagacaaaggtctctcctcattgagatagaaaaaaaaattgcctgcaaatccttttatgtgatgaaagc

SEQ ID NO: 424603 - DNA, 603 bp, Homo sapiens
tgattgttgtaatttgttagtatctgaagtttcatttcccttttacaaaatacaaattatcactataagggtaagatgaataaaggtaaaaggcatttgctgattacaaatgcctttcaatgttttaatgtcacaaattagagtgtaaccgggattgagattgtgaacgtcaatgcttgtcctaaaagtttcctccaacttgctgaaactggattcccaagcattatcaattgagggtgcagagcatgtaacccaamttagcctctccaataagtggagaatgaggtgctgacgaggagttactttgggaggcttttgagagcacaactgagaaaacatatttgaggacactgctatgttcttaataaagtcattcatttcaataccttttattcctcaaatatttgcactcacatttgtgaaaatcttaacttttcaccatgcttcaacatttggtgaaaaaataaacagcaaataagatttttttttctcaatccgatctccctggctgtttacttatagagtactgtagttgaaagtaagtcgttctcagaaacaactcagtctttagcctcacttctaggtgcgtccccaatctccgtg

SEQ ID NO: 424604 - DNA, 603 bp, Homo sapiens
tgattgttgtaatttgttagtatctgaagtttcatttcccttttacaaaatacaaattatcactataagggtaagatgaataaaggtaaaaggcatttgctgattacaaatgcctttcaatgttttaatgtcacaaattagagtgtaaccgggattgagattgtgaacgtcaatgcttgtcctaaaagtttcctccaacttgctgaaactggattcccaagcattatcaattgagggtgcagagcatgtaacccaacttagcctctccaataagtggagaatgaggtgctgacgaggagttactttgggaggcttttgagagcacaaytgagaaaacatatttgaggacactgctatgttcttaataaagtcattcatttcaataccttttattcctcaaatatttgcactcacatttgtgaaaatcttaacttttcaccatgcttcaacatttggtgaaaaaataaacagcaaataagatttttttttctcaatccgatctccctggctgtttacttatagagtactgtagttgaaagtaagtcgttctcagaaacaactcagtctttagcctcacttctaggtgcgtccccaatctccgtg

SEQ ID NO: 424605 - DNA, 607 bp, Homo sapiens
cgcctgcgtgctacttccccacgcatgctcggaaggtacctgtgggcgagcctgttaagtccacagccaatagacgtttgcttgcctacctgtacctgyacctgtacctaagtgagggggcaggcgggctgggagatgggtggagcacgtttacctgcactaagtgagctgtccaacctaggttcttgggcccttggagtgtcatggttttgtagtttgtggagaattttcatacctatgaaaattgcagtttggaaatgagcaggttacccattcccacatcatttaatttatatttaaatttaacgtggtgtagggagcaagagggaaagctcctacttttgccctctgaaagttgctggaatgaactaagtagacagattagtaggagaaaaaggcatacaaaatttgcttaacgtgcatagggaaaaatcacagaagagtgattactcaataactcaattaaggtccagatgcttgtatacccttctttgttgagtagagggagataggtatgaatgggcccgaaagccagacagtggtttgcaaatgattctccttggacattcagtgggacagaagtacaaacaatcgcttgtggacaagc

SEQ ID NO: 424606 - DNA, 584 bp, Homo sapiens
taggttactttgtttcccaaaacatataattacagatgggaaaggtgtgataaaacagtgtctctgtgaagcagtgttaatgaagagtttttattttttaattcttacatgtctggcaacgtaccaggcggtttgcatactttatttggctcaatcattgcaactctgaaaatagatatattatccctactttgtagatgagaagactgaggctcagaacatttaacttgcccacaggcatagagctggaaaaataacagaattaggacatgaccccaaagacttgcactttctactgctctgttgcctttctgtattaagataatacttaactcccagagtttttcatttcactgtggttttgtacagtcatccctcagtatccaagaagaattggttacaggatccccacagataccaaagtctgtgggtattcaagtctctgatataaaatgacccagtacagtcaaccttgcatatctgcagatacagaacccactgactgtgttttcacagaatagcttrttgtaagttttctagaactgaacctggatgtgcatctggcacagtgtgatgctggattc

SEQ ID NO: 424607 - DNA, 508 bp, Homo sapiens
tttttttttccacttattgcaaggaaaactcttggctaattcacagtgtattttactctctctgtatctctcagtctttgtgaaattatgcaaacsctaaacatgtgaagaacaattccaagatccagtcacacatagaagtatattatgtgctattttatttgctgaaatattttccttttcatatatttatataataatgatctcaactatttatcaaacattcactctatgattacttcttttagaagtaatgataagtatcacataacatttgtagagggatttgtagctgaccaagcatttacatttacatttacatttaatgtgcatttgcattttctccttttagtcacagcctgataaagcagccaatataatgtcagtgatccctgccttttttttttatttttttttccaaatacccagtcttcaagaagtaaaccctgtcttatttcacttatgagctattcaattaatgtggccctttgtaacatcagcaacaaca

SEQ ID NO: 424608 - DNA, 590 bp, Homo sapiens
accttttaaatggcatgagcctacacaaacacgcggtatccggtttgccaagggttgaaaactaaattaaatttcagtcaagttctactggcgatttatagaacagttaaargaccagggatctggtcttggcagggccgctgatgtacatggtcttccaggtaagtaatttctctcgttgggcttctgtttgcttgtctatgatgccaacattctgctctgagtacagaggaatcatgagagtgcagcagggtgctcagagctccatgcaagataggtgtctatgcaccaccagaatttcatccagaatgtcttctttcaagtgctcagttaccctaactggtctgccctgtatgactgtgcagtccataaactgcaaaagggcacaagtaggatctgaagccaagtcctctttcggccttgagcagagccacatctgactggagggagctgcctcttcttcacatgtgggcgctatctgccctccttgcccagaaggttcatcagctctgaagaaggcacgttttcgaattcccttctagataccaaatgatgacctgagccttagccaggaacgaagcaactgtcag

SEQ ID NO: 424609 - DNA, 590 bp, Homo sapiens
accttttaaatggcatgagcctacacaaacacgcggtatccggtttgccaagggttgaaaactaaattaaatttcagtcaagttctactggcgatttatagaacagttaaaggaccagggatctggtcttggcagggccgctgatgtacatggtcttccaggtaagtaatttctctcgttgggcttctgtttgcttgtctatgatgccaacattctgctctgagtacagaggaatcatgagagtgcagcagggtgctcagagctccatgcaagataggtgtctatgcaccaccagaatttcatccagaatgtcttctttcaagtgctcagttaccctaactggtctgccctgtatgactgtgcagtccataaactgcaaaagggcacaagtaggatctgaagccaagtcctctttcggccttgagcagagccacatctgactggagggagctgcctcttcttcacakgtgggcgctatctgccctccttgcccagaaggttcatcagctctgaagaaggcacgttttcgaattcccttctagataccaaatgatgacctgagccttagccaggaacgaagcaactgtcag

SEQ ID NO: 424610 - DNA, 590 bp, Homo sapiens
accttttaaatggcatgagcctacacaaacacgcggtatccggtttgccaagggttgaaaactaaattaaatttcagtcaagttctactggcgatttatagaacagttaaaggaccagggatctggtcttggcagggccgctgatgtacatggtcttccaggtaagtaatttctctcgttgggcttctgtttgcttgtctatgatgccaacattctgctctgagtacagaggaatcatgagagtgcagcagggtgctcagagctccatgcaagataggtgtctatgcaccaccagaatttcatccagaatgtcttctttcaagtgctcagttaccctaactggtctgccctgtatgactgtgcagtccataaactgcaaaagggcacaagtaggatctgaagccaagtcctctttcggccttgagcagagccacatctgactggagggagctgcctcttcttcacatgtgggygctatctgccctccttgcccagaaggttcatcagctctgaagaaggcacgttttcgaattcccttctagataccaaatgatgacctgagccttagccaggaacgaagcaactgtcag

SEQ ID NO: 424611 - DNA, 546 bp, Homo sapiens
caatgtcacaagcaaggggaaaagtaataaaaacaaaggagcaaaggaacgatttttaaatggcaatttgaatatgagatgtgagagcctcaagattctctgcttttatgtgcaacaaactgtcttaaaaagcttagctaaaagaacttggctcaatgagaagggtacaatgaaatactcaacttgggaaatttcagacatatcctgttcttatttctgaggcagggtctcactctgtcayccaggtgggagtgcaaggctcaatcacagctcattgcagtctcaacctcctgggctcaagcaatcctcccacctcatttttgaatttttcctagagatgaggtctcactatgttgcccaggatggtcttgaacctctaggctcaagcaatccttccactttggcctcccaaagtgctgggatcataggcatgaaccactggcacccgcccctattgttcttgacaaaccttaacttacatatctttgcacatttcaaaatgtaacagtaatcttgctgtgtttggaattttaagtaaaagttcac

SEQ ID NO: 424612 - DNA, 572 bp, Homo sapiens
ttattattattattagagaagggtctcactttgtcacccaggctagagtacagtcatagctcactgcagccctgaattcctgggctcaagcaatcctcctgtctcagcctgccaattagctaggactacaggcttgtgccactatgccctgctaattaaaaaaaatttttttgtagagacagggtctcactatgttgmcccggttggtcttgagcccctaaccccaagcaatcatccctcctcagcctcccaaagtgttggaattacaggcgtgagctaccaccccctgcccagaaatgcaaattattaagaccacagtgagatactaccacataactaccaaaatgactgaaattaaaaaatagtgacaacaccaaatgctggcaaggatacagaaaactcagatatctcatacattggtggtgggaagtgtaaaatggtatagccaccctggaaaacagtttggcagtttcttaaacactaaacatgcgactacaaaatgacccagcaattgcccttctggttacttatcccagagaagtgaaaactatgttcatatgaaaacatgtata

SEQ ID NO: 424613 - DNA, 678 bp, Homo sapiens
gctccttcagggcaggaacactgccctgagcattcttggaccctctacttagcccagcctcaggcatataggaggtggttaataaatgtttcctatggaggttagcacccttgggccctgagagtctcctgccctagcttcctccctccgcttctgcaccgcaccaccggctgagctgctggcacctgtaggagctggatcatcatgctgaccggccggttttttcttattgtgctccacagaaggaagttcatccacgtaattttttgcagtacccagaaagggtgggtacagtgtgttccgtggtgaaaagcttgtgaaggaggaatgcaggttttasagtctcactccacgttgctgctattcctatttgagaattgcccccccaccaccgccactcccctactcccacaaaagccttgaaatattttattcatgtgggattacagtctatgcaacaatgagacatgaggaggtggccatgaatagcccccgagtgtgttatacactgagaccttttccaaagggctgcagaggaattatttagtctaagcagccacgagtcatgtgatttcttcagaaacatttacgtctgggtaggcctgctttttaaatattcttggtgggaagcactttgaaccataaaggcacactaaaagacaattgctatggagactg

SEQ ID NO: 424614 - DNA, 552 bp, Homo sapiens
atttttgtatttttagtagagacggggtttcaccatgttggtcaggctggtctcgaactccttacctcaggtgatgtgccctcctcggcctcccaaagtgctggtattacaggcatgagccaccgcacctggcctcagattttctttttattgatccctttgttygtattccagtagaacgttttctgatgttttgtgagtgaggctgattttgttctgtcctccacatggatagaacttaatgcagagggaaatacagaggaaggaagaatctgtgtgtcatcatcatgggtggaccccaacccaaagggacaggcatggctctggcctttgggaagggaaacagcacaggaaccctaagcaagtgtgtcttactgatagacattggtcaggtctatgctgtgtttttaaagggtagaaatcagaacccataatggagataggtccttgatagactgttgagtgaaattactaatttttatggcatagcttgagtctcttgagcttaaagccttggacatagctatctgtgtctttactcctgtaatactt

SEQ ID NO: 424615 - DNA, 564 bp, Homo sapiens
ggaaccagtaaacaaacacacctagggagtgaatctggggggcggaaccatgaccagattcaccagcctgacccagcaggcagcgggggcccccagcctgcccctgcaaggagtctgcccttgactggagggtctcctctgctctctcagcatgttgtctctgtaacttagcttcctctcctgctcctgagttgtgtctgtagccttccctcctactcctccccctccctccccatgtctcaagctgctccctggctctctcagcttctctctgtctttgttttctctgtctttccccctcagtgctttcatgtctstcaaagtcaccctcctaaacagctccggcgtagatctgtttgagtgtagaatcaacaatacccccacccacacacccacatgcacacacaaagcccagctgtgtaagggcggaccccacccagcttcagatccctttgatccccccaagcttcaacattcctaccctgtaattatccctgccagctttactaccttggaggaaagaaataaccacgggtggggctggagggcctgctgatgtgcttg

SEQ ID NO: 424616 - DNA, 591 bp, Homo sapiens
atggtggggcatctggtaattttagacagggtggtcagagaagacctcactgaggaggttacatctgagtagagaacggaaggaagtgatgggaaagccatttggattcttgaagaaagagcgttctaaacatggggwagaataaatataataggatgtgcctggcttgttcaaggaagggtgcagaggccatcatggcaagagtggggcaggtgaggatagagtgcgggtcagatgaggtcaggaagggcaacgagaggacagatcccacgggatttctacaaatcctccataaggatttggcttcactgtgagagtaaagggaagcctttgataattttggcaaggaagtggcataaactgacctacaacttaacagcatggctttcatggctgtgctgagaatagcagaagcagagagaccagccaagagaccattgcagtaatccagtttagaggtgatggtgagttagaccagggtgatagcaatggaggtaatgaggagtgatagaattctatatatattttgagggtagaaccaacagaatgtactgatgtgggatgtgaaagagaagagacaaggataaaatc

SEQ ID NO: 424617 - DNA, 591 bp, Homo sapiens
atggtggggcatctggtaattttagacagggtggtcagagaagacctcactgaggaggttacatctgagtagagaacggaaggaagtgatgggaaagccatttggattcttgaagaaagagcgttctaaacatggggtagaataaatataataggatgtgcctggyttgttcaaggaagggtgcagaggccatcatggcaagagtggggcaggtgaggatagagtgcgggtcagatgaggtcaggaagggcaacgagaggacagatcccacgggatttctacaaatcctccataaggatttggcttcactgtgagagtaaagggaagcctttgataattttggcaaggaagtggcataaactgacctacaacttaacagcatggctttcatggctgtgctgagaatagcagaagcagagagaccagccaagagaccattgcagtaatccagtttagaggtgatggtgagttagaccagggtgatagcaatggaggtaatgaggagtgatagaattctatatatattttgagggtagaaccaacagaatgtactgatgtgggatgtgaaagagaagagacaaggataaaatc

SEQ ID NO: 424618 - DNA, 571 bp, Homo sapiens
taaggcagaggttgcagtgagccaagatcacgccactgcactacagcctgggagacagagcaagactccatctcaagaaaaaaaaamcaaaaaactctagctgaggagggttagccggaagccttcttcccaatgtaccaaccacccctacttcccactgctcacctcagcaaccccagtctggccaagtccatcccaacccatgctgccacacgcccttcatgctcttcctaggacatttaatcacctggtcttgggccaggcagactggactctcccttcattttacagacaaggaaactgagacacagagaggctgctggactgttgcaggcaagtcagggaagggcacggtctggaacccagggctcaaaatgcagtgttctttccaacttcacagatttcttagatccagaagaggcaggctggcaagggacagcaagggactcagagtgagtcaaaagaaaggacttccagatcagaaggattggtaagacctgaacatgtaattgtgggatgatgccaaaggtcttcacctgactcttgtcaacactaacaggttccgggacag

SEQ ID NO: 424619 - DNA, 571 bp, Homo sapiens
taaggcagaggttgcagtgagccaagatcacgccactgcactacagcctgggagacagagcaagactccatctcaagaaaaaaaaaccaaaaaactctagctgaggagggttagccggaagccttcttcccaatgtaccaaccacccctacttcccactgctcacctcagcaaccccagtctggccaagtccatcccaacccatgctgccacacgcccttcatgctcttcctaggacatttaatcacctggtcttgggccaggcagactggactctcccttcattttacagacaaggaaactgagacmcagagaggctgctggactgttgcaggcaagtcagggaagggcacggtctggaacccagggctcaaaatgcagtgttctttccaacttcacagatttcttagatccagaagaggcaggctggcaagggacagcaagggactcagagtgagtcaaaagaaaggacttccagatcagaaggattggtaagacctgaacatgtaattgtgggatgatgccaaaggtcttcacctgactcttgtcaacactaacaggttccgggacag

SEQ ID NO: 424620 - DNA, 561 bp, Homo sapiens
gtcaaatgatcagcttgcccatactaattttaaagataataaatagctagctkcccgacacagtggctcacgcctgtaatcccagcacttagggaggctggctcgggcaaatcacttgaggtcaggagtatgagaccagcctggccaacatggcgaaaccccgtctctactaaaaacacaaaaattagctgggagtggtggcagatgcctgtaattctacctacttgggaggctgaggcaggagaatcgcttcaacccagcgggcagaggttgcagtgagccaagatcgtgccactgcactccagcctgggcaacagagcgagactccatctcaaaataaataaataaataaacaaacaatatatgttgaatacttattttgtgccaggcactgacttcacaagtattagctcatttaatctttataagaacccagcaaggtaaatattaacatctctctttatacaatcgcacagaaaggttctgtaattgcctgagttcacacaactcctgagtagtaaagccaggatttgattccaggccatctgggtccagagttgc

SEQ ID NO: 424621 - DNA, 607 bp, Homo sapiens
gaccctcagctcagaagcatgggggaaacaggaagtgtctacatcatgcagggtagcaaaagtgttccatccaaaggttgtacgctccactctatttagccccgtctgtcttatttgttatttaatttgttgtttttttttttttttgagacagagtctcattctgtggccccggctggagtgcagtggtgcaatctcagctcactataacctccggcccccaagttcaggtgattctcctgcttcagcctcccaagtagctgggattacagacgcgtgccaccacgccttgctaattgtattttttagtagagatgggttttcactatgttggccaggctggtcttaaactcctggcctcaagtgatctgcccaccttggcctcccaaagtgctgggattacaggcatgagccactgcacccggccactcgttaatctttttctaaaatttttgatgtatgagtgtgtggaaaacttgtgagaataggagagatagaagaagttgattgtggccctacctccaatgatctatttwttattattattattattattattattattattattattattattgctttctgtatggcatgtccacatgtc

SEQ ID NO: 424622 - DNA, 600 bp, Homo sapiens
gggcttgcatctgtgtagctttgcctttattaatgtttagcaagattctatttaatcagggattccctatctaaaacaaaactaaaactaaaaccctttgattttgaaaaaccataggtctaatgggyttcctcataaactgtacattatttctggagtttcttttattcatttattaattcaacaaccatttattgtgtgcccgctttggcactaggcctcagcagtgaaaaggacagaaaaagactcagttcttacaaagctatcatcaagagaaatagaacatccaggcccccagctttttttttttttttaggttttattctttaattaaaccagatgttcttccagtaattccatgcattccttcttactcctatccccttgctgctaccctttcatcctacagaaatccgtttctatttatttgcaaacacagattctaacacttgctcatctgaagtgtattagtccttgcatatttctgccattggttctgaccacacagtgcagtaaaacaagcgtgtctgtgtaacatgtgctcgttcccttgctttgatttcttctgttttatattcaatatgacatgtaggaaatgtg

SEQ ID NO: 424623 - DNA, 600 bp, Homo sapiens
gggcttgcatctgtgtagctttgcctttattaatgtttagcaagattctatttaatcagggattccctatctaaaacaaaactaaaactaaaaccctttgattttgaaaaaccataggtctaatgggtttcctcataaactgtayattatttctggagtttcttttattcatttattaattcaacaaccatttattgtgtgcccgctttggcactaggcctcagcagtgaaaaggacagaaaaagactcagttcttacaaagctatcatcaagagaaatagaacatccaggcccccagctttttttttttttttaggttttattctttaattaaaccagatgttcttccagtaattccatgcattccttcttactcctatccccttgctgctaccctttcatcctacagaaatccgtttctatttatttgcaaacacagattctaacacttgctcatctgaagtgtattagtccttgcatatttctgccattggttctgaccacacagtgcagtaaaacaagcgtgtctgtgtaacatgtgctcgttcccttgctttgatttcttctgttttatattcaatatgacatgtaggaaatgtg

SEQ ID NO: 424624 - DNA, 577 bp, Homo sapiens
atcttaaaagtgttactattcctttcaaagtacctaccattcatcttagattttacttgtgcaaataaatggcatttgaggcccttgtccacaacacgttcacagatccatagtctacctctttctttttctttctctagcccttcaccttttttgtttgttcttcttctacttttccttctgtttttctgttgtgtttttttgagacaggaccttgctctgtcacccaggctggagtacagtagcgcaatcacagctcactacagccttgacctcccaggctcaagttatcctcctacctcagcctcccaagtagctgggaccacagatgtgcaccaccatgcctggctaattttttttgttttttgtagagatgaggkctcactatgttgcccaggctggtctcgaactcctgggctcaagcgatcctccttcctctgcctcccaaagtgctgggattacaggcatgagccaccacacccggccatgttgtttctcttagggcttcttttccacccaagaccattcctaagagcacacaggataaaaagaggttgctgaccactatcacagacta

SEQ ID NO: 424625 - DNA, 630 bp, Homo sapiens
agcccataacaatgtccacattgatctctttgactactaccctcaccccagtgatggaggtatgattctaatcgagatctttagtactccaaagctggtgctcatttctttatagtatcatagtggtcaccagccatggtttatttatrtcttctagaatacttcagccacaggagaagctaaatttgtccagctttgttttatctttttttttcttttacatgatattccatagtaaacattttacttaaaagtgggaactagtgctatagtgatatagtagattccaagacagacctatatttagacactgttctgctactctatactgtgctctgtttctcccaagatttttagtgagcattaaatgagatacagataaacacttggcttgaaacaaaagatgatcagcatttcccttattaagagaaaatagtattatagaaaatctacctctcaagtcagtacagtaaatacatgaggagttcagtgaaatgttctttaagaatttggaagtgaaagaaatatgattgccttttgagagttaaactttaaaatcatcacataatggataaaaacagtctcttctagcagcaggagttgatgtaatatgactggagctattaatac

SEQ ID NO: 424626 - DNA, 596 bp, Homo sapiens
taaatgagatacagataaacacttggcttgaaacaaaagatgatcagcatttcccttattaagagaaaatagtattatagaaaatctacctctcaagtcagtacagtaaatacatgaggagttcagtgaaatgttctttaagaatttggaagtgaaagaaatatgattgccttttgagagttaaactttaaaatcatcacataatggataaaaacagtctcttctagcagcaggagttgaygtaatatgactggagctattaatacagctaacggaaggatgtgtcactccaaggtagggggttggacagcccatgggagcttaggaaaaggagtcacagagacaaatattagcagaacccatctgggtacttttgggaaacaggaaatttgagccagtagatttttttaaatattaagttcccattgccaagtttccaactgtgtgattaatactttagcctgttttagtcttaaaccataaaacattcacacattccaatgagcttcttgtacttgaaaaccaattgtacctgatctcagtatgatatagatgtgcttacagagattgtgtgggtctatcatgctaacctgggt

SEQ ID NO: 424627 - DNA, 601 bp, Homo sapiens
actttagcctgttttagtcttaaaccataaaacattcacacattccaatgagcttcttgtacttgaaaaccaattgtacctgatctcagtatgatatagatgtgcttacagagattgtgtgggtctatcatgctaacctgggtatttagcaacctgttgtttttttactgtaattaaatagaactttatgtatttggttaatgtgactgagcaatagatccattatttgtgtacttagaaagtctggtttctgyctctgaatgactatgaacccaattcttccatattttgactttaacctataagggctaagatttagggttattagatttagcaaataaggatatagaaaaaccagttaaatttgagtttcagataaacaatggattttttttttcagtataagtatgtttcagacaaaatttgggatatgcttgtgtaaaaagtgttgaatgttcatttgaaattcaaatctaactggccattctgtactttacctgacaactatagagagacctcttttaatacagctgctagtattaatatacttaaagcccttagcacagactcatacataaacactataaatggtaacacattt

SEQ ID NO: 424628 - DNA, 600 bp, Homo sapiens
atgactgtattttattgaaggtttgaagagtggaccaccgtggagaaataagatggaataaaggggatataatctaatggaaactaggggaaatttagaaaagcctgtttgttcagattcctctctgtgtcctttcatcttcaaagataaggatggtcctttcctctggatatagggagagcatttctcacaagagggtcttatgacttgctttaggggaaggtcagaaaaaccttcctaggtgttacgacctgttttacaagaagagggtagaggaagatgagaatgaactttctaccttgtggttttctcaaattcctcagcttcagctattttagggtagcawgccctggacctcatcattggaagagtgagtaaggcttggcacaaagaagcagctataatctaggctatccaaagccctaagagacttctaaaataaaataagaaaatcttgatgagtaattcaatattccctttttccacatttgtctgctacaccagaaattttcgtaagattaaaagctgttaactaatcttttcaattacttggtttattaagctatccaggcagcaactttctctagataatttgtgtca

SEQ ID NO: 424629 - DNA, 600 bp, Homo sapiens
atgactgtattttattgaaggtttgaagagtggaccaccgtggagaaataagatggaataaaggggatataatctaatggaaactaggggaaatttagaaaagcctgtttgttcagattcctctctgtgtcctttcatcttcaaagataaggatggtcctttcctctggatatagggagagcatttctcacaagagggtcttatgacttgctttaggggaaggtcagaaaaaccttcctaggtgttacgacctgttttacaagaagagggtagaggaagatgagaatgaactttctaccttgtggttttctcaaattcctcagcttcagctattttagggtagcaagccctggacctcatcattggaagagtgagtaaggcttggcacaaagaagcagctataatctaggctatccaaagccctaagagacttctaaaataaaataagaaaatcttgatgagtaattcaatattccctttttccacatttgtctgctacaccagaaattttcgtaagattaaaagctgttaactratcttttcaattacttggtttattaagctatccaggcagcaactttctctagataatttgtgtca

SEQ ID NO: 424630 - DNA, 576 bp, Homo sapiens
aagcttattgtacatggttgcaaatccagtgaggctgagtgaacastgatttttatcaatgcattctatggaaaaggaaagcaagaaggcagattggtttcttgaagttagtcagttaatctgtgccagagctgaaactgaaaagcaagcctacctactctttccatgatactaataatctaagagaattgataacagaaagatcaagaggtgaaagaatgagccccagagagaaaaaatgtgacggcttccctctgacacttctctcaacctatactccttccacttttgctgccctgtctccttgtggtttctaggactttggtttctattcaggagcctgctgggtgattcacatttctctcttgcaccctggagtcattggggatggcatcagagatgaggggaagagaaactgtggcatctctagagacatgcttagaagagggaagattcttccacgtggcctgtaagaggaagtgacactcacagagatgaatgccagagtggcctggggaggcagatattttgaatcttgagcttattatgtctttctggatttttaggtttggacaa

SEQ ID NO: 424631 - DNA, 576 bp, Homo sapiens
aagcttattgtacatggttgcaaatccagtgaggctgagtgaacactgatttttatcaatgcattctatggaaaaggaaagcaagaaggcagattggtttcttgaagttagtcagttaatctgtgccagagctgaaactgaaaagcaagcctacctactctttccatgatactaataatctaagagaattgataacagaaagatcaagaggtgaaagaatgagccccagagagaaaaaatgtgacggcttccctctgacacttctctcaacctatactccttccacttttgctgccctgtctccttgtggtttctaggactttggtttctattcaggagcctgytgggtgattcacatttctctcttgcaccctggagtcattggggatggcatcagagatgaggggaagagaaactgtggcatctctagagacatgcttagaagagggaagattcttccacgtggcctgtaagaggaagtgacactcacagagatgaatgccagagtggcctggggaggcagatattttgaatcttgagcttattatgtctttctggatttttaggtttggacaa

SEQ ID NO: 424632 - DNA, 594 bp, Homo sapiens
tcaggagccatatacttttggaaaataatttatttggatgttttagaataagggatgttccattaatatgatacaataaagaggaaagataagaaactattgttcatatttcagtggctagaacctcaaaatcttggaaayggtaagagatgctcctactaatctgctattcaattctgagaaatgtctttcttggcacagtcacacttgggagcactcaaatgaattcaacagaattgaatttaaagcactttagtaagtatagtggaggacacaaaagttaagacaatgtacttactgtattctcccatagtgtgctttgaatgacactgacttaagaattcaataaaagcacttatatttattatttttggactgctttttccttcctaataaactgcaagcgctttgcacaggaaagcaggatcttgcatatctgtgtcaccaacaggtagtacagtggcagactcataatagacactcgagtgtttgtagagtaaatgctaaattttattttgtaataggaaaataactgttatcttatgttaatatatttaagtgtagtttcttctattaaccaaccttgctaggcct

SEQ ID NO: 424633 - DNA, 591 bp, Homo sapiens
gggctttggatagcctagattatagctgcttctttgtgccaagccttactcactcttccaatgatgaggtccagggcwtgctaccctaaaatagctgaagctgaggaatttgagaaaaccacaaggtagaaagttcattctcatcttcctctaccctcttcttgtaaaacaggtcgtaacacctaggaaggtttttctgaccttcccctaaagcaagtcataagaccctcttgtgagaaatgctctccctatatccagaggaaaggaccatccttatctttgaagatgaaaggacacagagaggaatctgaacaaacaggcttttctaaatttcccctagtttccattagattatatcccctttattccatcgtatttctccacggtggtccactcttcaaaccttcaataaaatacagtcatgtttaactgttgctttgagtctttatttccttatgaaggctcctgtatcacatacaaatttgtatattatatacaaattaaataaatcggtatgctattcttttgccaatctgtcttttgttataggggcctcagctatgaacctaggatagatgaaggaaagatgtt

SEQ ID NO: 424634 - DNA, 591 bp, Homo sapiens
gggctttggatagcctagattatagctgcttctttgtgccaagccttactcactcttccaatgatgaggtccagggcatgctaccctaaaatagctgaagctgaggaatttgagaaaaccacaaggtagaaagttcattctcatcttcctctaccctcttcttgtaaaacaggtcgtaacacctaggaaggtttttctgaccttcccctaaagcaagtcataagaccctcttgtgagaaatgctctccctatatccagaggaaaggaccatccttatctttgaagatgaaaggacacagagaggaatctgaacaaacaggcttttctaaatttcccctagtttccattagattatatcccctttattccatcktatttctccacggtggtccactcttcaaaccttcaataaaatacagtcatgtttaactgttgctttgagtctttatttccttatgaaggctcctgtatcacatacaaatttgtatattatatacaaattaaataaatcggtatgctattcttttgccaatctgtcttttgttataggggcctcagctatgaacctaggatagatgaaggaaagatgtt

SEQ ID NO: 424635 - DNA, 567 bp, Homo sapiens
gttttttctgtgtggtcttcatgcttgtggatgttggttggtgtctgggcttcagtggcttgggtatttatgatcatttttgtggtctgggcctctgtatgctcatcctttttgggaaggctttccaggtatttgaagggacttgggtgctgtgatctacatcttttgtcactgcagctatatctgccttagggggcacctcaagcccataattctgtggctcttgcagactcatagagctaccaccttggaggtcttgagtagaatcaagagcttcccctggattactaggtagagactcttgttctcatccctgactttctccccaaaaaatgaagttttgctctccatgctaagctgcctgcagcctggtgggggaggagtgacacacgacccctgttgctgccaccactgrggctgcactgggtcagacctgaagcctacatatcactgggtgtcacccaaggcctgccaggatcacttcctgattaccaccaatgttacttcaaggctctaggactctacaatcagcaagtgatgaatcaagccaggcttgtggccctccct

SEQ ID NO: 424636 - DNA, 483 bp, Homo sapiens
ctgatttttggttcttataaaagtgctttcttttgtagatggttgttcaatttggtgttcctgcatggagaggggcagcatttgctggaggcttctattcagttatcttgctctgcttcccagccttttttrttgttttgataatagtcctcttgactgggttgagatgaatctatttgtgcttttaatttgcatttccctgatgattaatgacagtgaactttttttttcgtatagttgttgaccatttgtatgtcatcttttgagaaatgtctgttcagatcctttgcccatttttaattggtttatttgtggggttttcctcttttgctgttgagttgtttgatttccttgtatattcttaaaagtaatccttgtcagatacatagtttacacacattttctcccattctgtagcttgtctcttcattctgttgattatttccttttctgtgcagaagctttgtaatttgatgtaatctc

SEQ ID NO: 424637 - DNA, 483 bp, Homo sapiens
ctgatttttggttcttataaaagtgctttcttttgtagatggttgttcaatttggtgttcctgcatggagaggggcagcatttgctggaggcttctattcagttatcttgctctgcttcccagccttttttgttgttttgataatagtcctcttgactgggttgagatgaatctatttgtgcttttaatttgcatttccctgatgattaatgacagtgaactttttttttcrtatagttgttgaccatttgtatgtcatcttttgagaaatgtctgttcagatcctttgcccatttttaattggtttatttgtggggttttcctcttttgctgttgagttgtttgatttccttgtatattcttaaaagtaatccttgtcagatacatagtttacacacattttctcccattctgtagcttgtctcttcattctgttgattatttccttttctgtgcagaagctttgtaatttgatgtaatctc

SEQ ID NO: 424638 - DNA, 618 bp, Homo sapiens
tactgtggtcattcacctgatttttggttcttataaaagtgctttcttttgtagatggttgttcaatttggtgttcctgcatggagaggggcagcatttgctggaggcttctattcagttatcttgytctgcttcccagccttttttattgttttgataatagtcctctcgactgggttgagatgaatctatttgtgcttttaatttgcatttccctgatgattaatgacagtgaactttttttttcatatagttgttgaccatttgtatgtcatcttttgagaaatgtctgttcagatcctttgcccatttttaattggtttatttgtggggttttcctctttcgctgttgagttgtttgatttccttgtatattcttaaaagtaatccttgtcagatacatagtttacacacattttctcccattctgtagcttgtctcttcattctgttgattatttccttttctgtgcagaagctttgtaatttgatgtaatctcatttgtctatttttgcttttgtttcttgtgcttttgaagtctagtctaatcttaaaaatccttgctcagaccaatatcataaagcatttcttctgggttttcttctagtagtttcatag

SEQ ID NO: 424639 - DNA, 617 bp, Homo sapiens
atctgaaataagacaagaatgcccattctcatcactcttattcaatatagtactggaagacttagcaagagcaattaggcaagattaagaaataaagggcatctaaattggaaaggaagaagttaaattgtcctctttgcaaattatatgactttatatgtagaaaatctgatggactccacaaaaaactcttagaaataataagaaagatcagtaaatttgtgggacacaaaatgaacatcccccaaattagtaccttttctaaatgccaatagcaaactatttgaaaaggaaatcaagaaaacaatcccactgataatagctataaaaaatacaatacctaggaataaatttaatcaagggggtggaagatctctacattaaaaactataaaatattgataaaataaattaaagargacacaaataaatgaaaagatatcttgcattcatggattggaagaattaatattttttaaatgtccatattacccaaagtaatctgcagcttcaatgtaatccctatgaaaacaacaatgattttcttcacagatatagaaaaacaatcctaaaatttatatggaaccacaaaagactcagaatagctaaagcaatctt

SEQ ID NO: 424640 - DNA, 617 bp, Homo sapiens
atctgaaataagacaagaatgcccattctcatcactcttattcaatatagtactggaagacttagcaagagcaattaggcaagattaagaaataaagggcatctaaattggaaaggaagaagttaaattgtcctctttgcaaattatatgactttatatgtagaaaatctgatggactccacaaaaaactcttagaaataataagaaagatcagtaaatttgtgggacacaaaatgaacatcccccaaattagtaccttttctaaatgccaatagcaaactatttgaaaaggaaatcaagaaaacaatcccactgataatagctataaaaaatacaatacctaggaataaatttaatcaagggggtggaagatctctacattaaaaactataaaatattgataaaataaattaaagaggacacaaataaatgaaaagatatcttgcattcatggattggaagaattaatattttttaaatgtccatattacccaaagtaatctgcagcttcaatrtaatccctatgaaaacaacaatgattttcttcacagatatagaaaaacaatcctaaaatttatatggaaccacaaaagactcagaatagctaaagcaatctt

SEQ ID NO: 424641 - DNA, 362 bp, Homo sapiens
atctgcagcttcaatgtaatccctatgaaaacaacaatgattttcttcacagatatagaaaaacaatcctaaaatttatatggaaccacaaaagactcagaatagctaaagcaatcttgaacaaaaagaacaaagctggaggcatcacactacctgacttcaaaatatgctgcaaaggaatagtaaccaaaacagcamgatactggcatgaaaacagacatagagaccaaaggaacagcatagtgaacctagaaataaatctatgcatttgtagtcaactgttctgacaaaggccccaagggcacacactggggaaaggacagtatcatcaaacaacaacaacaacaacaacaaaaaaaaca

SEQ ID NO: 424642 - DNA, 558 bp, Homo sapiens
acgattttcttagaggttgacctgagctcatttataggttgaagaagtaagacagtaagaccaacataagtgtagagtatagayagagaggaaagacacgtgtgtttgtgagtatgtgtgtgtgtatttcaactataatcaagtgtatatcttgcagaagcataattacaaaataaggggtgcagaaaatatgaccaaaatatgaaaggtcttgtctgtcatcctgccaaggagttccaactttatggtagagattcacaatggaggaatcattaaagaacatgtcattaatatatttgcattcagataggtgtccctggctattgggtgaaaaaaaaatggacttaaatagctggactggaagtattttaattatctttaggacaggttatcctctgaagcaaatactaatctaattcatatattcatgtgaatgaaacaatggcaaaacaaatgaataacaacaaaccttacaagactagaacataagtcaattttctcatattttatagttttgtttacataaacagtgtctgaggattttgagactttagattc

SEQ ID NO: 424643 - DNA, 558 bp, Homo sapiens
acgattttcttagaggttgacctgagctcatttataggttgaagaagtaagacagtaagaccaacataagtgtagagtatagacagagaggaaagacacgtgtgtttgtgagtatgtgtgtgtgtatttcaactataatcaagtgtatatcttgcagaagcataattacaaaataaggggtgcagaaaatatgaccaaaatatgaaaggtcttgtctgtcatcctgccaaggagttccaactttatggtagagattcacaatggaggaatcattaaagaacatrtcattaatatatttgcattcagataggtgtccctggctattgggtgaaaaaaaaatggacttaaatagctggactggaagtattttaattatctttaggacaggttatcctctgaagcaaatactaatctaattcatatattcatgtgaatgaaacaatggcaaaacaaatgaataacaacaaaccttacaagactagaacataagtcaattttctcatattttatagttttgtttacataaacagtgtctgaggattttgagactttagattc

SEQ ID NO: 424644 - DNA, 585 bp, Homo sapiens
atttttggaaacttgttctatggttcaaacaatcagttttggtaaatataccaaacatgcttgagaaaaatgccaatatcaagggcagtattctaaatatctcaattaaggcaagtttatcaaatttagggatgttcaagtcatttgtatctttattgcttttgtatttacctcttctatcagttaccaagagtgatgtgttaaatcttccaactgtaattttggatttccctattttttctttttttatttctgatttttaaattcatgtttttaaatttttattctatttttaattgacaaataattgtatatatttatgggataaattatatatatacacataaatatrtatatattcatgcatcatatgcaatgtgatgttttgatatattcacattgtagaatgattgcataagctaattaaaatatttattacctcacttatgttttttggtgtggtgagaacatttataatctactcttttagcagttttgaaacatacaatacattattatcaactatagttatcattctgtacaaaggatcactaaaatttattcctcctgtctaactgaaacttt

SEQ ID NO: 424645 - DNA, 640 bp, Homo sapiens
caatgcaaccataaaaaatgaaatcatttcttttgcagcaatgtagatggaactggaggtcattatctgaaatgaaacaactcagacacagaaagacaaactgcatattttcatttataagtgggagctaaacaatgtgtacacatggatgcaagagtgtggaatgttagacaatggatacttcgaaggttgcaagctgtgggaggagattgtatgatgagaaactacttagtgggtacaatgtacattattcaagcgatggataccctaaaagctttgaattcaccactaactacacaatctatccatgtaacaaaatgacacttgtagcccataaaattatacaaactgaaaaaaaaacctttttaatgatatagaatttcaaagttattttctttaatctctttaataatataattttcttctgttttatataatttcttctgagaagttgatttttagcagtgtcatwgttcatttgaaggtaatatgccattttcctttgactgctttaaatgctgttgttttgttttgtttttgactttcagaagttcaactatgaggcacctctgtgtgattttcttttagtttaaatttattcttctacagatttgtagatttctgaatctgtagcataatg

SEQ ID NO: 424646 - DNA, 277 bp, Homo sapiens
agagttgacatggcaaacctgagactgccctctgtagaaagacttgcttgcaaggttggcccttgggtggcatctggatcatggtaggattcctaccatttcctgttaagaataccttatatgcctaaactgtgcaaacaatatggtttatgctgaacatctttccttctgaggttttagaaaatgytaggcagacagtgtctgtgtgaccagctcccagtaaaaaactggggccctgagcttctaatgaacatccctggtagacatttcacttgtg

SEQ ID NO: 424647 - DNA, 579 bp, Homo sapiens
cacattatagcaaggtaattttttaacggaattctgataagaaagtggcaacaatgttttctaagattcccagttaaacttgccaacattctcattgaggattaaataataaagctaggagaggataaataaagaaaacaaattttaaaaatcaaaccttaaagagaaagtctttgtgtagtatttctatgtattagatacatgattatggagagttcattttacatgtagtagaatataataagcattgtgaaaggagaagaaacaaaagaaaacatacaaagtttgttgtttttccattttcttattgtttgcacctaaagcagatcttagagattgattgcaaacttgtctggaaatttccttggggtgaaatactgataactattttgaaaggtagctttctttcacatgtaggattacatggyagactccttcacttccgattgcacttatccctgtatctcccttatgatccatgatctatgtatgaacaagctatgcccttgacatagtctgttcttgagtcccagaatgccatccctgatttcctagtgaactgttcttcaaggctcaagt

SEQ ID NO: 424648 - DNA, 261 bp, Homo sapiens
agggtggatgtttttgagacatggttttttgtcccaccacttgcaatggcagattctaccttctaatgggttagtctacctgttaagatactgacttctgatacaacatggatgamcctcataaacatatcctatgttgtattaactagggttctccagaaaaacgacaaaaaatagaatatatacgaacagataattgagagaggatttattaggtgaagtggctcacatgattttggaggcagagaagtcccatgatgt

SEQ ID NO: 424649 - DNA, 594 bp, Homo sapiens
tttgcaagctgaagaaccaaagaagatggtagggtggctgagtccacttttcaagtcaaccaggggagctgatggtgtgattctcagtttgagaccaaaagctggtggggaagggtagtggctagtgcgagtcccagagtcaaaaggccagagaacctgaagttctaatgtccatgtgatatagtttggccrtgtccccacccaaatctcatcttgagttgtaactcccataattcccacatgtcatgggaggaacccagtgggaggtaattgaatcatgaaggcaggtgtttcccgtgctgttctcgtgatagtgaataagtctcacgagatctgatggttttaaaaatgggagtttccctgtatagtctctctctctctctttgcctgcctccatccatgtaagatgtgacttgctcctccttgccttctgccatgattgtgagccctaccaagccatgtggaactgtaagtccattatacctttttcttttgtaaattttgtgttttaaaaccatcagtcttgggtatgtctttatcagcagtgtgaaaacgaactaacacactatgatcaggagaagatgcatgactcaa

SEQ ID NO: 424650 - DNA, 622 bp, Homo sapiens
ggcacacaggttgcataaattagagataaatagattctttaaaaattaaaaaataatgacaaactataaagtaaaattgctaagcaaaactaatataaaactcttaggaatcatattgatcacattgtcagattggttaatttgcatatcatagccacatcaacaaggtgtcttttagttatgggctccctgtaatgttttatctgacaccattttaataagattctgtcaggatccaaagaatcagttttgttcactgccactctattttctttcaacctatttaggtaattattaatgtagctatgctaatgatcatttttctatttacaaacagtctctagaacattctcaagtggaaatgatcactatctccccttaagtcccagatgtttctgttgtcacacattatacctttcatatcctactttgtatctagttattgtgcaccttatctcttccactactgacatgctgcttgaggtccagaaccacattgtttttccattctccattgtgcctatcagagcaccaggaaaaagtaggcactgaagtgtctttaaacatgaatgacaaaacagtatcactacrttttcctcatgatcctgttttaagctcccat

SEQ ID NO: 424651 - DNA, 547 bp, Homo sapiens
aagaattgaggatagaggataaatcagtgaagagatggaccattgcaaaggaaggagaatcttgcagcataacgactttgagaaataagaaactataaacctatgtatttgaggatttgagggctgaaatgaaaattgaaaggaaaggatagacctctatgaatgattaatcaaaaaatgtaaaacttagccagaagtagtaaagttcaaagtcattattgaaagtaagaatgtataattttttaagttaaaatctatagcaaaatatcatagaacttggaaaataatgtatcattttggtgctgctaagaggagaacattgaactagagaaaaaaaatttcagaatttaattttgatgagtatgtttctgtcattgtaattttgctgattattgtggtttgatatttttatgcaaaaaaataggaaaatcagagaaattagamcattaatcccaataaaatgtttaaaaaataatttctaaaatggcttcccaatttgaatgaaagtaaaattcaaagtattaactgtgaatgaaaatcccaccat

SEQ ID NO: 424652 - DNA, 623 bp, Homo sapiens
cagcacacaaagtagttgagccagctccaggcaaccttatcctttatttcatttgttatttatctgtcttaggtagaactggtttaaaacttttaaaaatttgttggagaagattagtactgtaatgtaaactttttttaattcaagaaaatattgtgcatctttattggttctgaggagacaaaactctgggaggagagttttaaagttcaggggactttggattgattcttccaggcctgtcaaccaagtattagtggtcttcctgctttctccctagttgcgtgacaatagacaatgtagagaagagacctgatgccagggagtgctccttttatacatactatgtgggcaaccttcaccagactgacttgcctagtctccaaccttaccctttatacactcttccccattaagaaggtatgtggtgtctctttggagactcacaaagggctgataatctatcgaaatgccacagtttggggactgcatttctcttcttccagaccagcatgaggtaaagatctaggcaaytgtatctgctctggagacccatatgtttcctccagtgacccattccaacatctttatagaaagtaccaaattcctagtgataaatggta

SEQ ID NO: 424653 - DNA, 620 bp, Homo sapiens
tatggctgggatatcaggtattgcccagtattgatgtgagggtaggagcctagcttccttgggaattttatcttgaagataagagaaagtttacatctcttttaggtaaggccagttagcaaacacagatatcctacaatgcctttcctctccccatagctcttaaaaactctccagtgcccctttttatttggcagagttgaattcagaatggattctggtagtcttccttgtctgtttaacttagttcagtgaaatttttgcttggacagtttggagaaaagaaaacggtaatttccctcagcagtgtttataaaatgcttttgggaaattatcattattgaacattttcaattttgagatatttaattgccctgtacaatttatttgtgaggtagtaatagattcsccttaaataaggatatgctaataggctgtacatctcttgctgtcagagaacacccttcccagattttacttctgcccagttgggtggggggaatggctcagattccctggtagtgctgaggtgtctggagtttctggagtcatttgcttccaagactcagggtgcactcaaagagatcactttgttaataagcaaggattgtcctattgaa

SEQ ID NO: 424654 - DNA, 557 bp, Homo sapiens
aattcattataggttttattattatcatgaatgagactttcttcattttattagatgaggaagttgaggtccaggaagataaataaaagctcaaggtatttcagcttatctttttcattctatgttagatttacagaatctaacctggttagctaattgaaataagaattacaatctgaacactggggtctccaaacattccctaatatatctctctctgtctttccacaaatataaatataaggctattaaacacttgaggagggcaaactcaaatcacacttccacaaagcagagctatacaaatacatactcacacacacatattgagaaaaaaatgcattatgtacatttgctatgtcattatagaacaattactccctgatgatggacagaatgttttgtatatatttttatgaatgttctattctagagacatctgtgagatagccaaatctarcaattgtctaagtctcgggacacctgtattctagctttggcaccctttctaagctatgtgacataaacgagaaaattaaccttccttagtccttatg

SEQ ID NO: 424655 - DNA, 551 bp, Homo sapiens
agacaattactacctctcaattgttgttgactaagatataaatctagaggataactgaaataaaagtttgtccaattaaatttatagtagctatttcttccacaagctattccaatactgtggggggtgggggcgcagtcagaacactaatattaggaacaattaattgtattatatcatcacatttattaacatattctgaaagtgaaaaatatctatttatctatttacctatctaaacatatgtggagggtgagagaaagaaaacacgttacccttctgacagaatcccgcagaaatcccttctctcaacacataggcccgaaatgatatgggccagaataatagatgctcctttatctcaagtgagttatgttttttcacaaagatgtctgtacagggaaactgttgtctcgattggtctttgcttcacataacaatttgtcctttcaggaagactgcccatygattttgtcacacacccatagtaggcaaaaccagcctcaaaatggttgccatgctcacagttcccttctgaggaaacttgcaca

SEQ ID NO: 424656 - DNA, 462 bp, Homo sapiens
aagagagaaatatgacagccaatcttactcattaatacagatacaaaaattccaaacaagaccaaaaccaatacagcaatatttgaaaagataatatttgatgacaaagttgttttatgccaagagtgcgagttttgattagcgctagaaaagtaaaataatgtacctaagtagtttaccatactaaccgatgaaagaaaaaaatactaccatcatgatagatgcagggaaatcatttgatacaattctcttttttttwaaaaaaattattttttaacttttacatttaggggtacatgtgcaggtttcttacataggtaaacttgtgtcatggggttttgttgtacagattatttcatcacccaagtgttaagtgtagtacccattagttatttttcctgattctctcccttctcccatcctccaccctcctatagagaggcctagagagtgtcgttccac

SEQ ID NO: 424657 - DNA, 642 bp, Homo sapiens
cctacctgcttttggttaatttcctgtttatttttaaggctatgtgagggttattattgcttcacctcattgtagaaagtacaatctcctgatttttaattcatcttcttttcctccttcccccagaagaaaacagaaaacagctgtactgagaattagaactgttatcaggctcaaaacatttaattaaacaatgcattttattatttctaatcacgttgaattaatcttcttagttctgcctttatattagtcagggaaggctgggctatgttatagtaataaataaattatcagtggctaaatacaacaaaagttatttatcattcaaagtctatagtatttctaaatcaggttcctgcatgtagtaagttaaaaaaatccagattttgttttccaaactgtggcttaacgtctcatttcaagacctccatgtctgtctaggcaagagaaaagagagattattctagtgcaccagcttttaaatgcattsctcttgaagtggcatgtgtcatgtctgcctcgtatattaatagcaaccctaacttcatagtagctgggaaattaagaggagtatatgggattcaatgagaaatatacacctgccacagtctttcaagtcctaatattcagtttcacaaa

SEQ ID NO: 424658 - DNA, 520 bp, Homo sapiens
ataagcaaattgaaacccctctatccacactaaaattataactaaaatggaagagactagaattataaaatatgtcctacttattattgttccaatcatatacagtttgcctgtcaatggatggccttaaatggatgccagtaggaagataagagcacctaaatctcagaattagccaacagggttaggcaatgaccattgctgatattctcatgcctgaacataaattctttgtttcagtagatcaatgtacatgtgttcaaatgatcaagagaaaaagcaacatgtctacggtaaatcaaaaagatcaaacaaaaacaatctctgaagaaaatgttctctataaaatgtcagagcttgacagggcaagggtgctaagaattgaatacactatcctagaaaagtatttcttattatttagcaatttcygagtttcattgaatctaagatgccatttattgaaaggaacactattattttagatgtgactaaggaacaaaaatgtcaccaccaattgtaa

SEQ ID NO: 424659 - DNA, 535 bp, Homo sapiens
gttgggaccagctcttggcttggcttggcttggcttattgttawgagtttattggatcaagactaacaaataactttgtgatgaaaattcttcaaaaatatagctactcttttcaagtataccatttaaaatatttcatcaggcagagccctgaccaggaaaaaaaaaaaaaaagaaagaaagaaaagaaaaaaataaataaaatgctccaaaaagtgttttcagtagtcttcactggcccttgtgggaggaaaaatacttttttaacttgcttttctaagatttgttatatttaaatccaagagaaactatgccgaaaaaaagtgttataaagaggaatgcatgtagcattaatgcaaatatcaagaaaatacttgaaagagtccttttcatttatttaattaaatttggtgttttattttgtctgaatctgaatttctcctatttaatctatgcaattatgcttgttttatatttataagcacttgactcactgggtgtggtctttttactgtgttttatttcaaaacgttgt

SEQ ID NO: 424660 - DNA, 572 bp, Homo sapiens
gtaatcacaattattactttaacatgtgcccccgtttttttttttttttttaaacctatatagagcataaatgcacatacatatatagggcaaattttgaaagatgattcatttattaaaataatttcaaataggccattgataacactaaggggtatttttcttattactctgaagtcatttgattactctcctatgatactrctattaatataagcattgcagctaccaggcccatttttcacacccaacagtaattttttttttattgccaactgcatataaaaatagacaaaagaaaaaccattgatcggtccattccaacttataccacactgtttttcagatataccaccagaagttcttcaaattacaggtatttctcaagtgttgccttccattttaggagtcagctctgaacaaagaagatagatgactcaggatgtcgttacagggcttttacattgcatagatgaaaccagccattcataaagccaaaacgttccatttttaactgggatccattcagaacccagctgaatcacatcagggatttacagtactggtgtcaa

SEQ ID NO: 424661 - DNA, 582 bp, Homo sapiens
actttaacttgtaaatataacaatttataatataacttaagtattgtatttattcagaatccaatgcagagtcgctaataccccattacttagcccttttaaattgtggtaaaatacatataactttaaattcccattttaatcatatttaaagtatccaattcagtggcattaagttcattgataatgttgtgcaacaccactactatccatctccagaactttaaaaaaataattccaaacggaaatgctgtatccatcaaatcataactcccctgtcctcccaactcaaccctcggtaacacatacttttctttctatctttatgaatttgcctattcaggtaaatggaatcgtacagcatttggccttttgtctggcttattttatttagcataacrttttcaaggttcattcatgttgtaacatatatcaggattttatttctttttaaggctgaatgacgttccaatgtacgtttataccatattctgcttttcctttcatctgctgacagccatttgggttgttttcacctctagtctcttgtgaataatgatgctagcaccattagtgtacaag

SEQ ID NO: 424662 - DNA, 581 bp, Homo sapiens
ctcaccttgtcctcctgcaacccacttaattccaatccaccacaaggtaaacatcgtacagtgatgatacacatgaaggaaagaaacttggttgtttttctttctcagaataaaaaacactgtgtccaaatactcaactcctttagatacaaagtaccaccacagagcagcagctatctgtaaaaagggaaagcgtgttatawacaccaaaatgacactattgtatgggtttatactcattgtaagtaagtccaaaataaacatttgtatattgcacaaaatgtacaaggcatggaatcattaatggctaagtaggtttgaaaaacctaagcatctctccatggggaaaaatagaaaagaaagagtccaaagctctatctatacagtgccaataagttagagaacattttctgtctattccataggtagatgttacatagtgtcaaactgctgaatacagagctggaagcacattcagactgctgtgcttttcaacttggtagaggaactaagatgtttactttgtaaaatgattttagttgttcatgcttagcctacattatactacctcagaaaaactt

SEQ ID NO: 424663 - DNA, 567 bp, Homo sapiens
taaaaaatggctgtgtcaatctagcctttaggatttcctttgaaaatgttgtggagaatttgctagtgcccagaaaagtatataatgattagtaacaacagctatatggcagttaattcattttaattccagcccaaaatacaacattatgtaataggatttacttgaaattggcatattttgatcagttaccaaaccagaaactactgaataagaattataaataaatagctgctactgtttactgagtgcttaatacgtgccaaacactatgcaaaaattatcttactttactccrataataacctgagatggtaggtatttaagtggggaaaacgaggctaagaaaagttaaataactttcaatgccagaacagctaataagggttactttagaatccagttggtcttattcaaaattccactttaaacaactttcctatacctcatgtttaatatttttgttattcaaaagtgaaaaatgtcaaaaatgtacttttagagtagctaacagttatgtctgggtaaaatattacaatgatggttttacacattctcatttttaaa

SEQ ID NO: 424664 - DNA, 567 bp, Homo sapiens
taaaaaatggctgtgtcaatctagcctttaggatttcctttgaaaatgttgtggagaatttgctagtgcccagaaaagtatataatgattagtaacaacagctatatggcagttaattcattttaattccagcccaaaatacaacattatgtaataggatttacttgaaattggcatattttgatcagttaccaaaccagaaactactgaataagaattataaataaatagctgctactgtttactgagtgcttaatacgtgccaaacactatgcaaaaattatcttactttactccgataataacctgagatggtaggtatttaagtggggaaaacgaggctaagaaaagttaaataactttcaatgccagaacagctaataagggttactttagaatccagttggtcttattcaaaattccaytttaaacaactttcctatacctcatgtttaatatttttgttattcaaaagtgaaaaatgtcaaaaatgtacttttagagtagctaacagttatgtctgggtaaaatattacaatgatggttttacacattctcatttttaaa

SEQ ID NO: 424665 - DNA, 586 bp, Homo sapiens
tgttatcacataaccaatggcaaatgttttcccatggcagtttacaattgcccagaacatatttcactggttgaagaaattaacacattatttttatttggaaaaaattttaaatgactcataattttttggtaacaattttgcaccattaccaagtgttcagtgtgtcacatccagtgtagaatccatattagtggaataatatatggtgtttattttaccacttcattttgcacatactcactcattatttcaattatttttttgtaaagtgttttgggaagtaagtcacatttgttttttcactttcacatttttccaagtctttgtacaacaatggattaacttccataattagatgattcctgtaacatttatgccgtttaaaaacctcactgttcatcatgactctgaagagtaaaaatttttcacttaaaacttgacaactgtaaatatcttttagcactccagagataatattgaattgcctttgttctttaagacactgatccagtatgwttgtcttgcatatacagttggtccttcttatctatgagttctctatcagtggattcaaccaactaca

SEQ ID NO: 424666 - DNA, 587 bp, Homo sapiens
ttgtcaaatatatttgcaaatctaaagttttctggattggaatgacaatttctcaagtctcaatcctaaattatgtgtaacagattctagtagctatataaaaaaaagaaatccagtcaagtctcttcatttagggagtggataaatacccattcatttacagtgatgatctaacaaagttcggattagttcgagcttcacctaaaaatttgattactatttctatattgtggaatcctggagtttttagggagaacagatctctacccatacttccattcacacacgcaaaactgcagcataatacttaatacaaggagaaattgttaaaacagcttcaggtatttccctggtatttcttctaccgtggaggtcaacttaagtccctattcactagggggygccagtcacgtataagaaaatcatagatgagataaccttcagctgggaatggcggtcacacggatatcaccgtgtccacactccacctgtaagagtagaatgtttatttacatttataagctgtctaaacatataccaagaaccagaacataaaacttacccaatctggaaccctattacctggc

SEQ ID NO: 424667 - DNA, 585 bp, Homo sapiens
ccacctagaataacagccatctaaccaaaatcttggtagcatcataacagagtaaaagcaaatacaagcaacaacagcatctgcaaactttgagaacagagttctttcatgtggatcaaatgcaaataggatacagttacctacaaaacctaaaggagaggacattttatcataaatttttttgtataaaatagcaatatttttttctttttagaaacagggtctcactctatcagctaggctggattgcagtggtgtaatcataggttagtgcaacatcgaattcctgggctcgagctatcctcctgcctcatcctcctgcctcagcctcctaaatagctgatagagaaggaggactggctgtgttgcccmggctggtctcaaattcctgcctgcaagcaatcctcctgccttggccttcaaaaccactgggattacaggagtgagccaccacacccagtacaaaatatttttaaatgtcctacagtccatacaaggttagcaacataaatcaagctatccatcttttttttcctagtccacctttccatgttggtaatattgtcagcaacctctgctttcaaa

SEQ ID NO: 424668 - DNA, 588 bp, Homo sapiens
tcccactgtctcgcccaagctggagtgcagtggcccagtctcggctcactgcaacctctgcctctcgggttcaagggattctcatgccccagcctcccgagtaggtgggattacgggtgtgtgccatcacacccagctaatttttgtatttttattagagacagggtttcaccatgttaggtaggctagtctcaaactcctggtgtcatgtgatctgcctgccttggcctcccaaagtgctgggagtacaggtgtgagccactgtacctggtcaaagggttttaagtttacaaattttgacacatcrtgcccacttaacctccagaaatgtaccaattcacaattccaccaaaatttatgaaaaggtgctcatttccccaccccattctctttactgaatgtatgctttgtaatcattaccagtctgagaggtaaagattgatatttcattgttgcttgacagattatcatgtttattgcaattttagccttctttcaggaattgcctgtttgaattctttagacattttccattagttgtgtctactttttcttattgatttataagacatcttcttataataaagt

SEQ ID NO: 424669 - DNA, 561 bp, Homo sapiens
ttttcttattgatttataagacatcttcttataataaagttattaacagtttgtctgcatatgttgcaaatatattttcccagtttgctatttgtctcttactaaatttattataatgattttcaactaggcatattgaatgctgggaataagttaggttcacccgccaccacctccaccagaatcatatatcagaatgccttctcagctttgcaacccctgatgcatatttctaaggtacatatgctactcctttcctaagaatgacaactacaaattacttacattggatattcattgttttggtgtgacccaatatgtacacccaatctgtattctttaccggtcaaagccattagcccagtctctcttcacatagccatgtttcaaggccatatcccacacttttagtcatacattcaagcatatagtgataagagggccaaaccatggtggttctgcccrtttttcctggcttggctataccaagaaaagttttgtcactcttaattgagtattgtctgagttgtgatttccttcacttactactctaacatatct

SEQ ID NO: 424670 - DNA, 589 bp, Homo sapiens
gcaaaaacaaaaaaaacaaaacaaaacctggagagaaaaattacatctttcacaaaaattaactcaaattgcattatggacctaaatgtaggatgcaaawcataaaacttctgtatgaaaatatcagcaaaaatctaggtgaccttcattatagtgatgagtgtttagatacaacatcaaaagcacaatctatgaaagaaaaaaattgatgtcattaaaattaaaaacttctgctctgtgaaagactatttatttgcagaattaaaagacaaactacagaactgaagaaaatatttgcaaacacatatctgataaagggcttgtatccaaaatatacaaagaactcttaaaactcaacaataacaacaacagtaaaacaaacaactcgattgaaaaaataatcaaaagatctggacacctcatcaaagaagatctgcagatgggaaataaggatatgagatgctcaacatcatttgtcattaagaactgcaaattaaaataacaatgacataccactacacatttatgagaatggctaaatttcaaaagaaaacctaacaattcagaaatcatgctcctatttatttac

SEQ ID NO: 424671 - DNA, 579 bp, Homo sapiens
tgtgtgaggtatatgagaactcttttatctttgcaatttctatttaaatccaaaactgttctaaaaatgaagattatttttaaaatcataaataataaattaaaagtgaaaaaatagttataaccttttgcagtaatttcaattctgggaatttatcttgaagataaataactactatacattttactgtaaagtaggtttaatatatatcttattataaagtaggtttattaatagcacctacagcatacacatgttgtaaggccttaaatgaggtcagccatataaagtagtatgagtactcaataaatattggttgctagtgtttttgttattattcaaagctgactccgattcaggcacaatcatcaaagaattgacartatagtaaagataagtaaaaagattagtataataaagtgtaataagtgatgataaatgtctctttacttactgtatgaccttggcaaatgaattaatctcactgcctctgcctccagaacccaatacatgtagcaataatgatggtattgacaatattaacctccacaacaaccttaatgacaacatgaaggcaga

SEQ ID NO: 424672 - DNA, 504 bp, Homo sapiens
tattcaaagctgactccgattcaggcacaatcatcaaagaattgacagtatagtaaagataagtaaaaagattagtataataaagtgtaataagtgatgataaatgtctctttacttactgtatgaccttggcaaatgaattaatctcactgcctctgcctccagaacccaatacatgtagcaataatgatggtattgacaatattaacctccacaacaacctyaatgacaacatgaaggcagagatctgatggggtgcactgaaaacagaagaatctcttcattttgaccggagatgtctgtggcttactagaaaaggtaatggctaaaaggtatgccataaataaatattaacaaattcatttgttcattcaacaaacattcactgagtatctatgtatgttgaatttgctgtgtacttcaggtgctatccttgccttgaagtttctcataatctagagggaaagacagatacagcaatacatacagtaatttcaacacttt

SEQ ID NO: 424673 - DNA, 504 bp, Homo sapiens
tattcaaagctgactccgattcaggcacaatcatcaaagaattgacagtatagtaaagataagtaaaaagattagtataataaagtgtaataagtgatgataaatgtctctttacttactgtatgaccttggcaaatgaattaatctcactgcctctgcctccagaacccaatacatgtagcaataatgatggtattgacaatattaacctccacaacaaccttaatgacaacatgaaggcagagatctgatggggtgcaytgaaaacagaagaatctcttcattttgaccggagatgtctgtggcttactagaaaaggtaatggctaaaaggtatgccataaataaatattaacaaattcatttgttcattcaacaaacattcactgagtatctatgtatgttgaatttgctgtgtacttcaggtgctatccttgccttgaagtttctcataatctagagggaaagacagatacagcaatacatacagtaatttcaacacttt

SEQ ID NO: 424674 - DNA, 577 bp, Homo sapiens
tgccaaactgcttccagaaatgtgcagtgagtatttcctctagaaggcctgagtgttccagcctcaccacacaaggttgccagtccctgctttggcctccagagggtctgtgaattaatgagggggaggccactaggtttataaaacttcatgggagagaattttaaagaaacaaagaactaaaataataatattaggagtatcagagactaatttcaaaagtttcaagtattttctgaacttctgtcaacccaattcttctatgtccacgtagatgcaatctgacttccgttcattttagtttctggtttaccagtttttcttggaattttgaaaattccttcycctgtttttcccctcaaacttttataaaagccaagattattttgatcagagagactatattcttttaacttaattataagagcaatacatgtttacattcatgtctgtctgctacattgcatatccctaactctacttagaaagtgcataaaacttagtagatgctcaataaatatttgtgaaatgaacatatgaaggaatgtaagcaacttggaaatacaaaaaagaaaaa

SEQ ID NO: 424675 - DNA, 611 bp, Homo sapiens
tgcagaatacacattcttctccccagctcatggataattctcaatgataggccatatattaggttggaaaacaaatgttaaaacattcaaaaaatttgaaataatatcaagcgttttctctgaccacatggaataaaactagaaataactaacaagaggaattttggaaactatacaaacacgtggaaattaaacaacatgctcctgagtgaccagtgagtcaatgaagaaattaaaaaggaaattgaaaaaaaatcttgaaacaaatgataatggaaacacaacataccaaaacctatgggatatagtgaaaggagtactataagaagagacaaagagggaaatttacagctataactgcctatatcaaaaaagagaaaaaaatcaaataaattccaaacaatgcatcttaaagaactagaaaagcaagaacaggttgaactccaaatcagtagaataaaatacaaacgatcagtgaaacaaaaagtgtgttatttttaaaaagataaagttgacaaycttaaaccagaccaatgaagaaataaagggaaaagacccaaataaataaaatcagagatgaaaaaggagacattacaactgataccagagaa

SEQ ID NO: 424676 - DNA, 611 bp, Homo sapiens
tgcagaatacacattcttctccccagctcatggataattctcaatgataggccatatattaggttggaaaacaaatgttaaaacattcaaaaaatttgaaataatatcaagcgttttctctgaccacatggaataaaactagaaataactaacaagaggaattttggaaactatacaaacacgtggaaattaaacaacatgctcctgagtgaccagtgagtcaatgaagaaattaaaaaggaaattgaaaaaaaatcttgaaacaaatgataatggaaacacaacataccaaaacctatgggatatagtgaaaggagtactataagaagagacaaagagggaaatttacagctataactgcctatatcaaaaaagagaaaaaaatcaaataaattccaaacaatgcatcttaaagaactagaaaagcaagaacaggttgaactccaaatcagtagaataaaatacaaacgatcagtgaaacaaaaagtgtgttatttttaaaaagataaagttgacaaccttaaaccagaccaatgaagaaataaagggawaagacccaaataaataaaatcagagatgaaaaaggagacattacaactgataccagagaa

SEQ ID NO: 424677 - DNA, 634 bp, Homo sapiens
ctatttttgcaatttttcagtctgtaaggaccagagaagaagggtatatacttgtacagtcaccgactgaaatgcagcacccgtggatcccatgttatattataccaaaaaacctatcccagctgcacacaacagacatgaccagggtagattcaaaggaaaagaaacaaggcttgaaactcaacactgcagcacttagcatggtagggcacagaaatctctaacagagggtgcatctgtctataagacatagacccctgcaggatagccagtactgagatcagtttcccaagcaggacttcccctaaaccagaagaaacaatctcaaacacccattatcgtaagtccagcagatactacctctttaataaccatgtttaatgcaaaggactttctacagaatctgagatytggcccatcagatgaagagcagaaactaggctgccaatgaaatgaaaataaaatgaaactataattcagagaagataagcacagatgcagccagagggcactacagttagttgtcaccatttcttacagagtagtagaccagtaccttaagtatataagtgtatgactgaggctgggaagtggtgggaccaggttttgcagtttttgtacagttttgaattgt

SEQ ID NO: 424678 - DNA, 628 bp, Homo sapiens
agactctgggcactatactgacttctgttcatgagtttgcttctagcaggaccactcatcccacagatgtagccctagatcattttcaactgggagactgtgtcctcctgaagactctgaaaaaaaaaggacttgaacgctgacctcctgccaagttgacaaggccattcaaagtgctgtcaaatattcactcatcagttaagcttgctggaagaaagccataggtgcatcacactcaggtcaaggcagcacaaccagaagaaaccaggaaaacaaggggcttgggagcccttggaggatccaaagctactcttacacaaaaacrgtaagtgaaataaaaatgtatgtcctaccacatttatttaagaatgcattccaatatcaaatggcaaatttcaacaatgcaaaaaccgcaattactcttgcaccaacctgaagcctgtttctccaatcacctgtagggtctgattgataacttcgtacccagaggtccatgcttctttcttactcagcactgcattacacattatgtgcaaagaaataataagaacccacaagcttacaagtgtaatttctattgaccaaatgacctccctaggttaagccacctgttgcacttacattaatt

SEQ ID NO: 424679 - DNA, 572 bp, Homo sapiens
accacatttatttaagaatgcattccaatatcaaatggcaaatttcaacaatgcaaaaaccgcaattactcttgcaccaacctgaagcctgtttctccaatcacctgtagggtctgattgataacttcgtacccagaggtccatgcttctttcttactcagcactgcattacacattatgtgcraagaaataataagaacccacaagcttacaagtgtaatttctattgaccaaatgacctccctaggttaagccacctgttgcacttacattaattcctcctctaaagtagagacccatattagtaaaattatacaacaggccacctgacttcaacgaactttagaacaccaaagcagaattaatctgggcactttcagggactggtttatagacctgttctctgggattcctagtggaattcagttaatcctggaaagcattcttaaattgggccttaatattcttcttttgtcatggcggcctacgtactagtaaaacttactatgtattgcataaccaaaggttgcatgagtttgactatcaaagcaagaaaggagatgcccatgatc

SEQ ID NO: 424680 - DNA, 578 bp, Homo sapiens
accacatttatttaagaatgcattccaatatcaaatggcaaatttcaacaatgcaaaaaccgcaattactcttgcaccaacctgaagcctgtttctccaatcacctgtagggtctgattgataacttcgtacccagaggtccatgcttctttcttactcagcactgcattacacattatgtgcaaagaaataataagaacccacaagcttacaagtgtaatttctattgaccaaatgacctccctaggttaagccacctgttgcacttacattaattcctcctctaaagtagagacccatattartaaaattatacaacaggccacctgacttcaacgaactttagaacaccaaagcagaattaatctgggcactttcagggactggtttatagacctgttctctgggattcctagtggaattcagttaatcctggaaagcattcttaaattgggccttaatattcttcttttgtcatggcggcctacgtactagtaaaacttactatgtattgcataaccaaaggttgcatgagtttgactatcaaagcaagaaaggagatgcccatgatcattgtt

SEQ ID NO: 424681 - DNA, 537 bp, Homo sapiens
ggcggcctacgtactagtaaaacttactatgtattgcataaccaaaggttgcatgagtttgactatcaaagcaagaaaggagatgcccatgatcattgttcctaaaagaaacactaaggactatttccttaggcgggtcaaactattttattctacagtcgcccctcatcarccttgtccagcaagaaataggcagatgagagaaaaaaatccctttgtctgcaatcccacaagattgtggaatgacctttgacagtgcagaaattgtagtagtgaaaggaagtctagcatgactagttccattttgctcctaaccccaccactgcccctagcaccctaaacaatgatatcatttaggtcaactgcttttgattatttctgcacataggccaaactaattatgggaggaatttacagtttacctttaaagcaaggataatagtcccttcccaaaacaaacccctgaggagataaggatggtgtacacacaaggaaccatgttatgttaaagatttataggagcattgtgacctgacc

SEQ ID NO: 424682 - DNA, 547 bp, Homo sapiens
ttcacacgttctccagctccagacacatgacctgtattttagaacagagtccagtgccagcaggagactggagaacgaatcagtgaccagtgtgcactgcagtctgcagccatattgcagtctccatgaaacccttggttttggtctttcctcattyagggggctgggctttcatgtgcatttgaaagccaacatcctttagttcttggaaatgtcacttattacttctttagcaattacctcctttccattttctctcttccagaaattcttaattaaatctatttcctagtttgatcctttaacttttttattatttctttttctgttttcctgttagaaatctgtaggggcttttgtttgttttgcttaccagtctatttccttaaatttatctcctagcaattctactgatttcagctttcaaatgttaacttctaagatcctaccagttcttgttttatggatatagtgtattctcatctccctctgaggaatgtggttataaagtgtttggggctgttacttttcttgcctgtatagttgc

SEQ ID NO: 424683 - DNA, 547 bp, Homo sapiens
ttcacacgttctccagctccagacacatgacctgtattttagaacagagtccagtgccagcaggagactggagaacgaatcagtgaccagtgtgcactgcagtctgcagccatattgcagtctccatgaaacccttggttttggtctttcctcatttagggggctgggctttcatgtgcatttgaaagccaacatcctttagttcttggaaatgtcacttattacttctttagcaattacctcctttccattttctctcttccagaaattcttaattaaatctatttcctagtttgatcctttaacttttttattatttctttttctgttttcctgttagaaatctgtaggggcttttgtttgttttgcttaccagtctatttccttaaatttatctcctagcaattctactgatttcagctttcaaatgttaacttctaagatcctaccagttcttgttttatggatatagtgtattctcatctccctctgaggaatgtggtyataaagtgtttggggctgttacttttcttgcctgtatagttgc

SEQ ID NO: 424684 - DNA, 572 bp, Homo sapiens
atcaaggactataaatgcaccagcacctgaactccttccttttcttacctgacaacatcaaatgtttagaagcaaaatgacattatgtgaacattgagagtctgatgccaccataagcttacccacctttgcagtattccaaataaaataaatttctttcaggtaagagtactactatatcccatcttgtttaagtaagagataattgggattattgcctgcgtttgggaaattgatacaagaaaaagccaacctactttgtctggagggtagaaagttattcaaatgctaagataggaactaatccctcaggagctaggctatgagaacttagcctaccttttccttctctcctayctaactcctaaatatccctcaagatgctgcttaaaaataattttctttttcatgtgtttattataatgcttaccactggcacactggaattatttactgagacagttgtcttacccactacattaggaaattttccaggggaacagttttgttccaaacacttagcacaaagtagaatgcacagtagtaagttcttaacatgtttttgttgaata

SEQ ID NO: 424685 - DNA, 546 bp, Homo sapiens
tatcttcattgaagcacatcaaaataaaaagtgcatttatggtccaaaacaaagacacaggtaaaaagcaaattcaaaccaggaaaaatatctgcaactcttatcatataaatatgatttatttccttaatatgtaaaccgttataaattgagatgaaaaagatcaatcagccaaaagataaatgagcgaggacatgaacagacagttcacataaaaatgaccyttagtgagatgacacacaaccttacccatacttttaaaaatgcaaagaaatgataagtgagaagccattctcacttatcgtgttggcaaaaatccaaaaattctgtaatatactctgttagtgagactgtgggaaagcaggcactttcaacatttctgtaggaacccaagtggtacagctctgagaggggaccatgtagcagtttccatacagtattacagatgctttcaccctttaactcaattaacctataacagggagtttatcctatggaaatctctgcacagttacaaaatgacatgcacaagtgatgtgttatggt

SEQ ID NO: 424686 - DNA, 595 bp, Homo sapiens
tataaggcacattcagggaacaaattagacatttgttgagaagctgcaagacaggttaattaactttcttttatagaacaaaaggctaccatttaatgtgaaatcctcaggaggctactctgaattgagtgattcaggcagtaagatttattccgtttgaattccrttcgcgtttattgattccttcatctaagaaataaacaatcaagaaaaaaacatgaagcagctgtagagacagcaacccgggtcttccagactttactctaaatcacaagaaaggatgtggtctaaattgcttccattcatatatgcttctaggctgttccttatgtgaaaaattacttatcttccaacttcttctttcattaagctaagacggaagcctagtagctagcaataaagaacattgcactaaacaattggaaaaagatctttcctaggagactaaatgaaaatatgttggaaaatatgttggaaaaattttagcatcagcatgagttgagaatgatgttctttttatctatgagatgttttttggggggctatgcagacctggagtgctagcacttgctggaaatcatagctgtagggaaga

SEQ ID NO: 424687 - DNA, 616 bp, Homo sapiens
tgatgacagacagaagatagattattgatagatgaataatgactattgtcagccatttacaccttaaacatgactagagtttttatgtacacattttaataagtctgtgtatccactgttggtatcttgaatggcttcttcaccttcctttgctaagggatagatgttagtcttagtatttgaaacatttcttctctatcgaaccaggtggactaattttatttcctccttttttggattgctgaaagtgctgaaaggaaaaataacagccccaattatttcaatcaggtgagaggaaatttatcatttccaactaaaatgacattgattaaaaacaaacatcatatatgtcagcaaagaaagggtcccaaggacttcgccaaacattctttcattgctaatgttatacagttcacaaaagtttggcygccttctgcaaggaaaattattttgttcatttattcactcacttattcaacaaattgtttattgaatattgaggcagatttatcacaaagcgaatgaagcttaatttttattattttattatatccttttcaaaggcctggaggaaccctagagatgtgtttacatgcttatatattttggtaaaact

SEQ ID NO: 424688 - DNA, 592 bp, Homo sapiens
atgtccacacaataaaatgttactcaacaataaaaaggaacaagctagtgttacacaacaatatagataactcaaaaacattatactgtgcaaaagaaagtctatacaaatgagtacaaaatatattattttatttatgtgaaactctagaaaagacaaacctaatgtacattgacaaagcaaatcagcggtcccttggagccaactgcatacttaaaatggatgcattcagttatgtaaatcaggggtccccagcccccaggctgtggacctgtaccggtttgtggcctgttaggaaccaggctgtacagcaggagttgagcagtgagtgagaaagcatcaccacttgagstctacctcctgtcagatcaatggtgacattagattctcagaggagtaggaaccctattgtgaactgcatatgtgagggatctaggttgcacttttcttatgagaatctaactaatgcctgaagatctaaggtgaaacagtttcatcacaaaaacatcctcccccacccaccacagaaaaattatcttccataaaactagtccctagtaccaaaatgtttagggactgctgatgtaaatca

SEQ ID NO: 424689 - DNA, 567 bp, Homo sapiens
aattgaaaaaataaaacaacccacggcgaaggcaatgaagatgagatttcattgtctttacctagaactcagtaagtgggaaaaaagagataaaaatgatgaaaatggggacagaaaatgtagggaacaaatcctagaaatccaatctttatatttagacttctaggaggrgatattcttttaaacaaaatttatatcctgcattgagttgtataacctggcaaaggatagaatctcagatgatttatctcccgactgcacttaggtttgtttgatctttccttcctcctctttcactcattgtggcatccaaagattactaccatcaacaacattgtatgaattctggcttaaatatttgttccacaaaatgaaatttttcttgctttagattcccaagctctggggaagagaaaaaggttgtcattacattggacatcctctattcatttacacaggactatagcaatcatgtaagcctactttttcagaaagtatatactactgaaatttgtgtgtgtgtgtgtgtgtttaaattcctatcttaggactgaaaaagatgtgcac

SEQ ID NO: 424690 - DNA, 587 bp, Homo sapiens
ggatcacatgggaatctgagaaatgtaatttttagttccccaaactctgtaatactgaaggaggggagaatgagaacacatcaaagggaaaggaatggattcgtagtgcccataaacagctactacactaacctaaagatgacgcytgatttctgaagtagttaatatttggggtagacttcaggatgtaagctccaaatctcaacttttaacgataaattagaaatttgttacccaaattcatctggctgctctttttcctcatgagttcccatattacttttatttctggaggaaagattaggtaccactttacaagggctggcagtaataattcaagcataacaaaaacaaatgttgaataaatatagctttgaaaagcagcttttcttttgcgattatgtctttatgacatttttactgagatctgaaatcacaatatattggaaacctaactgtatcatgtccaactgacaaaccctaactatataatatgcttataaaaattgtaaatgtatttgatccccagatttattaattagaacacaagccacactctcaggtgaggtgtgactgttgctaacata

SEQ ID NO: 424691 - DNA, 522 bp, Homo sapiens
tgagcttgttgctttagttttatatgtgaagactggaaaaattctgttttgttttgaaaaatattttgagctaaaaatgttgtattccacatttgttaggaatggaagtctttaaaatatgaaatatttccaattgaagaaaaatagtgaamatgaactttatctgaataagattaatgaaaattatatgttgaaaaagtaaaatagttatgtgtactaacagtgactactaacccaacaatataaaattaagtaaaaatattattaccatgttaaatacaaattaaaattaattataaaaaagttaagatctatgattaaagtattaaaataaaatgagactgtattcacaaatttaaaagcaaattggtgaatgacatattttttgaaataataaattctttggcatattttatattttttattataaatgaaaattatttatttgaaatatttaaaggaacaaaatatttgcagctctattttattgagaaagtaattacaaaacaaaaacaaggagtt

SEQ ID NO: 424692 - DNA, 586 bp, Homo sapiens
gaagtataaaatgtctggatagacttgagcttgttgctttagttttatatgtgaagactggaaaaattctgttttgttttgaaaaatattttgagctaaaaatgttgtattccacatttgttaggaatggaagtctttaaaatatgaaatatttccaattgaagaaaaatagtgaacatgaactttatctgaataagattaatgaaaattayatgttgaaaaagtaaaatagttatgtgtactaacagtgactactaacccaacaatataaaattaagtaaaaatattattaccatgttaaatacaaattaaaattaattataaaaaagttaagatctatgattaaagtattaaaataaaatgagactgtattcacaaatttaaaagcaaattggtgaatgacatattttttgaaataataaattctttggcatattttatattttttattataaatgaaaattatttatttgaaatatttaaaggaacaaaatatttgcagctctattttattgagaaagtaattacaaaacaaaaacaaggagtttttgtaattacaaaagaatatattaatattatttagaag

SEQ ID NO: 424693 - DNA, 586 bp, Homo sapiens
gaagtataaaatgtctggatagacttgagcttgttgctttagttttatatgtgaagactggaaaaattctgttttgttttgaaaaatattttgagctaaaaatgttgtattccacatttgttaggaatggaagtctttaaaatatgaaatatttccaattgaagaaaaatagtgaacatgaactttatctgaataagattaatgaaaattatatgttgaaaaagtaaaatagttatgtgtactaacagtgactactaacccaacaatataaaattaagtaaaaatattattaccatgttaaatacaaattaaaattaattataaaaaagttaagatctatgattaaagtattaaaataaaatgagactgtattcacaaatytaaaagcaaattggtgaatgacatattttttgaaataataaattctttggcatattttatattttttattataaatgaaaattatttatttgaaatatttaaaggaacaaaatatttgcagctctattttattgagaaagtaattacaaaacaaaaacaaggagtttttgtaattacaaaagaatatattaatattatttagaag

SEQ ID NO: 424694 - DNA, 586 bp, Homo sapiens
gaagtataaaatgtctggatagacttgagcttgttgctttagttttatatgtgaagactggaaaaattctgttttgttttgaaaaatattttgagctaaaaatgttgtattccacatttgttaggaatggaagtctttaaaatatgaaatatttccaattgaagaaaaatagtgaacatgaactttatctgaataagattaatgaaaattatatgttgaaaaagtaaaatagttatgtgtactaacagtgactactaacccaacaatataaaattaagtaaaaatattattaccatgttaaatacaaattaaaattaattataaaaaagttaagatctatgattaaagtattaaaataaaatgagactgtattcacaaatttaaaagcaaattggtgaatgacatattttttgaaataataaattctttggcatattttatattttttattataaatgaaaattatttatttgaaatatttaaaggaacaaaatatttgcagctctattttattgagaaagtaattacaaaacaaaaacaaggagyttttgtaattacaaaagaatatattaatattatttagaag

SEQ ID NO: 424695 - DNA, 563 bp, Homo sapiens
attggtaacaatgtaaatttcctcttaaagtcaggtgagaactaattctgaagtcagaggaggaaagtagcctacaacaaagagtaagatcatcttgacaggatcagggagaaagataatagttgcaaatggagacaggtatattgatttagtgccaggtagttgaaagactatgagtataaagacttatattktctctgtgttgcagtagcaaagtcatctgcagagagagagaagtgagaagggagaagagagtgtcagaaattagaggattgtagagattgaaaaagttatgtcaggcaaaattgaaaacccggtttccaatggtgatcattgtcttaaaatattatcagtttgttttcttgcatgacattcttcagcagcagtcatggactgagaaatatgcagaaatcagatagttgagttcatctagagaagaggttgcaatgtgcttctaaaaaggacaaaaccaaaagcaaccgagagagagagagagagagaaagacagagagaaaaatgaagatgtgaaaggggataggtcaaaaatcagtaattttttttaa

SEQ ID NO: 424696 - DNA, 563 bp, Homo sapiens
attggtaacaatgtaaatttcctcttaaagtcaggtgagaactaattctgaagtcagaggaggaaagtagcctacaacaaagagtaagatcatcttgacaggatcagggagaaagataatagttgcaaatggagacaggtatattgatttagtgccaggtagttgaaagactatgagtataaagacttatattgtctctgtgttgcagtagcaaagtcatctgcagagagagagaagtgagaagggagaagagagtgtcagaaattagaggattgtagagattgaaaaagttatgtcaggcamaattgaaaacccggtttccaatggtgatcattgtcttaaaatattatcagtttgttttcttgcatgacattcttcagcagcagtcatggactgagaaatatgcagaaatcagatagttgagttcatctagagaagaggttgcaatgtgcttctaaaaaggacaaaaccaaaagcaaccgagagagagagagagagagaaagacagagagaaaaatgaagatgtgaaaggggataggtcaaaaatcagtaattttttttaa

SEQ ID NO: 424697 - DNA, 563 bp, Homo sapiens
attggtaacaatgtaaatttcctcttaaagtcaggtgagaactaattctgaagtcagaggaggaaagtagcctacaacaaagagtaagatcatcttgacaggatcagggagaaagataatagttgcaaatggagacaggtatattgatttagtgccaggtagttgaaagactatgagtataaagacttatattgtctctgtgttgcagtagcaaagtcatctgcagagagagagaagtgagaagggagaagagagtgtcagaaattagaggattgtagagattgaaaaagttatgtcaggcaaaattgaaaacccggtttccaatggtgatcattgtcttaaaatattatcagtttgttttcttgcatgrcattcttcagcagcagtcatggactgagaaatatgcagaaatcagatagttgagttcatctagagaagaggttgcaatgtgcttctaaaaaggacaaaaccaaaagcaaccgagagagagagagagagagaaagacagagagaaaaatgaagatgtgaaaggggataggtcaaaaatcagtaattttttttaa

SEQ ID NO: 424698 - DNA, 607 bp, Homo sapiens
gttaatccttccacagttttgaaaaagtctagcaaccctcaccttgaagagagtgaatagcgkggctaatccatctaagaacaatgcacgaaaacgaaaaacggagaatcctgcccggcagttaatttgttactcatacttgttgaacttaagatttggagctaaataagtgcagatgagagcaaagacccatcttttaaatatttaagcttttaggcaaacctgggcaggcaatatcacatttatcagtgcgaattctccaatgctctctaaaactttatttcaatgatctcacctcctgtaaggaattaattcccccttagcttgaccacaggatcaatatcttatcttaagaagtgtttaggttttctaaaaaaagaccagacactgaagacttacataaacatcaaagcattctttttttaattcctcgatatggagaaattcataggccgaaaattaggtaaatagagaggtaattaccaatgcctgtttccttgacaactcccctcccccacccctcctgtgatagggaaaaaccaaaatgaaagtgaggaggggtagccacaagccatgctggattttagcaaaccaaagcaagaagcag

SEQ ID NO: 424699 - DNA, 607 bp, Homo sapiens
gttaatccttccacagttttgaaaaagtctagcaaccctcaccttgaagagagtgaatagcgtggctaatccatctaagaacaatgcacgaaaacgaaaaacggagaatcctgcccggcagttaatttgttactcatacttgttgaacttaagatttggagctaaataagtgcagatgagagcaaagacccatcttttaaatatttaagcttttaggcaaacctgggcaggcaatatcacatttatcagtgcgaattctccaatgctctctaaaactttatttcaatgatctcacctcctgtaaggaattaattcccccttagcttgaccacaggatcaatatcktatcttaagaagtgtttaggttttctaaaaaaagaccagacactgaagacttacataaacatcaaagcattctttttttaattcctcgatatggagaaattcataggccgaaaattaggtaaatagagaggtaattaccaatgcctgtttccttgacaactcccctcccccacccctcctgtgatagggaaaaaccaaaatgaaagtgaggaggggtagccacaagccatgctggattttagcaaaccaaagcaagaagcag

SEQ ID NO: 424700 - DNA, 607 bp, Homo sapiens
gttaatccttccacagttttgaaaaagtctagcaaccctcaccttgaagagagtgaatagcgtggctaatccatctaagaacaatgcacgaaaacgaaaaacggagaatcctgcccggcagttaatttgttactcatacttgttgaacttaagatttggagctaaataagtgcagatgagagcaaagacccatcttttaaatatttaagcttttaggcaaacctgggcaggcaatatcacatttatcagtgcgaattctccaatgctctctaaaactttatttcaatgatctcacctcctgtaaggaattaattcccccttagcttgaccacaggatcaatatcttatcttaagaagtgtttaggttttctaaaaaaagaccagacactgaagacttacataaacatcaaagcattcyttttttaattcctcgatatggagaaattcataggccgaaaattaggtaaatagagaggtaattaccaatgcctgtttccttgacaactcccctcccccacccctcctgtgatagggaaaaaccaaaatgaaagtgaggaggggtagccacaagccatgctggattttagcaaaccaaagcaagaagcag

SEQ ID NO: 424701 - DNA, 616 bp, Homo sapiens
ggaacatgtatattcatcagagccatttataatagtaaagtctggaaaccatctgagtgtttgaagtagcaggttagctatggaaatgatgtaatcttcatatgatgaaacactctacaaaaaattaaaattctgtgtttgaaagacctagggaaattcatggtatcttaagtgtaaagggaactaagctttatataaattatggtcccgttttcgtgattctataaatatatattacagtgtgtgtagtgggttgaataagtgtcccccagtgtcccccacaaattcatgttcacccagaacctcacaatatgaatttgtttagaaacagagtctttgcagatgttaatcagctgagaygaagtcattctggattaggatgggctatagacccaatacctggtgtccttataaaaagaggagaggatgcagaaagacacacacatagaataaggccatgtgatggcggaggtagagatgggaatgatgtgtctatgaatcaaagattgctggcaaacaccagaaaccaggagagacgcatggaacagactctctgagagcctccagaaggacccaaccctgctgatgccttaattttagattcctggcctcgtga

SEQ ID NO: 424702 - DNA, 589 bp, Homo sapiens
gtgttttctagttttttttatatataggttttaaacatttctggttaagtttatgccctcacattttattttagtttgggtaatgacgttttacatgtgtgagttcctcaattatttcttttaaatgttctgattcaataggaacactctccttagtatccttaacagaaatgattcttgtttatagaattgctaaataagtaaagaaattttragttaaatcatggcaaggagttataattatactaagcttttttgttcctagagattttggctcactcatatggtaatctatatgaaaatttttctgtgatatctaataggagaaagatcctcaatgatagaatagtgtttcttcctagctgattcatacatctttctctgccaacattttgtttgttgaagtgttccccaacatatgactcattgcttactaaatccctattgagcagccaaagccctggtgactaattatgtcattaatttgggaaagtcagagacaataagactgtcagttgaaactttgtaggaggtaaaaaagtcactgctgtcagctgcaaagatccttaaaatggtctttaataaagtc

SEQ ID NO: 424703 - DNA, 589 bp, Homo sapiens
gtgttttctagttttttttatatataggttttaaacatttctggttaagtttatgccctcacattttattttagtttgggtaatgacgttttacatgtgtgagttcctcaattatttcttttaaatgttctgattcaataggaacactctccttagtatccttaacagaaatgattcttgtttatagaattgctaaataagtaaagaaattttgagttaaatcatggcaaggagttataattatactaagcttttttgttcctagagattttggctcactcatatggtaatctatatgaaaatttttctgtgatatctaatakgagaaagatcctcaatgatagaatagtgtttcttcctagctgattcatacatctttctctgccaacattttgtttgttgaagtgttccccaacatatgactcattgcttactaaatccctattgagcagccaaagccctggtgactaattatgtcattaatttgggaaagtcagagacaataagactgtcagttgaaactttgtaggaggtaaaaaagtcactgctgtcagctgcaaagatccttaaaatggtctttaataaagtc

SEQ ID NO: 424704 - DNA, 589 bp, Homo sapiens
gtgttttctagttttttttatatataggttttaaacatttctggttaagtttatgccctcacattttattttagtttgggtaatgacgttttacatgtgtgagttcctcaattatttcttttaaatgttctgattcaataggaacactctccttagtatccttaacagaaatgattcttgtttatagaattgctaaataagtaaagaaattttgagttaaatcatggcaaggagttataattatactaagcttttttgttcctagagattttggctcactcatatggtaatctatatgaaaatttttctgtgatatctaatagkagaaagatcctcaatgatagaatagtgtttcttcctagctgattcatacatctttctctgccaacattttgtttgttgaagtgttccccaacatatgactcattgcttactaaatccctattgagcagccaaagccctggtgactaattatgtcattaatttgggaaagtcagagacaataagactgtcagttgaaactttgtaggaggtaaaaaagtcactgctgtcagctgcaaagatccttaaaatggtctttaataaagtc

SEQ ID NO: 424705 - DNA, 589 bp, Homo sapiens
gtgttttctagttttttttatatataggttttaaacatttctggttaagtttatgccctcacattttattttagtttgggtaatgacgttttacatgtgtgagttcctcaattatttcttttaaatgttctgattcaataggaacactctccttagtatccttaacagaaatgattcttgtttatagaattgctaaataagtaaagaaattttgagttaaatcatggcaaggagttataattatactaagcttttttgttcctagagattttggctcactcatatggtaatctatatgaaaatttttctgtgatatctaataggagaaagatcctcartgatagaatagtgtttcttcctagctgattcatacatctttctctgccaacattttgtttgttgaagtgttccccaacatatgactcattgcttactaaatccctattgagcagccaaagccctggtgactaattatgtcattaatttgggaaagtcagagacaataagactgtcagttgaaactttgtaggaggtaaaaaagtcactgctgtcagctgcaaagatccttaaaatggtctttaataaagtc

SEQ ID NO: 424706 - DNA, 553 bp, Homo sapiens
acaaagagctacataaaaagtatttctaggacttctctcctaagattcaagtgtttactgaacctgaccgttggaggtctcacagaccgtgagatttcagcaggtgtaaatagagccacctttttcctgccacccccgagtctcacaggcaaacttggctctggctctgctcctgtgctctgcagcctggctcatgggactccaggcccacagccatccaagaagaacttaagacatatcccagaatcctctcttgctccttggtcacatcctttcattacataaatggagacttatggcctgcaaagcctaaattatctactatctggtttgtacaggaacatttgctggcccctggaatggactatgctttstagtcttcatgaacacacttgagttctgggattctctgatttcataatgttattactaaagaattttcagaccagcatcgttcccttgcatgaccatggcatggcgaactttgcaactgtcattcctggaatacttttttccctatcagtgtcaccatcagggacaggaataaacatgc

SEQ ID NO: 424707 - DNA, 584 bp, Homo sapiens
tcatacatctttctctgccaacattttgtttgttgaagtgttccccaacatatgactcattgcttactaaatccctattgagcagccaaagccctggtgactaattatgtcattaatttgggaaagtcagagacaataagactgtcagttgaaacttygtaggaggtaaaaaagtcactgctgtcagctgcaaagatccttaaaatggtctttaataaagtcaaattttgtgacaataattattgcatcaaagtcggggaaatacctcttagatcaaataagatacattgaaaagccaaaaattatttttatctcactttgtattctcataaggtctatccactgttacttggatatgagacttaacaaatggaaaagaagacaggggtactatcacactgtattttcctatggcctaatgaccacaatggttgatgaactgcagtaaagtttctataatattttccatctattcatttgctcaatcaccttgtaatggttacgttggttaattccagtctctcatgtgtaagcaacaaaatgagacttaatttgaaatatccagtatttttctattctcacag

SEQ ID NO: 424708 - DNA, 530 bp, Homo sapiens
agtattatactttactgaccaaaaggagaatccagatgagtattatgttttactgaccaaaaggagaatctagatcatcccatgattaatcttttcaatgctctggaaaggcaaataggtgrcaggcacaaggggaaagtgcttacatgaacacattttttactggaacttgtcctattgcaaagctcttctgccagattccattaggaaattgcaagcagattcatatatccaagtgctcctctctctcctactcataaatatatagacatcatatggcagggaggggggatgaagctgattctctcatggcatacccttgcacagcagacgtgtaggcaaatgcaaataccgaacatagtagttcatgcatatgtgcacatgaatatatatcatgctattactactcatcaatgagattccaagtagctaccagaggggagagaaaagtcacaatcaatatagcagtacttcagaatgtcaattaaagacagcgataagaagacaggcaggctgcccccagcaataca

SEQ ID NO: 424709 - DNA, 560 bp, Homo sapiens
tttttttgcaagtatctactgctttctggaccaaagagcctcaaccaacttaacatatactcagtgatcatctaaagagaataaacgtccaaatagcccttaatgtgaaaactgtttacacttagaagctaatgaaaataaaaggaaattaagttaaatgcagcataatagtcactggaaatatgggcttctcaaaatcattgattctatgcaccctcccaccagtggggaaaggagaaagagaactaacatatttgagtaccaacctgtgctaagaatgatgctagtcactcacatccatagctcatgccaacccaggaagcatgaggacctgcagcagcatcagtaacattctccaggcaacaagcatcagagtcttggagtctggtcctgctttattctccgtttctcatgaagaatttcmgtgaccgtctgcacaagggaagcaagttagacccaacctagtgaagtgatggctttgtttcatcaacttacctacatttccaagtcagaattggatagtcacttctttcttttatatttaaacacttcctttctct

SEQ ID NO: 424710 - DNA, 552 bp, Homo sapiens
ggaagtgtatttgggagggtccctgggaaccacacctatgggagagtagaggaaacaggattggacagaaggagaagctggactacattcaggcatcacaaaagcctcaactgacccccacgggatgctctgaagctgagatgaccctgcagagttgttccaatccaaattaagaggcagggtctttatgttctcatatgtcagtcatcgagtgcaggctacccccagaaaggggcccaatgcctctcttcagccaagggcaattaccaggagggattactccactrcaagctgtcagccatcactcccagcagctgagggaatgagcacctccatcctgaagcaggggctatgaggagctggggcacattcagcattgaccacaccaggtcagagctaccattgtggggttttgtgtatcagtgaaataagaaactccatgaagaaaatgtgctcttcacaataatattcttgtcattccactggcacactgtcagggacaggagcataccccaaactaactggtatttgagattcagtagaatctgtgac

SEQ ID NO: 424711 - DNA, 528 bp, Homo sapiens
ttaatctgaatgctgtgacttctaggaacttctacatttgtttcctctctggcaaactgttgaagaggtgtcccacttgctgttggtgttgtttcctctcaggaacatgtccctcaggcttcctgagactcaaatagcttgtttcctrtattaatcaggcttcttcagagaaacagaaccaataggatattgtgttcatctgttttgcgtaaaggaataaaggaatacttgaggctggataaagaaacgaggtttattttggctcatggttctgcaggcgtaaaagcatggcactggcatctgctcagcttctggtgaggcctcaggaagcttttagttatggcggaagggaagaggagctgacatgtcacatggtaagagagacagcaagagagaggaggaggtgcatggctggacaagctttaaatacccagctttcacttgaactaacagagcaagaactcgctcgttaccctgcagagggcaccaagccattcatgagaaattctcccccatgacccatatacc

SEQ ID NO: 424712 - DNA, 469 bp, Homo sapiens
catccttaaaagtctgtccctttagaaacattcttggtactaaaatttgtattagtcagggttctccagagaaacagaaccaatagtgtgtgtgtacctgcgtgtgtgtgtgtgtagatggagattttattatgggaattggttcacataattatggaggcagagaagtgccacagtcctggtctgaatctgaaggcctgagaactaggagcactgataactgagggcaggaggagatggrtgtcacagctcaaaaagagaaaaatttgccaccactcctctgccttttgttctattcagaggctcacaaaattggatgatgcccaccaacactggcgaggtcatctgctttactcagtttacaaattcaaatgctaatctcttcttcgtacgcccttacagaccctccccaaaataatgttttactggctctctggacatcctgtggctcagtcaagttgacacgtaa

SEQ ID NO: 424713 - DNA, 469 bp, Homo sapiens
catccttaaaagtctgtccctttagaaacattcttggtactaaaatttgtattagtcagggttctccagagaaacagaaccaatagtgtgtgtgtacctgcgtgtgtgtgtgtgtagatggagattttattatgggaattggttcacataattatggaggcagagaagtgccacagtcctggtctgaatctgaaggcctgagaactaggagcactgataactgagggcaggaggagatgggtgtcacagctcaaaaagagaaaaatttgccaccactcctctgccttttgttctattcagaggctcacaaaattggatgatgcccaccaacactggcgaggtcatctgctttactcagtttacaaattcaaatgctaatctcttcttcrtacgcccttacagaccctccccaaaataatgttttactggctctctggacatcctgtggctcagtcaagttgacacgtaa

SEQ ID NO: 424714 - DNA, 608 bp, Homo sapiens
gctagtacataggttgtgtatgctcgaggtgtgtctggaaaaaaagaaaacaggcaagtaacaggtacaaggtcttggccattgggaggggaaagaaggaaaaatctacattttgaaaaaatgagtcatgatcacaatggcattttgtcaccatggtacttcagtactccttgctagccatgacagcaggcacaatcccccataccttccacttctgacctatccttcttgacatcacaacctctcactctttcccaacactgcaagatatgaatgctatartcagatgaaagtgtaacctcaaggggtccttctgcattaaaagtccagccaccttccctcctctctgactccttcctggccttgaggttcaactgaaattccaccttctcagtgaaaccttttctggctactttaaccttcataatttgtttttcctcttaacatctacaatacttaagttcttgttagaatttaattatgcatattttgaattttacaacatttattggctacctttattacagaagtaatatatttatattacagaaaatttttttaaaaagcaaaagtaaaaccacttataggctctttatttcaagagaacc

SEQ ID NO: 424715 - DNA, 606 bp, Homo sapiens
ggtttgctgtgcaccggaggtgtgcctagaacaggcctggcacaacttagcataccaaaatgcgtgctgaacacacaaggatcrctcaccctggaccggcactctgagcagggcgtctgagcctttgattcctattttctgcttctagggatgcatgctgctgctttaacttccccactgccttcccctgtccacagagaggggcggacatgcgggaccaaagaccgtgtttctgactctggtctcaaaggtcatccctcgtttcttcctccagcgacgttcagcgagccctggctaggggccaggtactgtgctgggacaggcactggtgccacagcagcgaggaaaacagacaaaaatccctgcccttctggatatggatatttggggccctgtgaaagaccaagcaaagatgcactgatttttcttctatgccgaaagaaagcctgaatgtattcattcaaacccacgtttccatcttttgagtactttctacatgccaagccctgtgctggacccgagtctagcccctcttctctggagcagctcttgcctcttggcaacaccgcatgtatagaaaatggtagcatctagacagtgtcctgg

SEQ ID NO: 424716 - DNA, 606 bp, Homo sapiens
ggtttgctgtgcaccggaggtgtgcctagaacaggcctggcacaacttagcataccaaaatgcgtgctgaacacacaaggatcgctcaccctggaccggcactctgagcagggcgtctgagcctttgattcctattttctgcttctagggatgcrtgctgctgctttaacttccccactgccttcccctgtccacagagaggggcggacatgcgggaccaaagaccgtgtttctgactctggtctcaaaggtcatccctcgtttcttcctccagcgacgttcagcgagccctggctaggggccaggtactgtgctgggacaggcactggtgccacagcagcgaggaaaacagacaaaaatccctgcccttctggatatggatatttggggccctgtgaaagaccaagcaaagatgcactgatttttcttctatgccgaaagaaagcctgaatgtattcattcaaacccacgtttccatcttttgagtactttctacatgccaagccctgtgctggacccgagtctagcccctcttctctggagcagctcttgcctcttggcaacaccgcatgtatagaaaatggtagcatctagacagtgtcctgg

SEQ ID NO: 424717 - DNA, 487 bp, Homo sapiens
tcataaacatcgtgattgtgtttgttatttcttgcaaagcaagattctttcctacccatcctgtattttagggaagggaaggaggcagagagggtgggaggaaacaacaaaccaagctcataacatttttttggctgagtttgacacagtttgaggttaggctaatttagagttttggtcgggggtcctcttcaactcccgggtttgtgtatcattagcttggtcattagcttcaaagactccgagcctagattgtggctcagtcctatggtctgtcacttcacacacaaactcttccctaagcctggcctgtggacactgagccggakgctgggattcttcagtctacacaggtcggccaggtctttgtctttactggcccaaatctttggaggccagaggggagcgggttgggtcacaggtaggttcaatacatctactgaacgcacaaatggaaatagcttaatcctgctgggtgaaatgttgt

SEQ ID NO: 424718 - DNA, 469 bp, Homo sapiens
gggcagatttggaggttcagtggtgctactaagaccacaactttcagccctgccatactccccaaattgtcctcatcctcaggctttgcttgtggttgcaaggtggctgccagagctccacacataatatcttcataccaacacagaaggagggagagcagtgtcttcttcatgagcccgcttaagrgtggtaagaaaaaacttccccaaagctcccagcttccagatgttctgtcaactcttattggctaacattgtgtcacatcctctttacctaaaccaatcactagcaagaaatggaattactatgaccaccttggaccaatcaagtttcactgttgaactgagccacccccgaagcccatggattccagataactgaaccaaaataggataaagacaggtaagtgacagggcttcagatacagcaaaaatatgtaaataaaaatgttgtggaccaggcctggtg

SEQ ID NO: 424719 - DNA, 469 bp, Homo sapiens
gggcagatttggaggttcagtggtgctactaagaccacaactttcagccctgccatactccccaaattgtcctcatcctcaggctttgcttgtggttgcaaggtggctgccagagctccacacataatatcttcataccaacacagaaggagggagagcagtgtcttcttcatgagcccgcttaagggtggtaagaaaaaacttccccaaagctcccagcttccagatgttctgtcaactcttattggctaacattgtgtcacatcctctttacctaarccaatcactagcaagaaatggaattactatgaccaccttggaccaatcaagtttcactgttgaactgagccacccccgaagcccatggattccagataactgaaccaaaataggataaagacaggtaagtgacagggcttcagatacagcaaaaatatgtaaataaaaatgttgtggaccaggcctggtg

SEQ ID NO: 424720 - DNA, 626 bp, Homo sapiens
ccgggctggaggacagtggcacaatctcggctcactgcaacctctgcccccggggcttaaacgattcttccacctcagcctcctgagtagctgggactacaggtgctcatcaccacacctggctaatttttgtatttttttgtattttttttttttagagacagggttttgctgtgttgcccaggctggtctccaactccttgactcaagagatccgcccacctccacctcccaaaatgctgggattacagctgtaagccactgtgcccggccaagaacctgcatttcaaacatgctcccaggagaggctgatgctatgggctttggccacactttgagtagcaaggtccaaagcccctagaacagggctggtgagtggaggaggaaagaagctctcagtaggatttctcctgcctcaccctcaagctcaagtcmtggaaacttctgggaagtgaactgtagttggaatctctgtttctccactgaggggctgtgtgaccttaggcaggagacttcacctctctggtcctcagtatcttcagctataaagtgggtctcctgagagtgactcctcctagtgctgctaggaagggatggaagcaaatgagccatcaggcacagggtgc

SEQ ID NO: 424721 - DNA, 525 bp, Homo sapiens
ttgtcacctaggtgagtgctttactgctggagaagtagcaatcaagagaacagttctttttaacatggacatgagagattttagggaccagtccccagtgctcaaatcatagcaggtcccacccaagaacttggctcatccacaaaccaagctcctgccaagccctggcttatggagatggaccagacattcctggggcatcatggcaggcggccactgatgctstctcaaatcctggggttccatattacggagagaatcagctgcaaaaggcaacaattgtctttgagtcacccctgcccttccaaaaatcaggctttcaagagttgaaggcgtgaagcgtaatgcagggaatttctgacagtgcagagggtatctgacaggctgggatgttccagcgatgactgaacacgcagattgaatggaacactgattacattcttggttagccgcctatatagcccatactgggtcctcattacatgtgccctaacaacaaacattatgtttcattaaaatattaca

SEQ ID NO: 424722 - DNA, 525 bp, Homo sapiens
ttgtcacctaggtgagtgctttactgctggagaagtagcaatcaagagaacagttctttttaacatggacatgagagattttagggaccagtccccagtgctcaaatcatagcaggtcccacccaagaacttggctcatccacaaaccaagctcctgccaagccctggcttatggagatggaccagacattcctggggcatcatggcaggcggccactgatgctgtctcaaatcctggggttccatrttacggagagaatcagctgcaaaaggcaacaattgtctttgagtcacccctgcccttccaaaaatcaggctttcaagagttgaaggcgtgaagcgtaatgcagggaatttctgacagtgcagagggtatctgacaggctgggatgttccagcgatgactgaacacgcagattgaatggaacactgattacattcttggttagccgcctatatagcccatactgggtcctcattacatgtgccctaacaacaaacattatgtttcattaaaatattaca

SEQ ID NO: 424723 - DNA, 553 bp, Homo sapiens
cagctgcaaaaggcaacaattgtctttgagtcacccctgcccttccaaaaatcaggctttcaagagttgaaggcgtgaagcgtaatgcagggaatttctgacagtgcagagggtatctgacaggctgggatgttccagcgatgactgaacacgcagattgaatggaacactgattacattcttggttagccgcctatatagcccatactgggtcctcattacatgtgccctaacaacaaacattrtgtttcattaaaatattacacacttaggaaaatacttctaaaaatgcaaagaggagaataaaaactaccgcaagtgctatactgagacccagcgctgtggcaagttcccctgacctgtctgcagggatcattacaagccgatactggctgcccagcgggacctgatgagacatcagagagctcacgtgacctccattatcactgtcaccgccgtgcgtgctgttcacacaaacatcggagatgtaagtgacactttacaacaattcctgagccttccatcatgtggctcagaatgtcatggcccagat

SEQ ID NO: 424724 - DNA, 576 bp, Homo sapiens
ttgtttaagggcctgtatagaacaaaaggcagagagaagagggcttcacccttttgcttcctgtctaccaaatggagctgggacatctcagctcatcctctctcgcccttggactaggatttgcaacatcagctccccaggttctcaggccttcagacttgggctgaattatcccagatcctcctgggtctccagcttgcagatggcagatagcagggcttctcagcccccgtatctatgtaagccaattcctcttcatacatatatatatatacatatatatatatatcttctattgytctgtttctctggagaactctgactaatacacttaccatccccgtcttccaggggtggaaactgagtctcagaggtgaagacacttgtcctaggtcccccagccaggaggacttttttcctggggtggaattcacatctgcctgtctttggagcccttactgaagcccaaggctgttatgagggctttcttgtgttgctataaaggaatccctgaggctgggtaatttacaaagaaaagaggtttaactggctcacagttctgtaggctgtacagga

SEQ ID NO: 424725 - DNA, 576 bp, Homo sapiens
ttgtttaagggcctgtatagaacaaaaggcagagagaagagggcttcacccttttgcttcctgtctaccaaatggagctgggacatctcagctcatcctctctcgcccttggactaggatttgcaacatcagctccccaggttctcaggccttcagacttgggctgaattatcccagatcctcctgggtctccagcttgcagatggcagatagcagggcttctcagcccccgtatctatgtaagccaattcctcttcatacatatatatatatacatatatatatatatcttctattgctctgtttctctggagaactctgactaatacacttaccatccccgtcttccaggggtggaaactgagtctcagaggtgaagwcacttgtcctaggtcccccagccaggaggacttttttcctggggtggaattcacatctgcctgtctttggagcccttactgaagcccaaggctgttatgagggctttcttgtgttgctataaaggaatccctgaggctgggtaatttacaaagaaaagaggtttaactggctcacagttctgtaggctgtacagga

SEQ ID NO: 424726 - DNA, 446 bp, Homo sapiens
tctctttcgctcttcaagttttctctctcctctctgctttccagactcatcatgaggtggtcttaacagctcatagagcttgctcagttttgcaacttcaaggggaacgtggtgtcttcttctcaagagattcaggaaaatcccaagagggaacaatattgagaggcacagagatagtaaagaggacttcaaagaattttgcttattgctctgacaatatttctcccttggggatgtttaagtgacgtttgtaaagtttccaattgctttcaactgtggtttttttttggttactgagctgtttctttgaaatcatgtagaaaaacagacacacacaaatcatcacccattattttaccatcactgttattatttgggggtgtcttgttgtctgggtcccarcgcatttctgtgctaagtgtaattggggtggtgatgggaggggt

SEQ ID NO: 424727 - DNA, 672 bp, Homo sapiens
ggagggcggtccagccctactgacctcagcttgtggtctgcaccccatgctgattcttgctgggattagggtcaccgtctcctaactggccccggttttggaacttttctctctagcctcccatctttccaacatgtgtccagttttcttccacaatataaacacattaattcttcccggagtgctgaggggccatgacyatgatgatctcaacactctgggcattttgggccagatgattctctgctggggtgcggtgggaacatctcttgtacattgtaggatgttgagcagcacctccagcctcaacccgcaagatgccagcagcaccctccccgagagtgtgacaaccaaaaatgtctccagatgttgccaaatgtcaagggcagtaccggccctgcttgggaacctctggttggaaggatctctctatttccaccacctctcccaccatcccagcatccctccctcagccacggttatcattggtgtctcagttcccacccttgatttcttccagtctattccccagaacctgccagggagatgttttctggaaagaaaacctgatctcccgtcactcctttgtctgaaactcttctagtctccatggtgctcttggctaacatcccaccattcgctgtctcctatcagctcttccaatttcgccag

SEQ ID NO: 424728 - DNA, 672 bp, Homo sapiens
ggagggcggtccagccctactgacctcagcttgtggtctgcaccccatgctgattcttgctgggattagggtcaccgtctcctaactggccccggttttggaacttttctctctagcctcccatctttccaacatgtgtccagttttcttccacaatataaacacattaattcttcccggagtgctgaggggccatgaccatgatgatctcaacactctgggcattttgggccagatgattctctgctggggtgmggtgggaacatctcttgtacattgtaggatgttgagcagcacctccagcctcaacccgcaagatgccagcagcaccctccccgagagtgtgacaaccaaaaatgtctccagatgttgccaaatgtcaagggcagtaccggccctgcttgggaacctctggttggaaggatctctctatttccaccacctctcccaccatcccagcatccctccctcagccacggttatcattggtgtctcagttcccacccttgatttcttccagtctattccccagaacctgccagggagatgttttctggaaagaaaacctgatctcccgtcactcctttgtctgaaactcttctagtctccatggtgctcttggctaacatcccaccattcgctgtctcctatcagctcttccaatttcgccag

SEQ ID NO: 424729 - DNA, 672 bp, Homo sapiens
ggagggcggtccagccctactgacctcagcttgtggtctgcaccccatgctgattcttgctgggattagggtcaccgtctcctaactggccccggttttggaacttttctctctagcctcccatctttccaacatgtgtccagttttcttccacaatataaacacattaattcttcccggagtgctgaggggccatgaccatgatgatctcaacactctgggcattttgggccagatgattctctgctggggtgcggtgggaacatctcttgtacattgtaggatgttgagcagcacctccagcctcaacccgcaagatgccagcagcaccctccccgagagtgtgacaaccaaaaatgtctccagatgttgccaaatgtcaagggcagtaccggccctgcttgggaacctctggttggaaggatctctctatttccaccacctctcccaccatcccagcatccctccctcagccacggttatcattggtgtctcagttcccacccttgatttcttccagtctattccccagaacctgccagggagatgttttctggaaagaaaacctgatctcccrtcactcctttgtctgaaactcttctagtctccatggtgctcttggctaacatcccaccattcgctgtctcctatcagctcttccaatttcgccag

SEQ ID NO: 424730 - DNA, 561 bp, Homo sapiens
cacaccttgtattaggttgttccggcattgctataaagaaatacctgagactgggtcatttataaagaaaagaagttcatttggctcacacttctgcagtctgtacagaagcatggtgctggcatctactcagcttctggtaaggcttcagggtgtttacaatcatggtggaagttgaagggaaggggtagcaggcaggtcacatggatggatggctagargaggagcaagagagagagtggggggcgggggaggtgccacacacttaaaaaatcatatctcacaagatctcattcactattgtgaggaaagtaccaagggaattggctaaaccattcttcaaaaatccatctctattaaacaataatcttccaagaggccccacgtcgaacactggggattacaatttgacatgagattatatgggacacatatccaaactatataattttatctctggcccctcaaatctcattttcttctctcactgcaaaatacaatcatccccgaccaatagtctcccaaagccttaactcattctagcattaactccaaagtcca

SEQ ID NO: 424731 - DNA, 515 bp, Homo sapiens
ttttgcacttcagattcactgtattgagttgtatattagagactatttctgtaaacagtattacacatacctgctttgtataccgaaactcaaggagtaattttactgagatttgatatgaatgagttgaatcctggtcacattgtaaaaaggctaaacatttaaaacagaacatgaatttatatatayatatatatatatatatatatatatatatatatatatacacacattttcctttctttgatcaaaaaattgagaaagtataaatattcagaaatgcaagctctgagttaaaaatgaattttacgttttctaaacaactgacataatatgaattctaaatttgtattcacttaatgatccttccaatccaattatggtacaatttttaaatagatgaaaatgataaattaatactgttatgtttttcattgtcctttttttaatcttcacaccctcaaaatttccacttaagaattaatcatgactcaaagatactgaaaatatgttct

SEQ ID NO: 424732 - DNA, 593 bp, Homo sapiens
gggtagatagccaatcaaaaagaatcaaactctgtaaaataaatgaatggatttattctgagccaaatataagtgaccaaggcccaaggcacatctcaagaggtcccaagaacatatgccaaaggtgaatgggttacagcttgattttacacattttagggggacaaaagttacaggcaaaaccaataatcaatacatgtaccctatacattggttcagttcagaagagtgagacaactcgaaatggggggcatttccactcgaastgaggggcagatcataggcagattcaaagattttctgattgacggctggttgaaaaagttaagtaagagttagtttattatctaacaacccagaatcaatagacaggtgtgtctgggttaagataaggagttatggatttcatgcgcgtccgtgtgaagagaccaccaaacaggctttgtgtgagcaataaagctgtttatttcacctgggtgcaggtgggctgagtccaaaaagagagtcagtgaagggagataggggtggggccgttttataggatttgggtaggtaaaggaaaaaggggggttgttctctggcaggcaggagtg

SEQ ID NO: 424733 - DNA, 593 bp, Homo sapiens
gggtagatagccaatcaaaaagaatcaaactctgtaaaataaatgaatggatttattctgagccaaatataagtgaccaaggcccaaggcacatctcaagaggtcccaagaacatatgccaaaggtgaatgggttacagcttgattttacacattttagggggacaaaagttacaggcaaaaccaataatcaatacatgtaccctatacattggttcagttcagaagagtgagacaactcgaaatggggggcatttccactcgaactgaggggcagatcataggcagattcaaagattttctgattgacrgctggttgaaaaagttaagtaagagttagtttattatctaacaacccagaatcaatagacaggtgtgtctgggttaagataaggagttatggatttcatgcgcgtccgtgtgaagagaccaccaaacaggctttgtgtgagcaataaagctgtttatttcacctgggtgcaggtgggctgagtccaaaaagagagtcagtgaagggagataggggtggggccgttttataggatttgggtaggtaaaggaaaaaggggggttgttctctggcaggcaggagtg

SEQ ID NO: 424734 - DNA, 681 bp, Homo sapiens
gctttggccaggtatcttagggaaacagcttttcgaaattatcctaatacaatttctggattaaatattacgtgagtttgagctgccatccttgtaggaccctattttcttttcttttttcttttttttggtttggtaactttttattgtatatatatttttaaggtgtacaacatggtattttcatgtacttagcttggtatacatagtgattattaaagtcaagtaaattaacatacccatcatctcatataattagctttcttttttttcttgtgctaagactacctaacatctcctagcaaattatcagtatattatacaatattattaattgcagttctcatattgtacattagaactcyagacttatgtatcctataaaagtgcagttttatacccttggacctacaactacgcatcccttcctaccctctgcattactgctgttttactatttctctgtattcagtatgtatttttttttttaagattacacttgaaagtgagactatgcattattttctttcttcattcatctggcttattttacttaacataatgtcttctaagttcatccatgttgtagcaaatggcaggctctccttctttttagggatgaataatatttcattttatatttatgtaatatataacaaatcacacacacatacacacaca

SEQ ID NO: 424735 - DNA, 681 bp, Homo sapiens
gctttggccaggtatcttagggaaacagcttttcgaaattatcctaatacaatttctggattaaatattacgtgagtttgagctgccatccttgtaggaccctattttcttttcttttttcttttttttggtttggtaactttttattgtatatatatttttaaggtgtacaacatggtattttcatgtacttagcttggtatacatagtgattattaaagtcaagtaaattaacatacccatcatctcatataattagctttcttttttttcttgtgctaagactacctaacatctcctagcaaattatcagtatattatacaatattattaattgcagttctcatattgtacattagaactccagacttatgtatcctataaaagtgcagttttatrcccttggacctacaactacgcatcccttcctaccctctgcattactgctgttttactatttctctgtattcagtatgtatttttttttttaagattacacttgaaagtgagactatgcattattttctttcttcattcatctggcttattttacttaacataatgtcttctaagttcatccatgttgtagcaaatggcaggctctccttctttttagggatgaataatatttcattttatatttatgtaatatataacaaatcacacacacatacacacaca

SEQ ID NO: 424736 - DNA, 589 bp, Homo sapiens
cactgcgattcatcataagaaccaacaggtaagctgtagtggctgcatggactgtgatgttggacagggtttcaagacagtatccagactcttgagagaggatgctacaataaataaacaatatctgtaaagggcacaagcctgaaaaccagggcttgtatggcaggatatgccatacagttgctaacttaattttgtattccaaatgttattcccgttttgattgaaaatagctttcaaatttaatttttaaattacaggacagactctttgatttgtatacaacagrcttctctactgggtgacacattttgggacaagggcgctttctacattattcttcatatccaaccatctattctacttactgaccatccaggacagcatggatttatatccctagtgtcgttcacaactctaatttgttcccagtgtgaaatatcactcatattggtttgaaattatattctaaacttaaagcccacgatttctgtgtgggatgtaaagttgacaaaacacgtacatttttcctaatgcaaatcctacatgcgttgactttgaggtagtcaggctgacactgttgggggcg

SEQ ID NO: 424737 - DNA, 589 bp, Homo sapiens
cactgcgattcatcataagaaccaacaggtaagctgtagtggctgcatggactgtgatgttggacagggtttcaagacagtatccagactcttgagagaggatgctacaataaataaacaatatctgtaaagggcacaagcctgaaaaccagggcttgtatggcaggatatgccatacagttgctaacttaattttgtattccaaatgttattcccgttttgattgaaaatagctttcaaatttaatttttaaattacaggacagactctttgatttgtatacaacaggcttctctactgggtgacacattttgggacaagggcgctttctacattattcttcatatccaaccatctattctacttactgaccatccaggacagcatggatttatatccctagtgtcrttcacaactctaatttgttcccagtgtgaaatatcactcatattggtttgaaattatattctaaacttaaagcccacgatttctgtgtgggatgtaaagttgacaaaacacgtacatttttcctaatgcaaatcctacatgcgttgactttgaggtagtcaggctgacactgttgggggcg

SEQ ID NO: 424738 - DNA, 610 bp, Homo sapiens
atatccaaccatctattctacttactgaccatccaggacagcatggatttatatccctagtgtcgttcacaactctaatttgttcccagtgtgaaatatcactcatattggtttgaaattatattctaaacttaaagcccacratttctgtgtgggatgtaaagttgacaaaacacgtacatttttcctaatgcaaatcctacatgcgttgactttgaggtagtcaggctgacactgttgggggcgtgtaagacagaaaataactcctgttaaataaaagcataagaagtgaggaaagagaagcagatctgttttgttaaatggaatttttagagacagagtaaatggttctggtttgttttgaaggagattaagaataaaaatgaagtatttaaaatgagagtgaatacatgttaagaggtcaaggaaagctgacaatctgccagttgtgacaacacttaataatattcaaattaattgtaatattgaaaatgaaaaattctgactgcaaatgaataatgaataacaaaaccagacacggctcttaggtgaaatgtgattttcatgaggatgggaacatttaacatttatacagcagttcatattctca

SEQ ID NO: 424739 - DNA, 633 bp, Homo sapiens
taaatttcatgcctcccatggctcatcccagtgcttattcaactacagtgcatgtcgtgcctataacctcacctagttgctcacatcaatttccactgcaggttccaagctggcttacttcatccagtggaagaaaggaaataatgctaaatacagaattgtgtttcaggtacagagtaatagataaattagaaataggacaaagttgaactccaaaggattttagggtaataacacctttgattctggcaaaataaattaataaagataattataacagcaatgataacatatttattctgaagacataagatgtcaagcactgtattaagcttgataaatattcatttaatcttcagggccaccaartgagaataaaggctaatattattgctgtttagagaataggaagctgaagttgagagagtttaaagaatgtgctagaattcacacaactgtatgtgatatagctaggattcatacccatgcctgaccacagagtcatattggatatgtcttcttactgtgtgagactgttaggttggtcaattaggttgttattggagcctacactaggaccatgttacatttaggtaggttgaatcaggcccagactggattacactcaaacag

SEQ ID NO: 424740 - DNA, 560 bp, Homo sapiens
gtaaaagcatgacagggtccatagaccaagcctctgaaaatgtgagcagaaagtacktagggtagcagtaatgactagattaaggcaataagtcagcagaattctctagggcctttgttcatagtgactgagagttatattagaaataatagttctgacagtttccggaaaattttggctacctcttgaattaagtagaccagatttcactgctcagtttctgcccagtccctcaggatttgaagtgtcttgttggtctggctagaatgatgtgctatactatcgtggtatgggtctctgtttttgagggacgtgagctctcaatacccaggtgctttgagacatagtattttatcttcttcctatcactctgtcatttacctgtggatggagaggaatgaaaagtctgaccccctgagtgataagcatgcacctaacaaacatcacttgtatatatttttggtatctacttttgccaggtactgttttaattctaaggatgaaatgtaaaatatacagaaatctagtcctcaagaaatgatgagataattgtatatgta

SEQ ID NO: 424741 - DNA, 560 bp, Homo sapiens
gtaaaagcatgacagggtccatagaccaagcctctgaaaatgtgagcagaaagtacttagggtagcagtaatgactagattaaggcaataagtcagcagaattctctagggcctttgttcatagtgactgagagttatattagaaataatagttctgacagtttccggaaaattttggctacctcttgaattaagtagaccagatttcactgctcagtttctgcccagtccctcaggatttgaagtgtcttgttggtctggctagaatgatgtgctatactatcgtggtatgggtctctgtttttgagggacgtgagctctcaatacccaggtgctttgagacatagtattttatcttcttcctatcactctgtcatttacctgtggatggagaggaatgaaaagtctgaccccctgagtgataakcatgcacctaacaaacatcacttgtatatatttttggtatctacttttgccaggtactgttttaattctaaggatgaaatgtaaaatatacagaaatctagtcctcaagaaatgatgagataattgtatatgta

SEQ ID NO: 424742 - DNA, 480 bp, Homo sapiens
gtttgctgtcccagtggtggcagaagcagaagaggttaaggagttggaaggggaggccagagagccaggcatatgcactataactttcatttaaaaagattctcacgtaagtggaactacacagttaaaacccatgttgttcaagagtcaactgtctttatatatcatttactaaggagtaatggagttgatatccacataaccaacacccagatcagggaactatttccagcacatgggaagcccatattcatctatccatactttgactctcactttggtgtcgcttcccaattaaggctcctctttctttgaactttcctctccagggaaccagcttttttggtaatggttttctttctttgctttatagttttatgacctcaacatcgataaacaacatagttatgctaagtttgttctttatataaatggagcaccatggyatgtattgttctgtgttttgctgcattaattcct

SEQ ID NO: 424743 - DNA, 551 bp, Homo sapiens
gtttggaggagcagagagaaaatgaatagaatcctaaggacttctcagagttttgtctctgagatagtaatcctcaccgtatagcaacccctttttgagactgtatgggcagcaatgtaaaaattgacatgtagagtgaggcattcaactaatattgattgaatgtcatgtcctcattgccaagcattttacttggagctggaccaatagcagtggacaaaaaaggtccctattttcctgcttctgtcagaacactccatgactagaatctccattgtcactaggttctgcaccttgctgtcctgggcactggtgagrgcaactgagtttttgcttgttgaggctcctccttctaggatccttggtacacttttatccaatggacatcatctttaatttgacttgctggctttattagaatattgctattgttaacattcaggcaaaacttaggtttccacttctattcttcctgcttttagatgaagattgcccatctttaaaaggtgacaacttcaggcagttaattttgtccactttagtttagtttg

SEQ ID NO: 424744 - DNA, 616 bp, Homo sapiens
aatagcatgaagtcgttgatgtgtatgaataacacagtaattaagttgtttttactttgttgctggtttgagattttgtcctgggctgtgagtgctagtccactgacatatggaaataacaagagcttccttttaaaaggtgctctttccaccataagtgcagggagagggaagtttatcctaagtagtatgattttcatggagttcagtttctctgtgttgtcagcagtacccttcacatggaaggaaatacattgagatagggtaaytcctggagtcagctgagttggggtacccctctttgctcttcaaactcattttttagttttatttcaataattgttggggtacaggtggtttttggttgcacagataagttctttagtagttgtttttgagattttggtgaactcatcacctgagcagggtacactgtacccaatatgtagtcttttatccctcgttcccccctacaacccttccctctgtgtcctcaaagtccattgtatcattctaatgcctttgcattttcatagcttagctctcacttataagtgagaacatatgatatttggttttccattcttgtgttacttcacttagaataatgccccca

SEQ ID NO: 424745 - DNA, 574 bp, Homo sapiens
tgcagaaggatgcctggacaaagaagtgagaatgtgtgcaaatctgacatgttctctctgcaagaaacactgagctctggtgtagcagccctgactgcttagaggaggsaactccttttaccaattagcaccaatggggcatgtggagtaactggagccatggcaaagatcaccattgattctccattatattcgatttagtgttaaaaaatatagtccctgttatgatgaaacctgctattcaatgtacagaaagggctgcaactttgtccttcttaaatcctatgggtatgcataccacaggggtgaacaaaaggtgttgatgacaacatatcactctgagtttctttaacctgttgtaaggtaaagcattatgctgttcatagaaagttgataaattttggtcctcaaaagtcagacttgtcaatgcaggacattttgttacctacttaaattctatctctgctgtgcatccagaaaaatataaaactttaatactgatatctttattaaaaatggatatgcatatatttaatagtcatcatcacaaaattgattatggtatactttaaat

SEQ ID NO: 424746 - DNA, 555 bp, Homo sapiens
gctggcttaaattattactaccaaatttaaaaaacatgtaatactttttaaagtttttactatgtcagttactyttctagattaaaagagcagaaattggcgaactctttttgtaaagggcctgttagtaaatgttttaggttttgtgggctgtatggtctatatcactcttgctcaactctgccactgtgggaggaacgcatagacaatagacaaaatgcaatatgaaaatgaatgggtgtggctatgttccaataaacttgagtcctgcaaagggagtaggtagcaaggtagacaatcaggtgaatttatttcagatttaagatgcagaatactcaaattcataagaactgagagatcactgtgagtcccaggattcacacaggttttgggtttgctggagtatacaactagaagggatgagtaatgggagctagggtttcttaaacgtagtgtgcaatctttgatacttcatgttttttttgtaatgttgagactatatacagggccttaaatatggaagtggaaaatatacatacaatacgatctgttatt

SEQ ID NO: 424747 - DNA, 620 bp, Homo sapiens
gaaattggcgaactctttttgtaaagggcctgttagtaaatgttttaggttttgtgggctgtatggtctatatcactcttgctcaactctgccactgtgggaggaacgcatagacaatagacaaawtgcaatatgaaaatgaatgggtgtggctatgttccaataaacttgagtcctgcaaagggagtaggtagcaaggtagacaatcaggtgaatttatttcagatttaagatgcagaatactcaaattcataagaactgagagatcactgtgagtcccaggattcacacaggttttgggtttgctggagtatacaactagaagggatgagtaatgggagctagggtttcttaaacgtagtgtgcaatctttgatacttcatgttttttttgtaatgttgagactatatacagggccttaaatatggaagtggaaaatatacatacaatacgatctgttatttttgcttcaacctcacgatagcgtgtctattgcacttaggattttgctatagggtacattcccttaagggcacttactgagtactgctatttaccttgaatattacatgctttcactttccattgatcttggtcactgtagaagggagggtcagtcc

SEQ ID NO: 424748 - DNA, 621 bp, Homo sapiens
actttatttctaaaaactgctaacaaacatcaaagccttcagcaagtcataatctttttgctggtaaagtgtcttgccttgatgttgatgtctgctgaccaatcatggtggtggttgctaaaggttggggtggctgtggcaatttcttaacaaaagacaacaatgaagtttgctgcatcgatggactctgactttcagaaaagatttctcaatagcctgcaacattgtttgatagcattttactcacaggagaacttctttcaatattggagataatcctctacaactaggccagttttttaatttactaagtttataaaatattctaaatcctttgttgtcatttcaacartgttcacagcatctttaccagcagtagattccatttcaagaaatcactttctttgctcatccataagaaagcatctcctcacctgttcaagtttaatcatgagattgcggcagttcagttccatcttcaggctccacttctaattctagatctcttcctatttctattacatctgcagttgtttcctccacggaagtcttgaaccccttaaagtgatcatgagggttggaatcaactgttaaggaaatcctgataatgttgatattttg

SEQ ID NO: 424749 - DNA, 499 bp, Homo sapiens
gacatgtttaattagaagtaacatgggtaaaataattgatgctatttttgaagaacttcctctaacactgaaccaatgagtttaatatccaaatttgaatatataatgtgtatccctgttgttatcagattaaaaaagaaagtgatttttatgcaagaaaaaaatgattcctaaactgtttttcatttttcttatttttttctaagatagaagcagacaktgaatggcagatatcttgcagagcataaccctagatcaatactattcaagggaggctgcttagtaggttccaaaaacatgagctctaaagcaaccacaattttataaagcctattttactgaatcagctatggcttgctgacactaatgcagttgtaatgcttgaataagcttagtcaaataaagcttatgaagctcactccacagaaattactgctttgagtgatttaaatgtcagaaatatgggcttgtcatttttttcccagtaaaatcctattca

SEQ ID NO: 424750 - DNA, 631 bp, Homo sapiens
ggctggttttgaacacctgacctcaggtgatccacccgccttggcgtccccgcttcccccttaagccacaagtgaggaccagaagaccagttggcaaggctcagggcrtgtccccagccagaggtcagaggtctgtggtacccgagaccaggtgtggaatcagaggtaggaaagtctaaatgaggtactgctcagggggcttctgccaaaagtgtgaggacgtctgctggtagaggctacatgggcaccatttcatgccaaagcttcaacctaggaggggccagggcgagcccaagtgcaagacaagggtggcagagaagcaagcagccaccttccccttcccactgtcagccagaggaggcccagacaggggaggagaggagctcaagtctgagtgacatttggagtttttggttttgatatacaactggatatgcatttttaattttaggggctattcttatgattgaaagtgaccagaggaattaaaaaatatatgtgttagagggactagatattaactgagaatgagagggaactattataaacttcatccaagggcaaggaatgaacgagccccacagtgcaggcttgaccaagcaatgggcaaggaacactgtctcctgaccac

SEQ ID NO: 424751 - DNA, 631 bp, Homo sapiens
ggctggttttgaacacctgacctcaggtgatccacccgccttggcgtccccgcttcccccttaagccacaagtgaggaccagaagaccagttggcaaggctcagggcgtgtccccagccagaggtcagaggtctgtggtacccgagaccaggtgtggaatcagaggtaggaaagtctaaatgaggtactgctcagggggcttctgccaaaagtgtgaggacgtctgctggtagaggctacatgggcaccatttcatgccaaagcttcaacctaggaggggccagggcgagccyaagtgcaagacaagggtggcagagaagcaagcagccaccttccccttcccactgtcagccagaggaggcccagacaggggaggagaggagctcaagtctgagtgacatttggagtttttggttttgatatacaactggatatgcatttttaattttaggggctattcttatgattgaaagtgaccagaggaattaaaaaatatatgtgttagagggactagatattaactgagaatgagagggaactattataaacttcatccaagggcaaggaatgaacgagccccacagtgcaggcttgaccaagcaatgggcaaggaacactgtctcctgaccac

SEQ ID NO: 424752 - DNA, 631 bp, Homo sapiens
ggctggttttgaacacctgacctcaggtgatccacccgccttggcgtccccgcttcccccttaagccacaagtgaggaccagaagaccagttggcaaggctcagggcgtgtccccagccagaggtcagaggtctgtggtacccgagaccaggtgtggaatcagaggtaggaaagtctaaatgaggtactgctcagggggcttctgccaaaagtgtgaggacgtctgctggtagaggctacatgggcaccatttcatgccaaagcttcaacctaggaggggccagggcgagcccaagtgcaagacaagggtggcagagaagcaagcagccaccttccccttcccactgtcagccagaggaggcccagacaggggaggagaggagctcaartctgagtgacatttggagtttttggttttgatatacaactggatatgcatttttaattttaggggctattcttatgattgaaagtgaccagaggaattaaaaaatatatgtgttagagggactagatattaactgagaatgagagggaactattataaacttcatccaagggcaaggaatgaacgagccccacagtgcaggcttgaccaagcaatgggcaaggaacactgtctcctgaccac

SEQ ID NO: 424753 - DNA, 359 bp, Homo sapiens
cttttgctttgatttcttgtcacttgagagagcaaatgacasaaatttaacgcaaatgggtgtaacataaaaaagtgtttctattggctcagactgaagagtttggggaatggtttggcttgagtcatcactgaatccaggggcttaacaaatgtcatcaggacgtggttcctttcttcatcattcactatcctttcttttttgtcggcttcattctcaagacatctctctctaggtggtaccgtagtaggtccaggcttacttcctactaactcagcaacttgagttgaagaactagtactttgtttctccaaaacctcctgctatccccagaaaagtcctaggattggcttccacca

SEQ ID NO: 424754 - DNA, 482 bp, Homo sapiens
gtggcggcgactcccagtgagtccctccctgagtgcaggtgaggcctgtgacttgcttctcaccagcagaatatggcacgagtgacagtgaagggaggtcactycatctaacagattccagagaaaacccatcccccctgctggctttcaagaaataagctgccatgctgtgaatggacgaaggagaaggtctcatggcaaaaacccacatggcctctgggacctgggtgtggcctccagctgacagccagcaaaaagctgggccctcagtcccacaacttcaaggaatggaattctgccaaatgagctttgatgaggaacccaggcctcagatgagacaattttcgcagtctgaagcagagaacccagctaagctgacccagagaaatggaagataatacatgtgagctgttttaagccactaaatgtgtgctcatttgttatgcagcagaaaaaagagaaaattaatattcttctgtggt

SEQ ID NO: 424755 - DNA, 540 bp, Homo sapiens
aatggttaccttgcatttacagcacagtmctgtgttgcttaaagacgggtacattctgagaaacacatcactgggtgattttgtcactgtgtgaacatcatacagtgtacttgcaaacctagatggtatagcctcctacacaccttggctgtatggtacagcctactgcaccagggctacaagcctgcatagcatgttattgttctgaatacagtaggtggctgtaacagaatggtaagtatttatacatgcaaacatacaatagaaagggtacagtaaaaaatacagtattataatctgatggaactgctgttgtatacacggtttgtttttgaccaaaacgttattatacagcacatgactacatacacatttcactttgcacagtctaccttcacatataattatactaccacaccacatatagttatactacttcacatatagcctaagaattttacaaaagcatgcttctatttctctcctcttagactttgtgttattgttgccatatatttagcttctaaatgtttttaacgc

SEQ ID NO: 424756 - DNA, 540 bp, Homo sapiens
aatggttaccttgcatttacagcacagtcctgtgttgcttaaagacgggtacattctgagaaacrcatcactgggtgattttgtcactgtgtgaacatcatacagtgtacttgcaaacctagatggtatagcctcctacacaccttggctgtatggtacagcctactgcaccagggctacaagcctgcatagcatgttattgttctgaatacagtaggtggctgtaacagaatggtaagtatttatacatgcaaacatacaatagaaagggtacagtaaaaaatacagtattataatctgatggaactgctgttgtatacacggtttgtttttgaccaaaacgttattatacagcacatgactacatacacatttcactttgcacagtctaccttcacatataattatactaccacaccacatatagttatactacttcacatatagcctaagaattttacaaaagcatgcttctatttctctcctcttagactttgtgttattgttgccatatatttagcttctaaatgtttttaacgc

SEQ ID NO: 424757 - DNA, 626 bp, Homo sapiens
ttctcaggctccccgccagagagcgccgccaggtcctcggaaccacctcgcgcactttagctgggcgcgcgacccgcgcaaccagtgagaaccccgctcccgccctaggctttctgtggtggaaaaagcgcgcgcgcggacgagcaggttaggcgatagaggtcacgtgggccagctgtggccaatggggagcgcacatggcgacgcggccggcggcggcgcgcgcgtagctcgcctcgggctcctggcgggagcgggagttagggaggccgggttcccgaattacacacaccagcgttatttattctatcagtctttggttactctatctggcgttctcgacgccgtaataacaagttcgtgccccctcacaccgccccctcattccgcacatccctcatttcttcagtggtatcataaagatgaaggggagaaacgcgctgctgcctgaacagaaaggcaacccaggtgtcctgggccagaagtgggaggacatgggagacagcactttattggaagatccctggtttctaattgtttggcaggcrttgaaagcacattggtggcccaccagactaccagtcactaatgagatttgacatataactcgcgtatggtaaaacggg

SEQ ID NO: 424758 - DNA, 509 bp, Homo sapiens
tgccaaagtacttgctgaaaattggcacatttatattaagaagctgggaggtgaagtgttcatggccatcagctggatggctctttgaatgcagaacagagccacctggggcctgaccgtgcaagaakaggtgaggggtgactaagtagtaattcagattctacatgggccttcttggtcatataattgttttgggcagttgggtaggattaaaaatttagaggccctacattcttttaggcaatggacaaatccctgaccaagtgatttttttttaaataacttttctccagtgatcttcccactgctacctctccatttcgtttcgtgcttagggtgagtacatgattccctctttttatcttgttacctttcatagtgaatgagactagatgcacttaggagaatttttatgaatcagtgagaagctccaggctctgctctgatgctggcagaatccctatagtccctgaatggtagcttgttatttcctctgggtgggttaattt

SEQ ID NO: 424759 - DNA, 509 bp, Homo sapiens
tgccaaagtacttgctgaaaattggcacatttatattaagaagctgggaggtgaagtgttcatggccatcagctggatggctctttgaatgcagaacagagccacctggggcctgaccgtgcaagaagaggtgagrggtgactaagtagtaattcagattctacatgggccttcttggtcatataattgttttgggcagttgggtaggattaaaaatttagaggccctacattcttttaggcaatggacaaatccctgaccaagtgatttttttttaaataacttttctccagtgatcttcccactgctacctctccatttcgtttcgtgcttagggtgagtacatgattccctctttttatcttgttacctttcatagtgaatgagactagatgcacttaggagaatttttatgaatcagtgagaagctccaggctctgctctgatgctggcagaatccctatagtccctgaatggtagcttgttatttcctctgggtgggttaattt

SEQ ID NO: 424760 - DNA, 598 bp, Homo sapiens
agtattactgaaacttaaaaaataggggatgaggggtgtgagactggatagcaagagaggggcttcgtcatgaaggaagtatctgtagttcatggtagacacaaagaaaccagtgatgaggtcttgagcataggtgatcagattttaaaagttcaatctggtgataggttaaataggctgcaactacaagtaagaacaccagaaaagattatttaatgtgttcaggtaagaaaggctgagaatctkccctgtagcattacaagcattcatcagagagaagaggacaaatcaataatagctaagtttaggaggccgagctgccattatgcaatgattggtatgtgacgacaagggagaatctggggtttctgcctcatgtagctgtacagattcaggaggaagagcacaactatatacgatccacatctggtgctgtcagaatctcagaaagtattcaagatactaggtagcagatcagtcacttcagtttttattcaaatgctttgaaatctcatagaaacatcagggaaaattgaatatatatacaggagcagtttattttagatttacaggcagtaaaaatacaaggcagttctac

SEQ ID NO: 424761 - DNA, 571 bp, Homo sapiens
aaacctctgcattaggtctgatggaaatcttaaaatgttataagcaaaatcaagaaatatcttttactttatttgtaaagttttgctaagtttgattgttatgtttatatacattttcctgctatgtgcttaatgaatatctatatgtaaatcttaatatttattgatattttgaatgattgatattccctaaattctttattagacatgcatgtttattatttcttttatatattgacataatcaaatcaatgacttttaagggaaagttctgtttaaaaggtgttcaaagtatttataacttcagtgcttatcttaaagtactagatgatttttaaaatggcacaagactacctacatccagttgtttcacaggctctccctagcttctcttgtaaaatgatgaattgttctttatttcctctttatttggtttctttatttcctctttatttggattggtgggtttcctygtttcaggtggattgtatttgtaaagtgttcgggcttcttttgacacaaaagagagcctatttcttccagcatgacccaaatcatttgttaaatgttc

SEQ ID NO: 424762 - DNA, 539 bp, Homo sapiens
gctgatttcaccttgtgcattgtccatgtcaacaggcccagaaaataagaaatcaaaggtattttttgcatgttgcatggtgcatgcttattttgaaacagggaagaatcttttttttttccccaaggcagaaatcaataattatagtattaattgtgctcctacaaggaggaagaaaaagtgcaagacggtaccaggacttggtatatttgaatgtgtaaatgaattataatctgtatagaattatgtgtttcagtcaaatcctttgattttgaaaatcctctttctcttcctaacttcttatatctatgactccargggtattatttttcctcagacataatatgagttatatcattggccctaatgacagaattaaaagcaagtagtagagattcaggactatgatatgtttctgattgtttattaacagggaccctagcatccatccaaatatcctgtactgatggaatagtagacaggattaatataaaatggaatattatcttagatctaggcctgtgacatagccaagcacg

SEQ ID NO: 424763 - DNA, 566 bp, Homo sapiens
actatgtgctaaaaacacatctattaaacgctttttataattttaaggaatattatcagaagagagcaatgagggtagtggaattcttcacttgagtatcagggagttggtgaaggaagcaatataattatgcagaagagagctcttggcatgagccatgatttcaagaggggggaaataggaccaatgagataagttagcaggaagcatattttggctcaatgtaggggagaattttgtactaattctaacacttagacctgaatgttctgccttgggaggcaagcaagtgttcatttggctactaaacagaacagagattcatgtgtcagatgagggagttgaaccaaatgaccttctatatcacttcttatggtaagattctttgacattttgtgtgcaataacaagatatgtctctgtacaggctttcccagctatattctttagggaagttgaggataggagaacaagcactgtaaatgattacacatcctgaaatgagaagcaagggcatttgtagatatgtgcatagttgttgggmtaaagtgcctgtgtccaaattcc

SEQ ID NO: 424764 - DNA, 556 bp, Homo sapiens
tctatgaaattattcatttcatatattatttttatgattatgtatttagtcaatttatttctcaatgcactaagtccatttttttctgtgtaattatggtgtttcaaagactatcatttatcaaaacgttgtttgccaaccaggtggtattatgatcactggtttataaatctacattcttattcttttagcatgatctgaagagtaaaacctttgtatgatctcttatctaataagtaggaattgttagtggaacaagtagtgtataggtggacattaattccacattatacacaggtagtgtccaatccatgttctgtatatgtaagtgctttgaactggaggttcactaggctgcaggaaaatctgcagctttttccctagcatctctcctgaatttctaccccttattgtctgttaaaagatgagatgggactaaaayacggatttcaggagacttctggaggttgtggaaagggacacttttccattgccccttattccacactctggggccataatggtgggagatggtggcagagttcccacaccacag

SEQ ID NO: 424765 - DNA, 362 bp, Homo sapiens
atacaactcaataccaaaaaagcacaaataactcaatwaaaaaatgggcaagggacctgaacagatatttttcaaaagaagatatggccaatgagcatatgaaaagaccaacaggtatatgaaagggtgctcaacatcactagtcatcagggaaatgcaaatcaaaaccaccatgagctatcatatcacacctgttggaatgagtattagcaataggaatgagtgttggtcagaatgtggaaaaaagagaacacttgtacactgttggtgggaatgttaattggtaagtcagtaaggaaaacagtatgaagtttccccccaaaatttaaaatatggctaccataaaaatgcatcgatcccac

SEQ ID NO: 424766 - DNA, 596 bp, Homo sapiens
tgccatcttggcaagtatttttcagttgaatactgacaattttgtgtgtgttcaacccagtataaagctgagctcataaaaaaaagtgggggaaatccccaagggtcaaatactaaaagcaggctgaaattcagaacgtttatcatggtgctgatgctctggtaagagagaactggagttgcatctccgttaagaatcaagatttttgaattgttacactctcagttgcaagaagtatgataaaaaaaaaaawtttcaaagggaaatgacaaccccgctttttaatttttattgttttagagacagtgtcttactctgttgcccaggctagagtgcagtggtgtgatcagggctcactgcagtcttgaactcctgggctcatccagcttcctgcctcagtctttcaagtttctgaaactacaggtgtatgccaacacattcagctaatttttaaaattttttatagagatgggatctcactgtgttgtccaggctggtcttgaactcctgggctcaagtgatccttctgcctcagcctcccaaagtgctaggattacaggtgtaagccactgtgaatggccataagattttcttat

SEQ ID NO: 424767 - DNA, 509 bp, Homo sapiens
aagattttcttatatcaatctaggcttagggtaggaaaaaataacctttagtcacgagcctaccctgagacaggtttgagactgaatttatacaatctctgtgataaagaaaatatgtgctgaaaatcsaaatttgaattaatttaaaattagcttgccttattctgcttctgcaaatagagaagtagcttgtattggaccaactgttttacagataacaatgataaactctggataagaatataaaaaactatctgaaggtactgaagcatgaccaaggcaggtagaaactgcagtagagtcaacgcttgcaagaaaaatatggcactaggttggtttctagattttatagtttttcaccttacgggtagtcccttatctggtcacaatgaagtagtgaaaattcagcaacaacccagcagacgtattagatgaggaaacagagaagagtgtaaggtcatacagaaaccagaaagtaggggagaatctggaaaagagagtgccaaaag

SEQ ID NO: 424768 - DNA, 369 bp, Homo sapiens
tgtgatggggatgaatttgaaaaagttaaaaaaagtttatatattctactttcaattccttttttccagtttcctcttagatcccctttttttatgtcaccaaaacccctttttccaaggttcctgaagtcctctgcattgcaataaacccagtcctgagttgagatgacagcaacagaacttgagatagttgctcacaccctcctctttgatatattttcctttagaggattttaaaacttcattatctttctggtttttctttatcctccttttttaataatcatttcttaagctcctttgstgggtcatcttcttcttcccaaactggtaatgttgggatgctctagtcatgagtcctcaaacttc

SEQ ID NO: 424769 - DNA, 549 bp, Homo sapiens
gtggcttctcaaaggattggatgtaattggattcattgaaaaaacctggttactttagtgataaaacatataagtcactattcttcctctttgctaaggacaaatctgtaatagtattatgcatatccactccacattgtggtttacatttaattttgcactttctctgggaagtttctgatagcagtgatacggagttcataatactggatgaaataaaaatgtctgggggtatctaaagcatcttattattatgtcatgattcccaatgaaggaatttgggggatttatagagattggataaaaagatatttagattttttcctaatttaattaacatgtttgagccttttctctcttttccccatgataataatttggaattatttagtmcaatatcctaaaaaatattagtaatacaaattgtaaagtgaaactttattgttaatatgtaacttcttttcctataattattgaggtagaaatttagccttttttttcagttatgatgcatttaattcagcatatttcacagaagctattcattta

SEQ ID NO: 424770 - DNA, 549 bp, Homo sapiens
gtggcttctcaaaggattggatgtaattggattcattgaaaaaacctggttactttagtgataaaacatataagtcactattcttcctctttgctaaggacaaatctgtaatagtattatgcatatccactccacattgtggtttacatttaattttgcactttctctgggaagtttctgatagcagtgatacggagttcataatactggatgaaataaaaatgtctgggggtatctaaagcatcttattattatgtcatgattcccaatgaaggaatttgggggatttatagagattggataaaaagatatttagattttttcctaatttaattaacatgtttgagccttttctctcttttccccatgataataatttggaattatttagtccaatatmctaaaaaatattagtaatacaaattgtaaagtgaaactttattgttaatatgtaacttcttttcctataattattgaggtagaaatttagccttttttttcagttatgatgcatttaattcagcatatttcacagaagctattcattta

SEQ ID NO: 424771 - DNA, 566 bp, Homo sapiens
ttactttcactgggtacctcctgtgtctgactctgcctcgtgtttttgcactgcctggaaaatgtgagtacttacctaagagaagactgggtagggtcagttagagtactgaagttttcacagctgtgaatagtgcttcctgtagcatattaaaaggagcaagaggaaaggaaagatctagggtctgcgttaaaccttcacaaagctttcctagctgttgagctgaatcatcacaaagatattaacaaaggccagcggggtctttttccctgcataagataacacacaagwtaggcaccccaaggtagctaaaccctggtcttctttggcagtaggggagcctggtttagatgacatttgccttttgcttttgaaatttcatgccgttacaaaatgttcactgttgtccaggatggaatacttaatctaaagagcacaaaacaatagattttaaaaataagtcacatggctatatacaggtaaaagcaagatgctatttactggaacactattaagaagagtgcttaaacttgcaaatactttgttcctagttctgaatgccagct

SEQ ID NO: 424772 - DNA, 580 bp, Homo sapiens
tctgcacaacaaaaaacttatatcttatgcaaagtaaataccaattccaggaagcagaagggaaatgttttgaaaagatttgttcttacaaaggaactttttaaattttttggtcagatgtgtggtgcatgcctgcagtccaagatacttggaactttttaagaccttttttgggggcacaggaaaatttgtcttctgaactttgtacagattatatttcttataccaagcttggaatacattcaattgaagagytctgtaagtatttatcaaatacttactataggtttattattaaaattggtactttggaaagagaagcataaaatgctgacatagtatggtagacacagaaatgtggtgcccagatcccgttttgagaaaggtcttgctgttgagctgtggaaggtgtggttggcaggtagcatccaactgtcacctccttcagggtcaacctcatctgcagagaggctctccactgagtgtaccttctcggggaagcccacagctggtgaagccttggctactttggctggatatgggaagcgcttatgggcagcacttcctaataccaagtgtt

SEQ ID NO: 424773 - DNA, 547 bp, Homo sapiens
aaaagatttgttcttacaaaggaactttttaaattttttggtcagatgtgtggtgcatgcctgcagtccaagatacttggaactttttaagaccttttttgggggcacaggaaaatttgtcttctgaactttgtacagattatatttcttataccaagcttggaatacattcaattgaagagttctgtaagtatttatcaaatacttactataggtttattattaaaattggtactttggaaagagaagcataaaatgctgacatagtatggtagacacagaaatgtggtgcccagatcccgttttgagaaaggtcttgctgttgagctgtggaaggtgtggttggcaggtagcatccaactgtcacctccttcagggtcaacctcatctgcagagaggctctccactgagtgtaccttctcggggaagcccrcagctggtgaagccttggctactttggctggatatgggaagcgcttatgggcagcacttcctaataccaagtgttagggagctcctaagctccttacccaattagcccaggctc

SEQ ID NO: 424774 - DNA, 622 bp, Homo sapiens
tttcactttatatgtgaatattaacaactgtgggaaaatgaatcatgcataactctactccttggctgttcacagccatgtgcccccagtccaggtgtttgaggtctggtcctcaggcccttcctgggcagccacagtcaggtaaagggattaattctgcaacagatgagaattcgcccagtcggtttcaggcttctgctagatcctgaggagccagaaaagctaacatggttccctgaagcactgggtctcaacacttaatgggcaaaaggctcacctgggggcaaaggaggcattaaaaggcagatttcaagactctaatggcattttacagaggcagtttctgggcaggggccagaaaccaaaaagggtattttaaagagtcccacagctgattctgcagcagtcccatccctggtcctgggctgagaagccctgctcrgtgtggtgagtggatctcaggaaggggaaagagcttcagcagacatgggcatgctacagagcaaatgctgaacgttttgaggttggaacagaaactgaatttctctcacagctacgtgcattttcttccacgtggcttaatgtgcagtcagcagcttggaaaagagttcaagcctaaaca

SEQ ID NO: 424775 - DNA, 552 bp, Homo sapiens
taaacattgattccatttattaaataaattccrtttaataaaaataggcctaaacatattgcctatttattcttgtgtgaattttggcaggttgtgtacctctaaaaaataattcatttaatctaggttaccaaatttgtaggcattaagttgttcataatattcttttattatccttttcatgtgcatagcatctgtagtggtgtgcctctttgatttctgatattagtaatttgtgtcttctcttttttcttagcatgtctagaggcttacaaactttatcgatcttttcaaagaaccagttatagattttgttgattttctttattaatttcttgttttcaatttcattgatttctgctctaatttttatcagttttcctactttgaatttaatttgcccttctttttctagtttccttagactattgactctgtatctttcttttctaatacatgtcattcaacgctacatatttccctcaaagccctgcttttgctgtatcccacaaattttgataagttgtcaaatacttcaaaatatttttaaat

SEQ ID NO: 424776 - DNA, 437 bp, Homo sapiens
attaaaaataatattatatatattaacaatatataaatttattttgttaactagataayacttttggacaaattgaatatacaaaggacttcttgcaaaaattttgcaggacctaactcctctccttcccgcctcagatgagctagagttcaaatcttagctttgttgcttactagtgatgggaataactatgggttaatggggagtaactggcagttaacttaatctctgtgaggctcagtttcttcatggataggactgtgattatatttacattgtgggatgtttgagaatattaaataatatggaatggacagagtagccaatataatccctggaagatagcagtaggtgccctgaaaatgttacttctcatttttctcatcttctactcttttacatgcaagaaaataaattgtctctatggatgaatgtat

SEQ ID NO: 424777 - DNA, 646 bp, Homo sapiens
ttagctttgttgcttactagtgatgggaataactatgggttaatggggagtaactggcagttaacttaatctctgtgaggctcagtttcttcatggataggactgtgattatatttacattgtgggatgtttgagaatattaaataatatggaatggacagagtagccaatataatccctggaagatagcagtaggtgccctgaaaatgttacttctcatttttctcatcttctactcttttacatgcaagaaaataaattgtctctatggatgaatgtatgaattctctttattaggagaaacatcaactatgtaattcaatgtaatttttttttctgctttagctgccaataatctctaagccaaaagtattgctcaagtattttaatctagtcagttcttattctggcaagactactttcttgtgtatctttcctatagatgaggatcagttttcaatcaaatcatctcaattatcccaatgcactaaattcataaatacacatcaatttaggtacaaattatacatactagggaaagcaytgcattaaaaataagaaaacctgagatttgctcccagctttttcactatctgttgtgcttagacatataatattaataggcttcagtagtattatggccatg

SEQ ID NO: 424778 - DNA, 563 bp, Homo sapiens
tcattcttcttactagttttttccttaataacttgttttgccccaaacttgactatttagccgaaaattcatgtttcccaaaaatagtattatataataggctatataatgctagtattatctgcctacaaattccattgtctacaatatagccttgcctgttttgttcaacctagagagcctacaatcrtgtctaaataaaactcattgactattgatacgcctgttcccctaaaatgatgacataatttaaaaatagtaaattgacccaaccagagtaagcaggtcctcattaaagagcaagataggcagagctaaatgcacacaagtcatacatcacttaggacaagaagacattctgagaaatgcatcgtggggcaatttcattgttgtgccaatatgatagagtgtacttacataaacctagatggtgtagcctactacacatttaggctatatggtagaggctactaagcaacaaacctgtagagcatgttactctactaaacactgtaggcaattttaacacaatggcatctgtgtatctaaacataggaaaggta

SEQ ID NO: 424779 - DNA, 551 bp, Homo sapiens
tctatgcattaactatctattacatacataacatatccatcctgggagctcaaagttaagcaaaatatatctctgtgtaatctcttatccttaggaaattctttggcagaatcagccctgctgcggaaaaaaaaaaaaaggcagacygtgatcatccctctggtcctgaatggagtgaatgagacaaaatcttgttttcacagttcaagtttctttgcaggtatagatgctagccagtagaagaggtaaaacaatgtaaatgaacaaggacgtggtgattttgactgagcctatggaagataatatggactcaagctagccattatatacatactcagtttccttgcttcatgactgctcccactgtctgtggcacaaattcttcctgaataccaacctgaacttctgctcagaggagtttacggacaccatgtgtgacaccacctctaattaacgtgtgcatggattttcttcactgtaatggcattaccatgaggaagaagcctgttgccagggcaacagtactgtggattcttcccagtgcagtcact

SEQ ID NO: 424780 - DNA, 581 bp, Homo sapiens
agtcccaactggcataatatctctactaaccttcagcataatgtacccccattttcctattcatttatttgaaaacatgaaatcacatttaataatatgtcaaagtcatttcaagaacatttctaatgcaaaagtaatttaaaattaaatgttaccatcccagaaaaagtcaaagataaaaatactgaaactaaaaatatgatcagcagatgaagaggtggaagtaacacatcccaaactttcatgatatgactttagtttttcccctgctacaaaccaaatttacacttctaattttagtaattattttacaatcttatttttccctgtcttttatcattgccatttggttttgcttggactattttgatcccaatcaatcaatcaatcaatgagtaaacatcttcaaaaacatctcagcagctaaacaggacattgcacaagagattaaagaaactctaactacacctacattcaagatgtgttttrtactgtttgagagaacagttataaacacatccgcatctagaataccagcctacacactgcagatgctcaataaatatatattacataataaa

SEQ ID NO: 424781 - DNA, 588 bp, Homo sapiens
gattctcatgtatagatcacagaagcaaaaggattactcttcaaaattagacatttgtgttatttactaatatgaaattatcatggtcttccatgcacagcaaatatccaacacaatgctgttttttaataagcaaagctcacaggcaagagcattgtccaaaataggaatgttcacatactatcagttaagagcactctcttgattttcttgctaaaacaagattattccataaaaattaatattctgaaaacatttatttacttcaataattttaagagggcttaaaatattagaatactaaaattttcctattgttaataaaccataattttgagatcccaataaaactgytgacttaatggtgatattaattatctttattagccatttattttcatggtttaaagtaggagtttgtgctaacaaagggctgcacaaaagtgcaaaacagtcataaaaacccagtgttttgactctcttaatttcattacccatagaaaattgaaacaaatgtagtcattcttattttaatgatttataacggtgaactttgcaaatttaccagatacagcaataaatatttgt

SEQ ID NO: 424782 - DNA, 588 bp, Homo sapiens
gattctcatgtatagatcacagaagcaaaaggattactcttcaaaattagacatttgtgttatttactaatatgaaattatcatggtcttccatgcacagcaaatatccaacacaatgctgttttttaataagcaaagctcacaggcaagagcattgtccaaaataggaatgttcacatactatcagttaagagcactctcttgattttcttgctaaaacaagattattccataaaaattaatattctgaaaacatttatttacttcaataattttaagagggcttaaaatattagaatactaaaattttcctattgttaataaaccataattttgagatcccaataaaactgctgacttaatggtgatattaattatctttattagccatttattttcatggtttaaagtaggagtttgtgytaacaaagggctgcacaaaagtgcaaaacagtcataaaaacccagtgttttgactctcttaatttcattacccatagaaaattgaaacaaatgtagtcattcttattttaatgatttataacggtgaactttgcaaatttaccagatacagcaataaatatttgt

SEQ ID NO: 424783 - DNA, 598 bp, Homo sapiens
catacatgttaaggattgttatgtcttctgacataacagaagacataacaatcttttgcgtaatgtcattgtgtaatgccattatcatttatcattgtgtaatgccattattaatccctcatatttctcattttaaagtctgctctgtattaaattaatrtaactactcctgctttttttgattggtattagcatggtgcatttttttcattaatttacttttaatctatatgtgcctttatatttaaagtggttgcagacaacataggctttgtcttattttttgatccactctgacactctctgtcttttaagttatcattttgacctttgatgttcaaaatgatcattgatataattggataaatatccaccacattttctatttgttgcctttgttcttggttcctattgttgtgttccactcttttctgccttttgagattttaattgagcattttatataattctgttttatctcctttcttggcatgtcagtttcatttctttttttgactctaatgtttgctctatagtttgcaatacacatttacgatgaatccaagtctacactcaaataatgttatacctctgtaca

SEQ ID NO: 424784 - DNA, 598 bp, Homo sapiens
catacatgttaaggattgttatgtcttctgacataacagaagacataacaatcttttgcgtaatgtcattgtgtaatgccattatcatttatcattgtgtaatgccattattaatccctcatatttctcattttaaagtctgctctgtattaaattaatataactactcctgctttttttgattggtattagcatggtgcatttttttcattaatttacttttaatctatatgtgcctttatatttaaagtggttgcagacaacataggcttygtcttattttttgatccactctgacactctctgtcttttaagttatcattttgacctttgatgttcaaaatgatcattgatataattggataaatatccaccacattttctatttgttgcctttgttcttggttcctattgttgtgttccactcttttctgccttttgagattttaattgagcattttatataattctgttttatctcctttcttggcatgtcagtttcatttctttttttgactctaatgtttgctctatagtttgcaatacacatttacgatgaatccaagtctacactcaaataatgttatacctctgtaca

SEQ ID NO: 424785 - DNA, 524 bp, Homo sapiens
tattgctttcattcttttcacttatatgtaagcatatatatttatgtatgtgtaaacatatataatcaatattatgttgacattatcatttagaacaaactaatatcttttagatcagttaagaatcaaaacttaagtttttgttttctttattccttctcttctcttttccttcatgtatattgtagttgctgacctatattattttatttttctttagcaaacttttaaaaatattccttgcaaggcaggtctactgggaacaaattttcccaatttttgtttattaagggtaatttcacggagtacagaattttgtgttggtagcttttttctctcaacgttaaatattttagtctactccctccttgctttcatgatttattaggataatcaaatgtaattcttattttttacaggcaagatatttttcctcccagcttattttaggctattttatctttgatttgctatagtttgaawctgaagagttgatatctgaaagaggaagaaagagaaagtga

SEQ ID NO: 424786 - DNA, 566 bp, Homo sapiens
ttaactttgttatataaatctcataactagacagtttcatattcgttttggtcaaatcgaatgcaaggaagattatatgggagggaaataaaattagaggtgaggtttggtggtttggagagccatgatcataactttttcatgcttgttagaccagagatttaactgcaatttcaagtttaactttagagttctgtggygtaacttatatagtagaagttcaatacattgacagaaacaaatagaggaagagactgttattgctcataggcactgattgtcttgtaagtgaccccccccccaaaaaaaacctcattttatttagaggttctctttaaaatccttaaaataacttaataaaattaattgtggaaaaaacgtgaatgtgttgaataatggagcaacaggattagaggtagatcaggtttaaagccctacttcgctacctcaccagctgtctttttggtttcttcatagataaactgagtgtcattatacctctgcagcagtgcttaggttgttgcaaattttaaatgataatgcatataaagccattttcacagtat

SEQ ID NO: 424787 - DNA, 616 bp, Homo sapiens
aacactttctgagagttagaggaaaaatagccgatttagtttggatatttgtcctctctaaatttcgtgttgaaatttgatctccagtgttgaaggtggggccaagtggaagaygtttgggtcatgggagtggatccttcatgaatggcttggtgcactccccatggtaataagtcagcctcactattttagttcacccaagagctggcttttgtgttgctttgttttgagcttcactcttcacttcacaacagctttgctcttgtcacccaggctggagtgcaatggcgtgatcttggctcactgcaacctctgcctctctggttcaagcgattctcctgcctcagcctcctgagtagttgggattacaggcatgtgccaccacacctggctgattttgtattttagtagagataggatttcaccattttggtcaggctggtttcgaactcctgacctcaggtgatccacccacctcagcctcccaaagtgctgggattacaggcgtgagccactgcgcccagccaagagctggtttcttgaaagaacatggtacctcctctcccttcctcctgttctcgccgtgtgactgcctgcttccccttcaccttccact

SEQ ID NO: 424788 - DNA, 616 bp, Homo sapiens
aacactttctgagagttagaggaaaaatagccgatttagtttggatatttgtcctctctaaatttcgtgttgaaatttgatctccagtgttgaaggtggggccaagtggaagatgtttgggtcatgggagtggatccttcatgaatggcttggtgcactccccatggtaataagtcagcctcactattttagttcacccaagagctgkcttttgtgttgctttgttttgagcttcactcttcacttcacaacagctttgctcttgtcacccaggctggagtgcaatggcgtgatcttggctcactgcaacctctgcctctctggttcaagcgattctcctgcctcagcctcctgagtagttgggattacaggcatgtgccaccacacctggctgattttgtattttagtagagataggatttcaccattttggtcaggctggtttcgaactcctgacctcaggtgatccacccacctcagcctcccaaagtgctgggattacaggcgtgagccactgcgcccagccaagagctggtttcttgaaagaacatggtacctcctctcccttcctcctgttctcgccgtgtgactgcctgcttccccttcaccttccact

SEQ ID NO: 424789 - DNA, 563 bp, Homo sapiens
agaacagcagttactatcactccctattctcttacattgcttaatgtttttctaacagcattcattactggtaccgtttttacatttatttgttatttgcctctctcctggaatatgaattctacaagagccaagacttgtttacatttatattctcagcaccggactagacagctcctgacaaggactaggcattaaatatttaatgaacgaaactcactccgcaaaagtcacactatgaatgcattaatgtgtatccctctagatattttctacatacacataaactatttttcagaagtaaattttttcaatgatattgctttcaaaatttctgtgtgtatgtgtgtgtattttcaaacactctctttacctagacttctaggagcagaaagctccaagtccttctctggccatttcagactaaaccttctgtcaccacccttgatccaaccttccaccatccagcttcctttagacctgttgcagctccctttgctatttaacttcatcaatatttactgyccgttctctatctacctgttggtatgcatatatcttac

SEQ ID NO: 424790 - DNA, 552 bp, Homo sapiens
gatagttcttactctataccaaacattgttctactgctcartatattatttaatcttctaccaacttaatgaagtagatactattttaacccccatttttatagatgataaaatgtaggcacagagaaattaaggaactaaagtcacaaagttagaatatcgcaatttgtctttaaatccggatagtttgggtccagagactactcttaaccatatactttgcacataccctgtctcttagggtatgtgcaatgagtaaagaaaagaaattaaaagtaattcttaaagatgcacaatgtggcaattaacaggatagtattgtttccaaattgtgcattttactaaaccagactaatctctttaattgtagccaatttcattttaaaaaaaatagccttaactatttttaatatgtgctattcgtacttgtctaatcatgactgctcttcgcaaaggaataaatcctcctagattatatcagttatacctcaagtgacctgtcccaataatcatcaaaaaactaagtatcaaggatctcattttaagagctgt

SEQ ID NO: 424791 - DNA, 591 bp, Homo sapiens
gaaaattaactacttgttgcacaagcttttcagatctcattctctttctcagtggaataaggattatctataaaacctttttggttagaatgaaagaaacctcctgtgactaatacaagcagacggcataactatagaccactaccctttatttggcagggaaggaccacagtgaaggaaatagtgctttgaatttgaaattagtgaaaatcaacacaaaatagaggtaagtagtcatctgaataaatgacataatataaaaaaggagcttggagcttgaggttcaagctcaagcttgactctgcagtttacttggctgagctacaggtcttccattggagaacttaccaagtgatacccctcaagttctccttcagtcaagcaaccttcagagctctaattttttctactgagtttacttaagcagcagtttcttcatgaaatgagaaagttactgattcagctcatcttgtgaggcatcttttccactatacattcctcttctgatatgctggtgtccraatcagtttttgtgtgtgtttgttttggcctgaatttatcctttcgcgtttaatcacctctgagtaagct

SEQ ID NO: 424792 - DNA, 563 bp, Homo sapiens
aagagaaagaaagatgaatagaaagaagcagcatctgtaatgaatgctactgctcaatgagaatgagtgggattttcagggcaattgggagaatggatggattgacattagawgaaaatcaatggcttttaattaataccaccccaaagagtaaggataatgggggcagagaagtggatgattatacaaaataaggtcaatcctggttagaataaattacactccctatagatggtcaggagtactatgctgttttgtttttgtttttgttttttttaaatctattgagtttcagtgggagaacatataaggaaagaataggagctattcatctcaagcagatagtctgccttcataaataactgccattattaaaacaaggatcagtgtagaggtggccctgatgcccagaatccaaaggtcagctccctgaaagcctccccaaatcacagacgtttactatggcctggcccttttccatctgttacaactttactctgctcactggatttctcctacaactaacaactcaaaaatctcagtttagaattccatagagcaaa

SEQ ID NO: 424793 - DNA, 563 bp, Homo sapiens
aagagaaagaaagatgaatagaaagaagcagcatctgtaatgaatgctactgctcaatgagaatgagtgggattttcagggcaattgggagaatggatggattgacattagaagaaaatcaatggcttttaattaataccaccccaaagagtaaggataatgggggcagagaagtggatgattatacaaaataaggtcaatcctggttagaataaattacactccctatagatggtcaggagtactatgctgttttgtttttgtttttgttttttttaaatctattgagtttcagtgggagaacatataaggaaagaataggagctattcatctcaarcagatagtctgccttcataaataactgccattattaaaacaaggatcagtgtagaggtggccctgatgcccagaatccaaaggtcagctccctgaaagcctccccaaatcacagacgtttactatggcctggcccttttccatctgttacaactttactctgctcactggatttctcctacaactaacaactcaaaaatctcagtttagaattccatagagcaaa

SEQ ID NO: 424794 - DNA, 565 bp, Homo sapiens
attctgcacctcatatctgcatcccacaccactcaaaaaaaagagacaccgtgtcttccctgttcttcccatgagcaaagttatgagattcactcttattgggacaagtttcaatatatgcccttccctaaatgaatcactgtgaccaggagaatggaccattctgattgaccggaactgactgtggccaacacccagaactgaggtgtaactggcagacatgaatggctgctgggatgaccatcacagagtacattgtgatagctattgtaatgtgttaaattaaagaagaaggaaggaattcgtctgaggctggctctccactttgagttcctacataatgaagttcagcataacttggwctgtaaacaaaccaaaacctaatcaaggagtataacaaatagctgagtttcagctaactcctcactccatgaccaaaaaaggcaagtactcaccatgctcaaatgaggcagacacctaactgtagccaaacaggtaattttcctacttggtttctacatttggcctataaaatctggctgcttatactgctactgctgggcgg

SEQ ID NO: 424795 - DNA, 572 bp, Homo sapiens
gttaaaatgtatgctgcatagacgatccagagtattaatcataaaaatctctcttcctcttctatcaccttttacccttcctttgcaaacctatgtawgcttcatatgtctatgctgtgagtttgaactttgaaatttggaatgagtacttcataatgaaaaggaaagaagagccaagttttcaacttaacattgagtacgtgcttacttgcaatgtaaaataactgataacagaagatggaggagtggagagaaaaataaaaggatccaacttcgatttaatgcagatattttcactcatgtaaagatgtgcttaactcacatatgaccattctttgatttaaaaacaaacaaaataaaacaaaaacgttcaaactttcagtggaagctctcaaacaaatgggttttccttattcactacaagcagagttggccctcttatacaatgtaaagtgaaaggccattctcttcccacccatacttgaagaatggatctaggcaacacagcatagcatctactatggcataaaagcaacaagcaagatcctgcaataaagacagcaaatgaattc

SEQ ID NO: 424796 - DNA, 546 bp, Homo sapiens
gtaagaaatatattttctaccaggacaacaacaacaaacgtacgtagaactaatgacatctccttcactctataaacgcattggatatttaaaattcatatgttaaagggcattgctattggcttgattactctttttacaaaactgcttttgtagttagccattttcttgattgtcctaaaacatgtgttcagtgttagaatttgttgcagtaaccatagtttaaaacragttttcattgctgttaatgttattatttttattattttttttacaaattgaacagaaagtcacttaatggagaagacgggctaaagtaaaaagaactaaaaagtgtgttaaaaaagttgcatgcattcagttctgagactcgtgggttgctttaaattgctactaaaaatatctgcgctaaaagctaatttataacacctataaatgtaggtaaacattcattcattcttgcatgtatttattcatatacacagaaatatccattatgtggcagacattgtgctgggggctagttgtagaagaatgtgtgaacag

SEQ ID NO: 424797 - DNA, 546 bp, Homo sapiens
gtaagaaatatattttctaccaggacaacaacaacaaacgtacgtagaactaatgacatctccttcactctataaacgcattggatatttaaaattcatatgttaaagggcattgctattggcttgattactctttttacaaaactgcttttgtagttagccattttcttgattgtcctaaaacatgtgttcagtgttagaatttgttgcagtaaccatagtttaaaacgagttttcattgytgttaatgttattatttttattattttttttacaaattgaacagaaagtcacttaatggagaagacgggctaaagtaaaaagaactaaaaagtgtgttaaaaaagttgcatgcattcagttctgagactcgtgggttgctttaaattgctactaaaaatatctgcgctaaaagctaatttataacacctataaatgtaggtaaacattcattcattcttgcatgtatttattcatatacacagaaatatccattatgtggcagacattgtgctgggggctagttgtagaagaatgtgtgaacag

SEQ ID NO: 424798 - DNA, 630 bp, Homo sapiens
tgcttcaaaacataaaatcttatttcctgaaatgttgcacaactgtaagttaaaggtgtcttagcttcaaaagcaaagactttctttttgttgaatacttagtactgagtgatcctttttcttacagagttgaggattttggcatcttgctgaaggcttaaagcyatttcatccaggcagtgcagtagacagaaaagctcacaatgttttgctgcagaatgtttttaatgaaataatgatcttgggagatgtgaggctgacagctcaagagacagagatatcctgattagccaaagggcgagcacagcatgggtcaacagaaggacaccagcctctacttgtggcttggagcaaatcggccccagtgaaagtgcagtctgcctcttcaccccatctgctaagcccaggcagcatgacccgattagtaccagctgtgagagtgagtgttctgatggagagatagttcaactcaaagctgaaccaactccccagcctgcttccagacagcaccattaggctgtaaaatctctgtattcctactaccctaatcaagcccaaatcaaagacatacccggcagcacattacttactcttttgtcatctttttttgcccaacatcaataacgaaac

SEQ ID NO: 424799 - DNA, 630 bp, Homo sapiens
tgcttcaaaacataaaatcttatttcctgaaatgttgcacaactgtaagttaaaggtgtcttagcttcaaaagcaaagactttctttttgttgaatacttagtactgagtgatcctttttcttacagagttgaggattttggcatcttgctgaaggcttaaagccatttcatccaggcagtgcagtagacagaaaagctcacaatgttttgctgcagaatgtttttaatgaaataatgatcttggragatgtgaggctgacagctcaagagacagagatatcctgattagccaaagggcgagcacagcatgggtcaacagaaggacaccagcctctacttgtggcttggagcaaatcggccccagtgaaagtgcagtctgcctcttcaccccatctgctaagcccaggcagcatgacccgattagtaccagctgtgagagtgagtgttctgatggagagatagttcaactcaaagctgaaccaactccccagcctgcttccagacagcaccattaggctgtaaaatctctgtattcctactaccctaatcaagcccaaatcaaagacatacccggcagcacattacttactcttttgtcatctttttttgcccaacatcaataacgaaac

SEQ ID NO: 424800 - DNA, 555 bp, Homo sapiens
ttgtgtcacctgcaaaaccgtacacatcagcagcagacacttttctaaaagaagacttactttgatatgctcattgtttccttagggtgagaagtatttgtattagtattaaatgactaatgaaaatatctaattkgagagaaaacctgaggctttaatttatcaggatggctagcaataatttcagtgtacatgaaaatgattgcaaaccacataaatatatcccaataaatccaccataaatgtattcccacattaatttcctcttaactagatccccctaaaatgcctacagccactccaacaccagtgaacctggaggaaatgtgatagaaggaaatcagagggaatatcatactctttttaaatttttatgaaaatgtgaacatgttaacaaagttttagtgttcttctcaaggccatgggagggtctgatgtaagaaaaggctctgaaactttaaatttttcagttttacagtaagtaggtttgcttatgattttatatatgtgaaagttatatactcaggtaattccagaaatttcaatccaaatatg

SEQ ID NO: 424801 - DNA, 658 bp, Homo sapiens
taggtccaagggccaatggagttcagaggtatcataaaactggccaaagaacagagaactagaaagtggtagagaaaagacaaacacaggtgaacaggtcaccgttcaggggagacaccaagtcccttataaaagaagggaggtcattatctgctctgcagaaacagtcaagtgagttctttgacaactgcataactctggtttaaaatttataaaaaatgaaaaaattcatattatatatggttttcagrtgaatgtcacctaaaatgtatacctgtaaatgaaacagtgcataaacattttctttcctaaaataaatccatttggtcagtgtttatactgttttgaatgccaagctatagtagaatgaggcctaatgacttttatgaatattcacagatgatcattcttactatactcaagaaaatattgagggccagctttatctaaaattccctcaagcgtatgtcctaattttttttgctcgaatcctatcatgacttcttttaaaaatctgagttttcatcgacagtccatataagacagataaaattaaaaccagaacggaggagatgaacatcttgtacaacttcatgtggcaaaagattcataaaattgaataagaaaattattttttttctttttgagacggagtctc

SEQ ID NO: 424802 - DNA, 658 bp, Homo sapiens
taggtccaagggccaatggagttcagaggtatcataaaactggccaaagaacagagaactagaaagtggtagagaaaagacaaacacaggtgaacaggtcaccgttcaggggagacaccaagtcccttataaaagaagggaggtcattatctgctctgcagaaacagtcaagtgagttctttgacaactgcataactctggtttaaaatttataaaaaatgaaaaaattcatattatatatggttttcagatgaatgtcacctaaaatgtatacctgtaaatgaarcagtgcataaacattttctttcctaaaataaatccatttggtcagtgtttatactgttttgaatgccaagctatagtagaatgaggcctaatgacttttatgaatattcacagatgatcattcttactatactcaagaaaatattgagggccagctttatctaaaattccctcaagcgtatgtcctaattttttttgctcgaatcctatcatgacttcttttaaaaatctgagttttcatcgacagtccatataagacagataaaattaaaaccagaacggaggagatgaacatcttgtacaacttcatgtggcaaaagattcataaaattgaataagaaaattattttttttctttttgagacggagtctc

SEQ ID NO: 424803 - DNA, 658 bp, Homo sapiens
taggtccaagggccaatggagttcagaggtatcataaaactggccaaagaacagagaactagaaagtggtagagaaaagacaaacacaggtgaacaggtcaccgttcaggggagacaccaagtcccttataaaagaagggaggtcattatctgctctgcagaaacagtcaagtgagttctttgacaactgcataactctggtttaaaatttataaaaaatgaaaaaattcatattatatatggttttcagatgaatgtcacctaaaatgtatacctgtaaatgaaacagtgcataaacattttctttcctaaaataaatccatttggtcagtgtttatactgttttgaatgccaagctatagtagaatgaggcctaatgacttttatgaatattcacagatgatcattcttactatactcaagaaaatattgagggccagctttatctaaaattccctcaagcgtatgtcctaattttttttgctcraatcctatcatgacttcttttaaaaatctgagttttcatcgacagtccatataagacagataaaattaaaaccagaacggaggagatgaacatcttgtacaacttcatgtggcaaaagattcataaaattgaataagaaaattattttttttctttttgagacggagtctc

SEQ ID NO: 424804 - DNA, 658 bp, Homo sapiens
taggtccaagggccaatggagttcagaggtatcataaaactggccaaagaacagagaactagaaagtggtagagaaaagacaaacacaggtgaacaggtcaccgttcaggggagacaccaagtcccttataaaagaagggaggtcattatctgctctgcagaaacagtcaagtgagttctttgacaactgcataactctggtttaaaatttataaaaaatgaaaaaattcatattatatatggttttcagatgaatgtcacctaaaatgtatacctgtaaatgaaacagtgcataaacattttctttcctaaaataaatccatttggtcagtgtttatactgttttgaatgccaagctatagtagaatgaggcctaatgacttttatgaatattcacagatgatcattcttactatactcaagaaaatattgagggccagctttatctaaaattccctcaagcgtatgtcctaattttttttgctcgaatcctatcatgacttcttttaaaaatctgagttttcatcgacagtccatataagacagataaaattaaaaccagaacggaggagatgaacatcttgtacaacttcaygtggcaaaagattcataaaattgaataagaaaattattttttttctttttgagacggagtctc

SEQ ID NO: 424805 - DNA, 562 bp, Homo sapiens
tattgggtgcagctgtgtacaaaacagacatggtttcaggactcaacaagctcacattatccaggaaattcatttatacagggtatatttaatcatctatgtttccttattaggctctggcaattatgggatacatttatttcaggtagttttctaactctggtggcaaagggtaagcaaytgaggaaaagctttctctcatatccagagtgtatccttcttttgagtttttcatttaccttcattactctccttctctttctaatccttgatccccagtccacaaagaagttagtaaattaattgcttatttatttctggccttttacgagatagtgaactgtgtttttcagcatagagaaatgaacttttatgtgttatttctgcccattcctggcattctgccctattctctcagtaaatacagtagtcgccatccctgtgagagctcaagacatgttggatggacggatggatggatgagtggatggacatgtagctgtgctcaaggagagaatctgttagactggtgcttcatggaagtaaccacgactgtttattt

SEQ ID NO: 424806 - DNA, 620 bp, Homo sapiens
ttcttgagtttactgataggaatacagactctacttccaatcagacaatgctttagccaaatatatagctggagggatattaggttcagttctttattctgaggatacagtgggttggaaaaatcatgagaatcaagaagattttcaggatataaaataagtactttttgggaaaacaataaactatgtgattttacttggcaaactgaaagctgaggagagatttagtaaaaatcrcaggatcagaagggccatctgtttagattttatttacttatctattctctcatttcatttctagtgaagatacttccattttagaaagataaaatgggctcctaataaaaaagcagaaatttaagttagaagtgagaaaaatcttctggcagcaaagtttattaaatcgtgcagtgactctccaagtcagttttgcaacttctttgctaaagttctttaaaactaagttagtatctcatcattgagtttctttaaattattgtctagaggaatggattctgacctcatgagatcctttcctattcaaacattttatttcttattgaaaaaaaatacacagcttgcttttgaataatgctttaactttttgaaaaggcttaaca

SEQ ID NO: 424807 - DNA, 558 bp, Homo sapiens
tctttaatcaaacttttaagataatgccactttttctctcgttgtacccatggctcactcgcatttaaagaatgagagggaactgtgagattttcrttctgatggccttgcgccttctaaactccatgaatggagaagcattttaacaataacttataagttattttgatgaaacttgaaagaaggctttttttttaggccccagaaagaagagagccctgtttttctgcttggactagtttttgttttatttttcagaccttaaaggaacacttaagtgtcagcattccagattataataataaaactgagagaataaagttattttttccaactgtggcatggggtaccatttacttcatagcgatatatatcactgtgtaataggaatattctataagtaaaatgtctgttttgatattttctgtcaactagaaaaaatgaaataaaatgattgagagttttgatgtataaaattacaaaatgactttattgtttaattgcacatttcatataagcacccaggtacggtctttttatatatcatcatgtacgttg

SEQ ID NO: 424808 - DNA, 398 bp, Homo sapiens
aactctattatgtacacacagctttctggcttgatggatcacacaatgctcagttcactgtggcatctaaggctacagggaaacaggaatccaagggcaaatgttcagtctactagtctagatgttgcttctcaaaagtaggataattatctacagaagatggcatggcttggttctacaatattaagtccatatagtgcttcagctataggtgctttacaaaagttccatacacatacctatctgccacagacatttcaagaatcattgagccagctgggtcatacagcccaagtttaagagcagcttacatagcaaytcggacctgtgacaaagccttctcttgcttgaagtcccacttgaaactcgcactctttcctagtactccaaaaatgggg

SEQ ID NO: 424809 - DNA, 619 bp, Homo sapiens
gatttatttctcagcctctggcacacatgcttctttccaaaatatctaggacagttgctgtttcctgctcttgactcctatcaccctaatatcagcgtagtggtctgatatgaagtctcagtggagaggtgatcaatgctcctgtggacaagattatgatggagggctggagtactgatatagctctacaaaagaagagcaaacggctatttctggccctgcaaactgamagcaatgtgcttcttatggccttttactgacatacataaagaaaaaaaattcaaacacatcaataaccagatatcagggggtgtgtttatttgttccagtaaataaaccacatctggaacaacagctgtgactggagttaaagattaagttcatacagaccaccgtaattattcaaagtctgcctgtattttgctcaagacaaataggtgaggttggatggggatatggtaggaatcaaaacctctgctttcattgagtcttcaatggtggcatctttgggagaaacacctctaagtcctcatttgtaaactaagttagtagctgtcttcacacgtgccttttctgcctctcctgtgtatgcccattctaacacagctcttccattcta

SEQ ID NO: 424810 - DNA, 602 bp, Homo sapiens
ttctgaactttcatgaagctaaagcaaatagaaaaaaaaaaatagagagtgagagaaaaaattaatgaaccgtctcatcaaaagaaaaaaaaattccccaaaaccaaacacttcatcatcagatctctgaactaaacatcttcagatatgcttgctccactcatcagcagagaaaatattcattaatcagaatgttcagtacttatcctgtttagctccattgttaacagaggggtgaaagagataaaaatagtattagttactgttgttgaaaatatgtctaaaccattttggttctttgacctaacataaattaatacttgaaaatgtaaatcttttacaaattactgatggctccatgtaaacactatttctcttaatggagtaatgattcatggaaaaacttctatcaaaactttttcatctttaytatggaaaagcataatttatgtttatagaccaatgttgcacttaaaaattacaccctaaactgcatttttgaaagtattattatagaatgaaccaaaatattatctgggtctagaacataaatattagtgtagctatctgggttagagaagttaatagaatgtaggctgaag

SEQ ID NO: 424811 - DNA, 596 bp, Homo sapiens
tcttcacatgtgtaagataaaaaataatgctatgaacaatrctggtagaagttttcctggtcccatttactgtgaggtccgacaacagtctgtcatgtttggtacctcagtccaagagtaactagccaacagttgtgcaaatgtttgtcacatattgagaattggctcacaacatctgtccttctggcaggttagctttgctggtagttaacttgaagctctataattctacttctttggtttatttagccaaagagtaaagatgagaaatatgactttaagacgtgtttcagatctagaactatatttactcagagttgtttctttatatcctgaagaataaatggttatttggacaaggaaaaagtagaggattggccaaccattcctgataaggcctatggtaacgataatggtgtgtgtgtgtgtgtgtgtgtgtgtgtgtgtgtgtatgatgggggtaatggatgacaatctcaggaggttgagttatttgtccctggcctgaaaattaaaaaggaagaaatagcttgtattgacaataatcatacagaaaacctagctttaatgatttcaatcaaatttgctgccctatt

SEQ ID NO: 424812 - DNA, 596 bp, Homo sapiens
tcttcacatgtgtaagataaaaaataatgctatgaacaatactggtagaagttttcctggtcccatttactgtgaggtccgacaayagtctgtcatgtttggtacctcagtccaagagtaactagccaacagttgtgcaaatgtttgtcacatattgagaattggctcacaacatctgtccttctggcaggttagctttgctggtagttaacttgaagctctataattctacttctttggtttatttagccaaagagtaaagatgagaaatatgactttaagacgtgtttcagatctagaactatatttactcagagttgtttctttatatcctgaagaataaatggttatttggacaaggaaaaagtagaggattggccaaccattcctgataaggcctatggtaacgataatggtgtgtgtgtgtgtgtgtgtgtgtgtgtgtgtgtgtatgatgggggtaatggatgacaatctcaggaggttgagttatttgtccctggcctgaaaattaaaaaggaagaaatagcttgtattgacaataatcatacagaaaacctagctttaatgatttcaatcaaatttgctgccctatt

SEQ ID NO: 424813 - DNA, 596 bp, Homo sapiens
tcttcacatgtgtaagataaaaaataatgctatgaacaatactggtagaagttttcctggtcccatttactgtgaggtccgacaacagtctgtcatgtttggtacctcagtccaagagtaactagcmaacagttgtgcaaatgtttgtcacatattgagaattggctcacaacatctgtccttctggcaggttagctttgctggtagttaacttgaagctctataattctacttctttggtttatttagccaaagagtaaagatgagaaatatgactttaagacgtgtttcagatctagaactatatttactcagagttgtttctttatatcctgaagaataaatggttatttggacaaggaaaaagtagaggattggccaaccattcctgataaggcctatggtaacgataatggtgtgtgtgtgtgtgtgtgtgtgtgtgtgtgtgtgtatgatgggggtaatggatgacaatctcaggaggttgagttatttgtccctggcctgaaaattaaaaaggaagaaatagcttgtattgacaataatcatacagaaaacctagctttaatgatttcaatcaaatttgctgccctatt

SEQ ID NO: 424814 - DNA, 610 bp, Homo sapiens
attgaactaatcatgaaaaagtggaaacagagataaacatataagttgaatacactaatgcattctagcataagcacataaaagcattcttatttgtaccctaagtgaataacagtttagattaaaaattgatgaagttgtgttaggaccaagaggttgtaataatagctttgttcattcaaagtagtcttcatgaagaatacgaggctgggtgtttttcaaaacaggtatgtatgaagaaggaataattttctagatcataacaaatattaacacattttgaagggtgcattgtttattgcttaaaaattccgttactagttatttgccacaataattggggatgtagcaatraagatttccattgcaatgctaattagaatagctaaataattttgacattcaaagatatcaaactacaggggactgccccagcatctcttgaagttgcataattggcacggtggctgcaccctcttctaagatatgtagatagtgccccaagatgaggggtgtaaaagcctggatgctgtggaagccgtcctgactgttgagaagaaccagaagctggtccttctgtatctgcttgccctgggttctgcccgcacag

SEQ ID NO: 424815 - DNA, 526 bp, Homo sapiens
gaagtgaactcagcctgcatgaaggcctgtagacaaggcagggygtgacactactggaaaactacaagaagtctgctatggcatatatataaaattaagtttaaagaatgaattgctggactgtagagaacatggggaaaatggcatgaaatgagatttgagaagctggattacaagggaccttatagaatctataaccttataaccatgcagtcaatattaacctgaagacagtggggaatcatatataagccagccctgtctccatcccagaaggaaacaattttctttttctgttacgtccggagcatctccttattctttagctctcttacccctcatagcctcaagtaacatcccacagagataaagcactttattctcctgtgagaagaaatctgcatattttttcatttacagttctacacttttgtctgttgatgaagaacccttataatttgattttgtgtagaggtgggagtaaatccggttgtgccaaagcttcactttgaatgacaatgttttt

SEQ ID NO: 424816 - DNA, 526 bp, Homo sapiens
gaagtgaactcagcctgcatgaaggcctgtagacaaggcagggcgtgacactactggaaaactacaagaagtctgctatggcatatatataaaattaagtttaaagaatgaattgctggactgtagagaacatggggaaaatggcatgaaatgagatttgagaagctrgattacaagggaccttatagaatctataaccttataaccatgcagtcaatattaacctgaagacagtggggaatcatatataagccagccctgtctccatcccagaaggaaacaattttctttttctgttacgtccggagcatctccttattctttagctctcttacccctcatagcctcaagtaacatcccacagagataaagcactttattctcctgtgagaagaaatctgcatattttttcatttacagttctacacttttgtctgttgatgaagaacccttataatttgattttgtgtagaggtgggagtaaatccggttgtgccaaagcttcactttgaatgacaatgttttt

SEQ ID NO: 424817 - DNA, 588 bp, Homo sapiens
gaaggccttctatattttaatgtattccaaacgccaaaacaaaagaatgcaaacacaggattggcctgtgtgtgaggacagcatcactgggagggaacttgttggtgtccaaggaaatataagggggaagtggaaaagtcagatcgccactggggtttgtcagctatcaaagcaggctatgtctcttccctgcattcatcagcctagcaatactcgctaaaattgttttaaaaactaactaaataaaactgggyaataatttttgttgtcagagtttggatctatagttccagaatttattctggttttctctcctcatttctacaactaacagaaaagcttttatttaaaaaaaatcacaccagatttcaacataatttattgtttgtatttgtatatgtcatagatcataagatcatgctgaaggcatatatttttagattccctcaaaatatcgatttcggttctttttaaataaaaatgcatgcttatcttaaacaagtaatagaaaaaattccttacataaaaatgttgaaatgtcctttgacaccattcagtggctccttctcaatatatcctcgatttccc

SEQ ID NO: 424818 - DNA, 626 bp, Homo sapiens
ttacatgcttacatatacatgcttacatatatgcacatgctcatacattcactcatattaacatgtttaatattcrcttaatcaaatgaactttaaaaattacacatatagacacatgcatacattcacacttacatgatcacacagtcacttatttacacaaatatgctcacactttcacacacttatgtgagcatgatcacacatttgctcacctaaacatgctcacaaatgtactcaaataaatagacatattggatacactcacacacaccgataaattaacatacaatcctgctcattcatttaatcacataacatatgcacaatttcacttacacagacacacatattcacagtttcatgctcacacacagtaacttatttacataaatgtgctcatactttcacacacttttgtgtgcatgatcacatattcactcatataaacctgctcacaaatatactcaaatacatagatgcattagatacactcacatgcacacaccagtaaattaactacatacaatcctgctcattcaatcacatagcatttgcacaaattcacttacacagggactcaaacagatgtacttggatgctcccactttcactttcacatggac

SEQ ID NO: 424819 - DNA, 375 bp, Homo sapiens
ttcaggatactttgaatgtgggtgttctttcccaaattgccttctgctatttacatttcagagtccttacataactgctctatgcattctattccagttttatggtwgtattcagtggcagagatgaatgaagtgtttttattttatattacctggaaccagaactgatattctaatttccaaacatttctaccactactttgatctcacaaacacacacacaaccaacaaaccaatgccttctttccaaagagaatgaaatatcagtgttgcgaatacccagaagccaataaccaaggctggcattagaagacagaaaccctggcaagtaaagatatgtaaaatactctccattgttcaatgaacagtcccagt

SEQ ID NO: 424820 - DNA, 594 bp, Homo sapiens
gcctgcaacttacatttatgcaaacgggagcttatggcaaaatacaatgagtgctgtccagcagtgacaattgactggaatattgggcagaaagttttcagacgtggcagtgtattacactctgtttgagagacgattatttgtttgctatggggcacttattgaaactgcccgtatgacttgggtacataaaatactcttgaaaccattgctcataatgtcttgagtaatgtctaataagagagataagaaaggaagtgttcagaaatctccataatcaaatgaaaagggtttatgcaggaacatgccactggaggaatgcaaggatgcagtcaatgtgtgcatgcttaggtacagtctcttttcccttaggctaagtttggaaycaactgaagagatgccatattctattgccaccttggtggtgggtctctatgcacagctctcaactgaccacaaaatagctccttaatttatggatggcaattccaaggtggatggacagcatccagtttgggagactgaccgacctaaaaactgacgaacataaaaactctgattgaagaatgtaagaagaaatcagcttaaagggct

SEQ ID NO: 424821 - DNA, 450 bp, Homo sapiens
aatcccagttactcaggaggctgaggcagaaaaattgcttsaaactgggaggcagaggttgcagtgagccgagatcatgccattgcactgcagcctgggtgacagtgcgagtgactgcctcattaaaaaaaaaaaaaaaaaaaaaaaagaatgcttcttggagaaagcaaaggttatgcgtgattttgaaaaatgaaggatgaagaggcactgattaagctgaagacagagggaaggttcggaaagctcatgtgttcatttaacactgcatttaataaatattcattcagtgcctactctgagccagaaagtatgcttggtcttaaagacacagaggtgaccaagagaggcataagccttgccctcatggaacttgcattctgcaggagaagagatgtaagtagaccattgcagagtaatttttctatctggtatgacaaaagagaagga

SEQ ID NO: 424822 - DNA, 564 bp, Homo sapiens
aatctgccttatagccttgtaccactgtcctgctctctggagtcacagtgaacacatctgtgccctgtacccctgtgcagctctacagagggttgaagacattgggtgcacccttttgtgtcttttcttaacttgaataaacattcaaggtcactcaagygttcttcatggtcatcatttcaagggcctcggggacctgcttcctctcctctaggcattgttcagatgcttggccttccccttgcaagtcaactctttcctgcagcaatgaagctcattcatcccaccaactccctggaagcttccccatactcctcatggagcccaacttggatgatgaggtcctcgcctgcctccatagccccaaatctcctactttccctggccttccacattccagttacactctctgctgcagcgttgtctctcgtcccccagcctgctcacagtctgtcctctgtcccaaatcctcttttccctcatattagtttcttagggctaccattaaaagggcaccacaaatttggtggcttaaaacaacagaagtgtactctctcagagttc

SEQ ID NO: 424823 - DNA, 576 bp, Homo sapiens
ttccagtccagctgacatcaagcccctacagcgtcacccagagacagggttactccttctgtattagtgaataggaatcacccgacaggattctgtcgttccctgttagatgctgtatctcctatcatttggtggatggatgggagaaagttgaaattatcacaagggcaacaacagcaacattgataatagctaacacttcttaggcttctactggaacctcatcactagagagcttttgtccatgatcccttcaagtcctcctggggtccctgtgagccaaacaccacattatccacattttcaaagagaaggaattggaggctcagagggatgggcagctcactcagcrtcacagagctgataaaggacagggtcaggatttgaatccaggtctgtgtgccttcagtctataaccctaaggaggggagaaaccagaagccatctatcagaaaatcttttgaaaatgccattcactttcttcacagaattatagttttcagagttagagaggacttaatcgctcttaatgtagtcacatacttgtgtttcacctcacacatgcagttgtcccag

SEQ ID NO: 424824 - DNA, 585 bp, Homo sapiens
gttattgactggttgtgtttggttttctgtcatctggaggtaatgatgtctattctggaggtgcattgggagagctaaattaaagagtggatacaaagcactcaacacagggtctggcacaaagttagtgctcataattgcaagcttaattatcaatataattattgtacctgtgattttacatacaattggcttaaataaaytgtcttggataatctcaacaccctccttctatttcccctttgttgtatttccaacacatttctgtgatcaggtctgataggtccccatttgaaacacctttcaaagataatccaaactcttctgcttgttgttcatggctattcctactgcttcagttagtcctactaatcaaagtaacttcaatacatcatgagtagaaggcatattcttccagcttcaaaaaccctgtcaaaatctgtatgtggtcctaaatcattaccaacaacagttgctgctaggagaatctggaaacttaagagtaaaaatgggaggaacactatgctcctcccattatgttacactattttctactctgatttttatttgtacttttttttttga

SEQ ID NO: 424825 - DNA, 585 bp, Homo sapiens
gttattgactggttgtgtttggttttctgtcatctggaggtaatgatgtctattctggaggtgcattgggagagctaaattaaagagtggatacaaagcactcaacacagggtctggcacaaagttagtgctcataattgcaagcttaattatcaatataattattgtacctgtgattttacatacaattggcttaaataaattgtcttggataatctcaacaccctccttctatttcccctttgttgtatttccaacacatttctgtgatcaggtctgataggtccccatttgaaacacctttcaaagataatccaaactcttctgcttgttgttcatggctattcctactgcttcagttagtcctactaatcaaagtaacttcaatwcatcatgagtagaaggcatattcttccagcttcaaaaaccctgtcaaaatctgtatgtggtcctaaatcattaccaacaacagttgctgctaggagaatctggaaacttaagagtaaaaatgggaggaacactatgctcctcccattatgttacactattttctactctgatttttatttgtacttttttttttga

SEQ ID NO: 424826 - DNA, 620 bp, Homo sapiens
gaagtgaaaatttccatttaggggaaggtgaatctccggaaaggaatgtgggtagctgaagaggtactggaaccagatcacacatttctaacccctgatcccgtgctgctgtagctatagcttgtgctcttgtcttctcatccaggctgtgagctgagccatgactaatacaggcttacagccaccccctgcagtggctaacaaggaacccacccttactgtgtccctccaaacatgttaggcaattcaattcactaasatgctgatatcaaatctcctttgagagggaaaagcagcagaacagacaatattgtgctcagccctgggtttgaattctggctttgctaaatgattctaagcaagtgacgtcatctttttaagcctcattttccacatctgtaaaatgaatgtgaaaatatctatctctagggaatcaatgaactcaaataagaattaatttagatagtgtatgggaagcacctagcacattgccttgcgtatggtaaataataaacagcagctttgctattatcactgttattttaaaaaataccaattcatgaaacactttgtgtggtgtaagcagaaaggaaaaactcaacaaactagggaaagtgaat

SEQ ID NO: 424827 - DNA, 518 bp, Homo sapiens
gtcatctaccagtggacaggccgtcctcagggtcaccgtgcttagctctgagtgcctccctcgtgtatccacagcatacagagtgaacctgcagcacagcaagaaaacagagcaccaggctgtgacttcacagaaggccctgggagttgcagggaagaacagagagtcatggcacatgaggctacaggaaaaatgattttaaaaaaagaatgatamttataaagcatttattgagcactaactgcctactcagcactttgcacttcttaaaagggagggatttattgtcacccacatcttgtcaatgaggacactgagacttagattgtgtatctttccacagtctcagttactgagggacagaatgggggtattgaactcatgcagtctgagtccagggtctgagaagtgagccccattgctatcctttatggctggatatatccatttatatattcattaatttactcatttaagaaatatttattgagcatttactgcacaccaggaagtacttt

SEQ ID NO: 424828 - DNA, 603 bp, Homo sapiens
tgggactagcaaactgagctgccagactcaaatccaaagctctttgtatttcaccaacttgtatttcctattattgctccccttcacctccaagcatgccctgggaaatgggtgttatttgggattttacctcttaggcgggaagccccagagatggaggagtaagaaggagtgacttcacatgttctccacccagacataggccttgctagagtcccatgaacaaactagagctctggccctcatctgggagcaggcagaccagccactagcagccaaaaggaggaagggattgataaatagagagaatgtgggaggagggcaggaaggggattgctgtagccatctccaaccccccaaaaagtcaggcaggagaagtccaattaccctttcagagtaatttccgctctataaagtgatgacttacttcaccgcccagaggtttccatttgccaactggggatagmcaagtcctgcaggggagggagcgacttactgactcttcagctccctggaggggaaaggaacctgggcttggacgtgggctgtgctctgacttgcttttttactttgtgactcacctgccctctctggacctcagtt

SEQ ID NO: 424829 - DNA, 572 bp, Homo sapiens
taattcagaatagctgtgttgaggaaactcaaagagattcaagataacacagagaaggaattcagaattctatcagatgtaacaaagaggttaaaataattaaaaagaatcaagcagaaattctggagtgaaaagtaaaactgatatactgaagagttcatcagagtctcttaacagcagaattggccaagcagaaggaagaattagtgagcttgaagacaggctatctgaaaatacacagtcagaggagattaaagaaaaaaaaatataaaaaacaatgaagcatscctgcagcctctagaaaatagcctcataaggacaaatctgagttatcggccttaaggaggaggtagggaaagagataggggtataaagtttattcagaaggattataaaaaaagacttcccaaatgtagagaaagatatcaatatccaactaccagaaggttataaaatacccagcagatttaacccaaagaagactacctcaaggcatttaataatctaactcccaaaggtcaaggataaagaaagaatccaaaaaaaaaaaaaaaaaagagaaagaaacaact

SEQ ID NO: 424830 - DNA, 568 bp, Homo sapiens
gaaagaataaatgatgaactaatcaaaaataataactataactttttaagacatagacagtacaataagatatatatagaaacaacaaaaagtttaaaagttgggggatgaagttaaggtgtagagtttttattagttttctttttgcttatttctttgtttatgcaaacagtgttatcagcttaaaataataggttataagatagtatttgcaagccttgtggtaacctcagaacagaaaacaaacaacaaacacacaamaaataaaaagcaagaaatcaccagagaaaatcacctttactaaaagaaaaatggagaggagaggagaggaggaaaaagaaaagaagaccacaaaacaaccagtaaacaaataacaaaatggcaggagttagttcttacttatcaataataatattgaaggtaaataaactaaactctttaatcaaaagaaacagagtggctgaatggatgaagaaacaagaccaaataatctgttgcctacaagaaacacacttcatctataaagacacacatagactgaaaacaaaggcatgaaaaaagatattcc

SEQ ID NO: 424831 - DNA, 535 bp, Homo sapiens
ggtagctggtgagcagggataagatcttgccccaggctacaagtcaccctactgagaaagcaaacagggctttcaggcctcacccctccctgcctgctacagcttctgtgtgcatatctgcacttcccatttggccaccccccactcccctggattctgcccaggattaattgcactcaktcaaaattattaccaggttcagctgggagtttccttctccctgtggccctttcccagttccactggctgccctccccaaggacctctgtgagataaagtcaggaatggtttccctgggcttctctggggactgggagtgcctacagggatcttcccactgcttctactactttcatattttgcttggctctctaaaatgatttcagctctaggtaaagtgaaatccttctcctgtgatctggatttttaggttccgcagtaggtatgtgtggtcacaagctgactttcccccccctctcacattttaggcactggtagttttttggctgtctcacggagtttgcagtggcaagct

SEQ ID NO: 424832 - DNA, 535 bp, Homo sapiens
ggtagctggtgagcagggataagatcttgccccaggctacaagtcaccctactgagaaagcaaacagggctttcaggcctcacccctccctgcctgctacagcttctgtgtgcatatctgcacttcccatttggccaccccccactcccctggattctgcccaggattaattgcactcagtcaaaattattaccaggttcagctgggagtttccttctccctgtggccctttcccagttccactggctgccctccccaaggacctctgtgagataaagtcaggaatggtttccctgggcttctctggggactgggagtgcctacagggatcttcccactgcttctactactttcatattttgcttggctctctaaaatgatttcagctctaggtaaagtgaaatccttctcctgtgatctggatttttaggttccgcagtaggtatgtgtggtcacaagctgactttyccccccctctcacattttaggcactggtagttttttggctgtctcacggagtttgcagtggcaagct

SEQ ID NO: 424833 - DNA, 591 bp, Homo sapiens
taatcactggaaaacagtattttagtcctatcttgtgttttagccttcatattataatttccatttttaagtttttwatgtgtttgtaattaactggaattaaggcatgtttagcaattttttcatcagtttcttgttatatctcagacattagacttgtgatcatctttcttcttcatgaataacaacctttaaaggttcctttactggtaagtgctctcacttatttgttatttgaaaaatgtctttattgtttgctcttcttaaaagatggtttctgggaatatttttccaggttagtagttatttcacctttctagatattgtcccatagtcccttaaattccactgttcctcttaggaagtcattcttaggcctagttgtcatttccttataagaaacctgttttcctatctggtactttaagatcatctgtttgtctgtgcgctgctgcatcactgtgatatatctaggaattgatgttctgataaatcctttttgtaatatgttgtgctttttccaactaaagaaccataactgccattaattctgaaaaaataaagattccaatccaaaaatagagtatatcc

SEQ ID NO: 424834 - DNA, 591 bp, Homo sapiens
taatcactggaaaacagtattttagtcctatcttgtgttttagccttcatattataatttccatttttaagtttttaatgtgtttgtwattaactggaattaaggcatgtttagcaattttttcatcagtttcttgttatatctcagacattagacttgtgatcatctttcttcttcatgaataacaacctttaaaggttcctttactggtaagtgctctcacttatttgttatttgaaaaatgtctttattgtttgctcttcttaaaagatggtttctgggaatatttttccaggttagtagttatttcacctttctagatattgtcccatagtcccttaaattccactgttcctcttaggaagtcattcttaggcctagttgtcatttccttataagaaacctgttttcctatctggtactttaagatcatctgtttgtctgtgcgctgctgcatcactgtgatatatctaggaattgatgttctgataaatcctttttgtaatatgttgtgctttttccaactaaagaaccataactgccattaattctgaaaaaataaagattccaatccaaaaatagagtatatcc

SEQ ID NO: 424835 - DNA, 262 bp, Homo sapiens
ttgtgatcatctttcttcttcatgaataacaacctttaaaggttcctttactggtaagtgctctcacttatttgttatttgaaaaatgtctttattgtttgctcttcttaaaagatggtttctgggaatatttttccaggttagtagttatttcacctttctagatattgtcccatagtcccttaaattccactgttcctcttaggaagtcattcttaggcctagttgtcattkccttataagaaacctgttttcctatctg

SEQ ID NO: 424836 - DNA, 611 bp, Homo sapiens
ttttaccttcgtcataaaaatacatttccttgggagtcagataaggcctttgtcttcagcttcaaatcttcaagrgtctgggttgcatttttttttttttttaatgtaaacacctgggaagaaaactctccagctttcctcgaggactatttgcccacctttgatattaatgttattgttatataacacctacaatataattgattggctcttgggaacataaaagaaacttgtattatctttttaaatctgaacaattggctcccttggggaaacaaatggctgcgatctaacttttatggtgtaagaaaatgttcttgagaaaagtgagagctatactctaactttatagtatattataatgtattataatatattagattccatagctccagaggctgtggttttacagaacaactacaaaactaaaatccaggaaagatttattttcccacagtacagtgggtgtttttttttgtttgtttggttttgttttgttttcaatattctgacaatttctgccttttaatcaggctgtctcatttgttaatgtctaatgcaattatccacatggttggtttaagtctgccactttattttttatatactac

SEQ ID NO: 424837 - DNA, 585 bp, Homo sapiens
catataaagtgttctaatttttcatataaattgtaaataaatgtggcaaatgttcacagttcttaaattaaggacaaaagcaaakattatataattaagttcatcttttgttcatgtttatatatttatattttatatatgcatagtaatttctttttgaggtttgtcttaaatgagtaaaaagtgtttacatgagtgaagtgtgggttctgtacacgtctatatgactaatgttcaaattgtatgaatacccatacatatataagttatttatagtgtgaatatatgcattgtatcatgaaatatgaataagtttataatccatgctataaaatgatacaaattgtattactactttatagcattaatgtacacaaatatatttaatttaccaaaaatataaggtaaaagtaaataatatttttgtgaattttgaaacattgtggtgtgagaagcactagtttgctattgtggttaaggcacatttttatattagaatatattgagtttaaaaatagtacagaatgtttaacatattagcagtaatttctaggaaaaacctttatgaagtttagtataaataga

SEQ ID NO: 424838 - DNA, 593 bp, Homo sapiens
aacatgtggtatttgattttgtgttttgctgttaattaccttaagacagtggcctccagctacatccatgtcactgcaaaggatgtgattttgttcttttttatggctgcatagtattctgtggtatatatcaccacatttttttatccagtctaccattaatgggtatcwaggttgattctatgtatttgttgttgtgaatagtgctgcaatgaacatacaattgcatgtgtctttttagtagaacaatttattttcctttggatatatatccagtaatgggtttggtggtttgaatggtatttctgttcgaagttctttgagaaatctctgaactgctttccatagtggctgaataaagttacattcccatcagcagtgtataagcattcccctttcttggcaacacaattttataacagatttttcctctgaaatatctacttgaaattcctgacagtgttttcctaaaacattttaacataaataaatgcataaatatttttctaattatttcattttaaatacaaatacttactaatttcactttacatggtagaaaatgactggttttgttaaatattttgaaatta

SEQ ID NO: 424839 - DNA, 614 bp, Homo sapiens
agtatgtcattcctttgtatcgccatctaatctttcattgtacagatgtaacatatttcatttatccattcctcagttgatagacatttggattatttccatttttaaatttttattaatgctactgtaacatttttggacaacttttctgtagatacatattttcaattttcttcagaacatgkaagaattggaattgatgggtcatatgataaatttatatttaacattttgaggacttgccaaaatagtttccaaaattgctggatgattttacattttcactagcaacatattagggttcccatttctctacaacttaatggaaaattattgtctatatttttattatatttgatctagtggttgtaaagtggtagcgttttcaagtttagacttgtatttttttttaaatgactaatgatgtcaagtatatttttgtgtgcttacaggccactgctgtcttctttgaagaggtaactacttaaatgctttgctcatattttaatgtgtttatttctgtattgttattgaattgtaagtgttctttataaattctggctaaaagtaccttaccagatacatgattaacaagtgttttcttacattgtata

SEQ ID NO: 424840 - DNA, 614 bp, Homo sapiens
agtatgtcattcctttgtatcgccatctaatctttcattgtacagatgtaacatatttcatttatccattcctcagttgatagacatttggattatttccatttttaaatttttattaatgctactgtaacatttttggacaacttttctgtagatacatattttcaattttcttcagaacatggaagaattggaattgatgggtcatatgataaatttatatttaacattttgaggacttgccaaaatagtttccaaaattgctggatgattttacattttcactagcaacatattagggttcccatttctctacaacttaatggaaaattattgtctatatttttattatatttgatctagtggttgtaaagtggtagcgttttcaagtttagacttgtatttttttttaaatgactaatgatgtcaagtatatttttgtgtgcttacaggccactgctgtcttctttgaagaggtaactacttaaatgctttgctcatattttaatgtgtttatttctgtattgttattgaattgtaagtgttctttataaattctggctaaaagtaccttaccagatacatgaytaacaagtgttttcttacattgtata

SEQ ID NO: 424841 - DNA, 577 bp, Homo sapiens
atgtacaggaagaaaatattagaacttccatttatatgcatatttatctaaacataagaaaacatggactcattttcattaaagtgtgtaatattcagattgatatgtatgtgttcatggtatgctgtgtacaagttatcctgaagaagaataggaggtcctataataggcaagtttgccaatggctgccagactcctttgtggagctcagactgttaatttcagtatactgtgatgttgagcatatccaattaagttgatttaagaatattttctgggtttagtaaaatgtgtcctataaaacygacaagtgaaaaaaaaaaaacaaaactcaaaccaacatgaacaaactgtggaataaaatgagagtaataagaacaaagtataaaagaaaatagcatcactgatatttttcagagtataactatctaaaccatattatgaagaatagtagtctaatatgatgaacaccaacccccaaaagctcaaaatcacaacaatttaaaatattaatatttacctggtttcattaatgataaatcagaacttacacactgtgttttaagatgtgaatggc

SEQ ID NO: 424842 - DNA, 577 bp, Homo sapiens
atgtacaggaagaaaatattagaacttccatttatatgcatatttatctaaacataagaaaacatggactcattttcattaaagtgtgtaatattcagattgatatgtatgtgttcatggtatgctgtgtacaagttatcctgaagaagaataggaggtcctataataggcaagtttgccaatggctgccagactcctttgtggagctcagactgttaatttcagtatactgtgatgttgagcatatccaattaagttgatttaagaatattttctgggtttagtaaaatgtgtcctataaaactgacaagtgaaaaaaaaaaaacaaaactcaaaccaacatgaacaaactgtggaataaaatgagagtaataagaacaaagtataaaagaaaatagcatcactgatatttytcagagtataactatctaaaccatattatgaagaatagtagtctaatatgatgaacaccaacccccaaaagctcaaaatcacaacaatttaaaatattaatatttacctggtttcattaatgataaatcagaacttacacactgtgttttaagatgtgaatggc

SEQ ID NO: 424843 - DNA, 585 bp, Homo sapiens
tccaatctgccagaaaggctttgaaataattttcttattcttcttcattaattccagatgaattatcctggtgtttgttttaaaagaatgttgtgttgtagcttctgcctttttgttaaattgaaatatgtgaaaataaaattaaacgcccactgaggtcatcatactctacttatccaaggtgattttcctttaactgttttatgacctagcagaaaaatattaacatactgtaatttttatatatttgaattatttgtaaatgcagtgttctgatgtaatgcataagaytgagatattttataagtcatatacatattattgtgaatgacatccatcattgaaattattctaaaaacaatattttaatgaaattactctaaaagcaatttgcattgattcagaaaggtcttcaaaatagaagtcactgtagaccatagctatatttgagctagattcataaaaatacaagcaatagaaagttaaagttaatagagtgctacttcaaaacagtatacatggatataagagtacacattgtaaatggaaacttttttctttttattacgtagtgacttagtcaaa

SEQ ID NO: 424844 - DNA, 478 bp, Homo sapiens
tttacttccaagacaatatattttatatctacattaagcagaatagggtttgtgacttaagttgttatacaaaaatgacagttacatttacttttgaaaatctgtgtttgtgattatgaaacttgagtctatcaaaaaggagaatatttcctgccaccctatcagttactcccttcctcagtggtttaggggcttctgtgggcatttcaagcccttatcaatgtccaatattcctttcttcccaggtgcatggaacagtggcacttttcttttgycttgaagttgtagccattaaactgcactggccagtcaaatgtgagtaggtgatatgaatcactttcaggaaacatttaattgccagactgcaactctcctgtgttctcttctccagcccaaaggctgccttaagcttttgaggtcacaggtttttaccatatcattacttagcctaacccaagtgaaccaaatgaacgaacca

SEQ ID NO: 424845 - DNA, 588 bp, Homo sapiens
gtggccttctccttgaattataagtcaaatgtattccatacagtacattgaagaatttgtacctatgttaacacaaaagtttgatccrtagcatattcttcatgaataaaagaagtaagccatagagggatatgtgtaaattggatacatataaaagtattaggcaatataaattaatagtaaaatatgatcaaatttgaataaactttcttgaaaataacaaattttcaagcaggaataagtaagttatattttataatttccaaggtcattatagtacaaatcatattacgatcacttttttatagttagaattatttctaataggactatctgagctacttcgagaaaactagcaaggtctaccctgaaaacacttcagatatgtgatatttcaacatgtaataatatttataatacatatgtcagatcttaggtgatagactatttactaacataacaattaaaaacaaattacaaactgaatttctaacataaataatgaagattaaatatcctatgcactcacacatatattatcaaaacagtatgttactagacaaaaaaatatcacaaaattataatttt

SEQ ID NO: 424846 - DNA, 630 bp, Homo sapiens
agataacagactctgccgaagttgtggagaaaagtgaatgcttatgcactgctagtgggaatgtaaactagttcagccattgtggaaagcattctggagatttctcaaagaacttaaaacagaattaccatttaacccagaaatcccatcactgatatacccaaatgraatataaattattttaccataaagactcatgcacacatatgttcatcgcagcactattcacaatagtaaaggcaaggaatcaacctagatgcccatcaatggtagactagataaagaaaatgtggtacacatacaccatggaatactatgcagccataaaaaaagaatgagatcacatcctttgaaacaacatggatggaactgaaggccgttatcctaagcaaactaatacaggaacagaaaaccaaataccatctgttattgcttgtaagtggaatctaaacagtgagtacctatagacacaaagaagggaacaacagacaccaggagcctatttgagggtgaagggaaggaagagggtaacaatcaaaaacctactcatggggtagtatgcttattacctgggtgaaaaaataatctgtataccaaacctccacagcatgcaattcatttctataacag

SEQ ID NO: 424847 - DNA, 233 bp, Homo sapiens
ttggaaccccaagaagaaagacagtacaatatgcagagcaaacatgtgtaactccagtacrctatcattaactacagtcctcatgttgtacatgattagatctttcaacttgttcattgtacatatttgctactaccatctaagatgatgggtaagttaatttgttcactatagtaattattttatagtatatacgtattttataatgtatcgtacccctcaaatatacacaa

SEQ ID NO: 424848 - DNA, 473 bp, Homo sapiens
atactaatttcttgatttcataatagtactatagcagatgtaactactgggaaaagctggttaagggcyacatagaatcactctgtaatatctttgcaacttcctgttactctatagttattccaaatttaaaaaaaaaaaactaataaaggacattagttatagggagctcagacatagctgaaggtcctacaaagtggaggccaaggagacatactgaatatttcagaatgttgccaagctttatggtatttttcctgacttctcatctaaaactatggaggctagaagatagtggagtattttaagtgtcaaaacactttaaaaatgaagcatattgattctgagttctgaaactgcccaaaatatcttttatgaatgaagcaaattaagacattttcagataaaagaaactagcagaatcaatgtaactacttttgaaatatatgtgacaccttcttccaacatttaac

SEQ ID NO: 424849 - DNA, 556 bp, Homo sapiens
ggattatttttcctcatattctttacataaattttaaaaaattttgatttttatctcccaaatttattgtttaataatgtttaatacttattkattattaccaattctatctatttgctcccttgggtattttggtgttcctctttgtttagctaaatgctaaattaatttattttcactttttcttatttaataaatcatatgatcagggctctgaactttttcctaagtgaaactttggcagtattcacatctaatcttcaaaatgtttcttgagtttacaatatttgatagaatctgttgctgattcattatggaaaaacatagaatattatgtattttttagtatgacatttttgacaatgattacataaaataagtttatgacctatttactcaatttgatactaaaaaaaatatggaaaacatttgtagaacatcaaaatcacatgcagacattctgaaaaatgctccaagcatcagaaaaagtaatgactgtgtaattgtatcgaaaactctgaggcagagattaacatgcaggaggttattagagagg

SEQ ID NO: 424850 - DNA, 556 bp, Homo sapiens
ggattatttttcctcatattctttacataaattttaaaaaattttgatttttatctcccaaatttattgtttaataatgtttaatacttattgattattaccaattctatctatttgctcccttgggtattttggtgttcctctttgtttagctaaatgctaaattaatttattttcactttttcttatttaataaatcatatgatcagggctctgaactttttcctaagtgaaactttggcagtattcacatctaatcttcaaaatgtttcttgagtttacaatatttgatagaatctgttgctgattcattatggaaaaacatagaatattatgtattttttagtatgacatttttgacaatgattayataaaataagtttatgacctatttactcaatttgatactaaaaaaaatatggaaaacatttgtagaacatcaaaatcacatgcagacattctgaaaaatgctccaagcatcagaaaaagtaatgactgtgtaattgtatcgaaaactctgaggcagagattaacatgcaggaggttattagagagg

SEQ ID NO: 424851 - DNA, 441 bp, Homo sapiens
caaagcaaatagatgaaagagcaaattaacttttagaaaaagtatttaaaaataaagtggtccttcttcattactcagcttttcattctaaatttatcaacaggccatatgacgtattatttgttttcattttcattactccacttaaaaacatgaattttgtttacatacaatattaagaaagaaacagccaaatctaaagcagtaaactacctcagataataaatarcatttattcattgtgttctgtttgacctttatgtacttacttcttggtttgtgagttgatgagagatctctaaattacactgtcctggaccaaattgcagagtaccttgtctgctttctgacttggagtcacagttcatcttgaccttgctattggtataagtatcagattgggtaatgaccttatttttttgctatattgcagtccctagt

SEQ ID NO: 424852 - DNA, 574 bp, Homo sapiens
gttgccaacagatttaacattggcaaatcatctgacatacagcttaatctcctatgatacaatatatgaatatatagatgtaattctgttgtatgaacaaaattgttatagcacattctggaattgattaccttgaaactaaagtaatagattagagttacttgaaatttagttgcatagtaaggctaaatcttaaataaatatgctacaattacattgacagaataaaagatttttactaaaatttcatacatagccttaagtgtatgyttgagtaatcacaacgtatatatagcttttttcttaaagataacataaggactctgacttcataaagattgaataaaatgagaaataggacacaccaacccacatgatacaaaataataaaagctacaagaaaaaaatgctataacagggacacagtttgggaaatttttaaagcaaacttcacccacaaacccaacagatggtaaatctacatctgtttacacagcttataatgaccactttcttatgtagaaaaaaggctgtgaaagagaacataattttatataaagcacactccacatta

SEQ ID NO: 424853 - DNA, 574 bp, Homo sapiens
gttgccaacagatttaacattggcaaatcatctgacatacagcttaatctcctatgatacaatatatgaatatatagatgtaattctgttgtatgaacaaaattgttatagcacattctggaattgattaccttgaaactaaagtaatagattagagttacttgaaatttagttgcatagtaaggctaaatcttaaataaatatgctacaattacattgacagaataaaagatttttactaaaatttcatacatagccttaagtgtatgcttgagtaatcacaacgtatatatagcttttttcttaaagataacataaggactctgacttcataaagattgaataawatgagaaataggacacaccaacccacatgatacaaaataataaaagctacaagaaaaaaatgctataacagggacacagtttgggaaatttttaaagcaaacttcacccacaaacccaacagatggtaaatctacatctgtttacacagcttataatgaccactttcttatgtagaaaaaaggctgtgaaagagaacataattttatataaagcacactccacatta

SEQ ID NO: 424854 - DNA, 507 bp, Homo sapiens
agaaatggggacagcttctagaagatggaagaggcaagaaaacaaattgtttcttaggggcttcagagggaatgcagccttgccagtatcatgactagcccagtgagacccattttaatcttctgaggtacagaactataaaataaggaatttgtgtagttttaagccataaaattgtgtaatttgtaaaggtaaccatataaaattaatatagcttctatgaatacctctatcttaattatrtagttacagttttaattttttttataatgcatatcccttgaaaagttgtaagcaatatagcatgtgcttaagaggcaaaaaggtaatgtgaaaattttttaaagtataatttattatatatttatgatagtaatttgcaataatgtattatatgtattataaatcagtgttaatgtaccagtctatataaatatctatatgattaaactattccttattcaatatcaacttgcccactgtaaatcacactagtatgctgttgat

SEQ ID NO: 424855 - DNA, 560 bp, Homo sapiens
tgtgatgactgaagtgctattggcatctggtgaacagaggctagggatgctactaaatatcctacattgcacagaactgccctctcagtgaagaattatctagtccaatatgtcaacagtgctgaggctgagaaaccctgcggtagacagaaggcaattatgcaaggttttyggttgtgttttcatggcctcttttctaaactctgtgctcagtcagataattcaacaagaacattttcaaatatccatacctatacatctactttctcctcattgcttagagttggacacagcacaattttgagaactgacctccaaacccctgaggatgcagtaatttattctggacactaggggtccaccgtatattgctctatctattggtgaagggggcatcaaaccgaattcatccaccatccagcctaaaaacctgtctgtttgaagagagatgttaaaactatgtgtttggcatttctgggatggggagggacaaggggcatctctatccctaaggtggtccaattatcgccagaactgtgtccagctgtcaggaagggaga

SEQ ID NO: 424856 - DNA, 540 bp, Homo sapiens
gtggggttcacattttggtgaccatgaagggattctgagtggaggtgaccctgacctttgacaaatatcctatcggagcttgacaccagcatgagctaactttatggctcaaaccgatagtactatttgctgatgtctgtgagtatcccctccagataacacctgatctcccaaaatttggtggagacctaaagtttattttgcaatacaactccctttttttggagtttcacttgcttccaacaaggaaagcaagatttcctgcttacatagcgatggacagaaggtaactcctttacagagtttgagctcactcctagcagggaagatgagtttgacttttttcctgcttctaggatgtagagagcagtcttcagcctgagacctatccctgggtaagtagctgaattggggttttgtcttggctaaagtttaacaactagctggtcttaatttctccttaccattagcrcagtcagtgatcatattgttgggttttttgttgtttgtttgttctggtctttctcccatcagatttga

SEQ ID NO: 424857 - DNA, 561 bp, Homo sapiens
atgacagctgtgtgtttgtcttttttaatactaatcagccacaatctgggtaatacctcattcacctttttctttaattttaaatttktaactttcttgggtacatagtgtatatgcttatggggtgcataagatattttgatacaggaatacaatgcataataatcacatcagggtaaatgaggtacccatcacctcaagcatttatcctttgtgttacaaaaatccaattatcctcttagttatttttaaatgcactgttaatttattttattttactttatttttagacagagtcttgctctgccgccaggctggagttcactggcacgatcttggctcactgcaacctctgcctcccaggttcaagctattgtcctgcctcagcctccggagtagctgggattacaggcatgtgccaccactcccagctaatttttgtatttttagtagagacggggtttcaccatgttggccaggatggtctcgatctcttgacctcatgatctgccaacctcagcctcccaaaatgctgggataagaggcgtaagccaccgtgcc

SEQ ID NO: 424858 - DNA, 561 bp, Homo sapiens
atgacagctgtgtgtttgtcttttttaatactaatcagccacaatctgggtaatacctcattcacctttttctttaattttaaatttttaactttcttgggtacatagtgtatatgcttatggggtgcataagatattttgatacaggaatacaatgcataataatcacatcagggtaaatgaggtacccatcacctcaagcatttatcctttgtgttacaaaaatccaattatcctcttagttatttttaaatgcactgttaatttaytttattttactttatttttagacagagtcttgctctgccgccaggctggagttcactggcacgatcttggctcactgcaacctctgcctcccaggttcaagctattgtcctgcctcagcctccggagtagctgggattacaggcatgtgccaccactcccagctaatttttgtatttttagtagagacggggtttcaccatgttggccaggatggtctcgatctcttgacctcatgatctgccaacctcagcctcccaaaatgctgggataagaggcgtaagccaccgtgcc

SEQ ID NO: 424859 - DNA, 584 bp, Homo sapiens
ggatggaagaggctctgagatttgggatctgaacttgggsatcaaggcagcagttctttctttataggaacttcctattaaaacacattttttaaaaaaaaaatttaaataaagaaaggaaagggccttataggaaaggccacagtagctcaaaaattatcagtataagttaaggtttctgtgtctgtttacttttccgattttaataaaataaaatatctgactcactagagaaaatacataaaacgtgtactcgaagcagaaagagaattaaagaatcccagcatggccattactcatcttaagaaacagagcagtatttaccttagcctccttctgtgggccaccacccccttcaccaaacaaccacgtcctcggtagccactctcctgaattatatgttcattagtcaactgcctttctttgtagcttgacttaaactttctgtactattaaactatatattgaatagttttgcatgttcgtaagttttaaatacagcttgacactctattatcctgttgatcttgattttgtggtgccatatcttgctcctgctgacccacttcctgaatgtctgtcat

SEQ ID NO: 424860 - DNA, 622 bp, Homo sapiens
cactaactgtccctatgtctgtccctcagttcccagtctcacattcttcactaaatataaacatactttatttttactcttagataatgaatgttttgagggcagagcatgcatcttcataagaagcccagragatgcttggcttgtgaatgttttctctgaattgctggtgagtggaaacagtgggtccccactggacttttgccaggcactgcttcagaaggcttccccagactgatgaaaggatgcacatggatggcccggggcccagcccgtggttgggatcacgggttgtttagtgttaaaatccagtttttatgcactggcgcatgaaggaaaaatgaatcatttaaccccctcaacccctctttgtcccctcagctcgtgactccatccaccaccatcaagattgagagcactacataatgatgggagtgcctgaagccacgtctaagggtttgctttaggcttcatcctctttgtacttctgtcccattatcatcatcatcatcatcatcatcactaaatggttttcttcttcttaaagacatgcagcaagcactcaattaatgtccactatgaacaacattctatgccagatactaggctaagcattttaaca

SEQ ID NO: 424861 - DNA, 595 bp, Homo sapiens
ttatcatcatcatcatcatcatcatcactaaatggttttcttcttcttaaagacatgcagcaagcactcaattaatgtccactatgaacaacattctatgccagatactaggctaagcattttaacatgaattatccaatttaatcctcataatgactacattaggcaagaactcctaccatttgtgactggtttgacagaggagcccagctttttcttgtttttcactatctgcttttttggagaggtatggcagagtgwggatagaaagtgcaaattcaggagccagcttgagttccaatctcactcccagtgcttactctctatgtgaccttggatcagatacttaacttctctgtgcttcagcttgttcttctataaatggagatagtaatagttcatactttataacagtatgtgttaaatgagcaaaagcactcagaaaattcccagtgtattacaagtattcaataaatgtttagagtggccatgtcaaccttcctcacatctacttaactccacacctcatgccccagtctcccctatcctgaaaagattccgatggcctgtaactgcaacccagttctggccagta

SEQ ID NO: 424862 - DNA, 592 bp, Homo sapiens
ataactttctgcttctttcttttcatattaaacaacttaattagatatgatttgcataccataaaatatatcctctgyaagtgtacaattcgaattgtttgggtaaatttatagttgtgcaagcaccaccacagtcccgttttggtacattttcataaccccccaaataggtccttcacatccatttgcagtcaatcctgtcttccatccccagccttagttagacacactgatctgctttgtctctgtaaacctgccttttctagacattgcatataaatgcaattatataatacataggctattttcctctggctgatttcatttagcaccatatttttgaggttcatccatattttagcacatatgttagtagtgtgcttttaattatggaacagtattccatggtatggatataccacatttatttcaccattgatgggtatttgaattgcttccagttagacctattatgaatatcaattctagaaacattcacagatgactttgtatcaacatgttttcatttttcttaaacagattcctgggttgcatggcaggtttaactttttaagaaacttccaaacttatt

SEQ ID NO: 424863 - DNA, 604 bp, Homo sapiens
tatctattttatttattaagctggtttcaagaacaagctttttgtttcatttatcttttgtattgtttttcgttgttatttcaatttcatttagttctgcactgatcttgtttatttcctttttcttgctgggtttgggtttggtttgttcttgtttctccagttctttgaggtgtgaacttaggttgtccgtttatgctctttcagattttttgatgttggcatttagagctgtgaactttcctcttagcactgcctttgctgtattccagaggttttgataggttgtgtcactatttgcattcagtttgaagaattytttaattcccatcttgatttcatacttgacccagtgatcatttaggagcaggttatttaatttccatgtattttcatggttttgaaggttcctttcggagtggatttccagttttattccactgtggtctgatagagtactttatataatttcaattcccttaaatttactgaggctcattttgtggcctatcataaggtctatcttagagaaagttccatatgctgatgattataatgtatattctgtagttgttgggtagaatgttctgtaaatatctgttaa

SEQ ID NO: 424864 - DNA, 604 bp, Homo sapiens
tatctattttatttattaagctggtttcaagaacaagctttttgtttcatttatcttttgtattgtttttcgttgttatttcaatttcatttagttctgcactgatcttgtttatttcctttttcttgctgggtttgggtttggtttgttcttgtttctccagttctttgaggtgtgaacttaggttgtccgtttatgctctttcagattttttgatgttggcatttagagctgtgaactttcctcttagcactgcctttgctgtattccagaggttttgataggttgtgtcactatttgcattcagtttgaagaattctttaattcccatcttgatttcatacttgacccagtgatcatttaggagcaggttatttaatttccatgtattttcatggttttgaaggttcctttcggagtggatttycagttttattccactgtggtctgatagagtactttatataatttcaattcccttaaatttactgaggctcattttgtggcctatcataaggtctatcttagagaaagttccatatgctgatgattataatgtatattctgtagttgttgggtagaatgttctgtaaatatctgttaa

SEQ ID NO: 424865 - DNA, 554 bp, Homo sapiens
aaaaattaaagctaatattgctggttgttgtcttagtttgrcatcccatagaggcagaccctgatgcagggatttgaggacaattagcatatctctgaggcaaaggaaacacaagtaggacagtgaggaagtgagacacagaagggaaatcaaccataatgataataaaatccagccagcactggagtgactgggactcagtcccatcagagaattctgggagttagtgcagaacagatgcctcaaaggtcttccctctctgggggtaagagagctgggatactcattgactgctgcttctaggggtattcattttgacactttcagcactgtccatgagcaggctcagccaggcttgctcaccagagaaagctcccaggcacagtgatataggcattggcagctggaatctatgagtatacactgaagtgaggggagggagggtggatgagcaccagcagtgtcagctacatttgtgcagggctaaatataaagaaagggttctgcaactcccactttgtatcatacccacaaagcagctgacttccatgttg

SEQ ID NO: 424866 - DNA, 591 bp, Homo sapiens
tattgtagactctagtgaatgtctttttgattaagctcatggttcataaaattggctttgaaaataaaactgatgtgtttgcacttatttctcacactgcaaagtaatatagtgctcactgaaacgtgtctttctatctattgagtagataaagctcaggtttaaaaaaaggtagcatatagctttatgcaattagcttaggaagcaaaattaaattacaattcatcatctctcactcaggtaagctctatgtatatacttaaggttacctgtttggaagtcaggattgtatgttatgtttaaaaacaagatagagatctgtggagtttgtcattctagtcacttgcttgggaagtaaacatgagttaaaagtagttggaagtccaagagggaaaatatatccttgcactgtgtgtaactcatgtacctctctctagagggaaagctaagctgctacctctggagggtgttttccagcgataagcaaatacgcagtgataagatctrtgtagaaatgggatattgtgtagaaatgggatattgtgtagaaagttgattgagtggagagggtcatgcagtgtaatctcctga

SEQ ID NO: 424867 - DNA, 238 bp, Homo sapiens
tggtcctccacatttctcagttcccttagagttatatggaatcacatggctaatttatgaggaaaggcctattacragtcacttctaagccaaagaatttacaagctggcacatgaccctctcattcttgctatccgtgccacagtgacaaaacaagccacagggttctcaaaagtacaactacaaggccaggacggctctgtttgcctggatccctgagtgattctgaggagcagag

SEQ ID NO: 424868 - DNA, 564 bp, Homo sapiens
gtcctcttgtgtccccttcgctaagacaataggatttacttgcagaatgtatgtaagaaacctgcagagacatcccaaaaagattcagtaggaatttgagagaggttgtccttcttgyagagcatttggtgctggtgcaacctctaaaatccaggtcaagttaaaaacaaaaaggccgggtgcggtggcttatgcctgtaatcccagcactttgggaggctgaggcaggtggatcacaaggtcaggagatggagaccatcctggctaacacagtgaaaccccatctccacttaaaaaaaaaaaaaatacaaaaacttagccgggcgtggtgggatgtgcctgtattcccagctacttgggaggctgaggcaggagaatcgcttgaacccgggaggcagaggttgcaatgagccgaaatcgtgccacagcactccagcctgggcgacagagtgagactctgtcaaaaaaaaaaaaaaagcctgtttctttttttttattattgaatacaatgtccttgtggaattcaactacttggtatattataaaatatggtttccacctttc

SEQ ID NO: 424869 - DNA, 598 bp, Homo sapiens
ggttggtgcataaacttgtgcaaacacttggaaagccatggatccatgtattagtccgttctcacactgctacaaagatattgcctgagactgggtaatttataaacaaaagagggttattgaatcacagctccacatggcaagagaggcttcagagaactttcaatcatggcrgaaggtgaaggggaagcaagacgcatcttacatggtggcaggaaagagagagagagcaggggatactgccacttttaaaaccatcagatctcatgagaactccctcactatctggagaacagcatagggaaactgcccccatgatccaatctcctcccaccaagtccctctctcgacacatggggactacaatttgagacaagatttgggtggggtcacagagccaaaccatatcaatcagtatcttccaaagttgaacagatacacacgttatgttccaatgattccacttctaggtatgtacccaacagaaatgtacgtatatggctaccaaaggctatactagaacattcacagtagcaattgctttaatagctaaaaactagaaacaacccaaatgtccacaatagaatgattaaataaa

SEQ ID NO: 424870 - DNA, 589 bp, Homo sapiens
aggaaagagatggagaagaagaaaagaagaaagaaaagagacatctaatgttaaaaaagttttatttcaaaatctttattaaaaaaatgctttgcacwgagcaatagagctcagggaaaataacgccctctcttcaacttgtctttctaagtaacgtgaggcagttgggccaacaatagtgctcccctctacctcttcatctctccatttcctaaatcttagaagaaaataaacctacaagagtttagcccccaaatctcagtgaaacagccatggaagggagagaccagtgaaaatctacttctactttgatgataaaggttgagagaaatgcgataaaatttttgaacttgagacacaaactgggctgaacacacttggtattaactccgtctttcaccttggcctcaggccttatcttattcctccagcattccttgggatggtaaaggcaggtaccctcatatgcaagtcatagttaggagaagcgttagcatgtccacctccaaaagctacattaatctggagtagaactgaaccctgtccaagggagctgagttacaggacatgaggctctggaaacaggggc

SEQ ID NO: 424871 - DNA, 589 bp, Homo sapiens
aggaaagagatggagaagaagaaaagaagaaagaaaagagacatctaatgttaaaaaagttttatttcaaaatctttattaaaaaaatgctttgcactgagcaatagagctcagggaaaataacgccctctcttcaacttgtctttctaagtaacgtgaggcagttgggccaacaatagtgctcccctctacctcttcatctctccatttcctaaatcttagaagaaaataaacctacaagagtttagcccccaaatctcagtgaaacagccatggaagggagagaccagtgaaaatctacttctactttgatgataaaggttgagagaaatgcgataaaatttttgaacttgagacacaaactgggctgaacacacttggtattaactccgtctttcaccttggcctcaggccttatcttattcctccagcattccttgggatggtaaaggcaggtaccctcatatgcaagtcatagttaggagaagcrttagcatgtccacctccaaaagctacattaatctggagtagaactgaaccctgtccaagggagctgagttacaggacatgaggctctggaaacaggggc

SEQ ID NO: 424872 - DNA, 468 bp, Homo sapiens
accagctgtccctgttgggctctgcccatattaaaaattcttgagcaaataaataattgctgttttaagtttgctggtggcttattaagcagcaataaaaactgaatacatggatattatatttccttaaaatgactagaaaagtcattgtgcaatctcagtaccattttcaatgctttcatttatatttacatttacagagtttgctttgaccatgaatttgctattaatcattggcaaagacacattttcataagttataaatttctgttttgtttggcataaggacygtatgcttaagcccttaaccagagatgagtgtccggctgtaaaagccaaacacaatgaacctaaaccaatgcaaaagcacacccatttgaaaattgccaaatctgaagtgtaattattaacccttaggaggtctgtaatttattacattgtctatgaagaaatagttgactcaataaa

SEQ ID NO: 424873 - DNA, 538 bp, Homo sapiens
gaagctgttatatactttctaatgaaaattaatatgtccataactgcaaaattttttacatagagaatgtgtgtattccctgacttcctcagatccccagattagaaactttggctctgaaattttgtataaaactaggctatttctgcacttacaatccaactagaaaaaaacagcaaatcaactgttccagagaagacagggtaaaggattcacaaattgatccaccaaaaaagagaatatcacacataacacaaagtgattsaggcagcaagccccatgtgtgttagacatttatttaaaaattggattagagggtgggtgtggtggctcatgcctatagttctaaagcttttggaggacaaggaaggagggtcagttgagactaggagtttgaaaccagtctgggaaacatggcaagaccccatttcttaaaaaaaaaaaagaaaaaaaagaaaattaattagctggacgtggtggcatgcatctgtagccttagctatcccaggaggttgaagtgggaggaccacttgagccc

SEQ ID NO: 424874 - DNA, 498 bp, Homo sapiens
tacagaacattacttctctccaattacctatgtgacaaagaaaagtcaaaggaaactctcagaaaaagaaatgcaaaaactgccagctggaagtcaggccaaatacaattttcagcaaaaggaccagaacccagagtacatactataagcatagagatcgggtttcggtatcctccatcggctrcaactacccaaaaagaggcagttcctcaaataaacgcataggtccaggtgagaagggaaaagagacaaaatgaatttcaggtaggcactcaaaccagtgtctactgcacactcaaaccaggagtcagacatcaaacaatgaaataatcaaaagtgaaaacaacatactgttgcttatctctgggtcctctccaaggatggccaacctgggtgtctacactcatctctggacagctcactttccaattccctggttaatgcttagaaagaaagtaaccctacaatcttccccactgggcgatttgaacccgaaat

SEQ ID NO: 424875 - DNA, 594 bp, Homo sapiens
cttatctctgggtcctctccaaggatggccaacctgggtgtctacactcatctctggacagctcactttccaattccctggttaatgcttagaaagaaagtaaccctacaatcttccccactgggcgatttgaacccgaaataatttccttgagtgcagaaatccaaacttcatcttgcccgacaggtgtccctgcagcctgtgtgattcttccaccagtagggggcacactctctcacaaggcagcctcttccatcaccagaaagtcttccttattctrtagctctggcatgatcataaaatctgcatccccatgacttccatcatgctcccctctgttgccctctggcccattgctccctcctgggcctgtcctagactccagttccacctctgtagtgtcactcagccatatccacaagtgccttggaccagacattgttttcacagcatggtaggggatgggtagatttttctttcattcagtctctacagatgctttacagatgagctcaatgaggctcagaaaggttaagtaactgggccaggatcatagactgactagtgagagaagtgaggttcaaacacagatta

SEQ ID NO: 424876 - DNA, 393 bp, Homo sapiens
gtgtgattcttccaccagtagggggcacactctctcacaaggcagcctcttccatcaccagaaagtcttccttattctgtagctctggcatgatcataaaatctgcatccccatgacttccatcatgctcccctctgttgccctctggcccattgctccctcctgggcctgtcctagactccagttccacctctgtagtgtcactcagccatatccacaagtgccttggaccagacattgttttcacagcatggtaggggatgggtagatttttctttcattcartctctacagatgctttacagatgagctcaatgaggctcagaaaggttaagtaactgggccaggatcatagactgactagtgagagaagtgaggttcaaacacagatta

SEQ ID NO: 424877 - DNA, 593 bp, Homo sapiens
ctacatttaaatgagagagtttgaaagcaaataaagtgtaatgagtgctttgatagattttactgaggactcatgtgggaggaaaccctgacactgatttagatgactggggaaaagttcctggacagctacactgaatcctggaagactgataggagtgagctctgtcaatggcagtaaagagtactccaagaaaaaaaaraaaagctggaggtgagagagattgtagtgccttccaggtactgcagctatttcttgtggctgaaacacagggctttggcgttatgagacaggagtaagaagagaagaaatgggagggctaagggagttgagattataaagggcctcctaagccttgttaggaagtttgggtttgctctttgagcaatcaagagttggtgttgaatagggagaaatatgattaggtgtgcatgtaaagtcatcagtgtagctataatagagtattgaggatagagatgagagcttctggaaaaaaatctaagctaaaggaaataaaatcagagagatagaaaggagtggaggctaataagggcatattttacagtaggctttggtatgtgattgactatgtg

SEQ ID NO: 424878 - DNA, 603 bp, Homo sapiens
gcatttgtttgaaaaaaaaatctattgtataagttgacccatgcagttcaaacctgtgttgtttaagggtaaactgtraatttgtttttgaattttgtatgaataaaattctccatgatatactctgttctgtctggcttctttcactgaatattatgtttgtaagatatagtcatactgctgcatgtcatagttgttcatattttctcattgctgcgtgtagttctattgtataaatatgccactatccatttcatcgttaaaaaacatttggaatatctccagagtgaggcttttaagaaaagctctgctacgaagattcttgtgcacgtcttatattgcatatgtgtgttctcttgggtacatacctagaagtagaattgctggattatagggtatccatatactaaacttcagtaaactaccagtttccaaaatggttagaccattttatgctcccaccatcataggatgagagtttcagatgctctgtgtcctcatcaacacctggtattatctatggtgttttgattttgccttatcttcttatttgttttttggcattctagtggatgtgtaattgtacctcgttatggttttatt

SEQ ID NO: 424879 - DNA, 606 bp, Homo sapiens
aagtcaagctggtagccagggctgcaggcatctttaggctccactgtggctggagtatctgcttccaggctcactcatgcagttgttgacaggtgtcagctcttcactgacttttggccagagactcaaattcttcaccatgtgggcctcaccayaggcagcctgaatgtcctcatgacatgatagctgcattctcccagatcaagtgacccaagaggtataaaggtcatgatggaagctgaagttcttcacagcttaatctcaaagctaagacagggaatttattttgaaaagtgatttcaggtaacaggagtggaggactgggaagaataaaatatgagaggagggaaagtcatccaagcggtaattattgagctgggcaactgggcttcatcaactggggatggagtcctctgggagtctgtgtaaagtatgcctagaattatccacctaaaaacagaagagtatgtatttatccaaaagatcctgtcccccagtgatcaagggtgggctcagggagtagtgacaatcaggcagacagcaagagatgtggtgagttgccaagtgtacttgggttgtgtttgaatgcagcatgtgtccacagca

SEQ ID NO: 424880 - DNA, 579 bp, Homo sapiens
catcataaaggaagatacaacaatgcccaataaacacatgaaaagattctcaccaccattactcatcagggaaatgaaaattaaaaacgcagtgaaatgtcactctacacctactggaagagctaaaatccacaaggcaaggatgtgaaggaactgaaactctaataaattgttgattggaggtaatatatcataaccagtttggaaaacaatttgccttataacccaataataccattttcaggtatttaccaaggaggaaagaaaacatctgctgaaaacaaagcagctttattcatagtagccaaaatctggaaamaacccaaacgtctatcaccaggtaaacatgtaaacaaattgtggatgttcatgcaatggaatgctagtcagcaataaaaagaacaaactactgagacacacaacatgaatgaatctcaaaaaacatcacattgatcaaaagaagccaaatgcaaagagattgcattgtgtgatgccatttataggaaactcaagaatgggcaaactaagctagtgatagaaattaaaaaacagttgcctctagagagggggaggtagaat

SEQ ID NO: 424881 - DNA, 541 bp, Homo sapiens
taattctgttccaagaaatgagtagaaactaaggccaatttttgcccacctacaaggggaaagactgtgatggtcatttcttctgcacatacttatataaatcaaccagaaattccagtctcaatgttccttttgctcatgtcaaaccattttctccttgtgaacacaaagtaagcatagcaaaggcctccagggtcaagctcccttcccacaaaattatggtctgaccctggcaagtgacctgagcttcctcaagttctcctgacttgagacatttgtccacattccagtcaactgaagaagtaatttgatctcattcactcttccaacaatcaacaattgctcacctgccaggtgtcargaactctgctgagctctggggacaaagatgtaaataagaaaaccatggtcccttccttcccagagcttgtacaggaggagacaagaccgacagagactaaacagctccggtgtggtaggagttaggaagctgaactgcacaggtgccttctgagcctcctgagccaccttaaggactcac

SEQ ID NO: 424882 - DNA, 530 bp, Homo sapiens
ggcagaggggagtcatttaagaagcagcagtctgcggccaccggctgaggctgcagtattttttccaagaaccgctgtgtatcaaaatgacgctgcagcttccacagccytcagggagcttcatcccgctctgcagggtttcaagctggagagccttcagatgcacttaaatttttacaaatgccgtaagtggtgaagttgagggtggatgcattctctctggccacaccccacagagattggaaacagcctttaggggtctcaggagcgtctgactgaggggggtagtggtcccagagaccgcacacaggcccctcttacactctcacacctctcaaagactgagaagaaaaaaaccaccctcacattgtgatgcagcgtcttccttgccaggccaggtgtttcttgaaaaatcaccagagggattcttggttaacacccaggctctacactcagcccgctgtgtggctttgggaaaatgacttaaatcttcatctccttttcagttttccattaaatgagtaaagcaa

SEQ ID NO: 424883 - DNA, 653 bp, Homo sapiens
tgcattttcctgatgatttgtgatattgagcactttttttatattgctgttgaccattagtatagcttcttttgagaaatgtctgctcacattcttggtccttttttttttgaaatgatgtcttgctctgtcacccaggctggagtgcagtggcatgatcttggctcattataacctccgcctcctgggttcaagcaattctcctacctcagcctcctgtgtagctgggattacagkcgcctgccaccatgcccagctaatttttgtattttagtagagacgggttttcaccatgttggccaggctgctctcgaactgcagacctcaggtgatccacctgcctgagcctcccaaagtgcagggattacaggagtgagccaccgcgcctagcctcttgaaccatttttttaaattaggttttttgtttttagacagacatcaactccgacgatgaaaaattaacaggagatctatgaaactcggtaccaagctgtcctccacaacctaccaaagccagagggtggaagaagggacaaatgtcagctgcagcaggtgtcctggtgaagcccctgatacctgggcatggggcaccttcatctgcactgccctgaggaactgtgagctgttggagatgccagcaagcttggctgtgt

SEQ ID NO: 424884 - DNA, 653 bp, Homo sapiens
tgcattttcctgatgatttgtgatattgagcactttttttatattgctgttgaccattagtatagcttcttttgagaaatgtctgctcacattcttggtccttttttttttgaaatgatgtcttgctctgtcacccaggctggagtgcagtggcatgatcttggctcattataacctccgcctcctgggttcaagcaattctcctacctcagcctcctgtgtagctgggattacaggcgcctgccaccatgcccagctaatttttgtattttagtagagacgggttttcaccatgttggccaggctgctctcgaactgcagacctcaggtgatccacctgcctgagcctcccaaagtgcagggattacaggagtgagccaccgcgcctagcctcttgaaccatttttttaaattaggttttttgtttttagacagacatcaactccgacgatgaaaaattaacaggagatctatgaaactcggyaccaagctgtcctccacaacctaccaaagccagagggtggaagaagggacaaatgtcagctgcagcaggtgtcctggtgaagcccctgatacctgggcatggggcaccttcatctgcactgccctgaggaactgtgagctgttggagatgccagcaagcttggctgtgt

SEQ ID NO: 424885 - DNA, 653 bp, Homo sapiens
tgcattttcctgatgatttgtgatattgagcactttttttatattgctgttgaccattagtatagcttcttttgagaaatgtctgctcacattcttggtccttttttttttgaaatgatgtcttgctctgtcacccaggctggagtgcagtggcatgatcttggctcattataacctccgcctcctgggttcaagcaattctcctacctcagcctcctgtgtagctgggattacaggcgcctgccaccatgcccagctaatttttgtattttagtagagacgggttttcaccatgttggccaggctgctctcgaactgcagacctcaggtgatccacctgcctgagcctcccaaagtgcagggattacaggagtgagccaccgcgcctagcctcttgaaccatttttttaaattaggttttttgtttttagacagacatcaactccgacgatgaaaaattaacaggagatctatgaaactcggtaccaagctgtcctccacaacctaccaaagccagagggtggaagaagggacaaatgtcagctgcagcaggtgtcctggtgaagcccctgatacctgggcatggggcaccttcatctgcactgccctgaggaactgtgrgctgttggagatgccagcaagcttggctgtgt

SEQ ID NO: 424886 - DNA, 591 bp, Homo sapiens
ttctcttcctcctaagaagtctgccctgtgcaggggacctgaggagaatagctgctaatgagcccagtgccattttgggggctttgcgttctttattgcaaggtcacccagtggtactctatattctagagcccagccacagcaccgtgaaaaagagccagagaagaagcccattggttgttgcagggcgaaccgcgagagtgccaagcatccaaatacggaagaggaataaaatgaatcctgccattggtggcacatatagccaggcctgctgttgtcaggttaaagtcaggccatgtgccatataatgtcaaccaaacatttccagcacctggttgacctcacattcatagccasgcacacgaaaacacatctacacacagagaggggaacaccgtgctcactcaaagctgagatgtttgtgtcagccctgagcaagtgagctgagggtagctataatcagaccactgggacttatctcagcagttttcaaggcaatgccttgacctttttaaaagattttttttcttttttttttttttaaatagagacaaggtctctgtatgttaccaagtttggtctcaaactctt

SEQ ID NO: 424887 - DNA, 629 bp, Homo sapiens
tctggtttgctgatagcattctgattcttgatgtggtggtagttcacagatgtaaccttcacaacaaattcttacacaatataatgatgttttaggaaatttttgatatatgytttattttacaatataaaaataaaataatgtgtgtcaatacctggcacatagtaaatgctcaatacataatcaattattatcataaatatataataattgtatttttaaagtactttgcattttacaaagtgtttttcatgaaaaacaggcattgttattattcctgtttcacagatgaaaaactaaggcttattcttgccacaacgcagctaaccaagaaggaacacagctggaagcacagctcgggtctgctgctttcaaatcccatctctcttctaggctttcctacctgccatgttgtttaaccaaggaaaatgagccaacagcctgatatgcaaaatctcattcataacagtgtttgtttagctgtgtgacttgagtcaaatgtccgtgtgtgtgtgtgtgtaagccttggttttcccttgggtcaaaggtgtatgcaggcttcctatttgctatagaacccaaagtgacagaaacaaacacatgttgtgaggtataaaatgctaaacata

SEQ ID NO: 424888 - DNA, 539 bp, Homo sapiens
tagaattcagtggtttggatctgtgtccccaccaaatctcatgtcaaattgtaaacccttatgctggaggtggggcctggtgggaggcaattggaacatgggggcagaattctcatggatacattgacattatcccctcagtgctgttctcatgagagtgggtgagttttcatgagatctggttgtttaaaagtttatggcacctccccctctctctcttggtcctgctccttccatgtaagacacttmctcccactttgcctttaaccatgagtaaaagctccctgaggcctcctagaataagctgctgtgcttctggtacagtctgtggaactgtgagccaattaaacctctttccttcataaattacccagtctcgggtatttctgtatagcaatgcaagaactgactcatacaagggggctcctttaatgcagggaacctgggttataactacaaataacagaaaggattccggtgtctgagtctgtgtctctatctacccttcttacctgtgtgccaaagaggcaggagggtga

SEQ ID NO: 424889 - DNA, 659 bp, Homo sapiens
ccgttggagagaagttaaagtgcacaaactgggaaattaagcttattttcaggctgttttaaccgaaaacaatctctaggcctatctcacatgtcttctgacaggagggcatccactaggaagattacgtctattatcaaggtgagcaatgaactttccatttacattagacttttataatctgatgaaagaaaggtacatttatctagtcttttaaaaaggaaaaggaaaccctacaaatctgtccattatacctgccgagaatctaaagtgaggtcaagacaaaagcagattacttttgatagtgttaataagagtttattgcaaggcctgtgagccagatctccctctgtggatttctgaatggctttaggagctgggctattcttagagtaatgagaaagagccttatctcacwctataggaaattcaaagatccccatggcttcagaagccttactgatgcactttagcaaaactgaaagctagggtggttactatcacaaattcatgtacaatattagggatataaaaaaccctaagaggcataggcatgcagttcccaatatggtatattaataacagcaccccataaaaccctaatgggactgtggctgttgctatgactaaatttcgttttgaggcagtattagcagtag

SEQ ID NO: 424890 - DNA, 625 bp, Homo sapiens
tcctgtcttccatccccagctttagttaggcacaatcatctgctttgtctctataaacttgtcttttctagacattgcatataaatggaattacacaatacataggctattttcgtctggattcttttacttagcacagtgtttttaaggttcattcatgttctagtacatatattagttgtgtgcttttaattatagaacagtgttccatggtatggtataccacatttatttaaccattggccaatcgatgggcatttcaattgttttcagttagacctattaggaataacactgctagaaacattcacagacatgtctttgtatcaacatgagttcatttttcttaaatagattccaagaagtggaatttctgggttgcatggtaagtttaactttttaagaaactgccaaacttacttccagtggagctgcaccattttaaactcataccagcaatgtgtggggattccagtttctcttcatcctcaccaacacaagctactgtcttactatagccattgtagtgggtatttagtagtatatcattgtgrtttttatctattatatatggacctatgatccacttcagttaattttttgtgcagtatgagacaagagtctt

SEQ ID NO: 424891 - DNA, 540 bp, Homo sapiens
ctttgttaaattctatagcttgtagttgtttcttggaaagcttaaactctactctttccgcattggttaatttcactttcttcttggagtcaaagacattttggtccttgttaatggtaatgatgttatttgcaattacatctagtaaccctacatccgttggttttagtagtagtatttgattgtaaagttgcagagcctcctctgtttgaccctgaagctgcagaatataggccatctgaccataagtgatggccagtcctgcctgtgggtcttcctcagtctcatcagtgtcttctgataatgaatkgtggcaaagaccttcagctttttgtaggatgttcatggcctggttcagctggccgtggtctatcagtgcacatgcagtgtttagcacagctcatgtgtgccttcttggaagcccaggctctctggagccactttttcccaattgctttgagctgcaacaactgctgaagggtttgttttcctctcctcatcataagcatcgtgggagtttcggacgagatctctttatgc

SEQ ID NO: 424892 - DNA, 619 bp, Homo sapiens
ctcttgttccggctttcaccatgtgacttgccagctccctctttgccttccaccatgactgcaagcttcctgaggtcatatcagaagccaaacagatgcctggctgtacagcctgcagaaccatgagccaattaaacttcctttcttataaattacccagtcccaggtatttatagcaattcaagaaggtactcatacattcagctacaaaatatactgaaaagccagcttcggacatcatctgagtcagaagtaacatttttccctgtctttcatcatagttgctcaacccatttcccaccccccgccggccttacttatcctggtctccatgtttttggctctctaacagagcatagtctctattcttggccctcctattattttttagagactggtttaaacacccacctctggcttatgagctttgcctctctgcttgatattggtatgtgacttgcggctttctcatatttctggcatgtctgacaatcttctccacgctgaaaccccccagtgcctwtctcatacccactcctgcctccttgcaaaaggagtagaaccaggtgtttgctgagcattaaattttaaaaagtgagttctctggaagatcttaatg

SEQ ID NO: 424893 - DNA, 631 bp, Homo sapiens
tatagtgatcacctctacttccttgtgtcccctctgtccttgaatcacacagtgactccatattttgctgatagtgtttggtctaacawcaccattgaccttagttgaaaattcagtgggtgtttgtaaattgtcgtcttattcaatcactctgcagcttcagacactaataaacattccttctttctcaaaactctctcctacatggcttctgggacaccatattctcctattccacctcactcctaagttccccctctattatttaattcttctcagacattgtttaccagattctaccctctttctttgaagtcactgctatagttatccacattgaatgtaggtctctcaattttagctgttgttttaaacaagatgtgataatgcaaaaacagaaaaccaaatactgcatgttctcacttagaagtgggagctaaacattaagtacatgtggacacaaatataggaacaacaaacactggaaattccaaaagtgggaggaagggaggagggcaaggctgaaaaactacatatctggtaatacgttcactatagatttagtgatgaaaccactagaagtccaaacctcaacatcatgcaaatataaccatgtaacaaacctgcccat

SEQ ID NO: 424894 - DNA, 614 bp, Homo sapiens
tctgtctccactttttcatctgaatattttgaataataattccagccttattgggctgtgatgtgattaagtaaatcaatgtttataaggcatttggaatagtaccagcacaaagtcagtgtaacrtaagttgcttgataaatgactaagtacttagaaatagtgcttgggacctagtgctcagcagaacagttatttgaagtggtccccagccaaaccccatcactttcttttatttccttcctggacttagtgctatataaaattgtctggtttactcatttgttacatcttattgtctgcctttcttttgagaatacaagcatttaaaagttaatgccctccctgaatgaggacagggactgtcccagatctttcactcctgtccctaagagcatggaacagtgcacaacacagacaccacaaactcaagaagtattgttgaatgaattaatgattaaaactaacattataagcataaatacccttaatatataattgctgtactttaaatgtagtactaacatgtgataatgcttctggatgagcatgctataaatactttgagcaaaacttatttgagatattttctccatatgcagatgaatacatat

SEQ ID NO: 424895 - DNA, 614 bp, Homo sapiens
tctgtctccactttttcatctgaatattttgaataataattccagccttattgggctgtgatgtgattaagtaaatcaatgtttataaggcatttggaatagtaccagcacaaagtcagtgtaacgtaagttgcttgataaatgactaagtacttagaaatagtgcttgggacctagtgctcagcagaacagttatttgaagtggtccccagccaaaccccatcactttcttttatttccttcctggacttagtgctrtataaaattgtctggtttactcatttgttacatcttattgtctgcctttcttttgagaatacaagcatttaaaagttaatgccctccctgaatgaggacagggactgtcccagatctttcactcctgtccctaagagcatggaacagtgcacaacacagacaccacaaactcaagaagtattgttgaatgaattaatgattaaaactaacattataagcataaatacccttaatatataattgctgtactttaaatgtagtactaacatgtgataatgcttctggatgagcatgctataaatactttgagcaaaacttatttgagatattttctccatatgcagatgaatacatat

SEQ ID NO: 424896 - DNA, 400 bp, Homo sapiens
gaatatcatatcattcttgaacctttctgatgttttttgttgttccataggaactttatcttaatttttaaaggctgtaaatctataatttctgactcctttycctttgtctctttaaaaataatactgaaatgtaccaagtgcctaccatgttgttggcgaggacttcattttgcacttattaccatatgaatttaggtattaatattatccataatttacaaattagtgactgagaatgtagtgaaggttgttcaaggtcaaagagctagtaagtggaacaatcaggatctgaaacagttgaaacttagagcatgacctcttaaatatcattgtgcatattacattttaaagcattacattttggtaacattgcctattgcatttaaataattctttg

SEQ ID NO: 424897 - DNA, 633 bp, Homo sapiens
ttttgtatataaaatatataagggacttgattttggtatacaaagggagtccaggaaccaatccaccatgaataccaagggacaagtgcacattgattttattttataatcctgttttactaaatattcataaagcctgtatgttgtgtttgtggtttacatttttgaatttttttggggtttagagcaggagacaggtagagaaggcactgctattaatgtgctttttatagtgtctgtcacagagacataggtgggtcagggcttagtgatgactttttcaaaatgatactgatgatgattatctctaagtaatgttcaggagaactaggactattccaaaagaaatgagaaaaatgagcagtgattaagcagcgaacataaatttaagaacatgcacagaatatggtgaacagtttttrcctttctcaagttcagaataaataaggagaataaataagctttcagttgaagcacagtcaacaaatgcctatctcttgccagctactttgctaggtgtggaaagatacaagatcagtcttgaaggaatatgtagtttgtcagatgaaatattcagtttccatagagtagagcgacttcacagcgattacttaaaatagagcagattggtcc

SEQ ID NO: 424898 - DNA, 395 bp, Homo sapiens
gtcaactatctgccgacttagaaaaagtgttctttggggatatgtatcaggcctcatcctttgtgcctttaacacacagtggagacttgaatttttatgagagttggaggcagagaatttaggcaacatgaatattatgaagagatatcatttgactataaggaaacagaagtttctagtccttaaataaaattggaccttaagcacatgaagggtagctattatgaactaatttgaatattttgaatcttcatttttcttagtttgtaaaacgaaaaggaytcatgttggatagagatttgatgtgacttccatatttcataaatgatgcaaatgatgttggtttggttagtacttatgtaatagtaactacacaatgatgggaaatttaggaa

SEQ ID NO: 424899 - DNA, 474 bp, Homo sapiens
agcgcttttcttccttaccccttcagtgaggttatgttgtatatttattgtacacttagattgatttgtcaaaagctgtatttcattttgattcccccaaatcctgattttgttttgttttgttttactttgcagacagtaaaagccactcttcagcatacagttytatgagttttgacaaatgcatagtcatgtatttaccactccagtatcataaagaacagtttgattaccctgaaatatttccttgcatgttgcctttgtaatcaatctctatcctctacccctgtctctggcaactacttatcactttctgtccctacagcttttccttttacataatgtcattcaaaatggaatcataaaatacatagccttttaggcctggctttttttctcaaatagctaatgcatttaagattcatgtatattgctgtgtgcaacagctcattcctttatattgttaaatagcat

SEQ ID NO: 424900 - DNA, 595 bp, Homo sapiens
aaatagcctagtacagttaatcagaaaaaaacaaacatagaattgtattataaaacacacgtgctttgttattagtgtaaactaaatgtcttcagaccttactacccraggtaaaaataaggtcacctaacaaatagctgcatttcctaattgcttcatctgcacagctgcagcaccttcactcttgtagatcacctttcctatgtctccctggttatttctgagtgtctccagtgtttcacatcttgtctcttatattttttggctgtggcttccttgctgagagcccacgactcataaagaaagttcttacctgtcctgtgggtgcctccataacaacatgggtttgctgctcctaggagcatcttccggtgcatccctaacactacaaatgtctcaagatgcaataaggtgtcgtgctttgttcagtccccacagtgatgattctgggttatgctcctgggagagcatatcttcaaatgagatcttacaggaataagaagaatgtttttgtatctctcttaaggtaccaaatgcattttaccttgcatgcacaaactcaactgcatatatatatatatgttccactgtagtt

SEQ ID NO: 424901 - DNA, 467 bp, Homo sapiens
aacccacatatttttgtactgtaaaagtttttaagaattagtgcaataaaacattttgtagatgatataaaaatttacttttgtgtctaatacttatcaaaacttgcaatattttgaaaataagttgtgcattagtaaatgtaacaataactcatcagcagaaaaaaaaatttaacacctcaagacttatagtcaaagaaaaaaatgtaacagaggcattggatagagacctttaaaagactttcagtcatgcagatgtttttcattgggataatttcttgatggaagtggaatgaataacgtaatggaaaatgaataacgtaaatttctgacttattcaggaacttgtttgtgtaaatttaaaatggatcatatggtatcatatcacaaaggtaactagatagcattaagcaaattcaatatttagaataaggcagatattacattytttgcaattatttaaactt

SEQ ID NO: 424902 - DNA, 592 bp, Homo sapiens
cagcatatggccacagatcagtgatgcaaattctcctgccrtgaggacatagccacaggaatctgtggcatctgtgctcactatagatttgcaaccgggagtccattgagttctattgtctatacactggtctttgttggtcttcaattgtgaacgttttgagggactgggagaagcatttggcaaacatgaaatgaggcccttttggaaggatatgattgattgatttagcatgttaattaaagacacactggatggcccaggcctgaaagagatcttctggtcaattctgtgtgatggtagcttctataataaggttgtccagcttgcttaattttgttgttgttgttctgttttgttttgttttaggcttttatcagcctgaagccatggtttttagtttctgtctctagtgataagcagaaaagacggatgaggaaggagctttactgtcccaaccagaaacaacaactaagaatccatgactgtattctctccctcggatactcctgttagctattctgcactttttggtaagcaacttcaaggactaaggaatataaaaagttaaatcctaggagactggaaaaga

SEQ ID NO: 424903 - DNA, 592 bp, Homo sapiens
cagcatatggccacagatcagtgatgcaaattctcctgccatgaggacatagccacaggaatctgtggcatctgtgctcactatagatttgcaaccgggagtccattgagttctattgtctatacactggtctttgttggtcttcaattgtgaacgttttgagggactgggagaagcatttggcaaacatgaaatgaggcccttttggaaggatatgattgattgatttagcatgttaattaaagacacactggatggcccaggcctgaaagagatcttctggtcaattctgtgtgatggtagcttctataataaggttgtccagcttgcttaattttgttgttgttgttctgttttgttttgttttaggcttttatcagcctgaagccatggtttttagtttctgtctctagtgataagcagaaaagacggatgaggaaggagctttactgtcccaaccagaaacarcaactaagaatccatgactgtattctctccctcggatactcctgttagctattctgcactttttggtaagcaacttcaaggactaaggaatataaaaagttaaatcctaggagactggaaaaga

SEQ ID NO: 424904 - DNA, 592 bp, Homo sapiens
cagcatatggccacagatcagtgatgcaaattctcctgccatgaggacatagccacaggaatctgtggcatctgtgctcactatagatttgcaaccgggagtccattgagttctattgtctatacactggtctttgttggtcttcaattgtgaacgttttgagggactgggagaagcatttggcaaacatgaaatgaggcccttttggaaggatatgattgattgatttagcatgttaattaaagacacactggatggcccaggcctgaaagagatcttctggtcaattctgtgtgatggtagcttctataataaggttgtccagcttgcttaattttgttgttgttgttctgttttgttttgttttaggcttttatcagcctgaagccatggtttttagtttctgtctctagtgataagcagaaaagacggatgaggaaggagctttactgtcccaaccagaaacaacaactaagaatccatgactgtattctctccctyggatactcctgttagctattctgcactttttggtaagcaacttcaaggactaaggaatataaaaagttaaatcctaggagactggaaaaga

SEQ ID NO: 424905 - DNA, 592 bp, Homo sapiens
cagcatatggccacagatcagtgatgcaaattctcctgccatgaggacatagccacaggaatctgtggcatctgtgctcactatagatttgcaaccgggagtccattgagttctattgtctatacactggtctttgttggtcttcaattgtgaacgttttgagggactgggagaagcatttggcaaacatgaaatgaggcccttttggaaggatatgattgattgatttagcatgttaattaaagacacactggatggcccaggcctgaaagagatcttctggtcaattctgtgtgatggtagcttctataataaggttgtccagcttgcttaattttgttgttgttgttctgttttgttttgttttaggcttttatcagcctgaagccatggtttttagtttctgtctctagtgataagcagaaaagacggatgaggaaggagctttactgtcccaaccagaaacaacaactaagaatccatgactgtattctctccctcggatactcctgtkagctattctgcactttttggtaagcaacttcaaggactaaggaatataaaaagttaaatcctaggagactggaaaaga

SEQ ID NO: 424906 - DNA, 619 bp, Homo sapiens
gaatctcttgtagggagcatattattcaatcttgtctttttatccattcagctactctatgtcttttgattacaggttttaatccatttacatttgaagtagttattgacaggtaagaacttactactgccatcttgctaawttttttttttttagttttgtagttcttttgtttcactcttccagccttgctgcctttttgtgtgatttgttctatttctgtggtgatatgctttgattcctttctcttttgtgtatctactagagatttttttctttgtggttaccataaagtttggattaaaacatcttaaagttataatgccctaatttaagctaatagtatcttaacttctattgcatacaaagagtctacacttttatttctctcctgaaattttatgctattgatgcattctttacatctatttatattgtgtatctgttgactgtttatagttgttttcaatagttttgttttttaattcttatactaaaattaagagtgatttacataccaccttcacagtattagagtatgctgaatttgactatatatttacctttaccagtgaattttgtaccttaatatgttttcacatagttacttattatcttt

SEQ ID NO: 424907 - DNA, 612 bp, Homo sapiens
tgtaagcatttggttttaattaatatatatatatatatatatattggtagaggtggggtgggctcctgctatatttcttaggctggtcttgaactcctgggctcaagcaatcctcccactttcggcctcccaaagtgctggctttacaggcatgagctaccatgcctagactgttgggtaaatttccattgcctgctacttgtacttaaaccagaaatattgaaagggatgattactactttagccaagaattaagcttaaaatctgaattgaggtcaaagtataataatcctagttaacattaatctgagtgatggtgataacacatttttgaattattttatgtgtattatttcacttcattttagcaacaaccctaaggggtaagtgctatcattattattattactactattttgcagttgaagcaatttcagattggagagttaagtaactttacccaagattacatgaccaggaaatagagaaggtgggactctaactgcagtctacattttacaggtgactatggaatgccactatattgtatttccaggtagactgtgaatggttgaaayatgctcctgttgtctgctaactgcttaacgccag

SEQ ID NO: 424908 - DNA, 652 bp, Homo sapiens
ggggccactggtggacaccttatgggctgtgtctaaatgccatggggatggggccattcagagttttgggggtcaaaaccctgggccaattctctcagaacatgagacatggagtcaaataagtttattctcaagccttaatatttaatgttgttcacccaacagggttttgaacttacttgggactattaatagttacccctttcttctttcctatgtatcccttttagaatgggaatgtccatcctgtmcctatttcactgttgtattttggaagcacataacttgtttgatttcataagctcacagcttgagataaatttgcctcagaatggatcatttcttgagtcttatctatatctgatttagatgacatttagatgagactctggacttctttagacttttgagttgatactggctattgagatggaatgaatgcattttgcatgtgagaaggacataaattttgggaagccaggagtggaatgctatggtctgaacattggtttcacccccaaaactcctatattgaaacctagtaagagatgattaaaacatgagggctcctcccttgtgactgggattagtgtcctcatatatgagatctaagggaacttgttcactccttctgccatgttgggacacacag

SEQ ID NO: 424909 - DNA, 603 bp, Homo sapiens
tgggcagggctcagaacaattaaatggagtgatgatagtcagttgaactatctactgccacgggctgtggtctagatgaaccgagccttttcaacattatcttcaaaagtcatgattttctttttctgtgaaaggagaatattattcatttaactcattgcaatgaattttctgtgatttttatgcatgaccctgttcaatgctgtggttttgtacagtgctatggtggaattagctagcttttggttttctagcatttgaatactctcttacttggagactgccgtttgttatgcaggcctttgtgggagggatggtgagatccccaaacgaaacaaaaggaaggaasaaatatcctctctccctgttctttgctgcttgagtaacctggacttggccaatcagatgctcctgtccaacactgtgaggtcatctgtggaaatttctagcactgtgagtatccaggggatgcagcaccaacattggcaccctggccagactgtctggtgcagacttgactaggttctgagctgccaggctttctctgttttctgccaatatgctgactattatccaggcttcccagaggttttgtgagctccc

SEQ ID NO: 424910 - DNA, 537 bp, Homo sapiens
ttggaatgccctgtttttcaagatgaactcactggaactattgacttggcagccagctgctttttaaaagcwttgcaccaatcatataagagtaatcaacttaaatatttacgtaaaacctttccaaaattattacttacaggtctcaaaccagaataacagaatttgaagagcaattgcagaaacacttttttctcacatgctcgttgaagacaaacaacagaaaacactaatatattgatgctgatcactgaaaaggtattgcttagaatgtgttagaatctatgtcttaggcattggtgtgtatttctgttaacctgttttccagaagtgttatttttgtttccagatattttctgatttgctcagagctccaaatggtatcaacaagtggttttctacaatgagaatgaggcatgccagtgtgatggtccgtaatcgatatttgccagcagatcattattttaaaaatattatcaggaatttacctataagagtatctaagaatgggggttattaattagaaattgtaattca

SEQ ID NO: 424911 - DNA, 537 bp, Homo sapiens
ttggaatgccctgtttttcaagatgaactcactggaactattgacttggcagccagctgctttttaaaagctttgcaccaatcatataagagtaatcaacttaaatatttacgtaaaacctttccaaaattattacttacaggtctcaaaccagaataacagaatttgaagagcaattgcagaaacacttttttctcacatgctcgttgaagacaaacaacagaaaacactaatatattgatgctgatcactgaaaaggtattgyttagaatgtgttagaatctatgtcttaggcattggtgtgtatttctgttaacctgttttccagaagtgttatttttgtttccagatattttctgatttgctcagagctccaaatggtatcaacaagtggttttctacaatgagaatgaggcatgccagtgtgatggtccgtaatcgatatttgccagcagatcattattttaaaaatattatcaggaatttacctataagagtatctaagaatgggggttattaattagaaattgtaattca

SEQ ID NO: 424912 - DNA, 537 bp, Homo sapiens
ttggaatgccctgtttttcaagatgaactcactggaactattgacttggcagccagctgctttttaaaagctttgcaccaatcatataagagtaatcaacttaaatatttacgtaaaacctttccaaaattattacttacaggtctcaaaccagaataacagaatttgaagagcaattgcagaaacacttttttctcacatgctcgttgaagacaaacaacagaaaacactaatatattgatgctgatcactgaaaaggtattgcttagaatgtgttagaatctrtgtcttaggcattggtgtgtatttctgttaacctgttttccagaagtgttatttttgtttccagatattttctgatttgctcagagctccaaatggtatcaacaagtggttttctacaatgagaatgaggcatgccagtgtgatggtccgtaatcgatatttgccagcagatcattattttaaaaatattatcaggaatttacctataagagtatctaagaatgggggttattaattagaaattgtaattca

SEQ ID NO: 424913 - DNA, 528 bp, Homo sapiens
tgctgacctgccctgcatatttaggacttgccagcccctacaatcacatgggccaattccttaaaataattatctctctctgtctccctctgtgtgtgtgtgtgtgtgtgtgtgtgtgtgtgtgtgtgygcgcgcacgtagggttttcttattatgttaaattaataagtaaatttcgatttaaaagaattatcagctttaatttctatgatggaaaatcttcagattttcatactgagattaaaacatgtttgggaatgtggatgtataccctaaggtgtaaatggggaatgtttgtaaagtactctgacatcatctgacatggcagctccccagccatggtggtggtgatagaaatataaatggtgacagcagcagcagtgtgatagtcacggtggagggagattgcttttctgcagccatgcttctggcatctcccaacctgggtgggacccagctgaagatctgcagagaaaccagccatttctgagagcaaggcaatcagtgggcatttactggagggtgtct

SEQ ID NO: 424914 - DNA, 625 bp, Homo sapiens
aacaatcacttagaaaataattatttagcatttaattattgccagggactcttctaaaaccttttcttaaattaactaattcaatcctcaacaactctgagaggtactgttactatccttaagatgagggaactgaggaaccragaggttaagcaatttgcctttggttcacatagctaatgatgtggagatttgaacttaggctgtttgtctcccaagcctatgttcttaaatttggggaaatagtaaagataatttccacaatgtgaagacagttagcagccttaaggatgaaaggatggtgcaaataccatgcccagtgagtgacagagtatcaaggctggtagagcctgatgaaagcacaagttttcagaaaagagggaaacaaacaattcctataaagttaagaaaatcacattgacaccagacttctcattggtagagaccacaaagcccttttcaaaagtgggtcaaactggcaggctgagcacatatccttccttccctttctgtcaaaagatgggacattgtcttcaactttgaatgacttacacagcaaaacattcaaatttatggaaagaaatgaagacaattttagacatgccagactcatggtttactatac

SEQ ID NO: 424915 - DNA, 625 bp, Homo sapiens
aacaatcacttagaaaataattatttagcatttaattattgccagggactcttctaaaaccttttcttaaattaactaattcaatcctcaacaactctgagaggtactgttactatccttaagatgagggaactgaggaaccaagaggttaagcaatttgcctttggttcacatagctaatgatgtggaratttgaacttaggctgtttgtctcccaagcctatgttcttaaatttggggaaatagtaaagataatttccacaatgtgaagacagttagcagccttaaggatgaaaggatggtgcaaataccatgcccagtgagtgacagagtatcaaggctggtagagcctgatgaaagcacaagttttcagaaaagagggaaacaaacaattcctataaagttaagaaaatcacattgacaccagacttctcattggtagagaccacaaagcccttttcaaaagtgggtcaaactggcaggctgagcacatatccttccttccctttctgtcaaaagatgggacattgtcttcaactttgaatgacttacacagcaaaacattcaaatttatggaaagaaatgaagacaattttagacatgccagactcatggtttactatac

SEQ ID NO: 424916 - DNA, 625 bp, Homo sapiens
aacaatcacttagaaaataattatttagcatttaattattgccagggactcttctaaaaccttttcttaaattaactaattcaatcctcaacaactctgagaggtactgttactatccttaagatgagggaactgaggaaccaagaggttaagcaatttgcctttggttcacatagctaatgatgtggagatttgaacttaggctgtttgtctcccaagcctatgttcttaaatttggggaaatagtaaagataatttccacaatgtgaagacagttagcagccttaaggatgaaaggatggtgcaartaccatgcccagtgagtgacagagtatcaaggctggtagagcctgatgaaagcacaagttttcagaaaagagggaaacaaacaattcctataaagttaagaaaatcacattgacaccagacttctcattggtagagaccacaaagcccttttcaaaagtgggtcaaactggcaggctgagcacatatccttccttccctttctgtcaaaagatgggacattgtcttcaactttgaatgacttacacagcaaaacattcaaatttatggaaagaaatgaagacaattttagacatgccagactcatggtttactatac

SEQ ID NO: 424917 - DNA, 635 bp, Homo sapiens
atccctgctttaaaatcttatgagctagcagagtacatttctaacttatatgttatatrtgctgttaactatgagaagatctcccccaaaatcatgtttttctaatttcttataaaaatactaatacaaaactgcttattgactgcatctcatcagctgttattcttttagactgattgaattattctaagttgcttttccagattcatctaataaaaagaaagattggatctgacatgaacagtgtataaattagtacaagaaagtctcttttctgaatcaaatcttggtcctacagtttaggattttatttatttaatttactttgagacagggtctcattctgttgcccaggctggagagcagcggcgctatatctcagctcactgcaacctccgcgtcccgggttcaagcgattctggtgcctcagcttcctgagtagctgggactacaggtgagcgccatcacacccggctaaattttttattgtatttttagtagagacagggtttcatcatgttggccaggctggtctccaactcctggcctcaagtgatccaccagcctcagcctcccaaagtgctgggattacaggagtgagccaccatgcccagcctagtttaggattaaaaaat

SEQ ID NO: 424918 - DNA, 454 bp, Homo sapiens
tttcttttgtaacaggacacaattggagacactggttattttaccaagctttaactggaatggcatgcttttttkggggggcggaatcaaagttaacttataaagccaataaaagttccttgggaaagctggcctcataccttatctacacagtccctgtgcagggttcctaacctgtgataactaaagaatgtcactttctaacaggcccaggagccccaagttatcttgggacctcaagaggaaaagaatttacccaactcttacaggtatttaatggcacaaacccataactggccttaaggcattaaattcaaatctgagattctctatggaataaagtttcagcaaaaccaaatttaaaaagtagaagagtctatatgcaaaataattattcttgctaactttatgcaaatactcaagccaagtttaataaggctaaaacttattttac

SEQ ID NO: 424919 - DNA, 454 bp, Homo sapiens
tttcttttgtaacaggacacaattggagacactggttattttaccaagctttaactggaatggcatgcttttttgggggggcggaatcaaagttaacttataaagccaataaaagttccttgggaaagctggcctcataccttatctacacagtccctgtgcagggttcctaacctgtgataactaaagaatgtcactttctaacaggcccaggagccccaagttatcttgggacctcaagaggaaaagaatttacccaactcttacaggtatttaatggcacaaacccataactggscttaaggcattaaattcaaatctgagattctctatggaataaagtttcagcaaaaccaaatttaaaaagtagaagagtctatatgcaaaataattattcttgctaactttatgcaaatactcaagccaagtttaataaggctaaaacttattttac

SEQ ID NO: 424920 - DNA, 454 bp, Homo sapiens
tttcttttgtaacaggacacaattggagacactggttattttaccaagctttaactggaatggcatgcttttttgggggggcggaatcaaagttaacttataaagccaataaaagttccttgggaaagctggcctcataccttatctacacagtccctgtgcagggttcctaacctgtgataactaaagaatgtcactttctaacaggcccaggagccccaagttatcttgggacctcaagaggaaaagaatttacccaactcttacaggtatttaatggcacaaacccataactggccttaaggcrttaaattcaaatctgagattctctatggaataaagtttcagcaaaaccaaatttaaaaagtagaagagtctatatgcaaaataattattcttgctaactttatgcaaatactcaagccaagtttaataaggctaaaacttattttac

SEQ ID NO: 424921 - DNA, 549 bp, Homo sapiens
agcagctgatttcccagcagaaaacatggaggccagaaggcagtgagattacatattcaaagcgcaggaagggagaaaggtaggctgtcattatcttatatttctctgagtcccagaactgccatcatcttggtgaggattctttgcctcatccttgattcttcagttcagaaatcatttttatctttttcccccacccccatccatttgccttaactctgatagggtaaaactggaaaaaataaggcaatgacttcaaacaattggaattaatgagaggctcaagtaatatgcacacatgcaagaatagtagaactaactaaaaacagagaaagtaaaaagattagtgatgatgttgctgaaatatgaaaagagacaaggttctgagtcagatgaatttttacattttgattcttcatttctgttttyctcccaaggagaagtcctattactctctcctgaattttaagagattaataaagattctaatggatcctgaagttcaggatcagcagaaagtttcgaaggggattttccaggtgggaagaa

SEQ ID NO: 424922 - DNA, 577 bp, Homo sapiens
acaaattctttgaagaggaaatcatgtgggtcatccattagtgaaaattacaagtgaatcattaataatggttagttagacgtcttttcacattccagttcctctctgataatcagtcctctagaagctgctctcttggtatgtcccaggacatgatcccctgccacaggctgttaacaagggacaaagagaaataagtgtttatcagataagtaaatcagtgaatgaaactaagatgctagaaataaaatatattttatgcctaaagcaacaattttttctttttcagaattcttgaaggaaaaygatacgcaacataattaaattttgagttctacataagtaattcaagaaaacaacttcaatatccaaaccaaataaaaatattgtgttgtgaatgttgtgatgtattctagctaatgtaataactgtgaagtttacattgtaaatagtatttgagagttctaaattttgtctttaactcataaaaagcctgcaatttcatatgctgtatatcctttctaacaaaaaaatatatttaatgataagtaaatgctaggttaattccaattatatg

SEQ ID NO: 424923 - DNA, 577 bp, Homo sapiens
acaaattctttgaagaggaaatcatgtgggtcatccattagtgaaaattacaagtgaatcattaataatggttagttagacgtcttttcacattccagttcctctctgataatcagtcctctagaagctgctctcttggtatgtcccaggacatgatcccctgccacaggctgttaacaagggacaaagagaaataagtgtttatcagataagtaaatcagtgaatgaaactaagatgctagaaataaaatatattttatgcctaaagcaacaattttttctttttcagaattcttgaaggaaaatgatacgcaacataattaaattttgagttctacataagtaattcaagaaaacaacttcaatatccaaaccaaataaaaatattgtgttgtgaatgttgtgatgtattctagctaatgtaataactgtgawgtttacattgtaaatagtatttgagagttctaaattttgtctttaactcataaaaagcctgcaatttcatatgctgtatatcctttctaacaaaaaaatatatttaatgataagtaaatgctaggttaattccaattatatg

SEQ ID NO: 424924 - DNA, 577 bp, Homo sapiens
acaaattctttgaagaggaaatcatgtgggtcatccattagtgaaaattacaagtgaatcattaataatggttagttagacgtcttttcacattccagttcctctctgataatcagtcctctagaagctgctctcttggtatgtcccaggacatgatcccctgccacaggctgttaacaagggacaaagagaaataagtgtttatcagataagtaaatcagtgaatgaaactaagatgctagaaataaaatatattttatgcctaaagcaacaattttttctttttcagaattcttgaaggaaaatgatacgcaacataattaaattttgagttctacataagtaattcaagaaaacaacttcaatatccaaaccaaataaaaatattgtgttgtgaatgttgtgatgtattctagctaatgtaataactgtgaagtttacattgtaaatagtatttgagagttctaaattttgtctttaamtcataaaaagcctgcaatttcatatgctgtatatcctttctaacaaaaaaatatatttaatgataagtaaatgctaggttaattccaattatatg

SEQ ID NO: 424925 - DNA, 576 bp, Homo sapiens
tggcctaggggaataaatacccagaactctctttccctcctctttggtcctttcatttccaaccagcacgtctcttttgctgagcccagccagcagccagaggaccagggtgtggacgatgtagtccataaaggtcagccttcaaggaaatagaaacagtgaagaagagcagagagggttcccagcagaggcgggagctggggggagagcctgtggcrtcagatctctcccaagagtaagccgaaactcagggctcctgggaggtcctctagggctgaggcaaactgaaagaaacaggtttagctttagggccaaggaatgggttgaagaagcctaaggtgaggaaccaggtggcaaagttggagaccagctggaacaactgaagaacaaagagagggagggagacatgtggcctccagggtcagggcaggcctccatcctgcccccgtgctccattctaggacaaatctcaaagttaccaagcttcggtcccagggcctctttgaaactggttttaacactaagtaggatatagggtccctggcaggctcttcccaggcaaaccatgactataca

SEQ ID NO: 424926 - DNA, 576 bp, Homo sapiens
tggcctaggggaataaatacccagaactctctttccctcctctttggtcctttcatttccaaccagcacgtctcttttgctgagcccagccagcagccagaggaccagggtgtggacgatgtagtccataaaggtcagccttcaaggaaatagaaacagtgaagaagagcagagagggttcccagcagaggcgggagctggggggagagcctgtggcgtcagatctctcccaagagtaagccgaaactcagggctcctgggaggtcctctagggctgaggcaaactgaaagaaacaggtktagctttagggccaaggaatgggttgaagaagcctaaggtgaggaaccaggtggcaaagttggagaccagctggaacaactgaagaacaaagagagggagggagacatgtggcctccagggtcagggcaggcctccatcctgcccccgtgctccattctaggacaaatctcaaagttaccaagcttcggtcccagggcctctttgaaactggttttaacactaagtaggatatagggtccctggcaggctcttcccaggcaaaccatgactataca

SEQ ID NO: 424927 - DNA, 555 bp, Homo sapiens
ttttcctaaaacatagccacaggagttcacacaataggtctctgttccatgcttacagtgcccatatttctttagctatttttcatgtrtaatcccaaagatgcttgcaaggaaatcacagaataagatttgaggaaaaaaaaaatcagtaagtccacgtgttaaatttataattcagctcagttaaaaaggaatccgatcacaaattgtaaccatgattcagagcacagaaaattgttttggaatttggattactcaatgtgaattcatcctgctccctctcattttaataaacccatttcaattcttaaattattagtaggacaaaaattaaaagaaagaaatgttgtggaaagtatgtggaaaataagatgttaaaactattttttaaatatgctttgctgcaggcaaaacccagtgttctcatcagcttagtgtattaaaacctcatcaaattccaaattccctattccaataaaataatgtaagaattacttaacttcgttaactggtccagatagccaccagaatttagagttgcacttctatggatac

SEQ ID NO: 424928 - DNA, 576 bp, Homo sapiens
tggcctaggggaataaatacccagaactctctttccctcctctttggtcctttcatttccaaccagcacgtctcttttgctgagcccagccagcagccagaggaccagggtgtggacgatgtagtccataaaggtcagccttcaaggaaatagaaacagtgaagaagagcagagagggttcccagcagaggcgggagctggggggagagcctgtggcgtcagatctctcccaagagtaagccgaaactcagggctcctgggaggtcctctagggctgaggcaaactgaaagaaacaggtttagctttagggccaaggaatgggttgaagaagcctaaggtgaggaaccaggtggcaaagttggagaccagctggaacaactgaagaacaaagagagggagggagacatgtggcctccagggtcagggcaggcctccatcctgcccccgtgctccattctaggacaaatctcaaagttaccaagcttcggtcccagggcctctttgaaactggttttaacrctaagtaggatatagggtccctggcaggctcttcccaggcaaaccatgactataca

SEQ ID NO: 424929 - DNA, 569 bp, Homo sapiens
cacaaactcttgcttaagtaagcttacctaccttcctttctcccttcctggcaaaatttctgtgaatagtcatctttaccttctctcctcttaagtgcatttatccttcagctcggttaaatactcatcttgcccttttgtaccatctaaaacattctttggttaccagaggctgggaagggaaatgggagtgaggttggagggagatgaggatggttaatcaatacaaaaaayaattagaaagaatgaataagacctactttttgatagaccagcagggtgactacagtcaataacaatttaattgtgcatttaaaaatgactaaaaaagtataattggattgtttctaacacaaaagataagtgcttgagggaatggataccctattcttcatgatgtgattattatacattgcatgcctgtattgaaacatctcatgtaccccataaatatatacacctactatgtacccaaaaaaaagaaagcaaaaactaaaaaaaaaaaaaatttgctctaatttactagtgacagctcaaaagtgaaatccaatccaaatccaatagtgaaa

SEQ ID NO: 424930 - DNA, 594 bp, Homo sapiens
tcaattggaattttctttatggtcattttaaagactattataagctgttactatttaccagcttttcagaattaaagaacttgaagtttttccttttatctttgaaaggaggcaagcatctctattgtcacaatcagcctccacacagcatgatggggatggccatgtttttctccctaggagtattgcattgtcacttgagctgttcaagatttgggatgtgatatttttaatctgaacttccaagaacccataaatataattaaatgattctgatgaagccagtcccaaatatctgggccatgacatttacttcatcatttaattgggcagagaaacaaacattaatagaataaattggaaatcttaatcatacaaacatgcagatatggagaaaatcttcacattcccttgcacagctcatcctcgttgttgcctctgtcttctttccctctgttattattctaccgctaacctgaaaatatcttcttacattctttccattattcaaatgcatccatcrtgcaaaataataatttattcattcattttctgagctcagtaacctacaagggaatgcttaattgttggcta

SEQ ID NO: 424931 - DNA, 634 bp, Homo sapiens
tattttgacaaaatataatcctctattatcctatgtacttgatttgtggaaagacacaattatcctctatacgtgatttgtggaaagacagtctaaaaccaagagagagagaaattcttctaataattcttttaaacaaagtaatttcattttgaaaaagaatgccagttattcttctgcttcaaacttaagcattcagttatcttaagacttcaggcttcaaacttaagtattcagttattttaagactatccaaggatatatcaggataaatgtacagaatatcaatatttcactragatggtgtgtttcactaagtcatttgcattgtataatgtaagatatcatcttctaggtgggaaatgagaaatacattccatagatgatgagtttggaaacattttgacccgaaaggaattaatatggaagacaagttttagaaatgctgaggctcagactttgaagcccatgttctacctatctagtgtgtgcatgtatgtgatcacattgcctcacataatataatgcagaggtcaaactgtgtcatttctaacgtcccttcagctctagctttccacaattaagtgagtggaatcctgctgaatgcagttgttctatttttaagtttcatttt

SEQ ID NO: 424932 - DNA, 625 bp, Homo sapiens
agattagtttacacaaaaatacagtgggaatttagtggcagtcttagagacacaatctaaagtgttctgtcagactaaggtttttttctccaggtattttatttaaaaatagatattaaagtggaaaagtacggttttatctttctgctgttatgtcaaggagcaataactaaatgcaggctttgaatatacatacacatatttgggtatatctatgctgatatagtatctctttgtgtacatatataattaccttacatactaggtaaatatgtttaagatataatttacatagagtagcattcaccctattaagtgtatagttctgtgagttttgcgaaatacataactcgtgtaaccaccatcacaattaacatagagcagtttattgttagaacagatatagagcagctactsttcattgttactgcttttgaaggcagcatgctgatgctgtaagctgagaagaaatagttaaagggtcaaatgtcaaaaaactggtgcatgaaatggtggccatgactttttgcaccagcagcccctcacacttccctcattttcactttcctggattctgcatgagcagatgtgccaccctgcaaagcatccagtgtcagccccattc

SEQ ID NO: 424933 - DNA, 606 bp, Homo sapiens
gtagtgacatcctactaattctgatatgtctgtttttttctccctttaagcttgttctccctcaactaagctgtaacagggagcagaaactgtctataatttgcaagaaaaataaaatcaaggcaagaatcttagtgcaaagggaaatcaaaactattagacaccttttttgtctgctgctttgaatttttatttaatcaactgaactatttccctaagcttctaggttaatgccaatataacactaaaatgaagaaacacagtgtgtatataattgaaacaccaaagtatggtctttggaggggtgacaaattcccttatgattaagttgtagattactagaatccatagaatacactttttctcttagtttaaatgagaggtacatagatgaataagtattctcttgattaagtggtatcttgtcaggaaactatgaagagtgactcttcctaagtccatacttaataggtatgttttgcatcttccttacgttagcaactggacacattttagctttatattcaccatcttcattggcagcrgggcagggttacaccaagattggaaagaggccagaaaggcaaaaagaagaacatatttttc

SEQ ID NO: 424934 - DNA, 634 bp, Homo sapiens
tttgggtgtgttactttttgcaactcagtctcctcatctgttaaatggggaaaataacccctgcctcatagagtatatgaaaatataatgtgtataaagcacactttagagtatctaacatatagcaagcattcactcaacagtggctgctcttctgagaagccagcctgaacagattaggttgtttttgaaggtctctaactgtcaatcaagaatccatgattccaccatccaagacatgaaggtcataaaaagagatgagatcattgaaatgaatatgatattgaggatttaattaaaaaaaaatttaataaaaaatttaaaaaacaagtgaatacccttattttttcttatttaattattttatgtgtaaagsccagtttaattcatatagctctttataagagatcgtataggtttagaagaaatgacaatagtgtcttattatgaatttagaaattatccattccaatctacatattaacaaataagttattctaaacatattcttagaagttacttatgtttcactggcaaaactgagtgggtgtttttctggttcaaaggccactcctagagaaacagaaatgttaacttatgttataaaagcagaatgttggctactgtccaaagc

SEQ ID NO: 424935 - DNA, 634 bp, Homo sapiens
tttgggtgtgttactttttgcaactcagtctcctcatctgttaaatggggaaaataacccctgcctcatagagtatatgaaaatataatgtgtataaagcacactttagagtatctaacatatagcaagcattcactcaacagtggctgctcttctgagaagccagcctgaacagattaggttgtttttgaaggtctctaactgtcaatcaagaatccatgattccaccatccaagacatgaaggtcataaaaagagatgagatcattgaaatgaatatgatattgaggatttaattaaaaaaaaatttaataaaaaatttaaaaaacaagtgaatacccttattttttcttatttaattattttatgtgtaaagcccagtttaattcatatagctctttataagagatcgtataggtttagaagaaatgacaatagtgtcttattatgaatttagaaattatccattccaatctacatattaacaaataagttattctaaacatattcttagaagttacwtatgtttcactggcaaaactgagtgggtgtttttctggttcaaaggccactcctagagaaacagaaatgttaacttatgttataaaagcagaatgttggctactgtccaaagc

SEQ ID NO: 424936 - DNA, 557 bp, Homo sapiens
ctaaattatgagcatcttacaactttctctcttctgccactttttttatacacatagtaatgcaactccgctataagattctttaagaaaacctacagagtaatcattttagacatagataccacataggaatggactatgcacacctcagagcattattccaagttgtttggaatttttaattcaaktaatttctttttggtttttcctaaaaggtttattttctaataaatctgtaattttcaaggtacagttttctaaagcaaaatgtgtgtaaagtttttccatataatgtaactttgcttctataatgtagtagatggagtatgaattgtttgaatctgaatttatgtgcaaaatcctctagacaagaatagaccatttaaatactaggaggttggagtctatgacaaatgttcagaaataatattttgaacttaatgactatgttaaatgtgttttattaaagcagaaaactatcactcttttattatcaactaatatttcatcaaatttcatcagcccctatattcagatcatcctaaaatgtggacgat

SEQ ID NO: 424937 - DNA, 560 bp, Homo sapiens
ttcagtcagaaatcctcctaatccaatgtctggacacagaatgattatggataaaaccgtgggccccatcgctaaaagatatgggatataggccacaatggaatcttatgtacagttcatttaagagtaagaagtgtttaactgttttagccaatacacatatcttcaatgcctttactttcaccaaagggaatccattaatacattcattatagtgattaaccagacactagttcaccaataaagactaatcttttatatttagtttgataatgagtaaagtgttgattgtggctagatgtacctcagtaagaaggacctgtagttgccctgtatgggccttctagatataaagccaactgaccaactagtctgggcattcttggactcctcctagaattacaggttaaactaactggcacatatatagtatcatactgaaaataacaaaatattataaaataaattgyagatattataacaagcctacaaatgttaatattttgggaactactagtcaattgtgagagaacaaagagatattagcttgagtcttaatt

SEQ ID NO: 424938 - DNA, 560 bp, Homo sapiens
ttcagtcagaaatcctcctaatccaatgtctggacacagaatgattatggataaaaccgtgggccccatcgctaaaagatatgggatataggccacaatggaatcttatgtacagttcatttaagagtaagaagtgtttaactgttttagccaatacacatatcttcaatgcctttactttcaccaaagggaatccattaatacattcattatagtgattaaccagacactagttcaccaataaagactaatcttttatatttagtttgataatgagtaaagtgttgattgtggctagatgtacctcagtaagaaggacctgtagttgccctgtatgggccttctagatataaagccaactgaccaactagtctgggcattcttggactcctcctagaattacaggttaaactaactggcacatatatagtatcatactgaaaataacaaaatattataaaataaattgtagatattataacaagcmtacaaatgttaatattttgggaactactagtcaattgtgagagaacaaagagatattagcttgagtcttaatt

SEQ ID NO: 424939 - DNA, 641 bp, Homo sapiens
cagtattatattgtggttgaaagcaaagacaccagcctaagactgccgagttttgaattctggctccatcatttcttatctgtgtgacctcgggcaagtgttttaacttctctgtgccccattagacttatacatataaagggaataatagtaatraatagataataataaatctacttcacggcaatattgtgaagattaaatgagttaatgtatgtgaagcacttagaagaaagcctgatacaaacatagcaagtgccatccaaatattttcttttatttcttaggagtagggaacaggttttaatcaatttttctaattccaaaacctcagcacaatgcctggcacacaatatgtaacccagttctcaaagacaaagctatcctgtagctctaaacagtaaacacctcaggcaggctttaatggcaaagcaaaattacatgcttctgtaactacaaaaaaatatatatatatatgtaaggaacataatacaaaagaaaaaagaaaatacctaattcgctgtaacaggaaacagaatctcattaggatctgctttctatcaaactaaaatgtcctagtaaccagtctttcagaatcccctcctgaaatacagcagcaggccaattaattagtatgaaag

SEQ ID NO: 424940 - DNA, 584 bp, Homo sapiens
acttattaaggagtggaggggagggtagaggttcttatttcctagacccgaggcttggctactcattaccttagtcctctctaaacacctctgtctgggaactaaaaggattttctgaatggggacactagttcaaactaagaattccctgtccacaagtgcttccaatttcacaacgtggcgggtgttgaccctttacgtttctcaaagagagctaaggctgcaagtccaggttcaaatttagaattttcagactcaggtttcaggcttgtggcccatacctattcactttctcttggctccatttcgttctctaaagagtcttgactgcattcacatggacactacagatcttacattccaagccctagctactccctccccatttgtaaacagctacagcctcttggctaccttgtggctctgggrttctgtgctgataaagtgacgatagactcagggaaagtggatgaagtctgtcatccacttgggtagagaaggccggggacctacccacctggagcacagtctggaagggggtggggggatgggatctgggtgtttatgtcttcttgacccaggag

SEQ ID NO: 424941 - DNA, 618 bp, Homo sapiens
tctgtttttgccatattgtatgcagtagttaacagtatagaacttggtgatagattatattcttgactcctkctctgacttgtgtcttcagagacataacctttcttttctcagtttatctgtctctagagtaatggtagttatttctattggcattctttgttttcaagggaggtactagtgtttctattttctaaatggtttgcaagcaaaggtttctggctaatagcattttctggtctccaaatctgtggtgcaccattaatgaatctgtaattttcaaacatttaggatgaagtttagagtcatataagaatatggactaaggagctcaacatgtctgagtgtgaatctcagcatggctcattacattttacgggaccatgaatatgttactctatttgagcctcactttcttcccctatatatagtaataataacacatggtagttcttcctagaaggactattgtgaaggctagaaataatacaggtaacactgttagcacagtgcctggcagatggcagccacttaaaacaaataggaattttattattgaaaatgtaattttcctgaattatactaatcctaaatatacttaagcagatttacttaaca

SEQ ID NO: 424942 - DNA, 598 bp, Homo sapiens
attctaaatcctggatgcacattagaatcacctgaggcaccttagcaattctatgcttgggcttcgccctagacagattacatcagaatctcagggaatagcactaatagatccatagttgttagagcaccccaggtgataccaaygtgcagccaacgttgggaaatactagcttgactcaaaaacctatgatctttttataccaggatgcccctaaatcaaaaattgttttcattccacattgaaatagttctgttataccaacaagaccattgatcaaacatgataaacagaataaataaatgtcttcttgataggaaagcattatcctcttctgccttcaaagttatacaagaaatattttcaaggcctaggaatctcagcatcagggctgcaagattttgtttgctttgcttgttgcaagttgaaagcaattttatatttgcattattattatccttggttttgagtgcctatatatggtgcttgcaagctgggaaaggatatctaaacacacctgagggcacaaacctactgaaaaaggatttcctctacagataaagaacatagtgtaaatcagtttctatcttacagttta

SEQ ID NO: 424943 - DNA, 610 bp, Homo sapiens
gaataagctttattacaaacaacatttctattacccacgccctgccctgccaccctataagcaggtaggctataactttctctaccactctttgtcagttaaaccttctttcctcagaatcttctgaatttgtcaacaccttgagttcatggtgtctactgcctattattttttctttgtgacttaataatttggtcattttagtgtggtttgggaggtagaagacaaatcggtaatgtttaattaaaaattttggactacattttccaaatgacattgttgctaatatagaaaacttagattagtttattgatctcagtgtataggaaataaaattttatatgttgatcttgcatccaactagcccgttgattctttttactatttctaatagtttaaaaattgattatttttggattttctaataaggagatatattatctgcaatgacaacaatgtgtatctttattwttgtcttttcttgtattgttttcgtgagaaactcttgtacaacttagaataatagaagtgatggtagacatcttcctttttttcatgactgatggacattaatctagtattttactattacagatgattttcagtacaa

SEQ ID NO: 424944 - DNA, 577 bp, Homo sapiens
tttcaaagaggatcttgaggtaattaacttcaaaatttcttccaatttaaaaaatatctttctttatgcctctctcttgaacagtggcttggctgggtgtagaattctatcttcaaagttactttctcttagaatgttgagaatctctttctactgccttcttgtaccctgggttgcttgcaaagaacctgatgtcaatctgattctgatttcttcgtcaatatctttctttttactctgatagcttttaagatttttctctttattctctgttwtcaaagatttcatcaaagtatatgtgcttgtgcatgtgtgtatgtgtgtgtgtgtgtgtgtgtgtgtgtgtgtatctttagtctctcctacgccgggagaatttttacagtgttttgagaaaattttctgtaatatatctttaaatgctacctttcccccaaatttcctgatttctgccttctggaaatacttttaaatagacttcagaacttctgtgtcatccatgcattatgacctttctacttcccatgtcttcattcctgctcccaatacctaattttgggctatggtacatattgtc

SEQ ID NO: 424945 - DNA, 577 bp, Homo sapiens
tttcaaagaggatcttgaggtaattaacttcaaaatttcttccaatttaaaaaatatctttctttatgcctctctcttgaacagtggcttggctgggtgtagaattctatcttcaaagttactttctcttagaatgttgagaatctctttctactgccttcttgtaccctgggttgcttgcaaagaacctgatgtcaatctgattctgatttcttcgtcaatatctttctttttactctgatagcttttaagatttttctctttattctctgttttcamagatttcatcaaagtatatgtgcttgtgcatgtgtgtatgtgtgtgtgtgtgtgtgtgtgtgtgtgtgtatctttagtctctcctacgccgggagaatttttacagtgttttgagaaaattttctgtaatatatctttaaatgctacctttcccccaaatttcctgatttctgccttctggaaatacttttaaatagacttcagaacttctgtgtcatccatgcattatgacctttctacttcccatgtcttcattcctgctcccaatacctaattttgggctatggtacatattgtc

SEQ ID NO: 424946 - DNA, 552 bp, Homo sapiens
attaactttagctatttcctctttggggtggagcaagtagggaatggaaagatggagagagacagagagagagagagagagagacagttttttcccatcatctcagcttttagaagggaatggaagtcttccctgacctgggtggtatcatgggaaggacaggagtccttctacattccctttataccatgcttgctttagatgacatacatgttcatgtaaaaatttgtttcctgattacacatctacatatcatagtattaggcataaaaatttctggatggagaaaattagaatctataagaataaaatgttaacaatggttatctttgaatgggataactgaatcttcacaactccatggyccaaattctctgtggtttccaaatttcctctctcgagcatatacagacagtccctaacttaggatggtttgacttacagtattttcaacttatgatgggtttatagggatgtaacaccatcataagtccaggagcatctgtacttctttcaaaatatataaaacaacatatgttatgtatgagagtg

SEQ ID NO: 424947 - DNA, 546 bp, Homo sapiens
gttcttatttttcccattttacagatgaggaaatggagttctaaagatagtaggtaactttcttgaagtcacctggcaatgtcagagccaggatgtgatcacaggcctgctattctccttacataaaatgagcttaagtaatcaaggcccaggtggagcagaaactatacaggatccagtcatcaaagttgtctagactggattagcctcaaatcaatctagcakctgtgagctctctcttacattgagagtaccatgcaagagagagaaaactctgaggctattgaaaaatggtcactggttgggggtgttcctctgcattttttacattaaataaagtataggttataagacaaagtgcatgagaattagaaccattcattttctgatactgtgtggctaccttgggtatttttggagaagtggttgtcttaagtcagccaaactctaacttgtacttctaatttatagaattcatgaacataggaacattaacagtaacattaaagcaagtacacatttcaaagcacatattgaaggaaataa

SEQ ID NO: 424948 - DNA, 572 bp, Homo sapiens
ctgtggcctgtaacggtaagaccctgggacgaaaagctctgccaggtcctgatctattgccactgggcccgagccaattgctattcaggccaagacaactagacgaacctggctccatggaaaaacgaacacaaacaagttgatgcctgacctcctaattttggctctgcactagaccaacaagatcatttttattattatgaagtgcattaaaaatgcaaaagttcggcttctgagtttactgaactggaaataaattgccagaagagaccagagctttttcagatactttcaaactcctcaattattgctctgtctcctttctcatgtcccttatttctcctctttttctttttttccttatttccttttctgttaggaaaaaaaaaggactaaatctttctggttaaatattgtgatattttgctcttctaggtcattcaatgcaaaatattaaacatgggaaagctacagaatctactgacaaataccaaaatcagttgtctttagagagtaagaataatgwcccccacaaacccctgcctctccttctttctccaatttgagaattt

SEQ ID NO: 424949 - DNA, 593 bp, Homo sapiens
tttagtgttttggaaccttatcctttgcattaatctgcctggtgatttttggtgtttctgtcatcttcacttataaataaaaagttatgcaccaaaacagtggctggcacataacaggtacagaataaataaatattgtctggatatcattcttttaaatttaatacataataatatattattataatgacctcaggtccagagttatttaactttgtttgccaaatctcttataacaaccaccacaacaaaacagtaagagaagctggcacatatgggatagatataattttaggagctgacggggagggtcagggtggacygtggagctctacacctgtcctcataggatgtcacctggattgccagcacaggctgctgacatttaaaaacttttctgattattttgtaactcaaagcaattatttaaaaattatctggtataaatatgagactaagacacacagaatgttttctaatgaaaacatgcacatgaaatcctacaaaattcacattaatcacattacctagaatagttggagttgacttttggataactgattttgaaatctctctttttttttttagtaatt

SEQ ID NO: 424950 - DNA, 524 bp, Homo sapiens
ccttggactctgaagtccatgctgtttcggacacaccatgctgcttaattcacactttatgtggcagatgttgaaatagttttcccactccaatttattctctctccacatgacttagtgttttctttattaaaatcacatactagcaagataccwgaactactttaaaaatcagttaggaaattcaacagagcatagtgtctgtaggcagagaatgtgtcgtcattgtccagacacagcttctgaaccacatgtccatacatcccagctggcctggcttctagtcagtatactcgtattgtcctggtagaattattactagtcctgttggggtaggcaaaatgataatcccccaaagatattcacaccctaatcccttaaacctgtgaatatattactttatgaggtaagagggacttagcagatgtggattttgaggtgaggatattatcctgaattatctgggtgggctgaatgtaatagcaggtccaaaagagaaaagcaggcatggcagagtctgattt

SEQ ID NO: 424951 - DNA, 544 bp, Homo sapiens
atgtgtgagaagactgaacttaactctccctcctaaaattatggagcactcctaactagtcctcaaactttatttactcgtgggcctataaaccaaccttcacccagtagtttgaaagctcagtctttctctggcttgacagagaaaggtttggggttggggaaatgtgtggaaggccctgtggctcaggagtgaattarctcattaccaccaactctaccaaggaccagggcttgggccaggcagctggttcaggaacggactgacctccaaaacatcttcttggtaggtcatgactctcagttttaaacactgtctgcatgtttctgaatggatgcagaaagggcatgaaagctgtattttgcaaactcatgcactcaagaaacatgcattaagcacctcctgtgtgccctgtttcaggtgtggggaacagacatgaacaggacacagatagtgggaaatccaggttcctaaggtccttgttttcacccaactatgaacattccatttcttgccttggcctcacccgcagaggtaaggaacc

SEQ ID NO: 424952 - DNA, 544 bp, Homo sapiens
atgtgtgagaagactgaacttaactctccctcctaaaattatggagcactcctaactagtcctcaaactttatttactcgtgggcctataaaccaaccttcacccagtagtttgaaagctcagtctttctctggcttgacagagaaaggtttggggttggggaaatgtgtggaaggccctgtggctcaggagtgaattagctcattaccaccaactctaccaaggaccagggcttgggccaggcagctggttcaggaacggactgacctccaaaacatcttcttggtaggtcatgactctcagttttaaacactgtctgcatgtttctgaatggatgcagaaagggcatgaaagctgtattttgcaaactcatgcactcaagaaacatgcattragcacctcctgtgtgccctgtttcaggtgtggggaacagacatgaacaggacacagatagtgggaaatccaggttcctaaggtccttgttttcacccaactatgaacattccatttcttgccttggcctcacccgcagaggtaaggaacc

SEQ ID NO: 424953 - DNA, 358 bp, Homo sapiens
tagagatagatattttcacacatacagacatatacacatatatattttatttaatttaaaaattgttgaaaaagaacaaaaatttgtaagatctcactgttggccttcaagctgttggaaactatgatacacattcatgaaaaggagmctgagggtcattatacaggttggtttcagctcctaaggggtcctgccatcccagatctgtgaactccagggaaaatctctacttttctaccatttccttggtgattgattgcaaatcccctggggtttggagaatcacatatatctttcctcccagcttctgctataggttttcatttgctgttgaagttgagcaggaaccacccagagc

SEQ ID NO: 424954 - DNA, 358 bp, Homo sapiens
tagagatagatattttcacacatacagacatatacacatatatattttatttaatttaaaaattgttgaaaaagaacaaaaatttgtaagatctcactgttggccttcaagctgttggaaactatgatacacattcatgaaaaggagactgagggtcattatacaggttggtttcagctcctaaggggtcctgccatcccagatctgtgaactccagggaaaakctctacttttctaccatttccttggtgattgattgcaaatcccctggggtttggagaatcacatatatctttcctcccagcttctgctataggttttcatttgctgttgaagttgagcaggaaccacccagagc

SEQ ID NO: 424955 - DNA, 358 bp, Homo sapiens
tagagatagatattttcacacatacagacatatacacatatatattttatttaatttaaaaattgttgaaaaagaacaaaaatttgtaagatctcactgttggccttcaagctgttggaaactatgatacacattcatgaaaaggagactgagggtcattatacaggttggtttcagctcctaaggggtcctgccatcccagatctgtgaactccagggaaaatctctacttttctaccatttccttggtgattgattgcaaatcccctggggtttggagartcacatatatctttcctcccagcttctgctataggttttcatttgctgttgaagttgagcaggaaccacccagagc

SEQ ID NO: 424956 - DNA, 358 bp, Homo sapiens
tagagatagatattttcacacatacagacatatacacatatatattttatttaatttaaaaattgttgaaaaagaacaaaaatttgtaagatctcactgttggccttcaagctgttggaaactatgatacacattcatgaaaaggagactgagggtcattatacaggttggtttcagctcctaaggggtcctgccatcccagatctgtgaactccagggaaaatctctacttttctaccatttccttggtgattgattgcaaatcccctggggtttggagaatcacmtatatctttcctcccagcttctgctataggttttcatttgctgttgaagttgagcaggaaccacccagagc

SEQ ID NO: 424957 - DNA, 568 bp, Homo sapiens
tgattcccacacttcaaccccagttaatacctcttaaaaacaaccccaaaactcttggggagacatagttgaagtttcctctggtctcctcattcagctgccctacaggtattaaactctgtctctgctgtatcccaagtgtctcagtttattgactcactgcacatcgggcaaatgaacctattatggttacaattagataaatgataattttaaagttcctaatttacacagatcagattgacaataagtagaaggttagatgatacaaatgctggttaagaatacattcttgtctaggcatagtggctcatgcctgtgatcccagtactttgggagaccaaggcaggaggattgctcagcccaggagtcaaagaccaggctgggcaacacaacaagactctgtctctacaaaaaaaaccaaaaaattagccaggtgtggtggtgcatgcctgtggtcmcagttactagggaggctgaggcaggaggctgaggtgggggatcgctggagcctgggatggtgaggctgggtgaactacgtttgcagcactgtactccagcctgggtg

SEQ ID NO: 424958 - DNA, 574 bp, Homo sapiens
ggatgtatttccatttgtttgtgttgtctatgatttctttcagcagtgttttatagtgttccttgtagacgtcttttgcctccttggttaggtatattcctaagtgtttcgtttatttatttattttggcagctattgtaaaaggggttgagttcttgatttgattctcagcttgatcactgtttgaatatagcagggctactgatttgtgtacrttaattttgtatcctgaaatattgctgaattcatttatcagttctaggagctttctggaggagtttgtagggttttctagatatatgattatatcattggcaagcaacgacggtttgacttcctctttaccaattcgaatgcccttcatttctttctcttgtctgattgctctggctagacttccagtaccatgttaaatagaagtagtgagagtgggcatccttgtcttgttccagttctcaggggaaatgctttcaacttttccccattcagtattatgttggctgtggatttgtcatagatggcttttattacattaagttatgtcccttctatgccgattttgctaaggttttta

SEQ ID NO: 424959 - DNA, 574 bp, Homo sapiens
ggatgtatttccatttgtttgtgttgtctatgatttctttcagcagtgttttatagtgttccttgtagacgtcttttgcctccttggttaggtatattcctaagtgtttcgtttatttatttattttggcagctattgtaaaaggggttgagttcttgatttgattctcagcttgatcactgtttgaatatagcagggctactgatttgtgtacattaattttgtatcctgaaatattgctgaattcatttatcagttctaggagctttctggaggagtttgtagggttttctagatatatgattatatcatyggcaagcaacgacggtttgacttcctctttaccaattcgaatgcccttcatttctttctcttgtctgattgctctggctagacttccagtaccatgttaaatagaagtagtgagagtgggcatccttgtcttgttccagttctcaggggaaatgctttcaacttttccccattcagtattatgttggctgtggatttgtcatagatggcttttattacattaagttatgtcccttctatgccgattttgctaaggttttta

SEQ ID NO: 424960 - DNA, 599 bp, Homo sapiens
agaaaaagctgtcatactcatgtttgtggtttattagagtgaaagactacagattagagtcagcaaaaggaaaaggtgggtagggcagagtctaggagaaacaggacacaagcttccagttggcttctcccaaaggtgttgcatgaacagcacttaattatcttagcaacaatgtaacacacatgtaaatttttgcatcctatgaatctcatctgagccttggtgtccaaggatttttattggggttagtgacaaaggcatgcagcggctatgggacaacattarctactcagtctccagcccccagaggtcagtgtggttcaacaactgatgcagtgcggttcaacaacttagacgacaaaaacactcctggcaggcaggagatttcaagagagctcagaggtcacctcctggatgtcagccaaggaccagtccttttttttttgaatgtgcagggtttgagtaacccaagactgctgtgttaacctttttctggacacctatatacatatatttgtctgttctttggattctccattgaactgggtattgctgttactgtttttgccttcctagttcctcattaatgggctaaaata

SEQ ID NO: 424961 - DNA, 599 bp, Homo sapiens
agaaaaagctgtcatactcatgtttgtggtttattagagtgaaagactacagattagagtcagcaaaaggaaaaggtgggtagggcagagtctaggagaaacaggacacaagcttccagttggcttctcccaaaggtgttgcatgaacagcacttaattatcttagcaacaatgtaacacacatgtaaatttttgcatcctatgaatctcatctgagccttggtgtccaaggatttttattggggttagtgacaaaggcatgcagcggctatgggacaacattaactactcagtctccagcccccagaggtcagtgtggttcaacaactgatgcagtgcggttcaacaacttagacgacaaaaacactcctggcaggcaggagatttcaagagagctcagaggtcacctcctggatgtcagccaaggaccagtccttttttttttgaatgtgcagggtttgagtaacccaagactgctgtgttaacctttttctggacacctatatayatatatttgtctgttctttggattctccattgaactgggtattgctgttactgtttttgccttcctagttcctcattaatgggctaaaata

SEQ ID NO: 424962 - DNA, 625 bp, Homo sapiens
gttccataactccttctttagagttgggccaaataggtgacactgcttttcacagtgacattttctacaaagcaccccaggttcttcagtaactaaattggatacagcccaagatgggtcagatgcacaccaaatccttctgttaacaaatagttttcaatgtagtgtctcagttcaataagttaaactgcttcttctgtcccccacccagtattagctaagaaaggaagtgaataatcaagttgttgggtgtagcactgcaccacatctttttctttgaccaaatctaggccagcactattggcaggttcatggatctcctgttaagkttccttctatttctttcccaacagtggccatgaactctgacattggcaatggcagcagagttagggccaatggcagtgactagttacaatgaatcccaggagaggtgccacttacctcactgatttatggaattggatgtcattggtagtattagtgtctgtctgttactggggagaaaaggcattgttctaagtagcagaatcctgattatatattttcaatcctttgttttcaatctttatgtaaatcatggtatgactagactttaaagagttagtgattaggacactgagaa

SEQ ID NO: 424963 - DNA, 587 bp, Homo sapiens
tttttttttttttttttttttttctggtgaggggagtttacttcttcccaattttatgcttccctcatcctgcttctttaaattctctgctccctcgctttttgaatttcccttgttcagaaggtaaagttaaacaacttttgaaaagtgtcctttctgttcagtggcagtgcmtttttgttactgccaaatgacaccttgcattgggggagcatttttacagctcacaagcattcctataaattataagaattatcagaatcatgttgatgggcagaaaaatatcaatttaatgttttacatatgccccaattttggggcacagagaggttaagttactagcccaaggtcacacagttagtaagtggtagacctgggctaaaaatcaaggtttgtctctaatactaaggtgactgcttttcactatattaaatctaatgttacaatggaaccttacacttgaatattaaatatgaaggaacagaataaagaaaatatccaaaatataatccacaattctccttgttaaaaaataaatgattttcattatataaataatagatgagtatattcttgctttaaagtat

SEQ ID NO: 424964 - DNA, 587 bp, Homo sapiens
tttttttttttttttttttttttctggtgaggggagtttacttcttcccaattttatgcttccctcatcctgcttctttaaattctctgctccctcgctttttgaatttcccttgttcagaaggtaaagttaaacaacttttgaaaagtgtcctttctgttcagtggcagtgcatttttgttactgccaaatgacaccttgcattgggggagcatttttacagctcacaagcattcctataaattataagaattatcagaatcatgttgatgggcagaaaaatatcaatttaatgttttacatatgccccaattttggggcacagagaggttaagttactagcccaaggtcacacagttagtaagtggtagamctgggctaaaaatcaaggtttgtctctaatactaaggtgactgcttttcactatattaaatctaatgttacaatggaaccttacacttgaatattaaatatgaaggaacagaataaagaaaatatccaaaatataatccacaattctccttgttaaaaaataaatgattttcattatataaataatagatgagtatattcttgctttaaagtat

SEQ ID NO: 424965 - DNA, 489 bp, Homo sapiens
gctcacaacacggcatctggctgtcatcagtattaacacggtagaagcccgagtctttttgtratctcatctcagaagtggcatcccatcacattcaccacagtctgtttgttagaagaaagttcctaggcccagcccacatttaaagggaggaaattgtacagggacatgaataccaggaactgggaatcaggggagctgtcctagaagctgctcatcacacatgttaacaattggtggcacagggtgttgttccattaaatgggtctggtactttgggatatgttgatagtagtttgattcagaggttataaatctatgcattgcaatccaataagatattgaacaatgagatggagacagttgtacttacctcagttcctatgaaggagaacattgtatttatttgcaaataatctctggttaggtggaaacagaagtctagaagacagggaagtactttgtattcaggatgatgccacaggatag

SEQ ID NO: 424966 - DNA, 571 bp, Homo sapiens
tagcagcttaagacaacagacatttttagctcatgttttctaggggtctgaatctgggagtggcttagctaggggattctggctcagggtgtctcatgaggtttgactgaagatgttagcccaggctgctgtcatctgaaggcttgactgggactggaggacctgcctccaaggtggctcatattggcaggtggcctcagttcctcaccatgtggggctctccataggactgctagagcatcctcatgacatgtcatctggcttcctccagagtgactgatccaagacaaagaagcarggaggaagccacaaagttttcaaatcagcatttataaagtacttcactctttccagtcattaatacataaatgagcagataagttcaggatatttcagatccaacaggggcatgaattgtgtgtatacctgatttaaaaaaaaacaacaaaaacaatggggacagttttgaaagtgccatccttcctaagataattgttgtagaagaaaaaagaaagtgccatccactagccaaagtgaagcatgtgctagtttttctatgttagatttagtg

SEQ ID NO: 424967 - DNA, 618 bp, Homo sapiens
ctcccctttctctgcagtcctgcctctagtctaggttgtaaactctgggagaaaagggacatgtagattttctttgctgccctaatcttagtgcctagaagagcaccttacaaccttacatgtagtgagtgctcagtaaatattcgttgaattaaccaagtgccatttatggagacagactgatggataattagataaagataacaaaaagctgctgaccacagtttgatttccttaggcctttaattaccttgtgttgggatcctggatatattgctgttgtgtcctagagtctgttttcagttggtaaagtgggatattcraggttaaaagggggaaaaaaacaagttgtgattcttcttttggaaagtcagactttcccaaatgcaaattggctatcagtatgttaatatgttctctaaacgtacctatgattttatcagtgatggaaaatattgttaaaatatatttgtgttttacagaaactacattaaaagacttttccctcaatatttcaaggaaaacttttcatctttattttgtcctttctcttcttctcaatgttagtttttgtattatatggaaattgctttcttgattaacatttaaaacgtctgt

SEQ ID NO: 424968 - DNA, 598 bp, Homo sapiens
tatcatcttttcattgttcacatgtctttctgcacaaacatctcactgatttatatagccccagtgctcagctcatcagagatgatcartaaatatttgctgaaatatttcagctaaaattgcagaactaaaagaaattgttcttttagctcactaaaaatcaacttatcagccatttgaaaaaataagaaatgtaattactaagttaagaggcagagctctgagtgggaatatgggaatattgaaatctctgtaatagctcttttattatagtcaaattagcttctcaccccttgaacaggtggtgactatttctaactctgtgcctttactgaagccattctcctcccacaaatgtcctccccactactctgcagttttctaaattctacccatcatcaaggccaagtcctatctactccataaaggagccctctctaacctacccatcccatctctaactctactgtgctaagcctcacagtggcagtttcctgactttattgatattgcctgtacactctgtctgtgaaggaataaaagcatagttaaatgtttacctagtaataaagcaaaagtctatatacattattccatt

SEQ ID NO: 424969 - DNA, 598 bp, Homo sapiens
tatcatcttttcattgttcacatgtctttctgcacaaacatctcactgatttatatagccccagtgctcagctcatcagagatgatcagtaaatatttgctgaaatatttcagctaaaattgcagaactaaaagaaattgttcttttagctcactaaaaatcaacttatcagccatttgaaaaaataagaaatgtaattactaagttaagaggcagagctctgagtgggaatatgggaatattgaaatctctgtaatagctcttttattatagtcaaattagcttctcaccccttgaacaggtggtgactatttctaactctgtgcctttactgragccattctcctcccacaaatgtcctccccactactctgcagttttctaaattctacccatcatcaaggccaagtcctatctactccataaaggagccctctctaacctacccatcccatctctaactctactgtgctaagcctcacagtggcagtttcctgactttattgatattgcctgtacactctgtctgtgaaggaataaaagcatagttaaatgtttacctagtaataaagcaaaagtctatatacattattccatt

SEQ ID NO: 424970 - DNA, 564 bp, Homo sapiens
ggttttgttttcaaggttgcagatggagttgaaggtcataatgccttttcccatgactgctggcagcagctgcagggttactaagggaatagccacagaccacagtgtgatgagagraataaactcaggtgactctgcctgtctggcttgtataaagtcttacagtcctgccttcattggggagtccttgcatagggccagccaggctcctggaaccatcactgccctctactggatcagcataggagtccttgaagcccagtgggtccttctgatgaaatgggtgttagcctttgagctctgaggaagtggcgaccacagaatttatcctcagttcacctcatgcacttagccagtgacaatggtttgcttggtttgacatctgcttgtactgaaactagtcatatctgtgagatctgtcagatgcgggttctattcaatttggtacacttgtacagaaaataccattttgggtttgaaagcagatacatttagatcagagacatgaaaagacaaaatggctttagaatgctgaaaaaggccttggcaactctgaaatggtgt

SEQ ID NO: 424971 - DNA, 564 bp, Homo sapiens
ggttttgttttcaaggttgcagatggagttgaaggtcataatgccttttcccatgactgctggcagcagctgcagggttactaagggaatagccacagaccacagtgtgatgagaggaataaactcaggtgactctgcctgtctggcttgtataaagycttacagtcctgccttcattggggagtccttgcatagggccagccaggctcctggaaccatcactgccctctactggatcagcataggagtccttgaagcccagtgggtccttctgatgaaatgggtgttagcctttgagctctgaggaagtggcgaccacagaatttatcctcagttcacctcatgcacttagccagtgacaatggtttgcttggtttgacatctgcttgtactgaaactagtcatatctgtgagatctgtcagatgcgggttctattcaatttggtacacttgtacagaaaataccattttgggtttgaaagcagatacatttagatcagagacatgaaaagacaaaatggctttagaatgctgaaaaaggccttggcaactctgaaatggtgt

SEQ ID NO: 424972 - DNA, 544 bp, Homo sapiens
caatgacccctccccagagcagagcactactctgcttgcagataggaggctactggtgctttctggcaatgcatttctgcaaggtgcagtttaaatgaactcatatggtacttgatatggaaagaagctttttttcttctcaagttggatgcagaactgagtttaaaagatacaaggaaagcagggtttcattagtgggagctgatttagggttcagttctttatcactgcaatcttaggcaggccccttaactcctagtctctataaaataaggaagggggttgtcccagttttcagtctaatgtccccattctatgacagacccatgtcttctttatgtagaccaaggaagaggaattttagcaaaactacctgattatgcccatgtttcccaaataccttgatttttcttatattgacatttcatctgcacatgtctgggtgataattcattaatcaatgtaaaacgtagggacsctttattagctccataatgaaaaaaatctctccaccagccaagtgctgggacccaggtggccacca

SEQ ID NO: 424973 - DNA, 613 bp, Homo sapiens
cctttcagcaccaaaagtgacctctcagtatttctgtttcagaccatttcattgccacatcatccagggctcccacgcaacttcaaagtcagggagctcagggtcaagtacaaggagcaaaccctgagcttaggattttaagcaccacatttgagatcgtttttaagcaacgttcccatrgccttttaaagcctctaatagctgaaggtgattacagtagatttctgcaggtattacaagatttggttaaggcacatcgtgtgagtatcgggggggcatccctttcaccccacacttgcttttacttttccaggtgaggaaagtgtatataaaattactgatcttttttgctcttttgacatttcatgttttttggaggaaatttggttcccaactttggctgcatattggaatcacctgaagacctttaaaaaatacaatgcccaagctgtaccctagaccaattaaatcagaatgtcttgggtggggcctttacatccatatttttgaaagctccacagatgattccatgcacagcaaaggtttagaactactgccttagatagaacttcaacacaaaaaaacctgagttcgtaggcattgaaaaataaca

SEQ ID NO: 424974 - DNA, 525 bp, Homo sapiens
ttattttttaaagcagcattattgagatataattgacataccacacagttcatccatttaaaatctacaatttagtggtgtttaatagaataaagttttccaactrtcaccacaattagttttggtacatcttcattaccctaaaaagaaacctcatgcccattaatagccactttattctccccatccccctcagccttaagcaaccactaatttgtgttctgactctatagatatccctatttttgaaatgtcataataagtggaatcacacaatattccaaaaggccatttcatttcatggtcttttgtgagtggcttctttcactcagtagaatatcttcaaggttcatccacactgtagcaagtatcagtacctcattttttaatatcaccaaataatattccatggcgtggacataccacgtttcatttatcctttcgtcagttggtgggcattcagttgcttccactttgggactattatgaataatgctgctatgagcattcatgtacaagtttttg

SEQ ID NO: 424975 - DNA, 562 bp, Homo sapiens
aattctggcaccataaaaaatctgaatgtagtgacatgatcaaaggatcacactagctctccagaaatggtccctaaccaaagtggaaactcagaaatgacagataaagaagtcaaagaatggattgtaaggaagctcactgagacccaagacaaggttgaaaatcaacacgaagacacttytaaatcaatccaggaaatgaaggaagagataaacattttaaaaagaaatcaatcagagcttctgaaattgaaaaactcagttaaggaacttcagaatataactgaaatctttatcaacagattgaaccaagcagaataaaaaatttcagagcttgaagatggtctttcaaactaacccagacaaaaataaaataaatacaagaacaaagtcttcaaggaatatgggattatctaaagtgatgtaacttacaaattattggcattcctgagagggaagaaaaagtaaacagcctggaaaacatatttgagggaataattcaagaaaatttccctaatcgtgctagagatagacatccagatagaagaaatccaaagaacac

SEQ ID NO: 424976 - DNA, 600 bp, Homo sapiens
ttgctcatttaagataatgttaacttttggattattttatagatgcttttagtcaggttaagaactatcctttctcatttctaattgaagaagagtttttaaaatcataagtgggttttaagtttgatgaaagacttatctattgaaatgatcttttggttatctgtattattctgtaaatatggtaaggtacatttatggattttctaataataaaccatccttgtatacctggaatacattccatttggttgtgatatattgtctttcatatactcttttgggtttgattcattaatattttgttagctgttttacatctaaattaatgagttaaaataacctgtaatcttcatgtctcataatttatttgttctgatgtcaaagtatacttgccttacagaataggttgtgtggtattccctctttttcttttrtctgaaagtgtttgtataaaattgagattatctctttctagaaagcttggtagaactcaactataagacagtcttgacttagtatttcctcagcaggaagattttaaccactgcgttgaattttaagatagttataggatgattcaagattttaaaatttctt

SEQ ID NO: 424977 - DNA, 550 bp, Homo sapiens
tctttcacatgtgtatgctatcaatattatttttaaaatattagrgaagacctgtggaccccaactatgataagtactgtccctaccattagagtaactctaggttaaagcattgtcccaggacccctcttaaaatgtagttgctacttggaaggtatagcatattttaagccgtaagtaaccacagatattcatatagaataatttatcaaatataaataggaacaagaaattttatcacaaaaagagaaaggtcaaaggaacaatggctgttagagagaacaagtctaagcaagatgctaaagtgtggcccatgatccaaccagaacctaacacagaggcatcaggtacagggattcagaatagtgaggcagaggtaaaaggaacacaaagataaatatctcttccctcataattttgttaaaagccaattttgcatttcaacatcctgcattcacagtgaaattctcccctcattctaggccccaaaacctaaaaggccaatgaatatggagatggctgcgactagccggttccctttgtgttcaca

SEQ ID NO: 424978 - DNA, 586 bp, Homo sapiens
actttgttagcaacaacaaagcagccgggaaatgattctcaaatcaccttctaccttctaaatctgatgaaagtacatctaattggtgaaatctaatttgcatccrgaaacataactgtaagggaggcagatgttattttttgaggcttggcagtacaggaagccacgttaatgggaggcaagagagagtactgaatggaattcaccagacttacaagctcttttgctactaaagattgtatatatttgtctttctatccttaagcttccaaacaaaaatagtaatgaccatatggtgatgcctaacagaatgcaactctttctggtaaaaacaaaactgtggacatcttcttcccaaaaaggggatatccagggtctcagtagtcaccaaatccatctttgcttgatactcattcattttatggttttgtcataatcctaccttgatatactgtaacttaaaaactattataaacttaattactaccaacatattttacataaaatagttgaggaaaaggaaagatatgtgtatatttgtgtatgtatgtgtgtaagcaagggagaaaatatgggtacctattga

SEQ ID NO: 424979 - DNA, 586 bp, Homo sapiens
actttgttagcaacaacaaagcagccgggaaatgattctcaaatcaccttctaccttctaaatctgatgaaagtacatctaattggtgaaatctaatttgcatccagaaacataactgtaagggaggcagatgttattttttgaggcttggcagtacaggaagccacgttaatgggaggcaagagagagtactgaatggaattcaccagacttacaagctcttttgctactaaagattgtatatatttgtctttctatccttaagcttccaaacaaaaatagtaatgaccatatggtgatgcctaacagaatgcaactctttctggtaaaaacaaaactgtggacatcttcttcccaaaaaggggatatccagggtctcagtagtcaccaaatccatctttgcttgatactcattcattttatggttttgtcataatcctaccttgatatactgtaacttaaaaactattataaacttaattactaccaacatattttacataaaatagttgagraaaaggaaagatatgtgtatatttgtgtatgtatgtgtgtaagcaagggagaaaatatgggtacctattga

SEQ ID NO: 424980 - DNA, 593 bp, Homo sapiens
acacagtttcaacagttgtttcctgattagtcatctcagactttgtcaaacactcacactaccaggaatcctcacaaacccattttgtagcttctggggtattttacagagcctggcatattacactgggatcatcttacatcactttggcattcctctaaagggttgtagttagcgaagcttacaaagttctttggtttcacacatcagtgaattcattctttagcacccatctgggaatgagcaccacrgagtagtttgagtgttttctgtgaacgagttgtaagagtgctggactcggagttaagaacagcctgattcaaactagtcttgtgactctaggcaaatttgaacaggtctgagttcttttagggttgaagattgatatggtttggctctgtgtccccacccaaatctcatcttaaaatgtaatccctataatccccagtgtcgagggaaggacctggtgggaggtgattggatcataggggtggtttcccccatgctgttttcataatagtgagtgagttctcagagatctgatggtcttataagtatttgacagttcctcctacaagacgtgcctgctttcc

SEQ ID NO: 424981 - DNA, 543 bp, Homo sapiens
gtgtatccatcgtagcaaactcttgcctgccagggaatgtcacagggattctgtcaaaggcaggcagatgctcctagctgtaggagtgagccagggctgccrtcatgcctgagccagggactaggacaagccgtagtccccagtcccctaggcaggagcagccgaatactaactcatttcctctgatgttgggttgtttttcagggtgatgttcagcggacactcatccaagtggactttggcgatggtatcgcggtgtcttacgtcaatctcagctccatggaagatgggatcaaacacgtctatcagaacgtgggcattttccgtgtgaccgtgcaggtggacaacagtctgggttctgacagcgccgtcctgtacttacatgtaacttgtatgttattactgttgttggtttatgacctatcttaaatattgtgtccttttcaaattgaattcacaattttatatctagaagaagtacactagttatcttttagcagaaggggaatggggaagaaatgattaagagaccaaaataaggaa

SEQ ID NO: 424982 - DNA, 582 bp, Homo sapiens
gttctttatgaagagggcattcatatctttgtgaggttggtacatctaattaaggtttccagtttttataggcctctgtagataaaatcattctatattttaggtgagcatcttctgagaaccacagagctctctatctacttacacacacacctctgtcctgaattaacttaattcaaccccaaacacagtgtgtgtgccatgcttacctaactagacagctttgcagacacatgcacgaacacattcacacatacacagacctttaaaacccaataaataataaagggtaatgacatagagagtggtttgaagatttgtccattcacccttcatcaatatggattctatgaggtcttcatgastctggttcaccaccagggatacaacctcttggaaagactgcattgccttgtgaaatcccaaatgatgcctgttcttaaggacttcataagttacctgtaatttttttttaacttttacacacacctaactcaggtgttagaactggtagaaagattggtaagtgcaaaatgtcaagatgcaattgtgctcaatgtattctttctccaaagtggggaa

SEQ ID NO: 424983 - DNA, 582 bp, Homo sapiens
gttctttatgaagagggcattcatatctttgtgaggttggtacatctaattaaggtttccagtttttataggcctctgtagataaaatcattctatattttaggtgagcatcttctgagaaccacagagctctctatctacttacacacacacctctgtcctgaattaacttaattcaaccccaaacacagtgtgtgtgccatgcttacctaactagacagctttgcagacacatgcacgaacacattcacacatacacagacctttaaaacccaataaataataaagggtaatgacatagagagtggtttgaagatttgtccattcacccttcatcaatatggattctatgaggtcttcatgactctggttcaccaccagggatacaacctcttggaaagactgcattgccttgtgaaatcccaaatgatgcctgttcttaaggacttcataagttacctgtaatttttttttaacttttacacacacctaactcaggtgttagaactggtagaaasattggtaagtgcaaaatgtcaagatgcaattgtgctcaatgtattctttctccaaagtggggaa

SEQ ID NO: 424984 - DNA, 466 bp, Homo sapiens
tgtgtgaactcagcccatagtgggccctctatccatagcggaagagcaggaatytatgtcatttccctgaaaactagtactaaaaggtgaatgtactgaacaacttccttttgtaccccctattgttttttattttttttatttttccttttaaaagaaaaccagattctcaagagaccccattgaaaaggcttctcatgctgggcgttagtcttctttctgccatacagggaattaaatgaattttgatttttaaattaattaagaaaagatgggaaataaatgtttgtgaggagtgtgtcaagggaggtcagtaggctaatattttttcctctaggaccctagcagtcgattgtattgcaggcaccacgccaaatttttttttcttttttttctgttttgaatcctcaaaccactatccaattagtgcttgtttccacagcagctacttccaggaaactgctga

SEQ ID NO: 424985 - DNA, 582 bp, Homo sapiens
tagtcaagctttgaacaatacctctttggaatatattaactgccacgaaaacataccttataawgtcagagtcttcgaaacatgtgtttgataactccttagcattgttaggaaatgtacaagtgaacttttgtgcttcctgaatgtaaattggcatccccaatgtcgcttggaccctaatgaaacaaaagggcatgcttaacataaaaaatgtttattaaataaataaatgcataaatttcgagaaggctacaccataagttaagcatacatttattcaacaaatgtttattaattataaatgactcatagatagtaactgaaaacctactgtgtgctagacaagggccaggaacacagagccatcatcctgattgaggttatattccagtttgaaggacatatcaatgaaaacaaaataatttaaatagcgctgagtgtgaaaaagagacaaagggtccagtgatgaagggtgcatgggatggtggaagggaggctacctgaggttgggtggttggaaaggcctctcggggtgagactgaatgatgagaggggagtttgctacagtccagtgaagtggag

SEQ ID NO: 424986 - DNA, 582 bp, Homo sapiens
tagtcaagctttgaacaatacctctttggaatatattaactgccacgaaaacataccttataaagtcagagtcttcgaaacatgtgtttgataactccttagcattgttaggaaatgtacaagtgaacttttgtgcttcctgaatgtaaattggcatccccaatgtcgcttggaccctaatgaaacaaaagggcatgcttaacataaaaaatgtttattaaataaataaatgcataaatttcgagaaggctacaccataagttaagcatacatttattcaacaaatgtttattaattataaatgactcatagatagtaactgaaaacctactgtgtgctagacaagggccaggaacacagagccatcatcctgattgaggttatattccagtttgaaggacatawcaatgaaaacaaaataatttaaatagcgctgagtgtgaaaaagagacaaagggtccagtgatgaagggtgcatgggatggtggaagggaggctacctgaggttgggtggttggaaaggcctctcggggtgagactgaatgatgagaggggagtttgctacagtccagtgaagtggag

SEQ ID NO: 424987 - DNA, 510 bp, Homo sapiens
ctggagatatagagataatggttacattcatgttcattatatggtaagaagagatgtggaaaatgaaaaaaatgagtttaggcctattaaatagactggtatagtcaagggcatgtattggaagagaggatgatgggaataagggaaaaaacattaatgaatgcagttactcaaaatggagaaaaacaaggacaataaggaaggaatgtatctgaatggcatgagctcatgcgagttatgcagatttatwgcatgaaaagaaagtaaggtaccaagctagagactgtaaatttgtttaaggaaaatgccagtgtatcagcctattccaggactcaaagcaaagtagacacagtgactttacaaatgccaaacagagcacatcagaaattagtgtcttagttgtggagaacattattaccctgatggaaaaatgcacctgaaatcaacttattaaaccaaggtgcatgtctagaccctgtgagacaggggagtctcctggagacccatagt

SEQ ID NO: 424988 - DNA, 383 bp, Homo sapiens
tttcttccccatttatgtatattttttctttgcgtccatcaatagacaacgactgaaaaaatcggatattttcatttaataggttgcaataaaatagttagagatttatctcattaattttttgttctggtatggaaccatctccaagatatattattgagtacatttaacaagttgctaaaaataygcagggtatgataccactaaagtttaaaaagataaaaagaaaccttattaaaaatattttaagcttttcctttaccttaatctcatgctctttttgatcagttgaagtgcatttctctgtatctcattggcactgtgatttttgtttggggatcaggagcactgatttgagcatggtccctggtatctctctagac

SEQ ID NO: 424989 - DNA, 565 bp, Homo sapiens
gcaatgcttatattaaaagaggctacatattcttgaagatccatctgtaatttcacaatgtaaagactttatatccctttacaattatttctatttgaaaattgagagttaggtttaaggtacaacttgttagatgctgtaactagtactcagtgaccmagtgtagatctgatttattatgcaaataaggcagaaaaatatattctatttaatcatgtataattttttttcttgatagagtggccaggcacacaatgaatattctatgaacccaaaatcttcttcagaaaggaagatatttatatgaggttgtaatagcaaggtgccagaaacttgatttacagagtttgcttggtcggttgcagaaaatagtttgtctttaaacaactgaatcttataatgagaaaattatcaaaagcttttagctactcaggttatttaagtgaaagattaattcatccattatgagctataaaacccattgattacttgacttaattacttaaaccttacagcctgagaatcttgtctgactgaaatatcgccccttcaaccagaatgtatt

SEQ ID NO: 424990 - DNA, 383 bp, Homo sapiens
tttcttccccatttatgtatattttttctttgcgtccatcaatagacaacgactgaaaaaatcggatattttcatttaataggttgcaataaaatagttagagatttatctcattaattttttgttctggtatggaaccatctccaagatatattattgagtacatttaacaagttgctaaaaatatgcagggtatgataccactaaagtttaaaaagataaaaagaaaccttattaaaaatattttaagcttttcctttaccttaatctcatgctctttttgatcagttgaagtgcatttctctgtatctcattggcactgtgatttttgtttggggatcaggagcactgatytgagcatggtccctggtatctctctagac

SEQ ID NO: 424991 - DNA, 674 bp, Homo sapiens
gttgtctttagagttctgagtcgcagctaattttttagacttccccaaaggcatatcctttggaaaacagaggcaaacaaaagttaaagaccctcaactgttgacatccccaggctgtctttccagaagtgctgaagaactgcgttaatatggagcgccacctagtggaggtcaaactgactcgggagctcagagctgtgtatttgcgatcttgctgccatcgtgatgtatttgaagtgactaggaactgtaaatgtactgtgccttaatcttagagcaagggagatgcatgtggctataagaaagggactatgcaggtttaaagagagttatagctcaactttgaagcctttgggttgcacaaagaacatacctaactttttttaattgagttgccatgcctctttctcttatattttcatccatcactttgtcgtatgttgtcttgaaccaacaccagatagctgcccaggaagtcatataatagacataacacaaggacacagcacgcctcctctcccgggagagccagtggtaacagattgttctggtttctccaggatgaattctctttcttggctaccacccttccctcaccctaacrtagtgaaaggtgggatgtaagcctcagcccattagaggtaataacacacactgagttgcactattaactt

SEQ ID NO: 424992 - DNA, 387 bp, Homo sapiens
gctctttggttgaggcaacagagaaggaaagaacatttaggtttttcttggccagtgggttccctgattgtgaaggcaccccggcctcatgtttatccttcctgttgtcctctcgagaaaaatatcccatccacaaagcccaaagaaattgtggccatgaatatgttctctttcttgccacagtcgttgtttcatctttttaatttttttttgaaattttggyacttaggatttgtaatttaagtctgagactgagagggtggtaggtagtattcatcttttagtcagcattaaaggcagaaataagcaaaaactcttgcacaggagtcttcccaacttagcctctgcatggaacttacaaaaggttttcttacacaaatatgtaag

SEQ ID NO: 424993 - DNA, 550 bp, Homo sapiens
tgaatgtgtctagattaataaatggaagattgcagggtcacgtcttattcctcttagtagctctgatgcctgccccaattttgacacacagataagtaatgagtgaatgcagaaggaggygaggaagaggcaaattgcaaattgcaaacattattaatactatcaatgtctgtaaaacacttcagaagttgtgtctacatttagaaaaaggacagctgattgtgtaagcctagagggaggaccacttcatttgagtaagaagggcttgtaggggagggggttgtgtgtgtatgaactacacatatatagttgttcacactcttcatgcggttctgactttgatgttatccgcactcagcttgcttccttccatcccataaagtctggacagtcactttgcaggttcatctcttacagctgtaggcgggtcacccttctagttgagaagatgccagcagccatagcttgaccttattagttgcagaggatatcacagttgtcactgtgcatcagggaagcagtctaaaattcagcctcccactcagcttct

SEQ ID NO: 424994 - DNA, 649 bp, Homo sapiens
tttattggttaaaagaatcaggcaaagaaaggtaactagtaactagaggtccacttatgggtttcggggtttgcagactccctgaaattaagtgaaaaactctgtatggttgtstctgtgcactttttcttggtctttcatttgcatcagatccccaaactttgtacctgacccagaaaagattacagactaacagtctagttgctcctagaatttaccaattgatgatatgccatggcctgtgactatgtgtgaggatgcaaagggcagcttccaagcatgtgtgctggtcattctgtcctctgtaggtcagctgctggcattggtggtttgggtgtacatttctacattttcttaatgtggaaaggtcaggaaaatagagaactgcctttggaacaggctgtgctttgactctattgacttggagataactattgtgactattagcatatgtaggtactcagcacatatttgctaatgagagaaaagaaggcagaagacaagagaaatgaagagaggggcctatgatgtgcccccagcctgggcaaaatgtgcataaggactggagagctttgtcctgtgtccttcagaaacttggaggggtttgataagcattataataaaatatactaatataaactatattaat

SEQ ID NO: 424995 - DNA, 596 bp, Homo sapiens
cattgccagcaaagacacagctccaagcatcatagtggcatcaggtaagaagcttacctggtttgctggctgtggtaaatagtgtttattttaagaagctagatatctgtacttggaagtttattttaagaagctagatatctgtacttggaacttaatgagcaagctaaaaataattttgaaaggcacctaaaccattggacctgaagcaagtctgcagaaaacccctgcacagacagaatgcttgcagtcaaaatctttctcaggcagtgcacctgccaatatagtccattgttgcttttgcagaaagttcttttcactaatggcacckttctctttctaggtaatataggttctgaattgtcagacactgacatcagcatgtttgtctcttcagatgcagggaacacctggagacaggtaagaaaataccctgggtcaaatcgctgaagtttaagtaacataaaaattgcccagcttggttcaaatctgggaacttttttcagcggtgctacacataaatcctaatgactgtgaatatgtttatttttcctttttatataaaagtcttaaatgttggagtgtagcaaatattt

SEQ ID NO: 424996 - DNA, 503 bp, Homo sapiens
caggtggtgttctgagatgtttaaatctcatgtgcaaaagacagagtaataaccatcaggatgcatatgttagagaaagtagaaatggaatactttaaaccagtgtgtttagcttaagtgcttcctgcctttcttctgaatgaaaattagatacccatagcttacaaaacaggcatttaatgaggtttagcaatcttaacaagatatgcacctaatgcwtggttgttatacttcaatcaatatgttttaataacctactgacgtttaattatcatacaataactagcactgtaaattgaaatctaatgcacaggtaatcacacttagtgatgagagcactctcctttaaattttagtcagaggtgtccacattatattccaaatgccatttcttagcttcagaccctctatagatcctcagtgggattctgatattttgagcggaggaggaagggaagaaatttgcataagaaactccatagcaattgatcttggaggtatgt

SEQ ID NO: 424997 - DNA, 637 bp, Homo sapiens
ccacaattctgcctgtgcgtgtcccacagatggatgtataaagactaactcccagaggagttatcaataggctcttttaactgtgtttttgaaagtggttctctccgtatatgagtttgtccaaaatcaaaagcctggttttccttctactgttagtcagtttgatgactgaagggaaagctgcaaaagagagaaaaaagaaaggctaagcttgggcaagggcattcataaagaaatgcagagcaaagaaaaggtcctcggtggccatcttagttcatttggcctgctataacaaaataccataaactgggtggcttataaacaacggaaattaatttcttgtagttctggaggttgagatgtccagtatcaaaatgctggcagattcagtgtctgatgagggttccacttttgggtttatagatagcaccattttgctgtatcctcacgtggtggaagggcaaggcacttctctgaggcctcttttaaaagatcactaattcctttcatgggtggtccacccttaggatctaatcacctcccaaggtctccaccttctaaaatcatcayattggcgattagatattcaacatttgaattttagagaggacacaagcatttagagcattccagtgac

SEQ ID NO: 424998 - DNA, 644 bp, Homo sapiens
aacagctttgccattaaagataatacaagatttttaaaaactactgytattatttatttgagactatacgcacatggaaagctacactgaatccagcgtaattattttgcctcccgttgacactagccgtaagccaagtagataggcttgcatgctagttttaaccttgtgtttctggggtactgcgtttctcctgggaataagtggtggtagtcatttcaaggatgaaacttaaggcaaggtggacagttgaacaacatgtaactgcccattttgaaataaaacagttaactgctgagctttctggattgaggcttgtcaagcagctcattttcttttttaatgctcatgacttgcagtcttgtcagaaaaggtcacctgcggatccagttaatgcttcagtgtgaggagagtcaccacccaaagcctagtagtcgctgcagtacttaactgaaattctgatgaaagggtcactttctgcctggattcaagcagattccagtgattaaaatgtgcaaatgcatgtcccatgtctatatgagggaaattatgagacccttattaggaaatatctgcttcctaggggaagaacaaagtaggatttaatgtttcaagcataggctctgaattgcaggccatgtatc

SEQ ID NO: 424999 - DNA, 606 bp, Homo sapiens
atacctggacatataaatcctctacacaagtagaaaattgtgtgtgtgtgtgtgtgtgtgtgtgtaaaatttataatagcatcaaaatacaacaaacatttatactcaaatctaaaaacttattttcaatrgcactacccagaaaacaacacaaatttggaaataaattttgaaaaatacctgaatgaatggagggatgcatcctgatcatggattggaagactcagtattataaaaagacatcaattttcttcatattgacttgaattaaaagcaatctgaataaaaatctccagcatgttttgtgtattaaaattgacaagatcacaaaatttacacaaaatttcaagacctgaagaatagcaaagatacttttgaaggtgactcacaaatttggatgactgacattaccatatatatatatatatatatatatatatatatatacacatacaaacacacatatatatacatatatatgtatgtatatcataaacaagctgaacaaggagagtcaagaaacatatatacatgcatatattatatatatatagacacacacccacccactttatgacaaatgagacactgcagtacagtggagaa

SEQ ID NO: 425000 - DNA, 606 bp, Homo sapiens
atacctggacatataaatcctctacacaagtagaaaattgtgtgtgtgtgtgtgtgtgtgtgtgtaaaatttataatagcatcaaaatacaacaaacatttatactcaaatctaaaaacttattttcaatagcactacccagaaaacaacacaaatttggaaataaattttgaaaaatacctgaatgaatggagggatgcatcctgatcatggattggaagactcagtattataaaaagacatcaattttcttcatattgacttgaattaaaagcaatctgaataaaaatctccagcatgttttgtgtattaaaattgacaagatcacaaaatttacacaaaatttcaagacctgaagaatagcaaagatacttttgaaggtgactcacaaatttggatgactgacattaccrtatatatatatatatatatatatatatatatatacacatacaaacacacatatatatacatatatatgtatgtatatcataaacaagctgaacaaggagagtcaagaaacatatatacatgcatatattatatatatatagacacacacccacccactttatgacaaatgagacactgcagtacagtggagaa

SEQ ID NO: 425001 - DNA, 606 bp, Homo sapiens
atacctggacatataaatcctctacacaagtagaaaattgtgtgtgtgtgtgtgtgtgtgtgtgtaaaatttataatagcatcaaaatacaacaaacatttatactcaaatctaaaaacttattttcaatagcactacccagaaaacaacacaaatttggaaataaattttgaaaaatacctgaatgaatggagggatgcatcctgatcatggattggaagactcagtattataaaaagacatcaattttcttcatattgacttgaattaaaagcaatctgaataaaaatctccagcatgttttgtgtattaaaattgacaagatcacaaaatttacacaaaatttcaagacctgaagaatagcaaagatacttttgaaggtgactcacaaatttggatgactgacattaccatatatatatatatatatatatatatatatatayacacatacaaacacacatatatatacatatatatgtatgtatatcataaacaagctgaacaaggagagtcaagaaacatatatacatgcatatattatatatatatagacacacacccacccactttatgacaaatgagacactgcagtacagtggagaa

SEQ ID NO: 425002 - DNA, 606 bp, Homo sapiens
atacctggacatataaatcctctacacaagtagaaaattgtgtgtgtgtgtgtgtgtgtgtgtgtaaaatttataatagcatcaaaatacaacaaacatttatactcaaatctaaaaacttattttcaatagcactacccagaaaacaacacaaatttggaaataaattttgaaaaatacctgaatgaatggagggatgcatcctgatcatggattggaagactcagtattataaaaagacatcaattttcttcatattgacttgaattaaaagcaatctgaataaaaatctccagcatgttttgtgtattaaaattgacaagatcacaaaatttacacaaaatttcaagacctgaagaatagcaaagatacttttgaaggtgactcacaaatttggatgactgacattaccatatatatatatatatatatatatatatatatatacacatacaaacacacatatatatacatatatatgtatgtatatcataaacaagctgaacaaggagagtcaagaaacatatatacrtgcatatattatatatatatagacacacacccacccactttatgacaaatgagacactgcagtacagtggagaa

SEQ ID NO: 425003 - DNA, 595 bp, Homo sapiens
tatgctagaaatgattaagaataccttacaaaaatatgaataatttagaaagataaaataaattaataggtcagaaaatgagtaaaagamaatataaagatagaaagtttgaaagaatcaggaacaaatcatatactaaacttgctggaatcagctcctcttctcattttgactgaccagatctattctaagagattgttttagcagaatatcttttgcagaggtaggtgggggagacgattttctttggagaaaagctggtctggatttctatcaggttttctattgagttgtcatatcatggcagttagctaagcacaagcatctaatctctgctgggagaagtctcctcaagcacaaaaaagaagaatgagggtcatgaagggatgatgttgagggtccaaaccagaggcaggtgagagcttgcaccttctcatgactggagagagcttgcatgacgtgttatgttctggaagacggttcagcaagtgcattaatttattttcctattttgttcatatatctaaatcaagatttcttaacctcaacattgttgacattttgtcatattgacattttgtgtgtgtgtgtgagg

SEQ ID NO: 425004 - DNA, 595 bp, Homo sapiens
tatgctagaaatgattaagaataccttacaaaaatatgaataatttagaaagataaaataaattaataggtcagaaaatgagtaaaagacaatataaagatagaaagtttgaaagaatcaggaacaaatcatatactaaacttgctggaatcagctcctcttctcattttgactgaccagatctattctaagagattgttttagcagaatatcttytgcagaggtaggtgggggagacgattttctttggagaaaagctggtctggatttctatcaggttttctattgagttgtcatatcatggcagttagctaagcacaagcatctaatctctgctgggagaagtctcctcaagcacaaaaaagaagaatgagggtcatgaagggatgatgttgagggtccaaaccagaggcaggtgagagcttgcaccttctcatgactggagagagcttgcatgacgtgttatgttctggaagacggttcagcaagtgcattaatttattttcctattttgttcatatatctaaatcaagatttcttaacctcaacattgttgacattttgtcatattgacattttgtgtgtgtgtgtgagg

SEQ ID NO: 425005 - DNA, 595 bp, Homo sapiens
tatgctagaaatgattaagaataccttacaaaaatatgaataatttagaaagataaaataaattaataggtcagaaaatgagtaaaagacaatataaagatagaaagtttgaaagaatcaggaacaaatcatatactaaacttgctggaatcagctcctcttctcattttgactgaccagatctattctaagagattgttttagcagaatatcttttgcagaggtaggtgggggagacgattttctttggagaaaagctggtctggatttctatcaggttttctattgagttgtcatatcatggcagttagctaagcacaagcatctaatctctgctgggagaagtctcctcragcacaaaaaagaagaatgagggtcatgaagggatgatgttgagggtccaaaccagaggcaggtgagagcttgcaccttctcatgactggagagagcttgcatgacgtgttatgttctggaagacggttcagcaagtgcattaatttattttcctattttgttcatatatctaaatcaagatttcttaacctcaacattgttgacattttgtcatattgacattttgtgtgtgtgtgtgagg

SEQ ID NO: 425006 - DNA, 595 bp, Homo sapiens
tatgctagaaatgattaagaataccttacaaaaatatgaataatttagaaagataaaataaattaataggtcagaaaatgagtaaaagacaatataaagatagaaagtttgaaagaatcaggaacaaatcatatactaaacttgctggaatcagctcctcttctcattttgactgaccagatctattctaagagattgttttagcagaatatcttttgcagaggtaggtgggggagacgattttctttggagaaaagctggtctggatttctatcaggttttctattgagttgtcatatcatggcagttagctaagcacaagcatctaatctctgctgggagaagtctcctcaagcacaaaaaagaagaatgagggtcatgaagggatgatgttgagggtccaaaccagaggcaggtgagagcttgcaccttctcatgactggagagagcttgcatgaygtgttatgttctggaagacggttcagcaagtgcattaatttattttcctattttgttcatatatctaaatcaagatttcttaacctcaacattgttgacattttgtcatattgacattttgtgtgtgtgtgtgagg

SEQ ID NO: 425007 - DNA, 616 bp, Homo sapiens
attcacctaacctatctgagcttcaaatttctcacctatacaatgtcagtggtaatacttgataatgtttattgaatatttactatattccaggcactatgctgtatgctttcattaactcacttaatacttctaacaaccccttaaagtaggttttattattactccatttcccagatacaaaactaaggcttggcgattaagcaaattattgaagaacacacaaccaatgggtggtctggtaggaatgcaaaaccaggtacagctcatctcagaacataaacccttaaccattatctattaagttaaatacccttaaaatatttagcagagtatctggcaagatagcaataaagggtagcaatagattttaaaatgaatatctgcctgaaggtatctttgtttatgacagagattctaaactttggygtatattcaaatcaaaaggatgatcttaaaaaacaaaacaacaacaacaaaaaaccccaaacttttgtcctaataccatcctgtacaaattgaattagtatcgctggggctgagacctaaatatctgttttgttttgaatttttaaagctttcaaagttctgatttccagtaagatggaaaaacata

SEQ ID NO: 425008 - DNA, 606 bp, Homo sapiens
tcttgtaggaataaactcaacccccaccaagaagaaggtgctctggtcatagtaaaataacagccccaacaataaatgggtgaagatgagcctcagtctaggcatgtcatggagatacaggacttgttgtgatcygccactccctcctcaccccctcaccgtcacccacctgcctacctgtccagcttccaggttttctgggaagtcatttgttaagatttgttgagcccgttgggttgccaagcaaataagcctggccagttggaacccatatgtgggtcctgagatttgactctaagacccatcacattggtagcaatgaggctgtggctattctactttcctttcacaactggctcaggaattgggccaaaatgaagctacaggaggaaggcagaacattggtggatggctgcaagagaaagagagggtagcaacagaaaaaacaaagtggggccagggaagtgtgtttgtctcctttgactgattctctctccctttctcgtgtgcgtgtgtgtgtaacttataaatatcaatgaatggatatacacacatattaaatattgtattcaatggaatatatatttgaagacagtttatgtattg

SEQ ID NO: 425009 - DNA, 606 bp, Homo sapiens
tcttgtaggaataaactcaacccccaccaagaagaaggtgctctggtcatagtaaaataacagccccaacaataaatgggtgaagatgagcctcagtctaggcatgtcatggagatacaggacttgttgtgatctgccactccctcctcaccccctcaccstcacccacctgcctacctgtccagcttccaggttttctgggaagtcatttgttaagatttgttgagcccgttgggttgccaagcaaataagcctggccagttggaacccatatgtgggtcctgagatttgactctaagacccatcacattggtagcaatgaggctgtggctattctactttcctttcacaactggctcaggaattgggccaaaatgaagctacaggaggaaggcagaacattggtggatggctgcaagagaaagagagggtagcaacagaaaaaacaaagtggggccagggaagtgtgtttgtctcctttgactgattctctctccctttctcgtgtgcgtgtgtgtgtaacttataaatatcaatgaatggatatacacacatattaaatattgtattcaatggaatatatatttgaagacagtttatgtattg

SEQ ID NO: 425010 - DNA, 606 bp, Homo sapiens
tcttgtaggaataaactcaacccccaccaagaagaaggtgctctggtcatagtaaaataacagccccaacaataaatgggtgaagatgagcctcagtctaggcatgtcatggagatacaggacttgttgtgatctgccactccctcctcaccccctcaccgtcacccacctgcctacctgtccagcttccaggttttctgggaagtcatttgttaagatttgttgagcccsttgggttgccaagcaaataagcctggccagttggaacccatatgtgggtcctgagatttgactctaagacccatcacattggtagcaatgaggctgtggctattctactttcctttcacaactggctcaggaattgggccaaaatgaagctacaggaggaaggcagaacattggtggatggctgcaagagaaagagagggtagcaacagaaaaaacaaagtggggccagggaagtgtgtttgtctcctttgactgattctctctccctttctcgtgtgcgtgtgtgtgtaacttataaatatcaatgaatggatatacacacatattaaatattgtattcaatggaatatatatttgaagacagtttatgtattg

SEQ ID NO: 425011 - DNA, 606 bp, Homo sapiens
tcttgtaggaataaactcaacccccaccaagaagaaggtgctctggtcatagtaaaataacagccccaacaataaatgggtgaagatgagcctcagtctaggcatgtcatggagatacaggacttgttgtgatctgccactccctcctcaccccctcaccgtcacccacctgcctacctgtccagcttccaggttttctgggaagtcatttgttaagatttgttgagcccgttgggttgccaagcaaataagcctggccagttggaacccatatgtgggtcctgagatttgactctaagacccatcacattggtagcaatgaggctgtggctattctactttcctttcacaactggctcaggaattgggccaaaatgaagctacaggaggaaggcagaacattggtggatggctgcargagaaagagagggtagcaacagaaaaaacaaagtggggccagggaagtgtgtttgtctcctttgactgattctctctccctttctcgtgtgcgtgtgtgtgtaacttataaatatcaatgaatggatatacacacatattaaatattgtattcaatggaatatatatttgaagacagtttatgtattg

SEQ ID NO: 425012 - DNA, 632 bp, Homo sapiens
ttgttttcctgttaacagttttacatatgcaaagtggctgagacttatatttgatatatatatgttttttactkatgttgcctctggacatctttttcccatgatcagtgaacctctacagaaaaatgtctccaccctttttctaagtaaacactggaatgtcccttgttacaatgctgcctgcccatgaaacgccaggcagcaacctctgccacccagccatgctggcagggaaagcagtcaagagggctctgtgctggagcaaagcagcaggttagcaagatgaagggcagaagtggtaacacaggcaagatcttgctggcatctatgggatcagttcctacagctctaatataactcgagttaataaagtacatgttgttgcaaagtcaagcactgctagagctgactattaagactggcaatggggaaccgaaagcaaagtgcttggaacaaatggatggcttttctccaaggcaggctgggaaaacataccctgttttcatgcacacagttctaatgtgtgcctaaaactatgtggaagtaactaaggagaatagaatgctgagaattttgtctttagagttagaaagattcctgttcaaatcccagctatgcatctgctacttgag

SEQ ID NO: 425013 - DNA, 566 bp, Homo sapiens
tacagtcttgcttcctacctagtgccatatgggaggcgttagtgcctaacagcctatggtgaacataactagctcctgaccactgttcctctcgccatcaaacagtgcattcagggtcttagaaatctgaagctgcaaatattccttcatctgtcctgggtggtggaagagaattccgaattttgatatttaaattatagctaatgttaattgaatattaatatataaaaggcaatgtgwatttattttattaatcctctccaaatcatataatttattttattcaaatcatataatttattttattaatattattaataaaatttattatgttgatttattatgtattaatcctctcaatataattcagataactattttgaagttatctgaattatatttatttactttattatcttgtttattttattaatcctctcaaaggatgtattattttattaatcccctcaaaattttattgttttattacccctctcaaaatcatataattcaagataactattttgaaataaaataatatttgaaattatgtattgaaaagtcac

SEQ ID NO: 425014 - DNA, 548 bp, Homo sapiens
aaaactgacttccaagcataaccagaacagactactaaagatgcaaaaactcagggaattttgttcacctgaggtccttctgagtaatctactcagaatgatctcagacaaccaaaataactagagatgtaatgacatgagatgagctggtgaacattaagtgtattgttacttttagaactaagacttaatgaggctcaaaagaaagagagtacagtatgtaatggatatatgttytgacaaatagacactggacaacaattaaaaatggggagaacatgtgaaaattaaaaaaaaacgcttttagtatgtatactggtagtggtagcattagcttgcttttctgtatactatgtggtttgaacaaatagtgatggtatattctaattgtatcatccccagtatcctttagagtcaggattcttggtgtggaagaaagaaaatacagttgtaatatagaaaagtgtaagtgaaacatttgtaaccctgtatttaaatataaagtcaatacgaaattattttatctcacatataatttttctagctct

SEQ ID NO: 425015 - DNA, 605 bp, Homo sapiens
agcattagcttgcttttctgtatactatgtggtttgaacaaatagtgatggtatattctaattgtatcatccccagtatcctttagagtcaggattcttggtgtggaagaaagaaaatacagttgtaatatagaaaagtgtaagtgaaacatttgtaaccctgtatttaaatataaagtcaatacgaaattattttatctcacatataatttttctagctctatccactaaaaatgccttaaaaacaatgactaatccagtagcaacaagcatcctagtacctaggtgatggtattgaaacactactagattttccactgaaggatatcaaggcttcttggagaaatggttgattccaggtctggagtaggaaatgcacaaaatgagcctggaacatcttgtcatatcagagagcagggaggttatcaaagatgactggagtcacatcaaaaggattcaggagccagcttgaagatgctcccaggtcaaatatggaacaatatgagctttaataaagataataattrgaaggggggaaagaaacaagcatttatcctgacttgtccataagaactattccactgagtaaccaaatagtaggtgga

SEQ ID NO: 425016 - DNA, 631 bp, Homo sapiens
cttcttttctcttgccgcttcaccctggaaatgaaccatgccatggaaagtgtataacagaatggggagaataaaatcctgtatttctaactaagagaccrggaaaaggggactctgagagctggaggacatagagaaatcacagaggagggagcttgagaaaagaatcccataaatctctgcatgaaatctcaagtccactcccagatatatctgattggaaacagaaaacagaagagggagcactttccaattcattttaggagaccagcattaccctgatactataatgagacaatgtcagcacaacaaaacaaaactacagaccaatatctcccatgtaaagatgccaacattctcaatagaatattagcatatcaaattcatcaatgtgaaaaaataataatatgccacatccacatggattttatctcagaatgcaagggtggtccaacatttgaaaatcaatgaggtccaccatattaaaagactaaagaacaaaaagcacagtatcatctcaatagaggcaaaacaagcatttgagaaaatccaaaacaccttcatgatacaaacactcagcaaactagaaatagtagggttttttttttgttgttgtttgtttttgttttgt

SEQ ID NO: 425017 - DNA, 631 bp, Homo sapiens
cttcttttctcttgccgcttcaccctggaaatgaaccatgccatggaaagtgtataacagaatggggagaataaaatcctgtatttctaactaagagaccaggaaaaggggactctgagagctggaggacatagagaaatcacagaggagggagcttgagaaaagaatcccataaatctctgcatgaaatctcaagtccactcccagatatatctgattggaaacagaaaacagaagagggagcactttccaattcattttaggagaccagcattaccctgatactataatgagacaatgtcagcacaacaaaacaaaactacagamcaatatctcccatgtaaagatgccaacattctcaatagaatattagcatatcaaattcatcaatgtgaaaaaataataatatgccacatccacatggattttatctcagaatgcaagggtggtccaacatttgaaaatcaatgaggtccaccatattaaaagactaaagaacaaaaagcacagtatcatctcaatagaggcaaaacaagcatttgagaaaatccaaaacaccttcatgatacaaacactcagcaaactagaaatagtagggttttttttttgttgttgtttgtttttgttttgt

SEQ ID NO: 425018 - DNA, 631 bp, Homo sapiens
cttcttttctcttgccgcttcaccctggaaatgaaccatgccatggaaagtgtataacagaatggggagaataaaatcctgtatttctaactaagagaccaggaaaaggggactctgagagctggaggacatagagaaatcacagaggagggagcttgagaaaagaatcccataaatctctgcatgaaatctcaagtccactcccagatatatctgattggaaacagaaaacagaagagggagcactttccaattcattttaggagaccagcattaccctgatactataatgagacaatgtcagcacaacaaaacaaaactacagaccaatatctcccatgtaaagatgccaacattctcaatagaatattagcatatcaaattcatcaatgtgaaaaaakaataatatgccacatccacatggattttatctcagaatgcaagggtggtccaacatttgaaaatcaatgaggtccaccatattaaaagactaaagaacaaaaagcacagtatcatctcaatagaggcaaaacaagcatttgagaaaatccaaaacaccttcatgatacaaacactcagcaaactagaaatagtagggttttttttttgttgttgtttgtttttgttttgt

SEQ ID NO: 425019 - DNA, 599 bp, Homo sapiens
aattgatctatagattcaaaatgattccaataaaataatcccagcagaattttgtggaaatacacaaactgattgtaaaatttagtgaatattaaaggaactaccatagccaaagcaattttgtgaaagaacagccagaggactcccattactggattttatgacttattggtaatctagacagtgatttttgcataaggatagacacatagctcaatggaatagaaaatacaatccagaaatagagccacacaaacatggtcaacttatttttgataaaggtgtaaagactaaatggagacaggagagwtgttttaacaaatggtcttggaacaattggtcatctatataccttataccttataaaagattttacttaaaataaactttatacttaagcctaactttatttttaattacaaaaattttagaagaaaacaagagaaaatctttgtggtcttggattgggcagtttttgggatcgtgtcaccaaaaacgcgatccataaaagaaaaaatgataaagtagacttaaaaactaaaaaattttgctctctggaggacaatggtaagagaatgaaaaaacaagtgacagacagg

SEQ ID NO: 425020 - DNA, 599 bp, Homo sapiens
aattgatctatagattcaaaatgattccaataaaataatcccagcagaattttgtggaaatacacaaactgattgtaaaatttagtgaatattaaaggaactaccatagccaaagcaattttgtgaaagaacagccagaggactcccattactggattttatgacttattggtaatctagacagtgatttttgcataaggatagacacatagctcaatggaatagaaaatacaatccagaaatagagccacacaaacatggtcaacttatttttgataaaggtgtaaagactaaatggagacaggagagttgttttaacaaatggtcttggaacaattggtcatctatataccttataccttataaaagattttacttaaaataractttatacttaagcctaactttatttttaattacaaaaattttagaagaaaacaagagaaaatctttgtggtcttggattgggcagtttttgggatcgtgtcaccaaaaacgcgatccataaaagaaaaaatgataaagtagacttaaaaactaaaaaattttgctctctggaggacaatggtaagagaatgaaaaaacaagtgacagacagg

SEQ ID NO: 425021 - DNA, 599 bp, Homo sapiens
aattgatctatagattcaaaatgattccaataaaataatcccagcagaattttgtggaaatacacaaactgattgtaaaatttagtgaatattaaaggaactaccatagccaaagcaattttgtgaaagaacagccagaggactcccattactggattttatgacttattggtaatctagacagtgatttttgcataaggatagacacatagctcaatggaatagaaaatacaatccagaaatagagccacacaaacatggtcaacttatttttgataaaggtgtaaagactaaatggagacaggagagttgttttaacaaatggtcttggaacaattggtcatctatataccttataccttataaaagattttacttaaaataaactttatacttaagcctaactttatttttaattacaaaaattttagaagaaaacaagagaaaatctttgtggtcttggattgggcagtttttgggatcgtgtcaccaaaaacgygatccataaaagaaaaaatgataaagtagacttaaaaactaaaaaattttgctctctggaggacaatggtaagagaatgaaaaaacaagtgacagacagg

SEQ ID NO: 425022 - DNA, 633 bp, Homo sapiens
cgctgtccaagtaagatagaaggttgtcaaataagtacatgaaaaaatgctcaacaccattactcagtgggaaaatgcaaattaaaagcacaatgaactaccactatgcatctattagaatggctaaaacaaaaataaatatataaaacttacaatcccaagtgatggtgaggaaacaaagcaactcgaactttcatacactgctggtgggactgtggaatggtgcagtcattctgggaaacagtttgacagttataaagtaaaatacacccttaacgtatgatccrgcaatctaggtatttaacctagatacataaaaattcatgttcacacagaaacctgtacacacatatttacagaagcattcttcatagtcacccaaaccaggaagcaatccaaatgtcattcaacggatgaatgcagttacaaaactatggtgtatctacacagtggaatattattcagtgataaaatgataccaactatgtggatgaatctcaaatgcattacgctgactaagagaagccaggatcagggccatgtgctgcactgtctcatttatattacattctggaaaaagactaccagtaattgacgggggtaagggtgagggaaggtttgacgacaaaaggg

SEQ ID NO: 425023 - DNA, 633 bp, Homo sapiens
cgctgtccaagtaagatagaaggttgtcaaataagtacatgaaaaaatgctcaacaccattactcagtgggaaaatgcaaattaaaagcacaatgaactaccactatgcatctattagaatggctaaaacaaaaataaatatataaaacttacaatcccaagtgatggtgaggaaacaaagcaactcgaactttcatacactgctggtgggactgtggaatggtgcagtcattctgggaaacagtttgacagttataaagtaaaatacacccttaacgtatgatccagcaatctaggtatttaacctagatacataaaaattcatgttcacacagaaacctgtacacacatatttacagaagcattcttcatagtcacccaaaccaggaagcaatccaaatgtcattcaacggatgaatgcagttacaaaactatggtgtatctacacagtggaatattaytcagtgataaaatgataccaactatgtggatgaatctcaaatgcattacgctgactaagagaagccaggatcagggccatgtgctgcactgtctcatttatattacattctggaaaaagactaccagtaattgacgggggtaagggtgagggaaggtttgacgacaaaaggg

SEQ ID NO: 425024 - DNA, 525 bp, Homo sapiens
aataacacatccatagtaaataaagcctggccagcttgccttttttcataagaacatgmccctgttctagtcaatgcttaatcagaaaggcactgtgtagcgagcacaacagccatgtaatttgaagttatcacatctaacttgtaaggtaactattcttgtcatcatatagataaggaaatgaaggctctcaggggttgaataatattaccaaaaacaaatatctaatgtaagtaataagaccgcaattttattttttatttttttgagacagggtctctctctgtcacccaggctggagtgcagtggcacgatcatggctcactgtagcctcaatttcccaagttcggacgattctcctgccttagcctaccgagtagctgggactacagatgcaccaccatgctcagctaatttttgtattttttgcagagatgggggtctcactatgttgcccaggctaagattgccattttaactcagttttgtcttgcttcaaagcacaaagtgtttcttctataccat

SEQ ID NO: 425025 - DNA, 525 bp, Homo sapiens
aataacacatccatagtaaataaagcctggccagcttgccttttttcataagaacatgaccctgttctagtcaatgcttaatcagaaaggcactgtgtagcgagcacaacagccatgtaatttgaagttatcacatctaacttgtaaggtaactattcttgtcatcatatagataaggaaatgaaggctctcaggggttgaataatattaccaaaaacaaatatctaatgtaagtaataagaccgcaattttattttttatttttttgagacagggtctctctctgtcacccaggctggagtgcagtggcacgatcatggctcactgyagcctcaatttcccaagttcggacgattctcctgccttagcctaccgagtagctgggactacagatgcaccaccatgctcagctaatttttgtattttttgcagagatgggggtctcactatgttgcccaggctaagattgccattttaactcagttttgtcttgcttcaaagcacaaagtgtttcttctataccat

SEQ ID NO: 425026 - DNA, 525 bp, Homo sapiens
aataacacatccatagtaaataaagcctggccagcttgccttttttcataagaacatgaccctgttctagtcaatgcttaatcagaaaggcactgtgtagcgagcacaacagccatgtaatttgaagttatcacatctaacttgtaaggtaactattcttgtcatcatatagataaggaaatgaaggctctcaggggttgaataatattaccaaaaacaaatatctaatgtaagtaataagaccgcaattttattttttatttttttgagacagggtctctctctgtcacccaggctggagtgcagtggcacgatcatggctcactgtagcctcaatttcccaagttcggacgattctcctgccttagcctaccgagtagctgggactacagrtgcaccaccatgctcagctaatttttgtattttttgcagagatgggggtctcactatgttgcccaggctaagattgccattttaactcagttttgtcttgcttcaaagcacaaagtgtttcttctataccat

SEQ ID NO: 425027 - DNA, 511 bp, Homo sapiens
gaaccctaatgtaaactctgcactttgtgtgatcctgatgtgtcaatgtaggttcatagctgtgagtctggtggggggtgttgataataggggaggctgtgcatgtaggggagtagagggcatataggatatctttgtatcttcttctcattttcgctgcaaacctaaaactgctctagaaaakataaaatcttaaagtattccatctttattccacaattctgtttctcaagcagggctatatgtggaaaatctccatgagagaagctgtacgccttaattcattcatatctagccacaccgcagcctggattggttcattacattagctcacagtcatctgggaaaagcagaaaatattttaaacataatgactaacctggctttctgccctatatccatgagtttcaaaccaggagttttcaagctttttttgacagtaacattaagaaataaattttacatcacaacataagacacgtgtacctaacgctgaaatccttacgacatg

SEQ ID NO: 425028 - DNA, 480 bp, Homo sapiens
tatgcacctttattgagtctgctagagcccgtgtagtgctatctgccatggcagcagctgcagcaagagactggagactgaaaagatctgaagtggtacatgagagatgcatgatctccctacagcaatgatggactgcttcaatagccagctgcccaaagcatagatgtcatcttgccctcctctgctttaaatgattctttatcacctaaagcagtggttttcacgctgtggttgacagagtcctagggtctaaggcaaggagaaagtcaagggcagacttttgatccaccacccctgcttcactagggaacaagaaatcagctgcaaactacagcttcaaagccttcrcatagaaaaggtggcatccacataccttaacagctcatccatctattgactacattgaggtcgaactgagatttgaagggcaaataggagttaactagggaggagggaagaaagagcattcaagttgga

SEQ ID NO: 425029 - DNA, 511 bp, Homo sapiens
cacgatccagaagtgtagtcttcaaacattttaagtatatgtaactttttcttcaaattgattacgtttcttttaaaattaaatttgcacagagccaaatatatagaatagattaaaataattatgccttttagtcaatttatatagtcatggtttggctatgaataayaactggttgtttttggatttgggggtttgtgtggaagagcttgaatgccactaatctagatggcactggctggagacagtttatgatgttgagacacccccaattctataaccacagagaactgggaaaccccaggtgagccagctgtcttggaataaacagacaaatcgcacctatgataaccatagtattacataatctttgtatgtaacattagccaacacatattagtgtattcgagagctcccagttggtgctaagctctttactacattacctcatttaatcttcacaactctataaaagaggttaagattgcctcttatgcaagagtaagtggag

SEQ ID NO: 425030 - DNA, 581 bp, Homo sapiens
aaggagaatttttagccagtgtttggataccatctggaatttatggtcattatttgttgtgcgactattaagmattattttttccaatgaggtgagtctaaggatgggactttttggaattaattttattaaagtaagaaaggaaaaggagtgtataaaggaaagtgattatagtgacacaccacggaatcatagactttaaggtctgtaaggaggaaattgaactatatagggaattctgagtagtgaaaatcagagtcaaaaggggtggggttactgaagaggttgaagaattatggctgtataagaactagaataagtaagccaaatgaataggaggtggtgactggacacttggattcctgaaattgagattttggagtttagatagtcattattaatttagagttatataaaggaccatgagagtgggaggctgagggagttggagaaaaaattattgcagaagtcatcaagtatggagaaactaagatattacgtatataacaaacaaggtagttatcacaaagaatgatgtcaggagcagtgataaaaagaaaatcaataagccagcccagaat

SEQ ID NO: 425031 - DNA, 581 bp, Homo sapiens
aaggagaatttttagccagtgtttggataccatctggaatttatggtcattatttgttgtgcgactattaagcattattttttccaatgaggtgagtctaaggatgggactttttggaattaattttattaaagtaagaaaggaaaaggagtgtataaaggaaagtgattatagtgacacaccacggaatcatagactttaaggtctgtaaggaggaaattgaactatatagggaattctgagtagtgaaaatcagagtcaaaaggggtggggttactgaagaggttgaagaattatggctgtataagaactagaataagtaagccaaatgaataggaggtggtgactggacacttggattcctgaaattgagattttggagtttagatagtcattattaatttagagttatataaaggaccatgagagtgggaggctgagggagttggagaaaaaattattgcagaagtcatcaagtatggagaaactaagatattacgwatataacaaacaaggtagttatcacaaagaatgatgtcaggagcagtgataaaaagaaaatcaataagccagcccagaat

SEQ ID NO: 425032 - DNA, 446 bp, Homo sapiens
aacacattccaagcttattctgataatcaagtatggtccatgttatggactgaatrtttgtgtctcctcacaattcatatattgaaaccgtaaccccaatgtaatggtatttggtggggcgaggactatggaaggtaatttggtcaggagaaggagccctcatggatgggattagtgtccttataagaagatgccagagttcttttcccaccatgtgaggacacagcacacagcaagacaatggctgtctataaaccaggaacagggccctcagcaagaactcgaccctgctggcaccctatttcagactccaacctccagaactgtgagacataaatttctgttatgtacaaggcacccaatgccatttttgttatagctgcccaaactgacttagacagaccaatagcatcagcatcacctggaaacttgtttaaaattaaaat

SEQ ID NO: 425033 - DNA, 636 bp, Homo sapiens
ttgctatttttaataaaattgtgtgaaattgtgttcaaagttaaattctgtggttaaaacatgtgaacattttcttatatttgaatcttctctggaaattatttttattgagaaaattttttctctgcaggttctwagttacctggaaagttctgagaaaattcttactaaatagagagtatactcatttcaaaggtttttaaattgaaatatttaaatactttagtctaaacattttaacagatattgtttttaattttacccctttattcaacaaatattttcaacaaaacaaagttaagttagttggttctatttacgccccttttaacttttgtcaaatttagatgctaaaaaatcatgagtatacatttatccagttgaatatagaaactgtattaaaaagattcctctcttatgccaatatgctacaaggagaaattgtaaaatttgaaaagtgcataaatttaaatttaaatttaaatttcatgcacttttgagttgttgtcatttaattgatacaatttctcttgtgtttttattggattaaattttgatgttttcaccattgcaagcttgattttcaataaatgcaattcactaaatgtttaaatggtattttttggtagtccattt

SEQ ID NO: 425034 - DNA, 575 bp, Homo sapiens
caacaaatattttcaacaaaacaaagttaagttagttggttctatttacgccccttttaacttttgtcaaatttagatgctaaaaaatcatgagtatacatttatccagttgaatatagaaactgtattaaaaagattcctctcttatgccaatatgctacaaggagaaattgtaaaatttgaaaagtgcataaatttaaatttaaatttaaatttcatgcacttttgagttgttgtcatttaattgatacaatttctcttgtgtttttattggattaaattttgatgttttcaccattgcaagcttgattttcaataaatgcaattcactaaatgtttaaatggtattttttggtagtccattttttggcatcttggataccagctcagcctcagcaggataaggcaccaggccgatttgtgaggcccccatgctaggccctagtttctggatgacatttctagacatacyatgggccaaaaaggaacctggtgccttaaaggacccagtccttgcaggatttatcacctgttgactaaaaagcccttcagcactgattaaccagaagtgatgc

SEQ ID NO: 425035 - DNA, 575 bp, Homo sapiens
ataataaaaactaacatatccttggaaagcaagttaatatttttaagagaaaacatttctcaccaattattttacttaaaaaaggaggagaaatcttactatctttggttttataatcttttgaggaaatatgtatgtaaaatcagaatctaaaagctgctattcttaacatttttgttggtaacttatttagrtccattgattaatgattaagaatacctatcctttcatagtttagtgattgattttaccacttgagaagcattttagatgtgaggaaggattttaatgcgttaatttctgtatatttgaaattttgggttatctagttttaaaaaattggtttagttcacagctgttacattacctaagaatttagttgttaaaatgtatgaactataatcaatgtaaaattattgaatataaaaagaaaactcaaacaattgccaggatgtttccaaatattagcattattaaattttatcattatttagagcctagcaataagaggaaattgtttatgtctgcattgtagacattggcaaatcattcaagtcaagaaaaaattccccaaa

SEQ ID NO: 425036 - DNA, 575 bp, Homo sapiens
ataataaaaactaacatatccttggaaagcaagttaatatttttaagagaaaacatttctcaccaattattttacttaaaaaaggaggagaaatcttactatctttggttttataatcttttgaggaaatatgtatgtaaaatcagaatctaaaagctgctattcttaacatttttgttggtaacttatttaggtccattgattaatgattaagaatacctatcctttcatagttyagtgattgattttaccacttgagaagcattttagatgtgaggaaggattttaatgcgttaatttctgtatatttgaaattttgggttatctagttttaaaaaattggtttagttcacagctgttacattacctaagaatttagttgttaaaatgtatgaactataatcaatgtaaaattattgaatataaaaagaaaactcaaacaattgccaggatgtttccaaatattagcattattaaattttatcattatttagagcctagcaataagaggaaattgtttatgtctgcattgtagacattggcaaatcattcaagtcaagaaaaaattccccaaa

SEQ ID NO: 425037 - DNA, 593 bp, Homo sapiens
attcagaatctcacctcccaacctgtcctcttcaatatccccatctcagtatattacccatttctcatataaggaagttatctttaaaatctcctgctcttatgtcccatagcctatcaaaaatcaagtcctgatatttctactttgcaaatatctttcaacttcttctgagcctctccatctccctttcttcagccccagttcaaaccaccatcctctgtcttctgcatccctctggctgagaactcaggcagtgaagccagattgtctgaaatgaattactggctctgccacttaatatatgtggaaccttggtaaaattgtttctcttctgctatagtttgaatgtttttgtgttctaaaatttatatgttgaaacttgtaaaccaaaaatgtatctgagataagtctcaatcaatttagtgtattttgccaaggttaaggatatgcctgagacacagcctyaggaggtcctgacaacttgtgcccaaggtggtcagggtacagctgcttggttttagacattttggggagacatgaaacatcaatcaatgcgtgtaagatgtaccgcagtttggtctgcaaacacaaaa

SEQ ID NO: 425038 - DNA, 578 bp, Homo sapiens
acaggagtcttctccttcatctaggcccagtactcattgacccttgagtgcccctgctctttttcagccttcctttctgttgtttcctataccccttcattaattacatggacccatcaagatccatttaagactacacgtatttaccatttcactgaactattgtaccttccttctttctatgaccaatgatggcatttcttcatatactacaktgcattgttactcaattggttcatagccatatatcagcagcctctgttaaactatattctcagatgatgtaaaagttctgatttttatctttgctgtacccattatacctattgatgctgaacataataatatatgcataactaaatctcaagtattttttaaagtatatatgtaagcaaagttaaatatgtataagtatagtataagagaggcttataggtctgaaatttcccttcttcctctttcttagaaaggtttattttggtatatttctcaaagaagggttataagttaccctatgtgtgatcaatataagtgagaaccaggatgtgcctttgagtgcatgcccaaggcacatgcta

SEQ ID NO: 425039 - DNA, 587 bp, Homo sapiens
ttgaatatgtcatctcactcacccctagcctgtaaggtttccatttagaagcttggtcctggatatactggagctcctttacacattatttgtttgtttcttttctcttactatttttagaatcctatcttctccttgatctttgaaagttaggttattatatgccttggagtagtcttctttsagttgaatctgcttgatgactttgactttcctgtacctagatatttatatctttccctagtttggaaatttactgttattatctttttgaataagctttctacccctttctctttctctacactctctttaaggccaacgactcttaaatttggtcttttgatgtaatcccctagatctcattagcattcttcatccctttttatttttctctcctgtgactttgtattttcaaatagtctgtttttgagctcactgattcttctttgtaatcaattctgctcttgagactatctaatgcaatttttggttcatctattatatttttcagctccaatttttaaaataatttcaatctctttgttaagtttttctgataaatttttgaatctgcatatttgtgt

SEQ ID NO: 425040 - DNA, 478 bp, Homo sapiens
cccacattttattccacttttcttctagaatgtaaattgttcataattcgctattcattgycactgttatataggtgacctgctctaggagcctgttgaatttctcattacaaaaatgttcatatacaggagattaaaattgcaattactgtaagaagaagtcatgattaatttaataaatagatattttaattattaatttaatggccatcttcacacaaattatgtaatatatgtataacatatatatgtcatataaaaacacaaatatatttctttgctctgacaactaagaaggcgtaaaagaaataacacttcaatagctacaaatatacctcatacccagaacttggtttctaacatcattttccagtaaaaggaaccgaggaaccaaggaaccgaggttccctggagaaagagctaggactgggcagaaaatatacaagatgatcctgtagcaacttatagtgccagaaag

SEQ ID NO: 425041 - DNA, 589 bp, Homo sapiens
agccccccacaaaaacagaaaaaaatccacaatgatggaagtatgtcaaaggaacacaggagccaagtaaaagagctatcaacactggagcactttgagaaacaaaataagtaaagtcatattaggttatactcaaggaatgaaatgaataacctgagttaataatgatggaaataaatcattgaatacattaatacatagagaagaagagaaacacctcctatccagaagaatttcaaaaataagttgtttatatactctaccctaaaggagggggagcataaattcccactccttaagtgtgcrgtatgcataatgactttattataaagagtaaaacatgggaaaggggaaaaagtagtgactttgtggtggagataagaaaagcaagacttcaggcaatgatgttatcaaggtcaacatcaacagttacaaattatgttgatagtgcgtaaacttgacataatttgatgaaaatggtactctacctctgtggtcttcctccagtaaatccataaccctaatctaatcacgagaaaagcatgatttctatgaaaggggcatcctgcaatgtatctgaccattactc

SEQ ID NO: 425042 - DNA, 589 bp, Homo sapiens
agccccccacaaaaacagaaaaaaatccacaatgatggaagtatgtcaaaggaacacaggagccaagtaaaagagctatcaacactggagcactttgagaaacaaaataagtaaagtcatattaggttatactcaaggaatgaaatgaataacctgagttaataatgatggaaataaatcattgaatacattaatacatagagaagaagagaaacacctcctatccagaagaatttcaaaaataagttgtttatatactctaccctaaaggagggggagcataaattcccactccttaagtgtgcagtatgcataatgactttattataaagagtaaaacatgggaaaggggaaaaagtagtgactttgtggtggagataagaaaagcaagacttcaggcaatgatgttatcaaggtcaacatcaacagttacaaattatgttgatagtgcgtaaacttgacataatttgatgaaaatkgtactctacctctgtggtcttcctccagtaaatccataaccctaatctaatcacgagaaaagcatgatttctatgaaaggggcatcctgcaatgtatctgaccattactc

SEQ ID NO: 425043 - DNA, 621 bp, Homo sapiens
catagtttcaatattagaaactattagaaaatacatgttatgtaatataattcagtatattgctggatgaaaaagaaaaatatatgacagtctccatatatgtggaaaaatttgataaacttcaacattaatttctactacaaataaaacctttaataaagtaggaataaattaatactttattaacacaatagccaccacaaaacctaatgggaaagtctagaagcattctcattaaagtgaggaagaaggcattggtgttctttatgctaactatattgtatctgttgacttcttctcccatttagtaataartggttgctgagctagtctgtattttctagcttcactgctaagtgtggctgtggccatgtgacttaagttttgtacaatgagttgtatttggagtcatgtgtgcaatctccagaaaatctccttgaagaagataaaggtccttgttctgggcattcttttttcctcttgctgttagttgggaaatgttgacaaaggcaggagcccctttgggaaaagagatagaagccttacattgagaatcacgcagtcctaggtcactcactttggacttctacatgatgagaaataatttctttcttacttaaa

SEQ ID NO: 425044 - DNA, 583 bp, Homo sapiens
tgattaaaacagtcttttccgttctggcaactggtttaccggctttcactttcaaagatgcagggggaaaaaagatgcaaacataaaattcagcctgcaggtaaaatacgtgctattatctaaagatttctacatttagaagtatctgattgcctgatctttgggagatcagaattttcacaattcacgttcttaaagattacatttggaatcacattaaatttctcattttgttccctccttccccacttcctatatttccttaggtttctgttctacagttgttccagtgagggtaaggagaatgtgttctagtgggaataaagaaaaaaaacaaaattacgcaggcaaagaaaaaagttgtacatttttggacgttcaccactcaactgctcttagcaagttttcagaggatctattctaaattaggtagctgtggttaccactattttctggaaagttgttttctgggtatatgaaattaagtctgaggataattaaggtaggtagcttttcatcttttctctagaaagtaacyagcacaatcttggtgcttaatgaaattatatatcaggtaaatgat

SEQ ID NO: 425045 - DNA, 590 bp, Homo sapiens
tatattttttattataaatttactgtgcgctaggcactctaattattccattktttattataaatctactgtgtgccagctactcttctaataatcacctactgttaagacacaggatgggacatgtgacttcatgataaaaagggggaaacaccctgatataggaactgaattttacaagattttttgtgctccaacttcagtccctgccagaacaagcaaaaggagtgactacaatgtgactttctaaatggttgtattgaggaccacagatgctgggtcctgcctattaggaagaatgggcacactgagttatgaaatgataaaagactcctgtgtctcattctttggccttcagggactgtggtgattttgcaatgtctgtgaattgcccagggcttcagtgactgtggtgatagttctaaaacagggacacacagctttaggaacagtttcagtctataagtctgactatatgtacttcctgttgataaactcatgcttttgtcagtcttttgctaatactgaaaaacactcatgaaccatcctccatttcccattattattcaaggactttagacattcagagt

SEQ ID NO: 425046 - DNA, 483 bp, Homo sapiens
tcagtgatgtcatctgtcatcagctgtaaggcagactcccagcaagaagcccaagaggcaggcctataaggaatacccatggctgtagcaaggggctccctgccaaggccagcagagagctgggggcaatgcaggggcagtgtgagggatgtctactcagcccctgggcttgcagtaggaggcaaaaccatggaggttttggaaaaaatccataaaaactggtcaaacactgagaaaaagggcagagcaaggcgagcgccagtaaaggaaaatgagaggagcagggcagccwcgtgttaagagcatcggctctgagtcagattgtctttgagccacggctcagccactcaacacctgtgtaactgtgggcaacttatttagcctctctaagcttcagtttcctccttcacaagttggagttaacaataacagttcctccttcttaaggctgttctgagataatccactgcttttaatactcag

SEQ ID NO: 425047 - DNA, 419 bp, Homo sapiens
ggattgtacttcagctggtgtggactgcagaagatctgtgaccctctcagatgggagcactccataaccttcctggttatatcctttttctttttgagacagctctgttgcccaagttggagagcagtggtgtgatcacagctgctcactgcagtcttgacctcccaggctgaagcaatcctcccacttcagcctcccgagttgctgggactacaggcatatgacaccatgcccagataattttttattttttatagagatggggtcttatcatgttgcccaggctggtctcgaactcctgggctcamatgatcttcttgccttggcctctcaaagtgctgggattacaggcatgagccactgcgccttgctggctgtattctatttgtggaagaaaagcctcactttcttctgtgagc

SEQ ID NO: 425048 - DNA, 493 bp, Homo sapiens
ctgggtgaagggggctcctccctcggacaatcccccctgtgcctttgacttggacgacccatcctgtgataaaagtgggtgtgtgcagggactgggagcagctttcctccctttgctttccattcatggcctccaccctcactgaccctccactcttaactgtgcttctgcctttacgtctgcatccctccctcctcatttcttcctactcccaaggagtctgtctatgcacctatgcaccccgttctccattctgccaagtccgcacacagtcttcctcagggtctctatttccccttcagctccactttcaaccctggcaattgtggctctgggcacaggaatcaccttcatcatgtttggtgtttccagcttcctaattttccggtgagttctgggtttcttgctgacctactccctgcccccattgccacacaacctctggctgaagccaggtggtccctataaygtgggatagggtagtaggtttctt

SEQ ID NO: 425049 - DNA, 571 bp, Homo sapiens
tctggtcttgactccttgactttgctttgcgttgctccttgagtcttagtttctgtctttctcccctgggctcctgtctcacactatctccctgccctctgctctcacaggctggggatgtttataaagtgaggaccctggccccctgctgagtagagctggaaaagttgtaactctgtttcctgaggtgagggcatgaaaacaagaggtctagctttaacaagctgtgagagctgattcatgccccggcacagctagagggagggaggtggccatggagggggcactggactgggcacttccccagcaaggaggcaggaggggcragggcccccaggtggtccccagatctcttccctgacctggagagaaggaagcattccaccttccccctttctcccccactgccaccaccaggggtgtgtatgctgggatccctgcctggaccggagggaggcatttcctggggatggttaatcctgtgccccagccaaacccaggagctgcaatagggtgcgacggccagaagctccaggagagtgagcaggcacctggagtggagactgtgttt

SEQ ID NO: 425050 - DNA, 601 bp, Homo sapiens
gttgttttgcactctgtcacccaggctggagtgcagtggcacgatctcagctcattgcagcctccgcctcccaggttcaagcgattcttgtgcctcagcctgagtagctgggattacaggcgcccaccatgacacccagctaagtttttgtayttttagtagagacagggtttcgctatgttgaccagactggtctccaactcctgatctcaggtgatctgcccgcctcagcctcccaaattgctggggttataggcatgagccactgtgcctggccagattttttttttttttctttaagacaaggtctggctctgtcgctctgatgcagtggctcactgcatcctcccacctcaccctcccaagtagctgggaccacaagcatgtgccaccactcttggctaatttttgtgttttttgtagagatgaggtttcaccatgatgcccaggctggtcttgaactcctgagctcaagcgatccacccaccttggcctcccagagtgctgggattacagatgtgagccactgtgcctggccgtggacaggttattttgaaagagacatcagtgagactttatggagatgtctgaccctggaggt

SEQ ID NO: 425051 - DNA, 601 bp, Homo sapiens
gttgttttgcactctgtcacccaggctggagtgcagtggcacgatctcagctcattgcagcctccgcctcccaggttcaagcgattcttgtgcctcagcctgagtagctgggattacaggcgcccaccatgacacccagctaagtttttgtatttttagtagagacagggtttcgctatgttgaccagactggtctccaactcctgatctcaggtgatctgcccgcctcagcctcccaaattgctggggttataggcatgagccactgtgcctggccagattttttttttttttctttaagacaaggtctggctctgtcgctctgatgcagtggctcactgcatcctcccacctcaccctcccaagtagctgggaccacaagcatgtgccaccactcttggctaatttttgtsttttttgtagagatgaggtttcaccatgatgcccaggctggtcttgaactcctgagctcaagcgatccacccaccttggcctcccagagtgctgggattacagatgtgagccactgtgcctggccgtggacaggttattttgaaagagacatcagtgagactttatggagatgtctgaccctggaggt

SEQ ID NO: 425052 - DNA, 610 bp, Homo sapiens
tgatgtgagcttcagtggtgagtggagagtaaagccagctagcatagacaactctttgttgtgcatgragcatatgcaacaggcggagaaatgagagtagttatgcagcaagagacctgggaccatggaggtttagtttgctacaacaaatgagagataccagaatggtatgtcgagaacatgctgatcttatagaggagagtctggtgagtccctgagtaggtgctggaggacaggcagagaaatgagagtagctatgcagcaagagaccgggaccatggaggtttagtttgctaaaacaaatgggagataccagaatggtatgtcgagaacatgctgatcttatagagaaggggagtctggtgagtccctgagtaggtgcacgaggacaggatacagagcacatggagaggaactgtgacgggaacagggatgcttcctccatcatgactccagaaaggagcagatgttggtgaatctactgggagggaagagcagggcattatttcgcaaaggctttgttttttcagtaaagtattaggcaaggtcacctgcaaggaattgaagcaattagcaaacaaacaaaaactactgcaatgttggcatgtgg

SEQ ID NO: 425053 - DNA, 627 bp, Homo sapiens
tatttgtataactgcatttcatactctgatcatcaacctaaagtttgacagctgtgatgtttagcattctctctcagtggggatgaacatattatctaattatgcctagtatttggagaacatgcaaaataagactaattataaatctttgtataataattcacagtgagaatttatagttttcaaaacatggcattgtatatgtaaatgaatagtgatgaagagtargagctcaggagttggacaccttggcttcaaatcctggctgtcccacttattttctgtgacctttgacaagttatttgaattctctgaacatcagtttcctcatttgtgtaatcaggggaataacaatgcttacctgaaatggttgttttgaggacttaataaagtagatcacttagataaaattaagcacctagataattgaaatgaaaagggaaatgaaacacagtgcaaaaatgtttttatcagtggtataactatgctgaccaaaaaatctcatttccactaaaataattatacataaacatatatataaacatatataaaaacataaacatatatatatatttatcagaacactgggccccctaggtttcagtcttagcatgtagaaagggtaat

SEQ ID NO: 425054 - DNA, 627 bp, Homo sapiens
tatttgtataactgcatttcatactctgatcatcaacctaaagtttgacagctgtgatgtttagcattctctctcagtggggatgaacatattatctaattatgcctagtatttggagaacatgcaaaataagactaattataaatctttgtataataattcacagtgagaatttatagttttcaaaacatggcattgtatatgtaaatgaatagtgatgaagagtaggagctcaggagttggacaccttggcttcaaatcctggctstcccacttattttctgtgacctttgacaagttatttgaattctctgaacatcagtttcctcatttgtgtaatcaggggaataacaatgcttacctgaaatggttgttttgaggacttaataaagtagatcacttagataaaattaagcacctagataattgaaatgaaaagggaaatgaaacacagtgcaaaaatgtttttatcagtggtataactatgctgaccaaaaaatctcatttccactaaaataattatacataaacatatatataaacatatataaaaacataaacatatatatatatttatcagaacactgggccccctaggtttcagtcttagcatgtagaaagggtaat

SEQ ID NO: 425055 - DNA, 627 bp, Homo sapiens
tatttgtataactgcatttcatactctgatcatcaacctaaagtttgacagctgtgatgtttagcattctctctcagtggggatgaacatattatctaattatgcctagtatttggagaacatgcaaaataagactaattataaatctttgtataataattcacagtgagaatttatagttttcaaaacatggcattgtatatgtaaatgaatagtgatgaagagtaggagctcaggagttggacaccttggcttcaaatcctggctgtcccacttattttctgtgacctttgacaagttatttgaattctctgaacatcagtttcctcatttgtgtaatcaggggaataacaatgcttacctgaaatggttgttttgaggacttaataaagtagatcacttagataaaattaagcacctagataattgaaatgaaaagggaaatgawacacagtgcaaaaatgtttttatcagtggtataactatgctgaccaaaaaatctcatttccactaaaataattatacataaacatatatataaacatatataaaaacataaacatatatatatatttatcagaacactgggccccctaggtttcagtcttagcatgtagaaagggtaat

SEQ ID NO: 425056 - DNA, 503 bp, Homo sapiens
ttatccatgcggctgaactggtgtgtagagtatggactctagggcccagggtacaaactagctcactatggcagtcgatacagtgtctgagacgaggtggggccaatgcagccacagagcatgagactggagcttgtgggctcttatgaagtgcctgcagccccaagattgaggtatgtacagggttagaagaaatggtggctcctttcttaaagtgtctcaccagcaaccacttctgggggtargggtttttagggatgtgcatttccttttctaaggttctccagtgggaatgactatctgatacctcagtggcaggagatgctggtatcctctgtaaagcaggtcactgtgaccacagtagttctgctgtgtggctcataccaaggcctccacctttgttcgtagacatctcctggtgtattaaatatgctgatcacaatcctttctgtgtgattattctccattattgtgctccactgtattgctgcatatcctataat

SEQ ID NO: 425057 - DNA, 571 bp, Homo sapiens
ccacttctgagtctgtttcttcatctataaaattaaagggtcaggctatatgacgaaaattccttccaactctaataggctaattctgtatgttattctagtgtgtacgtgactrtatcttgtatagaaatcttatttccccccaaaattgtaacttcttcaaagtcgcgggggtggagggacatcctttgtttctataatacttagggccatgccaagaagaacttcttcaattatttcaatgttttttatgaaccaccctgggcacatcaggtattccaattaaagatctcctgcctgactttaatacttacctttcgctcctctaacattctgtttaaggacaccaatatctgggcaaatgatggcctctcataaggcttctcccgccagcattgtctcattagatcataccttcgaaagcaaagaattaaagggttaattctataactgtgcttcagtcctaggcacggcaggaaaagagaggagagaatgaagccacccaatgcatggttatgaagcttaaccaaagtacagcccctaggaagtttctatgaggactcccacctcc

SEQ ID NO: 425058 - DNA, 591 bp, Homo sapiens
tttgcaatataatgaatatggcaaaatatttatgtaacttaatgaatgggggaaaactgtgccaccaatgaaaagcaacttattttccattttgtrtttgttttttaagaagaaaaaaaaaaaatagtccgggcatggtggctcacgtctgtaatcctagcactttgggaggccgaggtgggtggaccacttgaggccaggagtttgagactagcctggccaacatggtgaaaacacatctctactaaaaatacaaaaattagcccggcgtggtggcaggtgcctgtaatcccagctactccgcaggctgaggcaggagaatcgcctgaacctgggacgtggaggttgcattgagtcgagatcacaccactgcactccagcctggaggatagagagagattctgtctcataaaagaagaaaaaaaacagttctatgactccaacccaagaaccagatactcttgcttcatagacaaaaggctactgtatattggtatacggtatatagtgcaatacctatacaaagctgagaatatacatcaattcatttgattctcacagccagccccaaatataccagaggcatatatt

SEQ ID NO: 425059 - DNA, 538 bp, Homo sapiens
cccagtttcccttttccaccctgcttcccttttccatattattaatacagttaaattctcactcagtgtctatgcctgtctcccctttcaaacctcggagtgcctctgagggctataaggtgaataaggaatgaccgactaccatgcgtgcacactcacacttccattcatataacgctgctggaccccgaaagataaataggacttatactatttgcatgttttgaaatttgaaaacacatgtagctgggacatacacaaagcaatgatttctgagtctacccagcaatcatttgtggagccacagctcaggcaggctgagagcctcttaaagaccctgtcccagttaagtgaaattctcactttgttctctccagggaaggctcccagtgcgctggatggccatcgagtcactgaattacagtgtgtacacaaccaacagtgatgtgtgagtaaacttcttattgccaaggggwttttttttccccctcccagaaacatatacatttgacagagattttaaaaagatacaggaatg

SEQ ID NO: 425060 - DNA, 657 bp, Homo sapiens
aacacacattgggtggcaaggaaaggagtgaggtgctggtggccataaacatggctgctcatgcttagaaactgtgacaatcatctcatgagggamtaatggtactcataagtcaagtgctctgttcatactacagaagcctcatggagggtcaatatcttgggaatatttttttaaagttctttatagtgaggttgtccacttcagtaactgcccttctttggatgcactgctttgcctgcaggatttatctgccctggtgccttattaagctattttccctcttcacatgggcacaaggtagaaaatcaggctcacaatagatcccaataaaaactgccttcataagattctacacccctctcctctcactatcctcactgctccccaaaactccctgtgactaaagtagcaaaacagaaaagggatttgtggctgttttgcaagtagtttgtattgtttttaaagaaacatattgctgtttctaatcatagataatattttgttttgttagtcttcctaacaatgcagaaagcagagatgatttaataagatttagaggtaattcatagattcaatagtgtggtccaaaaaaaaagaaaaatctgccagcatccttagagagctcttaagatggagctgcacaatgataatagt

SEQ ID NO: 425061 - DNA, 542 bp, Homo sapiens
catggagacctaataacctgcatcagtaaagtagaagaagactcagaattgcacagtgtcatccaagctaaaaaaggagtgtttgaggaagaatggagcatggttcttggagcctcctactggagctcttgcatagcctgccttctataagcagctcccacattcttctttctcctaggaattaaaattcatattcctcagagctttcttcttagattgctggatggggtatgctgatagactgatctattctaaggttcaataatagaaaacggaccaacagggatccttctcagaggcattttgatattaaggacctctctgtaaatgcctgtccattcaaccaccgacttttcataggctttcatctcacaggcctgtcctgataaaccagctgcctatagggctgcacggtaatcctrtgtaaatacctgtccattcaaccaaccttgagattctgggagggtcaccagttcatgagaaaaggctgggttgcttgaccctatgttgttctctgcaaaaatgtccacctggtatgctgt

SEQ ID NO: 425062 - DNA, 542 bp, Homo sapiens
catggagacctaataacctgcatcagtaaagtagaagaagactcagaattgcacagtgtcatccaagctaaaaaaggagtgtttgaggaagaatggagcatggttcttggagcctcctactggagctcttgcatagcctgccttctataagcagctcccacattcttctttctcctaggaattaaaattcatattcctcagagctttcttcttagattgctggatggggtatgctgatagactgatctattctaaggttcaataatagaaaacggaccaacagggatccttctcagaggcattttgatattaaggacctctctgtaaatgcctgtccattcaaccaccgacttttcataggctttcatctcacaggcctgtcctgataaaccagctgcctatagggctgcacggtaatcctgtgtaaatacytgtccattcaaccaaccttgagattctgggagggtcaccagttcatgagaaaaggctgggttgcttgaccctatgttgttctctgcaaaaatgtccacctggtatgctgt

SEQ ID NO: 425063 - DNA, 526 bp, Homo sapiens
tgatacttttttccctaccaaaatgattcattacattatttataacagcaaacaattggaagaaacctaaacactcaaaataggaaactgctttaataaattatgatatagccattcagtggaaaaatagataactaggataagtatgaaagcccaataaagagacttcaagtacatgtaggcatgctaaaagttatgtctacaatggtgaaggataggaaggaaactgataaaaatcaaaacagtagatttgccaaggttatgggattatgggmgagtatttaccgtttctgttaccattttgagcaatacattgtaaagcaatttaggggttccttccccttagcaagattttcagaaatcatacagctgtggtggcagggccaggcctattcctgctctgatcacatcaaggtatccgctatgactacgtgatgcctggccataatcacccacaggagcctgggctaccaagacatcactgaatagaaacaatatgggttttaaaatcagagagacaggaaca

SEQ ID NO: 425064 - DNA, 561 bp, Homo sapiens
cagacgaaatgaaaagcaaacagcagcaaaattcaaatgatgggaaaagaagaaccttcaataatccccttcccgcctacccctgagaactactttgaaatattctgagagacctcctggctgsaacacattctgagggctgaagacagtacagtgtggggctgtgaagtgttttatgttctgttccataaatactttccatctgagtcagtttatgctcttcccctcttgactcaccaacagtgacttgagagagaattaactaccatttgccttttagcagtaacatgatgacatatcagggatcccttgggtcatggttgtagaggtccctttttcctctctatatagtttctgggtttattttttatattcacaaccaggtgggtccccaagcagccatttcttacttgtgtgtaatgcttctataagcctcagagtagcttttgagtctcatttggttctttaagatgctgctagtaacataaaaactaggtgggtggtgtgaaggaaggatgtttctgttaagggtgcacaatctctgcagaagaaaagtggatg

SEQ ID NO: 425065 - DNA, 561 bp, Homo sapiens
cagacgaaatgaaaagcaaacagcagcaaaattcaaatgatgggaaaagaagaaccttcaataatccccttcccgcctacccctgagaactactttgaaatattctgagagacctcctggctggaacacattctgagggctgaagacagtacagtgtggggctgtgaagtgttttatgttctgttccataaatactttccatctgagtcagtttatgctcttcccctcttgactcaccaacagtgacttgagagagaattaactaccatttgccttttagcagtaacatgatgacatatcagggatcccttgggtcatggttgtagaggtccctttttcctctctatatagtttctgggtttattttttatattcacaaccaggtgggtccccaagcagccatttcttacttgtgtgtaatgcttctataagyctcagagtagcttttgagtctcatttggttctttaagatgctgctagtaacataaaaactaggtgggtggtgtgaaggaaggatgtttctgttaagggtgcacaatctctgcagaagaaaagtggatg

SEQ ID NO: 425066 - DNA, 346 bp, Homo sapiens
ggagtacggggtaaacacttacaagcaagacacctgaagcatgatttcttttaaactcctcctcataagatttgttcctttcctatctaacacagagatggctgcgtgggaggacaaagtgacttcctaagtgtttgagaggctgtcaagtrgggagtactggaaaaatccagggttctgaagagagatggacctctgccatttttttttttttgagagacaacaaagtcttgttccttggctcaggctggagtgcagttgagtgatcatagttcactgcagcctcaaactcctggccttaagtgatccccccacctcacccaagtagctgggactacaggtatat

SEQ ID NO: 425067 - DNA, 566 bp, Homo sapiens
tggaatagacaagaattttaaaacaactataataactatgctcagtaaggtaaaagaagatatgttcataacaaatgcaacaatgagaaacttcagcagggaaatagaaactatttttaaaaagcaaaaggaattctaaaactgaaaaacacaatatttgaaatcaaataatcrctgtatggacttagcaacagaatggagataacaaaagaaagagtcaataaacttgaagcaacatcaatagatagcccatctaaagaagaaaagtaggaaaaaggttggaaaaaaatgatttttaatccttagggacccaagagacaaaacatctaacacacatgtaactggaggtccaagaaggaccagagagaaagggttagacaaaatatttgaagaaataatggtttaaattatcccaatttgttgaaatttacacattcaaaaatttgttaagcccttagcagaataaatataaagtaaactatgcataggcacatcatggttaaactgctaaaaactaaaaatcaagataatttaaaatgttagctttttaagactgtttctttata

SEQ ID NO: 425068 - DNA, 566 bp, Homo sapiens
tggaatagacaagaattttaaaacaactataataactatgctcagtaaggtaaaagaagatatgttcataacaaatgcaacaatgagaaacttcagcagggaaatagaaactatttttaaaaagcaaaaggaattctaaaactgaaaaacacaatatttgaaatcaaataatcactgtatggacttagcaacagaatggagataacaaaagaaagagtcaataaacttgaagcaacatcaatagatagcccatctaaagaagaaaagtaggaaaaaggttggaaaraaatgatttttaatccttagggacccaagagacaaaacatctaacacacatgtaactggaggtccaagaaggaccagagagaaagggttagacaaaatatttgaagaaataatggtttaaattatcccaatttgttgaaatttacacattcaaaaatttgttaagcccttagcagaataaatataaagtaaactatgcataggcacatcatggttaaactgctaaaaactaaaaatcaagataatttaaaatgttagctttttaagactgtttctttata

SEQ ID NO: 425069 - DNA, 604 bp, Homo sapiens
gacaatctttgacctgacatggacatcttctcaaagatgtcaccagagatgaccatgtagtccatccatcagacggtaggcagccaacggcccattcaatggagcagccacaccctgggatrtttgctcactgcattgccgagtagtacctgctgggctcacaacctttcccattgcagtctctgcccagccctgagaaagtccctcctggccatcctcatagcttcatgggggctttggagtggttgaaagttaaatgaagagttccctctgctgtctgaacaagctcactgcgagaggcactccgggcagaagcaggggcagttttcctccttatctgctgcatccacatagagcttctggtccaaagctctcttggtggtgagagccagtgggtcagctgtcatccccttggtttcatcctcatgcatcctctgatcagtgctctggtcctgcctgttgcagcccacagcccacactcttggggtttgtagtcagaaccccaacactaatggctgcttatgctcctaatggactgtgactatggttagagagtcctcctggcgtagcctcctactctaagctgcagaacatcaagccaggg

SEQ ID NO: 425070 - DNA, 604 bp, Homo sapiens
gacaatctttgacctgacatggacatcttctcaaagatgtcaccagagatgaccatgtagtccatccatcagacggtaggcagccaacggcccattcaatggagcagccacaccctgggatatttgctcactgcattgccgagtagtacctgctgggctcacaacctttcccattgcagtctctgcccagccctgagaaagtccctcctggccatcctcatagcttcatgggggctttggagtggttgaaagttaaatgaagagttccctctgctgtctgaacaagctcactgcgagaggcactccgggcagaagcaggggcagttttcctccttatctgctgcatccacatagagcttctggtccaaagctctcttggtggtgagagccagtgggtcagctgtcatycccttggtttcatcctcatgcatcctctgatcagtgctctggtcctgcctgttgcagcccacagcccacactcttggggtttgtagtcagaaccccaacactaatggctgcttatgctcctaatggactgtgactatggttagagagtcctcctggcgtagcctcctactctaagctgcagaacatcaagccaggg

SEQ ID NO: 425071 - DNA, 574 bp, Homo sapiens
tctttccaagctttagcctcttctagaaggatcatgggactttctgtggttttgtttgagaggctgaagagaaagatgtgccaacaaaaccctcctggccagtttcacacagaggagagagatagaaagagaggttgctcgaggtggtgaaaggagcatattctagaaggtcaagattatggaaaccttaagactagctctcaccttgagatttcacaatattagacagaaagggtcactaaatgccatgctaacagagatcctagttttaggagtggcgagactacccagagagactagggtctggcccaagactccacagtaggtaaatggtggagctgggttcagaacacagggcttctgactyctaatccagggctcttctctgactttcagtattcctgtggaataggaagggttaaatgcaggaagaagtgggtttgcagccactacagacactggaactgaaaactgacaagacagctggaggtgctgggaaaacaagcactaatgagctcctgggttccatcttgtgggagaatgccagcagatgacttcaggcccatgtgctgaa

SEQ ID NO: 425072 - DNA, 619 bp, Homo sapiens
aagccttttaaacaatctcatcctttattgcttaagttctagaagcaattttcttttctgtagctccaagatgaaaaaggtcttccttaccttcattggrttttgaatgagtgagtaataaacttttattgtattaatccactgaaattttcaggatttgtctgtattagcagctagtgccaattagtctaatgcagaaattgatactggtagtgagggtgcttcattaaaaagaaggataatagaaatgactttagcttagtggtcaagagacagttgattggaaactgaactgtagactggaaagatggagatcaggttatgcaggggcaaagttttggaaagttgtcacctgtgatgactagacgggcaaacagtgctcattgaactcatcatttcagagcaagaagtaggaaaatagtgttatggtagcatagctgtatttggcaaggtattaggagtattacacaagctcaagaaattgttagatgagttgcaagcagaaattcagaataatagagcccagaaagatggggccttggagttgaaacagcagactatttctaggttccacacaatatgagatggaatttaaaagggatttacgtggcaagggccc

SEQ ID NO: 425073 - DNA, 473 bp, Homo sapiens
tattttcatgtatggagggaggaatggtcatgtttaacctgtttgtctccaggtaaaatgacccccatcccaaccatcttccttgccttggagtgttttcttctcctttaatcagtggttagatggctaatcatccatctttccactgggttattgtggacatcataagatattataaagtgttagcaagtatttgaaaagcatagctattttgagcactgccttggtgttaatgatgtgcttaatttgcctcaataccttgaaaggcttgtttcttttcacagaggaatgatcagcagatgcaatgagctcctgaatttgctttggacacaaaatgcccycgtggaccaaaaatgatcaaaggcagctctgtttggaatatgccaggggaagtccacattcctttccttgttgccctcacatagtcttgtaaggtgggctctggctcatggcccaaagggacttttgccaag

SEQ ID NO: 425074 - DNA, 507 bp, Homo sapiens
ccagcctcctttcagcctggaattggctgctgagatgtggctgcagtgcctgagactcagtgggcaaatagaactaacgtctcatcccttcaagaaggaaagccattttgaaaagtaaagggaagccagcagtagccattcctccaacattgctttcctgtataagggactgggagatctctgttgtagagactagaggccttcaggtgtaagcccacaccagcagtggcagcagtagcacctgggaacttggtgccactttaagaccctctagacctactctaattcagaaactcaggctggggtctggtagtctgttttaacaaagcaccccagggaatgcagatgcctgagaccatttgaaaaacactgatttagggaaacaatctccaagagatcatctggtccaaaatttagcctttggacaggtaaactamcacctccattgtgtaggtagggaaactgaggcataataaaagttattgtctggggccatgtagctgggtc

SEQ ID NO: 425075 - DNA, 507 bp, Homo sapiens
gacaggggcagtgggaggaagatttggaacagggctagcaaactgaaccataggccaaatctggcaggcacctatttttgtaattgaagttgtattgaaatgtaattatatccctttgtgtatacatctatggcttcaattccactacaacagcaaatctgagtggtttcaacagagacctcacagctgscgaagtctaaaatatttgctatttagacctttacagagaaagcttgctgacccttggtttagagtattaaaatagactcaaggcagggtaaccgaaagagatctgggaaaaagaacagaaatgcatttcctaatacacttccatgcagagaaaaaggaactcaattccctattggtaggaatgtaaaccagtacagccaccatgaaaaatcatacgaagagtcctcataaagctgaaaatagaactaccatttgatccagcaatcccactactgggtctctacccagaggaaaacaatcagtatatcaaagagatac

SEQ ID NO: 425076 - DNA, 571 bp, Homo sapiens
taacatatcacctccttggttcgttgggaggactaaatgaaagcactcatatggaaatataatgtttggatacataaatgaattttgctttattattttaacttagccagtggttctcaaaatgtggtccagagaccctyaagtatccttgaaacacttttagtgagctcacgaggtcaaaactattttcaccgcaataccagcatgttatggttctttttcagactcattctctcctgtaagtggagcttttctgaggttgcatgatgtatgatatctgcaacggactcaaggaagaagcaggtatgagaatccagctgtctcatattaagccagagatagaagagatttacaaaactctaaaaccaatgttgctcttagcatttttttaaatgttattttttcataaaaatatgttaaactatttctgtaactctttacctattaatttattttaaaataataataacccatgaatcccactgcaacaggattattgctgttgttttaaaataaattaataagtacagattttttaagtttctcagtttttatttctaataatattcat

SEQ ID NO: 425077 - DNA, 571 bp, Homo sapiens
taacatatcacctccttggttcgttgggaggactaaatgaaagcactcatatggaaatataatgtttggatacataaatgaattttgctttattattttaacttagccagtggttctcaaaatgtggtccagagaccctcaagtatccttgaaacacttttagtgagctcacgaggtcaaaactattttcaccgcaataccagcatgttatggttctttttcagactcattctctcctgtaagtggagcttttctgaggttgcatgatgtatgatatctgcaacggactcaaggaagaagcaggtatgagaatccagctgtctcatattaagccagagatagaagagatttacaaaactctaaaaccaatgttgctcttagcatttttttaaatgttattttttcataaaaatatgttaaactatttctgtaactctttacctattaatttattttaaaataataataacccatgamtcccactgcaacaggattattgctgttgttttaaaataaattaataagtacagattttttaagtttctcagtttttatttctaataatattcat

SEQ ID NO: 425078 - DNA, 518 bp, Homo sapiens
ggtgggagcccaaggagacgatgctgggagacactgatcctgttttatgaagagccttgagtactcagggcaaggagagtgaattttttcctggttgggagcttgttagtattttttcagtggtgggagaggtggtgatggtagggtattttgatsaaagcaatttcagaaataacttttctggttgtggtatgaaggctagtttgaaaagggtacacatgtaggaaataagatgctatgaaccgacgagagcttttgagaaaggaagagtgggactgcagaaagtttagagaagaaaaatcaataggactttggttctgatttaatataggaggttaaaggtgattctcaaaaacgcttccatccaggcatggtggctgacacctgtactcccagctctttgggaggccaaggtgggcagattgcctgagcccaggagttagagaccagcctgggcaacatggtgaaatcctatctctacaaaaaatactggttaaggacatggtggcaggtgcctg

SEQ ID NO: 425079 - DNA, 518 bp, Homo sapiens
ggtgggagcccaaggagacgatgctgggagacactgatcctgttttatgaagagccttgagtactcagggcaaggagagtgaattttttcctggttgggagcttgttagtattttttcagtggtgggagaggtggtgatggtagggtattttgatcaaagcaatttcagaaataacttttctggttgtggtatgaaggctagtttgaaaagggtacacatgtaggaaataagatgctatgaaccgaygagagcttttgagaaaggaagagtgggactgcagaaagtttagagaagaaaaatcaataggactttggttctgatttaatataggaggttaaaggtgattctcaaaaacgcttccatccaggcatggtggctgacacctgtactcccagctctttgggaggccaaggtgggcagattgcctgagcccaggagttagagaccagcctgggcaacatggtgaaatcctatctctacaaaaaatactggttaaggacatggtggcaggtgcctg

SEQ ID NO: 425080 - DNA, 528 bp, Homo sapiens
ttagctgggatgttaaataatttattaacaagactatctgttgaggtaacttgaaaaaccggatgagcttttggtatgcttagagcaggatttcccacccttgacaccattgacattttggaccagataattctttgttgtggggacttgttctgtgcattgtaggatgcatggcatcatccctggcttctacccattagatgccagtagaactccccccrctcctattgtgacaactgaaaatgccttcagacattgccctgtggggacaaagtcagccctggttaagagttactgtcctagaggaattggagcccatctaatggaaccaaagaagcactggatgagagttgagtttgaagtccattgccaactctgccatttagtgcagatgttttctttaagttctatctgaattcaaggtcaggctgtttgactctggataaacagcttgacctgctggatagcagccttctcatctcaggtaatagaataatgcaagtccagaatattgttgatacttctgag

SEQ ID NO: 425081 - DNA, 618 bp, Homo sapiens
ctcatctatttgtagatctttttgtttttagatgctgaataaatactttttgaaacgatttttaaaaaattaacaactaatattgtatgtttttatcaagtacaacgtgatgttttatggtatatatatatagtagaaatggtaaatatggctaattaacaaatgcattacctgtaattgtgtggttttgagtgaatttcttaagatctaatttgattgcactgtggtctgagagactgttatgatttcagttcctttgtatttgctgagggtgttttacctccaattatgtgatcaattttagagtcagggccatatggcaatgagaagaatgtacattctgttgttttggggtggggagagctatagatatctatcaggcccacttgatccagagctgagttcaggtcctgaatatctttgttaattttctgtccttgatgatctgtctaatactgtcagtgggatgttaaagtctgccagtgttattctgtgggaaactaagtctstttgtagatctctaagaacttgctttataaatctgagtgcttcctgtattgagtgcatatatatttaggatagttagctcttcttgttgaattgaaccctttatgatta

SEQ ID NO: 425082 - DNA, 522 bp, Homo sapiens
ttcgaggtctaggagggtttcctgggggaagttacagttgagctgatgggtaagagattgtggagaccgccagctaatcaaggggaagaagggcagggctctctgagtgagaaccatatcttgaacaaaggcgcagaggaagtggatgcctggtcccttcaggaaaatacaaattgctcagtcagaccagaaaacagattggaatggaggaggagaggggaggcagcagaggtggggaggcgataactatcctagctctgccactcactagccttgaataaactggggttaacatttcccagcctcaggtttttttaaatcttaaagtggggacaataataatagaccttgatgcatgcattgttttgaggattaagtgagataaacttgtagaccacccagcmccgtgcttggtatatagtaagagctgagtaaagggtagatttgattatcactcatcacttttgaattgttaatgtgctggttagtaacctaaccactgtttgcagctggaggttttgg

SEQ ID NO: 425083 - DNA, 615 bp, Homo sapiens
aagcctaaacaattacatttgacttgatttgattggcatcacttggtttagttttaggaatgctagtccccttctttataagacaagggaacagcaataggtgattgtttaagaccctttttggaaagtagcattgagaggtgctttggacaggttagctttcctggtgtatgacagttgttacttgtttctggtagaaaaggcctcctcccatcatggtacatttgcactaatgtgcatagggcactctgggcatatgtcccattaagagatctctggaatttgggttgtttatccaagtaatactctgtatcagtccattctcatgctgctataaataactacctaagactgggtaatttataaaggaaagaggtttaattgactcctagttctgcagggctggggtgggctcagaaaacttacaatcatggtggaaggggaagcaaacatgtccttcttcacatggctgcaggatagaaaagtgagtgcccagtgaagggggaagccccttatgaaactactagatcttgtgagaactcactcactgtcatgagaacagaatgggggaaacaaccccratgattcaattatttctacctggtccctcccacg

SEQ ID NO: 425084 - DNA, 585 bp, Homo sapiens
ctgggtaatttataaaggaaagaggtttaattgacttacagttctacaaggctagggagacctcaggaaacttacaatcatggtggaaggggaagcaaacaagtccttcttcacatggcagcaggagagaaaagtgagtgcccacagaagggggaagccccctataagaccatcagatcttttgagaagcaattatcatgagaacagggtgaggaaaactgcccccatgattcaattatctctatctggtctctcccatgacacatggggatgatgggaactacaattcaagatcagatttgggtggggacaccgccaaaccatatcatattctaatactgtcttcacacttggacacatggcagctaaagcttcattagccrtgaaatggacttcactagaattgattctctttttctgctaaaagaaaggggaaagccataaaaagtccaaaaaaatttcaattcattagagagctctgatctgttgaattcatttcaacacacatttttcaggttcctagtgtgtgccagcaccagaaacagagctatgatgaacaagacagaataccagccctgggaggga

SEQ ID NO: 425085 - DNA, 560 bp, Homo sapiens
ctatttcgttggattgctttgaagattaaataagtgagtgcaggaaaagtcataacatgtaagagcttgataaatggttattatcactatcaattccaagaacaatcgggagatgctattgctgtctggagatgggatttataaggagtaagactggaggcagtgctgtgagttaggaggtattgagagtggtggctggaactaggaaactggaggaattagttgggtgttaattgagtaggaagtgagaagaaggatattcagagactgagatagtccttgagatttggaatgtaggaatagtgttaagttcaggatgagtatggtggggttggtttgtacrtaatggtgaggtcagtttgtacatgttgttattatattcatgaggaatcagttgcagagaacagacttcgcgttagcttgtttggcaggaaggggtttatcacagggtgttaaatggcttgtagaattgtcaggaggtctgaggaaacagaatcgagattgagctttcaggagaaacctataatgcgactcctaggaactgggctgctatagtagct

SEQ ID NO: 425086 - DNA, 514 bp, Homo sapiens
aattttataatagctcaagtcccttacgtgacttttttatccattaaaatagatacatgtgaataatttcttttttaaaaatagtttactctcctagctcttcctttactcatctcagatactttcatctttctaatacttccaacctgtccgagaaaaaagtctctctctcagcaccttgctcagagaactyctcattctcccctttacccctctgatctaattctaaattctcaaccctcaaagcactgaactgacaagaaaggaagcttctcagagagcagaagagagtaggagactgagtaggtcaacctagaatttcctttcaagtgcaaagaaagggcaatggctggtaacagtcatatacttttcacccataacaagtatttgtcaaatggaagaaaagagggcaggaagaatggaagaaaagaaggatcagaggaagggaaggaggaaaaaagaaagactaatatatttgaaaagtcacttttactacagcctagccaacttctgt

SEQ ID NO: 425087 - DNA, 546 bp, Homo sapiens
aactaagagataaaaccactataaaggaatatataatatcatgaacaactatagctgaagtaattgtgtaccgaaaaacacaaataagtgaacttaataaactaatcatcagggtggttacatataaaaatgcatataaaatcaatactactctaccatttatgcttctatttcactcactgatctaaaattttatacctagatttttattattacattttaatactttacattattcatcttatctttaaaatttgttttaaaatttatcttttgattatgttggtaatcagtataattacttatatttatcatttaactggttttactactcactaccagtgtttctacaatacagattcactgttctcaaagggttttttaatggtgatataattttttctcatttagaggctatctctgagtaatatcaggtatgaagcttgtgtagtacattttctgagttttgcatattgtggaatgtgtttttgytgccactgcacaaaggaggcaatatgctcacaggtgggatctttagtcaataac

SEQ ID NO: 425088 - DNA, 546 bp, Homo sapiens
aactaagagataaaaccactataaaggaatatataatatcatgaacaactatagctgaagtaattgtgtaccgaaaaacacaaataagtgaacttaataaactaatcatcagggtggttacatataaaaatgcatataaaatcaatactactctaccatttatgcttctatttcactcactgatctaaaattttatacctagatttttattattacattttaatactttacattattcatcttatctttaaaatttgttttaaaatttatcttttgattatgttggtaatcagtataattacttatatttatcatttaactggttttactactcactaccagtgtttctacaatacagattcactgttctcaaagggttttttaatggtgatataattttttctcatttagaggctatctctgagtaatatcaggtatgaagcttgtgtagtacattttctgagttttgcatattgtggaatgtgtttttgctgccactgcacaaaggaggcaatatgcycacaggtgggatctttagtcaataac

SEQ ID NO: 425089 - DNA, 555 bp, Homo sapiens
tcatcctgcaatgttggtcagatgtcatgtttgagcacttctttctgcacagagaggggatctctgaggacccctcacgcctcgttggacagatccatgatggggtctccaaggccaacttctccatcggtcccttgatgcctgtccttgcaggaacctacagatgttatggttctgttcctcactccccctatcagttgtcagctcccagtgaccccctggacatcgtgatcacaggtgagagtgtccagacattcttctcattgtcattgggacacagagtgaatgatccaggacttggaacccccaggtggtcatgaggaagataagcgtgrgattcttatggagagagactgactcggtgaggtctgtaccaacagagacagggaaacaggagacataagtacagaccaggtgtcataacagaggacagacacaggggccatacggggaagtagaaaagagagaaagaggtaaaggagacactcagacagacagacatgtgccagagagaagtgtccttccatgctgactttgctcagagacctggcacag

SEQ ID NO: 425090 - DNA, 544 bp, Homo sapiens
cagacagacagacatgtcccagagagaggtgtccctccatgctgactttgctcacagacctggcacaggttagaagtttcatttctgttttacctccacaaagtgttctctaccaggagaacccaaggacacccatatttctgacctgagttgggccctgtggcctcaggccttgtggcacctacaggccatgtttattctgacacctctgccttccatgtaatggagagtaaycgtcccaggatatcatggccccagaacaccaacccctgtatgctgtgtgaacttgtggtctccagactggattctgaggctcacattccaaataaccccacatatgaaaggatcactgagaggcacagagaaaaatcaggaacaccaaaaagcaaagacataaacacacggagaatgagccagaggaaggagattgagagactcacagacacataaagagagagaaaagagggcagaggagtggtgagaatgatggcagggagcagagaaaagcactaaaattagagtcctgagagagaggcacaaggac

SEQ ID NO: 425091 - DNA, 544 bp, Homo sapiens
cagacagacagacatgtcccagagagaggtgtccctccatgctgactttgctcacagacctggcacaggttagaagtttcatttctgttttacctccacaaagtgttctctaccaggagaacccaaggacacccatatttctgacctgagttgggccctgtggcctcaggccttgtggcacctacaggccatgtttattctgacacctctgccttccatgtaatggagagtaaccgtcccaggatatcatggccccagaacaccaacccctgtatgctgtgtgaacttgtggtctccagactggattctgwggctcacattccaaataaccccacatatgaaaggatcactgagaggcacagagaaaaatcaggaacaccaaaaagcaaagacataaacacacggagaatgagccagaggaaggagattgagagactcacagacacataaagagagagaaaagagggcagaggagtggtgagaatgatggcagggagcagagaaaagcactaaaattagagtcctgagagagaggcacaaggac

SEQ ID NO: 425092 - DNA, 544 bp, Homo sapiens
cagacagacagacatgtcccagagagaggtgtccctccatgctgactttgctcacagacctggcacaggttagaagtttcatttctgttttacctccacaaagtgttctctaccaggagaacccaaggacacccatatttctgacctgagttgggccctgtggcctcaggccttgtggcacctacaggccatgtttattctgacacctctgccttccatgtaatggagagtaaccgtcccaggatatcatggccccagaacaccaacccctgtatgctgtgtgaacttgtggtctccagactggattctgaggctcacattccaaataaccccacatatgaaaggatcactgagaggcacagagaaaaatcaggaacaccaaaaagcaaagacataaacacacrgagaatgagccagaggaaggagattgagagactcacagacacataaagagagagaaaagagggcagaggagtggtgagaatgatggcagggagcagagaaaagcactaaaattagagtcctgagagagaggcacaaggac

SEQ ID NO: 425093 - DNA, 510 bp, Homo sapiens
tcaggtgggaggggagctgtgacaaggaagaacctccctgaggaaactgcctcttctccttccaggtctatatgagaaaccttcgcttacagcccggccgggccccacggttcgcrcaggagagaacgtgaccttgtcctgcagctcccagagctcctttgacatctaccatctatccagggagggggaagcccatgaacttaggctccctgcagtgcccagcatcaatggaacattccaggccgacttccctctgggtcctgccacccacggagagacctacagatgcttcggctctttccatggatctccctacgagtggtcagacccgagtgacccactgcctgtttctgtcacaggtgaggaaagccaatgtctgtcccatgtcctatggtcctagagccttagctgaggagcttcctgctgatgatggagagaagcatggacagatgtggagagaagatgcagcatggtgtgagggtgggatcagggcacaggatggcagacagg

SEQ ID NO: 425094 - DNA, 510 bp, Homo sapiens
tcaggtgggaggggagctgtgacaaggaagaacctccctgaggaaactgcctcttctccttccaggtctatatgagaaaccttcgcttacagcccggccgggccccacggttcgcgcaggagagaacgtgaccttgtcctgcagctcccagagctcctttgacatctaccatctatccagggagggggaagcccatgaacttaggctccctgcagtgcccagcatcaatggaacattccaggccgacttccctctgggtcctgccacccacggagagacctacagatgcttcggctctttccatggatctccctacgagtggtcagacscgagtgacccactgcctgtttctgtcacaggtgaggaaagccaatgtctgtcccatgtcctatggtcctagagccttagctgaggagcttcctgctgatgatggagagaagcatggacagatgtggagagaagatgcagcatggtgtgagggtgggatcagggcacaggatggcagacagg

SEQ ID NO: 425095 - DNA, 365 bp, Homo sapiens
gaatatagctaaggtaatgagacgccackcctatgattaggttgcatcatagaatactcgtctttctagcagatactcctggctggctcaaagaaaggaacagccatgttgcaaatgtccatgtggaaagaaactgcaagtagcctgtaggaactgtgagtggcctttaggcactgcgggcagcctccagcagctgacagcaatctccaaataacagccagaaagaaactggggccctcagtcctacaaccataagaaaatggatttcatcaacagaacaatggaaaactaatacatcatacaaaggtacattcacataaagaattaataatacctgagtgggtgagttagacatcaaatggggt

SEQ ID NO: 425096 - DNA, 440 bp, Homo sapiens
aatccaaactaaaataacccaccattacccttcacaaagtcwtggggggagaggcagtatattagttttctgttgctttgtaacacactacaccaatttagaggcttaaaaacgacacccatttactatcttaacattcctgtggggcagaaatccaggcatagcttaattgggttctctgcttagtgactcacaagactgcaatcaaggtactggccacactggtaaaagagcttccaagctccttcaggctgttgaaagagttcattttcctgcagtgtggaatcgtggggacttgcttcttcaaggcgagttggggacagtctctgatctcagggagagaccccagtccctctcttaagggcttccaccaggttaattcaggtctacttagaataatctcctttttgattaactcaaaatgaacagatttcaggtat

SEQ ID NO: 425097 - DNA, 511 bp, Homo sapiens
acacccatttactatcttaacattcctgtggggcagaaatccaggcatagcttaattgggttctctgcttagtgactcacaagactgcaatcaaggtactggccacactggtaaaagagcttccaagctccttcaggctgttgaaagagttcattttcctgcagtgtggaatcgtggggacttgcytcttcaaggcgagttggggacagtctctgatctcagggagagaccccagtccctctcttaagggcttccaccaggttaattcaggtctacttagaataatctcctttttgattaactcaaaatgaacagatttcaggtattaattacattttcaaaaatcccttaatttttgctatgagaatgctttttccacagccctttttgccagaatatctgtcttctccagtcctgaacatagacactgatcagtgcttatagggtcaggggatcaagactgacgatgggactctagagattctttcctcactttcacttttatattgaa

SEQ ID NO: 425098 - DNA, 595 bp, Homo sapiens
gtataacatacaggtaataattaagtagatttactaagtctccttaattactagctgggcaataatagtacccactttcttggaatgttatgaagataaggtatgtaaagcatctgacacagagcctagcataggaaactttattttcccttcccagtcacatggcttttatttctgaagattcttgtagagagcaggccaatgagaggacagaatctaggatgggtataattagagatggtggggacctgcgaggccagacctaggtgtggatctcagtataagacatgtagcattcagggctgtgcaagaatttgtttggctggaacaatgaaaggaggactgaggaccaacaaattcaacctcaccagatatcactgcaagactctagaactaatgacaactggagaccttctgagaccttgagtgagttcagcatgggccttggcaagagtctctgtatcctgaaagatgcagtcctggctctgcgggaaattgtaagactcatcttatttttcttggtgcttttcgtctttttcagaggctttactgcctgggaatagggctggcttaygaatccaggagttaatgttct

SEQ ID NO: 425099 - DNA, 523 bp, Homo sapiens
tcaaatgactttattccactactatatacttctttaataatatattaagaatgtatttggcagtcatwtttttcatttttaatatttttaattgacatactgtaattgtacacatttgtggggtatgatttgatgtttcaatacatatctatgttgtataatgatccaatcagggtagttggtatattcattacctcatgtattcatcattcatttgtggtaagaacatttaaaacactctcttctacctattttgtaataaacaatattttactgtaaattatagtcaccctactatgcaatagaacaccagaatttatttctcctaattgtaactttgttcccattaaacaacctctccccttactcttctccccagtctctagtaagcactgttctactctctgcttctgtgatagcaactttttttaggttccatgtataagtgagatatatggtatttgtctttctgtgtctggcttatttcaggttctccaggttcatccatgatgttacaaatgat

SEQ ID NO: 425100 - DNA, 587 bp, Homo sapiens
tgatcacattttattcttttttatgggtgaatggtattccattatgtatgtataacacattttctttatccattcattcattgttggacacttaggttgattccataccttggctatttttgaaaagtgctgcaatawacatgggagggctagtatcgcttcaacatactgatttcatttcctttggacatatacccagtattggaatcatatggtagatcatatggtatttctattttttattttttgaggaacctccatactgttttccacaatggctgtaccaatttctattcccaccaacggtgtgtaagcagttagcttttctccatatcctcaccaacacttgttttcttttgtctttttgataacgtccattctaactgaagtgaagtggtatctcattatggttttaatgtgcatttccctgaagattagttatgttgagcattttttcatgtacctattggtcatttgtacgtctttttctgagagatgcctattaagatcttttgtccattttttaatcaagttatttggttttttgctgttgagtttttaagtttctaatatagtctggatattaa

SEQ ID NO: 425101 - DNA, 617 bp, Homo sapiens
cctcaccaacacttgttttcttttgtctttttgataacgtccattctaactgaagtgaagtggtatctcattatggttttaatgtgcatttccctgaagattagttatgttgagcattttttcatgtacctattggtcatttgtacgtctttttctgagagatgcctattaagatcttttgtccattttttaatcaagttatttggttttttgctgttgagtttttaagtttctaatatagtctggatattaacctcttgtcagatgtgtagtttgcaattattttctcccattccacaggctgtctcttcactctgttaatagtttcctttattgtggaaaagcttttcagtttgacataatcccatttgtttatttttgcttctgttatctatgctttagaggtcttattttaaaaatctttgtccagcctaattagtgatttttgagaaccaactatgtgctcagtcctaggggttctttaytgtaaatcaaagaatgaatgaatgagtgaatgaattaataaataaataagtcagctttccaattattcatttacctaaccaatatttctaagaaccttctatgtggaagaaactacattatagaagtagtag

SEQ ID NO: 425102 - DNA, 429 bp, Homo sapiens
aagaaaatatgtacactgcatacatctgacaaagaaattgtattcaaaatttttttaacttacaaaacaatactaagacaaaaaaattaaaaatggccaaatatttaacagacacttcataaaagaaamtatgcaaatggccaataagcacatgaaaagatgctcaacattattagttgctagaaaaatgcaaattaaaactgcaatgagataccagtaaatacacactacagtgactaaaattaaaaagaccaaaaataccatgtgttggtgaggacatgaagcaactctcatgattgctagtaggaatgtaaaacagtaccatcatttttaagatcatttggcagtttgttgaaaatttaaatctatacttaccatatgatccagcagtttcacctttaggtatttgtatttgtctatttgtatgct

SEQ ID NO: 425103 - DNA, 626 bp, Homo sapiens
taccaatgtgcattcaattttggaggacgctggttcaggatacttattttactgaggggaaactgagggctagagaggacagttgatttgctgcagatcacattgctgtgcatttcactcctgtactgggggccttctactatttgctgcctcatgattcagagtgagataaaggcaaggagtcwttggcaacagaagccagaaagctttcccctgaggctctctctgaggatcttggatttgcttctggaagcttagctctggagaagagcagcattcaggacaagcgaacaggtctggaacttgcttgggctagtcgcttcacttgagtgctttagtttcctcatctgtaaaatgggttaatcacagtaagtaacatataaagtggtgagaattaaagcattactatgtggaaagcatatagatcaatgtttattgaataatgtgtgtatatactctgtgttttcatttaattttctgccgtgtgtactttcctgtcattaaaatagtctttagaaacacggttttagggactgtacaaagtctttgcttcctgaattttgaacttggagaacagaagataaggaagggccaagtgagaaagagaagatgaaacaaaatacctg

SEQ ID NO: 425104 - DNA, 657 bp, Homo sapiens
ttaaactaagtattatgttgattcttattcagttttagcaggaattgggatgggggaacctctttccgacctcgtaactcagactaagaaaaagtaaatgttcctaaagctgatcaaagtttaaaaggctcctttttaaagatctagtcaaaaactttggacttagctgattctactgctagtgaaatgtctgtgctgtccccatcaataaaggtttgtatacaactgaggtaagccagacactgggactatagtggtaagtaagacaaccaacggccctgctstcatagagaccaaataaataaatataaaataaatgagtttgctgcagatagttagaaaggttatgaggatgataaagtaagggaatgggatacagaatgtctgggtggggctggcatcatctatgctgtggtaagggagggtctctgagaaggcagcatcagggctgaggctgaggctaggtgataagaatctatctgtgtggaaagcttgggaggttctttccaggctgagggatcagcatgttcaaaggccctaaggtgagaatgaacttggcagatgaaaggagctggagcataagcacctcggggatggctggctggaggggaggtcaggggctgcgcaagggcaagactgtgaggatttgtggggcgt

SEQ ID NO: 425105 - DNA, 631 bp, Homo sapiens
aacgaaccaaaagtcattcatttcaaatcatacacttcgttcaaatcaagcctgctatgatcccagccaggcctccctcctaaatgagttgagggaagcaaggctgcccagactaaagttgcatgtcccctcaaagccttccctgcaaggctttaacaagtgaaaatttgctttttaggaaagtatcattcctgcaaagccttgtatttctgtgtgacttgaacaatgccagtactatactgcccayagaatggtagagaagggatttattgctcaaacggcttcttgataactcattggcctcagcagagatatccataatttatggaggaagtgatcaatcactagaaaatacatcctgcccattaaaggaagctgtcagcctcctgccagcccatctcactggactggagagtctgagccaagggcacttgggacagcctctttctggcattggttttcagggaacagaaagaaattttgtcattgactcaaaagctctaaggcctaaaaaggagctgagttttggaaaatagattcacataggggaaaataggaggacaagagagatctgtcttaaagggagaagctttcaactattcctgcagtagatgggggtgcacgcatgaat

SEQ ID NO: 425106 - DNA, 578 bp, Homo sapiens
agaaagaaccaaggaacctacatgggtgagaagaaaaagaaagacctgagcatagtgagaatacagaaaagtaatagggtagaggattgaaagtcacaacgaggctgtgtaatttctaaagtgggagatctagagtgagtgagatggaaggatatgaggtggtgctcagagcagagacctctgctatagaccaacctcattaggctagtttacccattccaaatcctaaaacttcgctatgctggcatccttgctctgctccaaaatrccctccctcctttttaggtattaatctatccatggatgttgtcacacactctgtaactttaaaccagcttgatgtgtctgaaggctgcacataggttgaccactcaatggaggttgaaacggtttcaaagccatttgtggacaccttcctgaatcacttcctgttggctgttgcgctgcttggtttatgacctggttgaactctgctcagctcttatgctctttgctctagtctagagtcttggctccatcatccatgcaagatcatgctccctgctctgcattctcttgcatggtgatggctgccagtt

SEQ ID NO: 425107 - DNA, 578 bp, Homo sapiens
agaaagaaccaaggaacctacatgggtgagaagaaaaagaaagacctgagcatagtgagaatacagaaaagtaatagggtagaggattgaaagtcacaacgaggctgtgtaatttctaaagtgggagatctagagtgagtgagatggaaggatatgaggtggtgctcagagcagagacctctgctatagaccaacctcattaggctagtttacccattccaaatcctaaaacttcgctatgctggcatccttgctctgctccaaaataccctccctcctttttaggtattaatctatccatggatgttgtcacacactctgtaactttaaaccagcttgatgtgtctgarggctgcacataggttgaccactcaatggaggttgaaacggtttcaaagccatttgtggacaccttcctgaatcacttcctgttggctgttgcgctgcttggtttatgacctggttgaactctgctcagctcttatgctctttgctctagtctagagtcttggctccatcatccatgcaagatcatgctccctgctctgcattctcttgcatggtgatggctgccagtt

SEQ ID NO: 425108 - DNA, 557 bp, Homo sapiens
gaatagagctgcacatttttacaattttcacaatttttacaattttcagagctctacatcagaaggtcagccacattcacctgtcaagatattttgggcagtaatgactcccctttcttgctattcttatcagttgccttttgttatagtcactggggctttgtgagctrgctttctcataagtcttctgtataatgtagtattcggcacttttcctattctcattcaaacttcagcaaaaatatcagggaaaatgggggaaaggatgatgcctgcaacttgagtattatttttatctacatcacatggagtgaagttgcttaaacgctgtagaactatgacatagttctgggatttcatatattcaatatgtacataaagcaggaccacttttctatactttagtgaccattttacttctagcgctgctttaggcttccatttaaaattctgattcttaatctaagtttgaaatcattgggaattatttgtggaaaggccagtggatggtgaggcattaggccaaagggaggtcaggacccgttgagtctgctaag

SEQ ID NO: 425109 - DNA, 557 bp, Homo sapiens
gaatagagctgcacatttttacaattttcacaatttttacaattttcagagctctacatcagaaggtcagccacattcacctgtcaagatattttgggcagtaatgactcccctttcttgctattcttatcagttgccttttgttatagtcactggggctttgtgagctagctttctcataagtcttctgtataatgtagtattcggcacttttcctattctcattcaaacttcagcaaaaatatcagggaaaatgggggaaaggatgatgcctgcaacttgagtaytatttttatctacatcacatggagtgaagttgcttaaacgctgtagaactatgacatagttctgggatttcatatattcaatatgtacataaagcaggaccacttttctatactttagtgaccattttacttctagcgctgctttaggcttccatttaaaattctgattcttaatctaagtttgaaatcattgggaattatttgtggaaaggccagtggatggtgaggcattaggccaaagggaggtcaggacccgttgagtctgctaag

SEQ ID NO: 425110 - DNA, 447 bp, Homo sapiens
cagaaataagagaagacattatttctgaccttgacagaaatacaaagggttgtaaaggaagaatatgacagcaattgtacatcaacaatgaaataacttagataaagtgggaagatttctagaaagatataaactaccaaaactgatttaagaaaatatcaaaagtctaaaaagaattataataatcaagattgaatagctaagcaaaaaatctacccacaaagtaaagccctgtatcaagtggtttcaccasggaattctactaaatttttttttttttaaatgaacaccaattctttacaaattctcttaaaaaagaggagggaatactttacaattcattttatgaggctagttgccctgataccaaaaccagacaaaaacctcataagaaataaaaactaaagatgaatatatcttatgaatagatgcagacatcatgaacaa

SEQ ID NO: 425111 - DNA, 450 bp, Homo sapiens
ggcctagtatctacatatattttatgcattcatgacatatctagctttttcttttctttttttttccatatttcttggctaagcgaytcatctgtgaggtttttcacaaaattgttgccatcgccaaaaatattccatttactgaaaaaaatccacatataagtgtactcacgcagttcaaactaatgttgttcaagagtcaactgtataaaaggtattaatatgtctggaaagagatatgtttccaatttaacagacactaccaatgaggagaagagttgggctaggcaggaaacttcaaattttccttttttactttatatattctattgtatctcaacttataacctgtggaccacgtttattagaagaaaatgcagattcctgaaacttcctgcagaccccatgagtgacaatctcagggagatggagttccagagtctgcttttt

SEQ ID NO: 425112 - DNA, 608 bp, Homo sapiens
gttgccatcgccaaaaatattccatttactgaaaaaaatccacatataagtgtactcacgcagttcaaactaatgttgttcaagagtcaactgtataaaaggtattaatatgtctggaaagagatatgtttccaatttaacagacactaccaatgaggagaagagttgggctaggcaggaaacttcaaattttccttttttactttatatattctattgtatctcaacttataacctgtggaccacgtttattagaagaaaatgcagattcctgaaacttcctgcagaccccatgagtgacaatctcagggagatggagttccagartctgctttttttcatagatgtttctttgtcattcctgtgtatatctgagtttcagtagcactgctaatcaattgtttggggttctctctccttcaccagcatgttcttgcaaaactaaccaaacacatacaaagcgcaaacagtacaatagtgcactgcaccttcatgacccttacctgttccagcctcttcctacctcttccacatgtgatatgtgtgtacatacccacagacagaaacacagagacatgtttggaagccagtgtggatgccctgtgatc

SEQ ID NO: 425113 - DNA, 608 bp, Homo sapiens
gttgccatcgccaaaaatattccatttactgaaaaaaatccacatataagtgtactcacgcagttcaaactaatgttgttcaagagtcaactgtataaaaggtattaatatgtctggaaagagatatgtttccaatttaacagacactaccaatgaggagaagagttgggctaggcaggaaacttcaaattttccttttttactttatatattctattgtatctcaacttataacctgtggaccacgtttattagaagaaaatgcagattcctgaaacttcctgcagaccccatgagtgacaatctcagggagatggagttccagagtctgctttttttcatagatgtttctttgycattcctgtgtatatctgagtttcagtagcactgctaatcaattgtttggggttctctctccttcaccagcatgttcttgcaaaactaaccaaacacatacaaagcgcaaacagtacaatagtgcactgcaccttcatgacccttacctgttccagcctcttcctacctcttccacatgtgatatgtgtgtacatacccacagacagaaacacagagacatgtttggaagccagtgtggatgccctgtgatc

SEQ ID NO: 425114 - DNA, 608 bp, Homo sapiens
gttgccatcgccaaaaatattccatttactgaaaaaaatccacatataagtgtactcacgcagttcaaactaatgttgttcaagagtcaactgtataaaaggtattaatatgtctggaaagagatatgtttccaatttaacagacactaccaatgaggagaagagttgggctaggcaggaaacttcaaattttccttttttactttatatattctattgtatctcaacttataacctgtggaccacgtttattagaagaaaatgcagattcctgaaacttcctgcagaccccatgagtgacaatctcagggagatggagttccagagtctgctttttttcatagatgtttctttgtcattcctgtgtatatctgagtttcagtagcactgctaatcaattgtttggggttctctctccttcaccagcatgttcttgcaaaactaaccaaacacatayaaagcgcaaacagtacaatagtgcactgcaccttcatgacccttacctgttccagcctcttcctacctcttccacatgtgatatgtgtgtacatacccacagacagaaacacagagacatgtttggaagccagtgtggatgccctgtgatc

SEQ ID NO: 425115 - DNA, 594 bp, Homo sapiens
cttaccattttggaaaaaaaatgtgtgaaagtagaaaactgggagagtgaactactatttgaaggggtaaagtatttttaatgaaagttgttatttggtattttttcttgagataaaatgaagtagggaaacaaattcaaggagggcaaaaagtagatcttagagaattacaggatattatttgtctggagagtagggagaagggaagtgaggaagtaaatcctggaatggtagacctgggacagatttcagtggagaaagacagtatcctgttcaaagtgaataaatgaaatattttgcaggtaattagaatctagggatgtgtagaaggtttttgagggggtaaaattagaggaaaatctaaaaaggatggttactttaataagaaataaaataccaacattgtatagtgtttttaaatgctaaaattctattggagtgtaattggtatatttgtgttttatttttaaatgtattttaattttaaactaaaayattttagggtgcacttgatctatctgatgtacattctccaccaaagtcaccagagggaaaaacaagtgcacagacaacaccaagtaaggtgagttagct

SEQ ID NO: 425116 - DNA, 604 bp, Homo sapiens
actaaggtgaagtgcaatttgacccttttttgaaaaataaaatgtgtgtttgtgtatatgcatatgaaaattggaaagacataaaaattgttaaaaaataactgtctatgggattggatagtgagaggattctcttttttaaatcatatgttccaaccacaatagraagatgaagaagtattgggattacgtatattttacattattttctgtatgttttaaaaaattgtctatatttaaaatgtattgctttagaatatattttttaaaagttatccatctctcacctccagatggaaaaaagagaaaacaaaagtatatacattttttgcttacgtaataatagcaatagtgtgaaatgagctttcattgtcaaatgtggtgaaactatgcttattttttttcttccaattgtattcagtttaacttattcaggcaaatatagtcactaattacatatatctgtttttctgctgactatatccttggctaatatcaaatcaagacatatagacacacaggcacagagtctttctcattctctctctttctcgttcatacacacacacacacatagttccctgatacctcatgtaatcagtac

SEQ ID NO: 425117 - DNA, 624 bp, Homo sapiens
ataggcgtgcaccacataatatatcattgttagagacattctaatgcattaactaagtactatattttagtgaaattgaattcatacatttgttgggaataattttttaagtgcatcctaaatcagtgttggccaacaatttgagtagttttctatttacaaatacggacaaaataatggtctcatatgttgttacaaaataaaatattgcattagatatattggcaaagaaaaccttagtcagctactttcatgatctaaaatactattgtgttttagactttggcctatttccatgactaatgaaagaaatattggggaagaaaaattactgaagacttttaccacttctagctttkaaataaggtttcagtggtgattatttctacacttagtgtcatttcaaacaaatcatttgcttaacaacattgtattctaataagagacagagaataggttttcttccagctggggttctaatgttgctttattttatcatgcaaaatatgtatgagaacaatttgttgttatacatttgacatgtaattgtgagatatttatgtagtatctcacatattcctatttggtttttgaaaaagagtttcacatattttatgtgaatgt

SEQ ID NO: 425118 - DNA, 568 bp, Homo sapiens
accaaaacctgccatcaaaactaccctgacccttattctctccatagtgttatatatatataatgttatattcattcagggttagaatgtattgagatagtgcttagaagacaaaaaaacagttggatagacagtaaagaggagattgaaggataatccttaatttattcatccttctatatccacattcttccactgtcaagactatactaattccactgtggttcaataaacctatgaaaacattagttttaagtattatgtataaaagtgatgaagtagtaagttcatgtgtatgcatgtgtatgcatcaaaacacatgatatctaagttatatatatgctagtattcatatrtacacattatatgtttgtataagtgtatatacacacatttttaagtaacaagatttattctataatatgcctataagtattattgctacagcattttgtatacatggtaaaatttaattctgaattgtaataccaccacttggacttgttctagtgtctaggagtttccctaacctttaagctaagaatcatagttcttgatccctaattaa

SEQ ID NO: 425119 - DNA, 590 bp, Homo sapiens
ggaaacaatgattattaagaagtgtaagaatcaaggtgattccyagcacactgttcagagagggactgaatggttatgggcatcctttgaagaaaaggtattaaaagcctgctgaccctgcagctgtgtgttgaaaaaattacgtattactgagaagcacatgaactcttatatatttgtatactttcaagcttcataataataccagccaacactaaattgtacgtactatatgccaggaattgttcatggcatttttacacatattatctcatttaatcttcaaaataatactattgggcagtgtattggtccattctcacgccctggagacattttccccattgtcttggtaattaacatttggatcctcattacttatgccatgaagaaatgctcaagactgggtaatttatgaagaaaaaggtttaactcacagttctgcatgactgtggaggcctcaggaaacttacaatcatggcaaatggcacttcttcacagggtggcaggagagagaagtgcagagtgaagtggtgaaaatccccttataaaaccatcagatcttgtgcgaactcactcaccatcacaag

SEQ ID NO: 425120 - DNA, 504 bp, Homo sapiens
ttgggaagaatttatctgatggttaaagacatagtctaatgtgccaagtgagcaarttcagaaatagaatatttcttccaggatattgtcttagtatgcgatatttctctcagaacatgatactcattataacaaatcagttcattttatgattatcctcatcagtgaggtaattgcttcaaaatggttttccattatctattgcttttcctgaatgttgggatgtattgacgaattgttgcttccttgtaacatacattttatcttctgagtatgtcgatttaagatgaccttgtacctgaagtaaaggttgttcaaatttacagttttcaaaaatgtgtggctactcaaaatttgcagattataaaattaaaactgagaaatcaaaaaccagtaaaacatgtatatgagtctcttaatgaagaaataatgtctgaaataacatgctccaaaatgtgagatccaagttaaatcatgtagaaatattaacaatcaattcttttt

SEQ ID NO: 425121 - DNA, 483 bp, Homo sapiens
ctctttgggagacatttctactcacaaacccttaccataaaatttgggaagttttttgaaagcagaggaytttcataatttttttagtgtgagttacagaacccaaagcaatattaaaggtgaacacatcctaacacgacatagctagctagaagatgccaaggcctgtgttcttttcctcaattattcgatatctatcagaacataattttagcaaggaaataattgagactatataaaattatatcaactgtttacttcattagaaaatatatgacagccatgtcaatgattatttcaatcacctcgtgctggaagtatatacattttggggtttcagggaagcatatttagaacaaacaaatgtaagttatagtttcacccattaggtaataaacatcattaggtcattctttgaatagctctgcactagacgacttgcaaagcccaggattcaccgtggtgctcaaaatgcacaaagtc

SEQ ID NO: 425122 - DNA, 410 bp, Homo sapiens
ggtcaattaagcactgtgggaaacacagatatttatatagtcacattacaggtaatgcaagaagtaaagcagaaaatggtgtccataaactcatgtgtcaaatcattttcatgcaagctaatagtgatatatcaatgtaaaaccggagtcatacatagtataaatctttggtgcagtaacagtagtcaggacaaagactggacccatagtctgggacccagagagaacacatcrgagtgagagaacaaaaggtgtcatggccagattactccaactgcaaagcaacatgcagataggagacacatttaaaaacccactttttccatcttcccccatatgcctgctcatacatgcttcagaaaaatttcaagggaattaactatttactattcctattcaagttgtctact

SEQ ID NO: 425123 - DNA, 487 bp, Homo sapiens
ttctcccttgcaaataaacatgaagacagagaatgccaaaacttctggaaaaaaatttaaaactcattctattcctcatttgggaaagtacagagtagaattttcaagtgacamaacaatggaagcctccagagagttccatgattagagaggaaaaataattacataggacattagtacattgatgctctctggtgatagaaatcttaaaggaaataccttccttagtttgggaaagagcataaaaacagattcttgatatctttcaaaaattccagcactcttatcttaagggtataaaataaaaatatcacatagctgtaaaaacgaagattaagattttatttatttatttatttatttgctttcctttttaactttaattttaggttcgaggtacatgtgaaggtttgttgtaaaggtaatcttgtgtcacaggagtttgtcgtatgaattatttcactacccaggtattaagcctagtacc

SEQ ID NO: 425124 - DNA, 633 bp, Homo sapiens
ccttccttagtttgggaaagagcataaaaacagattcttgatatctttcaaaaattccagcactcttatcttaagggtataaaataaaaatatcacatagctgtaaaaacgaagattaagattttatttatttatttatttatttgctttcytttttaactttaattttaggttcgaggtacatgtgaaggtttgttgtaaaggtaatcttgtgtcacaggagtttgtcgtatgaattatttcactacccaggtattaagcctagtacccaatagtaattttttctgcccctctccctcctcccaccctctaccttcaaatagtgtctgttgttcccttcattgtgttcatgaccactcctattcaacatagtattggaagtcctagccagagcaatcaggcaagaaaaatattttaatcttatatcagcctttgtaccatgtaataaaaataatttatcaaagttacctttgaaacaatgagcaaatactaaaatagattagaaaaatctccaagagtcatgaggattcgtttaactccgtggatgaacagagcctctgtcactaagacatttgggtcaaggtggcactgccttttatgcctgggactgtgcaagacacattctctttcttg

SEQ ID NO: 425125 - DNA, 633 bp, Homo sapiens
ccttccttagtttgggaaagagcataaaaacagattcttgatatctttcaaaaattccagcactcttatcttaagggtataaaataaaaatatcacatagctgtaaaaacgaagattaagattttatttatttatttatttatttgctttcctttttaactttaattttaggttcgaggtacatgtgaaggtttgttgtaaaggtaawcttgtgtcacaggagtttgtcgtatgaattatttcactacccaggtattaagcctagtacccaatagtaattttttctgcccctctccctcctcccaccctctaccttcaaatagtgtctgttgttcccttcattgtgttcatgaccactcctattcaacatagtattggaagtcctagccagagcaatcaggcaagaaaaatattttaatcttatatcagcctttgtaccatgtaataaaaataatttatcaaagttacctttgaaacaatgagcaaatactaaaatagattagaaaaatctccaagagtcatgaggattcgtttaactccgtggatgaacagagcctctgtcactaagacatttgggtcaaggtggcactgccttttatgcctgggactgtgcaagacacattctctttcttg

SEQ ID NO: 425126 - DNA, 595 bp, Homo sapiens
cacattgattttatatactgagattttgctaaatttgcttatcaacttaagaagttgtaggactcagatagctgggatgggattttgtagataaaggaaacctttgcaaccaaaggtagtttgtaagcaaagatagtttgacttcctcttttcctattgtcatctgcaagcaaagatagatcgacttcctctaatcttattgtcatcttcaaggaaagatagtttgacttcctctcttcctatttgtataccctttatttctttctcttgcctcacttccctggccagaacttccaatactatgtagaataggagtggtgacagagggcatgcttgtcttgtgcaggttttcaagaggaatgctgccagcttttgcccattcagtaygatatcattggtgggtttgtcatatatggctcttcttactttgaggtatcttacttcaatacctagttaattgagaacacttaacataaagtgaggtttaattttactgaaggccttttctatatctattgagacagtcctggggtttttgtctttagttctgtttatgtgatgaatcatgtttatttatttgcatatgcttaaccaa

SEQ ID NO: 425127 - DNA, 595 bp, Homo sapiens
cacattgattttatatactgagattttgctaaatttgcttatcaacttaagaagttgtaggactcagatagctgggatgggattttgtagataaaggaaacctttgcaaccaaaggtagtttgtaagcaaagatagtttgacttcctcttttcctattgtcatctgcaagcaaagatagatcgacttcctctaatcttattgtcatcttcaaggaaagatagtttgacttcctctcttcctatttgtataccctttatttctttctcttgcctcacttccctggccagaacttccaatactatgtagaataggagtggtgacagagggcatgcttgtcttgtgcaggttttcaagaggaatgctgccagcttttgcccattcagtacgatatcaktggtgggtttgtcatatatggctcttcttactttgaggtatcttacttcaatacctagttaattgagaacacttaacataaagtgaggtttaattttactgaaggccttttctatatctattgagacagtcctggggtttttgtctttagttctgtttatgtgatgaatcatgtttatttatttgcatatgcttaaccaa

SEQ ID NO: 425128 - DNA, 595 bp, Homo sapiens
cacattgattttatatactgagattttgctaaatttgcttatcaacttaagaagttgtaggactcagatagctgggatgggattttgtagataaaggaaacctttgcaaccaaaggtagtttgtaagcaaagatagtttgacttcctcttttcctattgtcatctgcaagcaaagatagatcgacttcctctaatcttattgtcatcttcaaggaaagatagtttgacttcctctcttcctatttgtataccctttatttctttctcttgcctcacttccctggccagaacttccaatactatgtagaataggagtggtgacagagggcatgcttgtcttgtgcaggttttcaagaggaatgctgccagcttttgcccattcagtacgatatcattkgtgggtttgtcatatatggctcttcttactttgaggtatcttacttcaatacctagttaattgagaacacttaacataaagtgaggtttaattttactgaaggccttttctatatctattgagacagtcctggggtttttgtctttagttctgtttatgtgatgaatcatgtttatttatttgcatatgcttaaccaa

SEQ ID NO: 425129 - DNA, 595 bp, Homo sapiens
cacattgattttatatactgagattttgctaaatttgcttatcaacttaagaagttgtaggactcagatagctgggatgggattttgtagataaaggaaacctttgcaaccaaaggtagtttgtaagcaaagatagtttgacttcctcttttcctattgtcatctgcaagcaaagatagatcgacttcctctaatcttattgtcatcttcaaggaaagatagtttgacttcctctcttcctatttgtataccctttatttctttctcttgcctcacttccctggccagaacttccaatactatgtagaataggagtggtgacagagggcatgcttgtcttgtgcaggttttcaagaggaatgctgccagcttttgcccattcagtacgatatcattggtgggtttgtcatatatggctcttcttactttgaggtatcttacttcaatacctagttaattragaacacttaacataaagtgaggtttaattttactgaaggccttttctatatctattgagacagtcctggggtttttgtctttagttctgtttatgtgatgaatcatgtttatttatttgcatatgcttaaccaa

SEQ ID NO: 425130 - DNA, 545 bp, Homo sapiens
cagccaagccatgatggggaactgcctccacctgcatcatcttggactctaaagcccacaggctggaatgaccaattcacccaaacagcaaaggtggcagacctcccctccctgccaggmactccatcccagggagaaataagaactctgtcagcctagagtaccagcgacggtggctgtaggctccagttgggagatcccggccagtgaggaggaatgaatcagggtcctgcttaatgtcccagggagaaataagaactctgtccatagaatacgggcaagggtggctggaggccccagctgggaggtcctgcccagtgaggaggaatggattggggtcccacttaaagaagcagtctagccgcattttggtaaagcagctgcactttgctgggggcaggggtcgggggaaggtcccttcctcatccaggccatttgggctctccaaagcctgcagcctgtttggctgaatccttcaaatagtaaaggtggcagcccacccctcccccaccaaggagttgggtccagtctcaggtaagccacag

SEQ ID NO: 425131 - DNA, 557 bp, Homo sapiens
tacatggctttggataatacacctgatatctctataattgactcatgggtaatataacctacaaaaattcctgcataagttcgtgagaaaatgtacaattatgtttatcacaatgtgttttgttaatggtaacaaagtattggaaacaactatcaaccaaccacaaagagtatagataagaaaagagtgactgccttgctagggctacttactagggttttctccagaagcagattttaagacaagcactgaggataccaaaagggtgtcagcacagttttaatcaattctgctttataatgtctagaagggcaagtattcccagacttcctcagggaagtgggaagttaaaacagcaagggaaagtagccaataagtgcttcgttcttaagccagctactacagtgggcaactgaaacttaatcmgcaggcaggctgtggaaaattgtgaaaaacacacatctcagaacaatctcagccaacggaggagcaaaggtatttatacactctcaccaagtagcaattgtgaagagctgcccagtggatgtgaatttcca

SEQ ID NO: 425132 - DNA, 557 bp, Homo sapiens
tacatggctttggataatacacctgatatctctataattgactcatgggtaatataacctacaaaaattcctgcataagttcgtgagaaaatgtacaattatgtttatcacaatgtgttttgttaatggtaacaaagtattggaaacaactatcaaccaaccacaaagagtatagataagaaaagagtgactgccttgctagggctacttactagggttttctccagaagcagattttaagacaagcactgaggataccaaaagggtgtcagcacagttttaatcaattctgctttataatgtctagaagggcaagtattcccagacttcctcagggaagtgggaagttaaaacagcaagggaaagtagccaataagtgcttcgttcttaagccagctactacagtgggcaactgaaacttaatccgcaggcaggctgtggaaaattgtgaaaaacacacatctcagaacaatctcagccaacggaggagcaaaggtatttatacactctcaccaagtrgcaattgtgaagagctgcccagtggatgtgaatttcca

SEQ ID NO: 425133 - DNA, 502 bp, Homo sapiens
cgcctggtgcaatgttttatgacggtaattgcagcactttgggaggctgaggtggggagattgcttggacccaagagatcaagaccagcctgggcaacacagaaagactccatttctgctagccaggcatggcrgcacatgcctgtagtcccagctaccatggcggctgaggggagagggtcgcttgagcctgggaagtcaaggctgtagtgatctttaatagcactactaccctccagcctggatgacagtcctagaccctgtctctaacagggacagggtctggctctgtcaaaagagagagaaaaagatgtgacaatggcagcaagattgaagtgaagcaatatgatgattcaccacaccattcctagctttgaaaatgaaagtgggccaggacccaaggaacgcaagcagactctagaaactagaaaaggtaaagggatgggttaccatagagggacttcaaaagagaaccagcctagctgactgaaataggttggat

SEQ ID NO: 425134 - DNA, 502 bp, Homo sapiens
cgcctggtgcaatgttttatgacggtaattgcagcactttgggaggctgaggtggggagattgcttggacccaagagatcaagaccagcctgggcaacacagaaagactccatttctgctagccaggcatggcggcacatgcctgtagtcccagctaccatggcggctgaggggagagggtcgcttgagcctgggaagtcaaggctgtagtgatctttaatagcactactaccctccagcctggatgacagtcctagaccctgtctctaacagggacagggtctggctctgtcaaaagagasagaaaaagatgtgacaatggcagcaagattgaagtgaagcaatatgatgattcaccacaccattcctagctttgaaaatgaaagtgggccaggacccaaggaacgcaagcagactctagaaactagaaaaggtaaagggatgggttaccatagagggacttcaaaagagaaccagcctagctgactgaaataggttggat

SEQ ID NO: 425135 - DNA, 502 bp, Homo sapiens
cgcctggtgcaatgttttatgacggtaattgcagcactttgggaggctgaggtggggagattgcttggacccaagagatcaagaccagcctgggcaacacagaaagactccatttctgctagccaggcatggcggcacatgcctgtagtcccagctaccatggcggctgaggggagagggtcgcttgagcctgggaagtcaaggctgtagtgatctttaatagcactactaccctccagcctggatgacagtcctagaccctgtctctaacagggacagggtctggctctgtcaaaagagagagaaaaagatgtgacaatggcagcaagattgaagtgaagcaatatgaygattcaccacaccattcctagctttgaaaatgaaagtgggccaggacccaaggaacgcaagcagactctagaaactagaaaaggtaaagggatgggttaccatagagggacttcaaaagagaaccagcctagctgactgaaataggttggat

SEQ ID NO: 425136 - DNA, 529 bp, Homo sapiens
catgcttcctgtacagaccatggaactgtgagtcatttaaacctcttttcttcataaactatccagtgatatggtttggctctgtgaccccacccaaatctcatgttgaattgtaattcccagtgttgggggagggacctggtgggaggtgattggatcatgcagatatcccccttgctgttctcatgatagtgagtgagttctcatgagatatggttgtttaaaagtgagtagcactacctccttcactctcgctcattcccactatgtcatatgaagaaggtccttacttcmccttcacccttctgccatgatggtaaatgtcctgaggcttgcccagtcatgcttcctgttaagcctgcagaaatgtgagtcaattaagcctcttttcttcatagcttacccagtctcaggtagttctttgtagcagtttgagaatggactaatacaaaaaattggtaccagagaggtaagacattactataaagatactgaaaatgtggaagtgactttggaactgggtaacagg

SEQ ID NO: 425137 - DNA, 536 bp, Homo sapiens
cagagctctcatggagaacttccagagcagtctggatgggaaataggaggttggagcccctacatggagtccccactggggcactgcctagtggagctatgagaagaggccaccatcctgcagaccccagaatggtagagagcttgcaccaggcacctagaaaagccacaggcactcaatgccgctcagaaagcaggactgtgacacggcctttcctctctyggatttggatgcttcagcttgagtttgtaggattttgtaagggtgagtcacagtatttcactggatacagagaaatctgacactccacagattctagaataggccaaattccatgaattatgtgagatattgaaatactcttttcaaataccttgtttctttatacttaaggttataaggccaatcagaacttggaggaatgggctattcattctttcacagctttcttatggtaacacactgccttcaaatgagattcaggaaaatggaacatgtagccttaaatctggcttcacaccatttcccatgtgtca

SEQ ID NO: 425138 - DNA, 536 bp, Homo sapiens
cagagctctcatggagaacttccagagcagtctggatgggaaataggaggttggagcccctacatggagtccccactggggcactgcctagtggagctatgagaagaggccaccatcctgcagaccccagaatggtagagagcttgcaccaggcacctagaaaagccacaggcactcaatgccgctcagaaagcaggactgtgacacggcctttcctctctcggatttggatgcttcagcttgagtttgtaggattttgtaagggtgagtcacagtatttcactggatacagagaaatctgacactccacagattctagaataggccaaattccatgaattatgtgagatattgaaatactcttttcaaataccttgtttctttatacttaagkttataaggccaatcagaacttggaggaatgggctattcattctttcacagctttcttatggtaacacactgccttcaaatgagattcaggaaaatggaacatgtagccttaaatctggcttcacaccatttcccatgtgtca

SEQ ID NO: 425139 - DNA, 513 bp, Homo sapiens
tctttgccatatgggtctagtactactcgctactactctctagggtttccatgtagaatgcttcaatatttcaatctaatggcagacctttcttccaacctaaacmatttccagacatacagtcttagccagccaaatgtcatcttttctgaataggtcagtgtgcagctgcaaagatctcgagagctattgcatcctggagtggcatgacattttgtggatcaatgcagttaaatagaattctcagctgatgatcagaaactcagttattgaccaatcctggctttacacaaatattagcaatttacactaaaaaggctaatattactactgaggatttagtgtatctgagttgattctcagcactgtggcaattttggaaaataattcatggagagatacacttacaaatataataaacataacttttaatcatctttgtaaatataaaagcatattataatatatatgtattattataattagagtagtgtaaacctaacaagaaattat

SEQ ID NO: 425140 - DNA, 513 bp, Homo sapiens
tctttgccatatgggtctagtactactcgctactactctctagggtttccatgtagaatgcttcaatatttcaatctaatggcagacctttcttccaacctaaacaatttccagacatacagtcttagccagccaaatgtcatcttttctgaataggtcagtgtgcagctrcaaagatctcgagagctattgcatcctggagtggcatgacattttgtggatcaatgcagttaaatagaattctcagctgatgatcagaaactcagttattgaccaatcctggctttacacaaatattagcaatttacactaaaaaggctaatattactactgaggatttagtgtatctgagttgattctcagcactgtggcaattttggaaaataattcatggagagatacacttacaaatataataaacataacttttaatcatctttgtaaatataaaagcatattataatatatatgtattattataattagagtagtgtaaacctaacaagaaattat

SEQ ID NO: 425141 - DNA, 630 bp, Homo sapiens
ctgggactacaggcacacaccaccacaccaaactaattttttctgcttttttgtagagacacaggtttcactattttgcctaggctggtctcgaactcctgggctcaagtgatctgcccacgttggcctcccaaaatgctgggattatagacatgagccaccgcctatagccagcatcatttgcttctacatgtcaataatgtgcttggcataatccatcaaacctaatacatatagattgaaataattaagattccaaaatacataaacgatgatatatcgagaaagaactgtccaatttatagtgatagggttttacatatatttgaaatctgatctcaagagagattgtcagaatctagcaacagctatcattagcttctgcttcaacctggcaaatgaataagttcaaggatgtgttataatggcttgcaaaagccaaatgttaacaagaggcrtaagaggcataggtatgaataataccatggcaaaatgcactaataacctaatctagtggattcattgtttgtaccgttctgaaccaggcctgtagaaatatatatgaaagggattgccaagtacctctccaaacacccaagaatggcctcggaaatataaaaaataaccact

SEQ ID NO: 425142 - DNA, 566 bp, Homo sapiens
gcaatttaagggatgcctggattaggttccaaatgcccatctgtaaactaaggaatctggccagctgaacagctgcactagcagactgaaactagaccaatctcttaggtaggcaggaggaagggcagacaggataggaaataagccatctatcttttcatatttacagttgcactttccacccaatattgaagcaatacaaaaattagcatttttgtagccaattacaagttttctgaaatggtaaaactcaatcataacctgctgaattaaactcacagatgaagaaaaacaaatattttactttaaaattggttttatttctgagatttasaaacacaaaaattacaatatggacatttacatttaaataaaatattttatgcgggtggttgaactgtggcaaaggaaaccgagaaaaacctgcaattaatactaacaatattagtaaaataaataattatatattatgaataaggtgcatagtgtgcattatattattttatccttgaaacaaattttcaaggcaaacatgttatctataatttacagctgaggaagggaaa

SEQ ID NO: 425143 - DNA, 566 bp, Homo sapiens
gcaatttaagggatgcctggattaggttccaaatgcccatctgtaaactaaggaatctggccagctgaacagctgcactagcagactgaaactagaccaatctcttaggtaggcaggaggaagggcagacaggataggaaataagccatctatcttttcatatttacagttgcactttccacccaatattgaagcaatacaaaaattagcatttttgtagccaattacaagttttctgaaatggtaaaactcaatcataacctgctgaattaaactcacagatgaagaaaaacaaatattttactttaaaattggttttatttctgagatttacaaacacaaaaattacaatatggacatttacatttaaataaaatattttatgcgggtggttgaactgtggcaaaggaaacygagaaaaacctgcaattaatactaacaatattagtaaaataaataattatatattatgaataaggtgcatagtgtgcattatattattttatccttgaaacaaattttcaaggcaaacatgttatctataatttacagctgaggaagggaaa

SEQ ID NO: 425144 - DNA, 566 bp, Homo sapiens
gcaatttaagggatgcctggattaggttccaaatgcccatctgtaaactaaggaatctggccagctgaacagctgcactagcagactgaaactagaccaatctcttaggtaggcaggaggaagggcagacaggataggaaataagccatctatcttttcatatttacagttgcactttccacccaatattgaagcaatacaaaaattagcatttttgtagccaattacaagttttctgaaatggtaaaactcaatcataacctgctgaattaaactcacagatgaagaaaaacaaatattttactttaaaattggttttatttctgagatttacaaacacaaaaattacaatatggacatttacatttaaataaaatattttatgcgggtggttgaactgtggcaaaggaaaccgagaaaaacctgcaattaatactaacaatattagtaaaawaaataattatatattatgaataaggtgcatagtgtgcattatattattttatccttgaaacaaattttcaaggcaaacatgttatctataatttacagctgaggaagggaaa

SEQ ID NO: 425145 - DNA, 551 bp, Homo sapiens
ctatagtattgtcctcattttattcttgttgttggtaatctataytttatgtatttttatttctcagttgtcttggaagtttgtgttattctttccaaaaaatgaagtttttgttatttgctattgtattctggtttttaattttattaatttctgctttttattttacttctgcttatcttaatattgctttgccattctaattttagctcttagaggaagaagcttaggttattgattttatacttttcctcttatctaatgtatttggttctataaatttatctcttggcactgctttagttgaagttcacagattttaatatgtatttctaattgaatcttattcccattttcattatgaattatattctttatttcattttcagattattcattgctcatatgtaaaagataattgttttgtttacttaccttctgccaccttgttgtagttgcttattaatcctaataacttcttgtggatttttaaaaaatagtctacaaacaagatcacgtcatttgccagtgaacactgttttacttcttaa

SEQ ID NO: 425146 - DNA, 602 bp, Homo sapiens
ctgctcatgtaattatttgccatcacatatgttcctgatgcagtgtctgttcayatatttggtccattgtttatttttcttattgatgtgctttgataattatttctatagttcagatacaagttctctgtcagaaatattgtattagtacattttcgcactgctataacgaaatacctgagactgggtaatttataaagggaagagatttaattgactcacagttccacatggctgggaggcctcaggaaacttacaatcatggaggaaggtgaaggggaagcaggcacctttttcaaaaggtggcaggagggagtgagagcaaaggaataaaaactgccatgtagaaaactatcagatctcatgagaactcactcattctcatgagaaaagcataaggaaaaccacccacatgatccaattacctcccaccaggtctctccctcaacacctggggattataatttaaggtgagatttgggtggcaacacaaagcctaaccatatcatttcaccccgggccctcccaaaatctcatgtccctttcacatttcaaaaccaatcatgccttcccaacagtcccccaacatcttaattcattcc

SEQ ID NO: 425147 - DNA, 580 bp, Homo sapiens
atacccgcttagggaccttcccattctgaccttcagcattctgattgtttactagaactgagacaaacctaggctttaaggccatcaagtgctgaaaaggagacagtgaccttgttggggtaaaaataaaaacatcaacaggcaaattacaaaaaaaaaaatctaagcaaacatatcctataaaaaacaaaacagacagcaaacactagaagaagtaactaattattcaatgcaaatatatagacatacatctacaaggaaaaaaaatggaatcatgaactcttcaaatgagcaaagcaaggaaccagtgactggctccactgggacgatgacatgtgaatgctcttaataaaattctaaatagtagttttaaggaacctcagtgatttccaagataacacagaaaagcagtccagacatttactagacacatttaacaaagagattgaaataattttaaaaatcaaacaaaaatcttctaactaagaaaaacatttgctgaactgagaaatacattagaggctctcaygagcagaatggatcaagcatgaaaatgatcagtgagctattcaataatata

SEQ ID NO: 425148 - DNA, 562 bp, Homo sapiens
cagggcaggaattaatcaaactttcaaaggttaaaacaaggagagggttctaaaaagagtaagagtaagaagaaaacaagttgtaaaagagctccaattcatcagggagctgacatctgaatgaataccacacagaccaacaaggtgtgggaaggcattttcaatgtactgaaagaagtaactgccatttaagaatattttatcccacagagctatcttttacacatgaaagagaaagtmtttcccggacaaacaaaagctgaaaaaaattgccaacgccagacccttttataagaaatgcaaaagggagttcttccatctgaaaaaaatctgatgaaaaaaaaaaaaaacactaacattgaaaacattagaaggtataaaacacactggtaaaattaagtacatgaactaacccagaatactctaatattgtaattgtgttgtgcaattcacttgtaactctattataaagcccaaagataactctatcaagaataataatagcaatagcaacctgtgaagagataggcaacattaaaagacatgaattgagacaacgtaa

SEQ ID NO: 425149 - DNA, 552 bp, Homo sapiens
gaaaggcattttacatgaactttataaatacatgcaaggtttatgcatattacactaagcagtttcatctataactttatgataccctttttttttaattctttgaaccacattctcctgcacaattctgactgatgtgtttctgagcttacagtttccttaggttttaccatagggctcaacaaatctaggacatgtcatggatatcaagggacttgttatgtttgtaaagccttcctttttctgtctcatgatgcctatttatttattcttcaagattctacttacattccaactcaccaaaacctttcctaacatcccagggcaaaattaactgatctttcttcagtggttccacagaattttgttcacagcaytcctataacttcacgtgttattacactccatcttatactgtgagaactttgtgggtaattactaagtttttcttctctgtggtgggatggtacctaaaatagtaccagcctcatgatataattcaattcacgtttgtcagatcaatggatgattctataaataatgattttgtat

SEQ ID NO: 425150 - DNA, 632 bp, Homo sapiens
atgtactcaggggaataatgtgaatatatgcgtataaagggtatgtgagcaaatgtgatgtgtgcaaattctgagtcactttcatggaaaaaaattatgttccttctgtttattgtcattacttgaaaacctgacaaggaagctttggcatgcagacaagggccacaccctgagagatggaggagcaacaagttagcaataatctgggcacctagaagacctcatgaaacaaaaccacctacacacaatccatatccttttggtctgtgatgagagggaaataaactctaccatttgagattccacctctgagatgtctgttagagaagctaagcctatatcctatatcccatgtaatctacccactctgtgcagggcagttggtcccattgcagatatatttagcaactttcagttctgatgaatattgtcacatcctctctctagttgcagcagctccattagcacacaatgagccacagaaccagcaacccaagccartaacagtggcagcacaactccaaacagtaataggagctctaaataactttacagccagagccagcagctccactagttcccaacagttgcttctgtcagcagtttcacaggatttttcaagtttgtttctt

SEQ ID NO: 425151 - DNA, 467 bp, Homo sapiens
atagtgtattgcattgagaatttttgttaaatgagtagattgtagttgctcttaacatggtgggggagatgggtaactttgtgaaataatagatatgttaatttttttcattatagcaatgatattaaggtatatatawatatatcttataacatcatgttatatactccaaatatacacagtgaatttttcaaacaaacaaatatattgcccatttttaattgagctatttgtctttttatgattgagttgtaaaacttctttagctgttctaggtataagtcccctatgaagatacatgactttcaagcattttctcccactgtgtgtgttgtcttttcattttcttgatggttccctttgaaccatgcagagcaagattgattttctcggtatttcctcttattatttgctaatatacctactgctagcaggtcatatagttagattagaaaatagttagatta

SEQ ID NO: 425152 - DNA, 418 bp, Homo sapiens
tgaagatcaaatatccccataactgaataagtctagaagccatattcttttaaactcctccacaactgggatcagttaagttgcagccaatgtgagtttgattctcacatatgtttggtgctcatgaacaaatatctatgaaacacagaatggagtaccaaatgagaaacaacatacaataatttttgttttgtgtggctgaaattttagtatagaagacaaactatgaagataaaggtaaaaacaggcagatcaagaaaatgatgagtggtgttctatagagattgtttaggaaaggatcctagacaatatttcacctmaacagagacttgcattaagtaaagtaatttgtgataacattgggaaagatcacattaagcagagggaagagattgagcaaagcattgaggcaggaata

SEQ ID NO: 425153 - DNA, 583 bp, Homo sapiens
gaccccctcttccactttacagatcccgtcttgttgcatcctcacaaggtgagaagagagtgagagagttctctagggctctctgttactggagcactaagcccattcataagggctccaccctcagggctcgatcacttcccaaaggctccacctcctaatatcacattggggcttaggattgcagcacatgaattttgggggaacacaaacattcagtccattgcatcactctcaaaagtaaagaggcttcttatataggaaagcattttcagtctttagaaatcataaagtaaatggttcacttgagtgaggcaagatgatcagtggggaaaagagtgagatctgtagccagactccctaggttctkattatggctgaaatctaggctgaatgggttaaaagtttatgtccttgtgtttcttcaatttaaaaaaaatgaaataagaaaaataatagcaacagataataaggatatagaagaactcaccttgtttaggttactgggggttatattaagaactcaaaatggtaactgttgctagtatatagtgtagagtcctctattcatggtagataatca

SEQ ID NO: 425154 - DNA, 534 bp, Homo sapiens
tgacctttaggaaaactcttctyccctattttcttctgatttaggttcattctctgcctttttttccctctctttgtgtgtagtcagttttgtcaaacatatgactctctggaaattttgcagaaataagagttcaatcaagactcttggaattttctatcttggtttttcaaaaatatgcaactctatatgttgatgtagaactagagtgattgaaatatactctttgacagagggtaaagttaagggtaatccactttttttggaagataagaataaaaatatggtttgctttattttgaggaagaccaaatggaaggagcagacaatcatttatttcacaaactctaattatgtaaggagattgattgattggtttttggttgatatgggagaatgattttttttcctgccatgcacagcactgggcagtctagttcccttatcctaagggagtttataatctagtagaggtggtataacacacatacacatgggcacacacacacacgcatgggcacacacacacaataa

SEQ ID NO: 425155 - DNA, 534 bp, Homo sapiens
tgacctttaggaaaactcttctcccctattttcttctgatttaggttcattctctgcctttttttccctctctttgtgtgtagtcagttttgtcaaacatatgactctctggaaattttgyagaaataagagttcaatcaagactcttggaattttctatcttggtttttcaaaaatatgcaactctatatgttgatgtagaactagagtgattgaaatatactctttgacagagggtaaagttaagggtaatccactttttttggaagataagaataaaaatatggtttgctttattttgaggaagaccaaatggaaggagcagacaatcatttatttcacaaactctaattatgtaaggagattgattgattggtttttggttgatatgggagaatgattttttttcctgccatgcacagcactgggcagtctagttcccttatcctaagggagtttataatctagtagaggtggtataacacacatacacatgggcacacacacacacgcatgggcacacacacacaataa

SEQ ID NO: 425156 - DNA, 534 bp, Homo sapiens
tgacctttaggaaaactcttctcccctattttcttctgatttaggttcattctctgcctttttttccctctctttgtgtgtagtcagttttgtcaaacatatgactctctggaaattttgcagaaataagagttcaatcaagactcttggaattttctatcttggtttttcaaaaatatgcaactctatatgttgatgtagaactasagtgattgaaatatactctttgacagagggtaaagttaagggtaatccactttttttggaagataagaataaaaatatggtttgctttattttgaggaagaccaaatggaaggagcagacaatcatttatttcacaaactctaattatgtaaggagattgattgattggtttttggttgatatgggagaatgattttttttcctgccatgcacagcactgggcagtctagttcccttatcctaagggagtttataatctagtagaggtggtataacacacatacacatgggcacacacacacacgcatgggcacacacacacaataa

SEQ ID NO: 425157 - DNA, 534 bp, Homo sapiens
tgacctttaggaaaactcttctcccctattttcttctgatttaggttcattctctgcctttttttccctctctttgtgtgtagtcagttttgtcaaacatatgactctctggaaattttgcagaaataagagttcaatcaagactcttggaattttctatcttggtttttcaaaaatatgcaactctatatgttgatgtagaactagagtgattgaaatatactctttgacagagggtaaagttaagggtaatccactttttttggaagataagaataaaaatatggtttgctttattttgaggaagaccaaatggaaggagcagacaatcatttatttcacaaactctaattatgtaaggagattgattgattggtttttggttgatatgggagaatgattttttttcctgccatgcacagcactgggcagtctagttcccttatcctaagggagtttataatctagtagaggtggtataacacacatacacatgggcacacacacacacrcatgggcacacacacacaataa

SEQ ID NO: 425158 - DNA, 596 bp, Homo sapiens
aataagcatatggcttagtatagaagagaagaaaaaatccagtaaattacgattttcttctaaaaaacaccatctggatgctggttcagctgcattatctcactaatttacattttattttctcaagagacaaaggtatattcaataaaagaagaaaatccagtttagaatgcttgtctctggaacctgtcagctacacttaatttctacstagatgcagaaatgaggagtttcctcatcaatgtttaaacaaagcatagaattaatcactcaacattcagaagaatcaaagtcaaaatcaaaataagatactttattgaatttatctctccctgcagtttggaatttaatcctgactagaagtcaaaacaaatgcactttttagatgttgataagatgaaaatcaatcaatcgatataggtgttgtattgtattaaaatggcttaatggggttaattaaaaaccatcttagaaataaagaagataaaatacagattactattctaacagtagaagggactaaatatcgtgaagagtcttacagctgaaaactacctagaagctgagtaataacggacatttgaatgacttgctgc

SEQ ID NO: 425159 - DNA, 596 bp, Homo sapiens
aataagcatatggcttagtatagaagagaagaaaaaatccagtaaattacgattttcttctaaaaaacaccatctggatgctggttcagctgcattatctcactaatttacattttattttctcaagagacaaaggtatattcaataaaagaagaaaatccagtttagaatgcttgtctctggaacctgtcagctacacttaatttctacgtagatgcagaaatgaggagtttcctcatcaatgtttaaacaaagcatagaattaatcactcaacattcagaagaatcaaagtcaaaatcaaaataagatactttattgaatttatctctccctgcagtttggaatttaatcctgactasaagtcaaaacaaatgcactttttagatgttgataagatgaaaatcaatcaatcgatataggtgttgtattgtattaaaatggcttaatggggttaattaaaaaccatcttagaaataaagaagataaaatacagattactattctaacagtagaagggactaaatatcgtgaagagtcttacagctgaaaactacctagaagctgagtaataacggacatttgaatgacttgctgc

SEQ ID NO: 425160 - DNA, 596 bp, Homo sapiens
aataagcatatggcttagtatagaagagaagaaaaaatccagtaaattacgattttcttctaaaaaacaccatctggatgctggttcagctgcattatctcactaatttacattttattttctcaagagacaaaggtatattcaataaaagaagaaaatccagtttagaatgcttgtctctggaacctgtcagctacacttaatttctacgtagatgcagaaatgaggagtttcctcatcaatgtttaaacaaagcatagaattaatcactcaacattcagaagaatcaaagtcaaaatcaaaataagatactttattgaatttatctctccctgcagtttggaatttaatcctgactagaagtcaaaacaaatgcactttttagatgttgataagatgaaaatcaatcaatcgatataggtgttgtattgtattaaaatggcttaatgggrttaattaaaaaccatcttagaaataaagaagataaaatacagattactattctaacagtagaagggactaaatatcgtgaagagtcttacagctgaaaactacctagaagctgagtaataacggacatttgaatgacttgctgc

SEQ ID NO: 425161 - DNA, 575 bp, Homo sapiens
cttctctcatgaaattagaggagctgagggagctaagcatttctaaagtggatgccagcaacccaaagataacttcgcctcgtcctggctatttgtgggaaacctcagttcaacagcttcttcatctttcagggtgaagtgaaatctgccagtttacatgccttgccccaagcactcagagctcccrgcgagactcctgttaactagactgatgagtgttttgactaaatgcttcattttccaccctcccttgcagctgaccatggtcatgtgattagattctggccagcagtatgtagacagcagtaatgttcacagctgttaggtgaagcccttgaagagatggcacgtttctttccccttccactcaaactacttggttcaacagtaaataactttaacatggtcccaattgtgtaaatttagctgttttaaaaaaaaaagtttggaatcaatcaagggataatgtaaggaagactaaatcatggttataggacaaaatttaaatattttaaatgaaaaagaaatggtaaaactaaaataacctgtgaagagtcaaatatcatgtgtaactg

SEQ ID NO: 425162 - DNA, 575 bp, Homo sapiens
cttctctcatgaaattagaggagctgagggagctaagcatttctaaagtggatgccagcaacccaaagataacttcgcctcgtcctggctatttgtgggaaacctcagttcaacagcttcttcatctttcagggtgaagtgaaatctgccagtttacatgccttgccccaagcactcagagctcccggcgagactcctgttaactagactgatgagtkttttgactaaatgcttcattttccaccctcccttgcagctgaccatggtcatgtgattagattctggccagcagtatgtagacagcagtaatgttcacagctgttaggtgaagcccttgaagagatggcacgtttctttccccttccactcaaactacttggttcaacagtaaataactttaacatggtcccaattgtgtaaatttagctgttttaaaaaaaaaagtttggaatcaatcaagggataatgtaaggaagactaaatcatggttataggacaaaatttaaatattttaaatgaaaaagaaatggtaaaactaaaataacctgtgaagagtcaaatatcatgtgtaactg

SEQ ID NO: 425163 - DNA, 516 bp, Homo sapiens
ctacccttctgaagcactgaagcctacaaggataaatgagaagtcaggtaggaccagcttctggagagaaactgcagaggaactgttgtgcttgcatctgatgatgggtctggtgggcctggtrgtcagcagccctagaggtctggaagaagagctggctgtgcacagggagagttaggacatgctggctcctcaccatctctgaccaggaccatgaccacctgaagagagcaagggcagctgcaccaattcatcctcagagctcccacagattcatactctggccaactcaaaccagagccatttaagttgggggactctgggaaatgcaattcctgcacagccatgtgacacagtacaagccccaaagaacagtgttttcagttgtcacagggaagaaactttagggttagcaaaggcttttcagcttccccagagaaaagctgctgaagagttgaaaataccaagtgttccagcattaacatggtgctgaacacctagacaccaacccactgc

SEQ ID NO: 425164 - DNA, 625 bp, Homo sapiens
agaagccaaaataaatttaaaaactagaagcctaagttcatcacaragagttatgtggttacctgaccaacccgaaacagaagctgtttaagatgattgtctctggagaattaaatggaattgaggatgggatatatgagtcagagacttgtgtgtctcattttatgccctaccatatatattttttaaaaaagtgtgtgtgatagctttatatgatatcaataatgacgataaattacatagccatgctttaaaataatgccatcctaattttattaaagaaacttttctttacatgataggatatatgtacatgtagtatgtcaatttaattccctccattttattccaggactgccttccttaagtgttttctgtgttagaggatattagggggaaaaaaagtaaggggaggccttggctatgaaagaattctaaagcccagggctaggtgggatgctgtcctccctgtggtcatcagaataatccagagatcagattattctggtttatgtggcttgttctgggcaaatgagcaggccaagctgcatctcaagggttggccaacttctcagaggccatatatggccttctactcagaagacttctcctgcatataactaca

SEQ ID NO: 425165 - DNA, 482 bp, Homo sapiens
gtgaagcttatattcttctcatgcaccatactgctattctggttgacacagctgcaagaaggttaatttcgttcctctttttcttccttagcaatttttttaaataacaaaagttaaattttatctgggcatcttctcttttgagatacactggatggatatttctctgccacccagaggataaaagattatattttcttcagtcttctaataatatcatgcattttttcatatgcttttggggattgcagatggtcactgaataattgttattgtattattacatattttagaagtcataattrtaatgacttctaaaatatatcacatgactacttgtgattgacttcagcatacattgtatatagtttaaaaaatattctcaaaataccaattggtcatgattttgaaccattggtgtgcacagaacaaatgcagaaatgttttgtgaacaaatgatatagtttggatatttctcccct

SEQ ID NO: 425166 - DNA, 531 bp, Homo sapiens
tgggtgtgatgtttgtacagccagcagaactgtsagccaaatacacctgttttctttataaattacccagccttaggcgttcctttatagcaataaaaaatggactgacacagaaaattgttactgagaagtggggcattgctgtaaagatacttgaagatgtgaaagtggctttgaaactggtaatgggcacagggttggaagagtttggaaggcttagaaaaagacaggaagacaagggaaagtttgcaacttcttagagacttgttaagtggttgtgaccaaaatgccaatagaaatatggacagtgaaggccaggctgactcagataaaaatgaggaagttattgggaactagtgtagagaacaaggtagtgctagtaccttgttgtgtactagcaaagggcttggctgcattgcatccacgtctgaggcctctgtggaaggtgaaacttaagagtgatgacttaggatatttggaagaagaaatctctaagcagcaaagcattcaagatgtggcatggctgcttct

SEQ ID NO: 425167 - DNA, 531 bp, Homo sapiens
tgggtgtgatgtttgtacagccagcagaactgtgagccaaatacacctgttttctttataaattacccagccttaggcrttcctttatagcaataaaaaatggactgacacagaaaattgttactgagaagtggggcattgctgtaaagatacttgaagatgtgaaagtggctttgaaactggtaatgggcacagggttggaagagtttggaaggcttagaaaaagacaggaagacaagggaaagtttgcaacttcttagagacttgttaagtggttgtgaccaaaatgccaatagaaatatggacagtgaaggccaggctgactcagataaaaatgaggaagttattgggaactagtgtagagaacaaggtagtgctagtaccttgttgtgtactagcaaagggcttggctgcattgcatccacgtctgaggcctctgtggaaggtgaaacttaagagtgatgacttaggatatttggaagaagaaatctctaagcagcaaagcattcaagatgtggcatggctgcttct

SEQ ID NO: 425168 - DNA, 400 bp, Homo sapiens
gacttgttaagtggttgtgaccaaaatgccaatagaaatatggacagtgaaggccaggctgactcagataaaaatgaggaagttattgggaactagtgtagagaacaaggtagtgctagtaccttgttgtgtactagcaaagggcttggctgcattgcatccacgtctgaggcctctgtggaaggtgaaacttaagagtgatgacttaggatatttggaagaagaaatctctaagcagcaaagcattcaagatgtggcatggctgcttctgaaaacctatacatagatrtgggagcaaaaaaatgacttaaagttggaacttacaattcaatgagaagcagagcttaaaaatttggaaaattcacaacttgaccctgtggtagaaaaggaaaaagcattt

SEQ ID NO: 425169 - DNA, 590 bp, Homo sapiens
ttcagaacataatttttaggctccataaaacatgtttgtggttggctgctttatagtaacatatttttgtatgcatttggcttcatttcttctattattgtgattctcattccacttgttacctagcagttgccttttctactgtttaaaaaattttttaagggggaaatgtgttttgtaactcagaaaaacataatgtaagatttctcaaaatmtatgattttaaaacaaggacaataaatgatttcctcttaaaactgacattacttaaattactaacacaataatatctttaaatgtctacatacatgttaaatggattgtaatgtcttttgaaaaatatttacatattttggttcagagactaagtatactcaatttatctacaatgattcctttgttgacaaatagttacaggcgtgactgatttgatagttcattggaagaagatcttcggtatctttcataaagcttagaattggcctggtatttaaaaaataattcatgttggagtaatttttgtatggttaatccatttaaagacagacaggataattcatttttcactgaatcatctagatagtagaggc

SEQ ID NO: 425170 - DNA, 314 bp, Homo sapiens
tgaggttagccatcctgctatataatctggagtctaggaaaagtacatgtcattttacctggatattttactcaatattaaacatttatgttctaagtttgaatatccccctttccacatctaaaaaagaataaatcaaatagtaaaccccattgctataatttgaatgtgtcccccaaagtttgtgtgttgaaaacttgatccccaaagcagtggtgttggaagatggggcctaataaaaggtgtttggrtcatgggggcaccatcctcatgaataggttaatgtccttatcttataagtgggtttgttagca

SEQ ID NO: 425171 - DNA, 488 bp, Homo sapiens
tcaaccattctcactactagaaacacatattactaaaaccctgtggcctgccaattgtaaggtaatcttttaacataagaaactgcattaattttctataaacccaaagacttgcacaattatttcagaagtgtaattctcccaacacacacacacacacacacacacacacacacacacacacacgtaccacatttcttttcagtagcttgactataacttggaaaaaatgctttagagaaatcacttcaggatggtggaaaaaacaaagaatcataattctccttatgtgtaatcaatagtaacactccatctcatgtataagtttcatatactttcaagtccagctctctggctttgttcatttcattcaacaggactgaaacaaaggtcttggcctcagtttttcacatgaagatgtttgcaaaggaaacagtattttaaagagtatttaattcacagaagytgactataaaaaataactaaga

SEQ ID NO: 425172 - DNA, 550 bp, Homo sapiens
aacagtattttaaagagtatttaattcacagaagttgactataaaaaataactaagaagcttcttttcttccaagacttagtgtttcccttgttaatgagacatttgtcatatagacttgtttactgccttgttcagtttcatagaaaaaaatgatgtacttttagaatttgatatagaaaatattaccagaaaaattataacaaatggcatgtttagaatttatagtctgctgaaatacaatttaggtctttattttactatgaaaatgcaatcaatagccaaaatccaacgtattccagtgattgaagtttatttsaatactgtgaagttgtgaaatacatatttggtcttccctctgtgtctttctataagctaatgagttagctggtgactggcagcccctaggtagcttaaggatgggggctggtcacagaaaaggccaaagaaggcatgattagagggttgagacttttcagccccatcctcaacctctggggagtgtagaggggctgaaggttgagttgatcaacagtggccaataatttaat

SEQ ID NO: 425173 - DNA, 517 bp, Homo sapiens
aacttttttcaatgattataaaggcgatatgtgttaactatcaaaacttcataaaaggygatcagttataaccttataatcaaggtttatgttgacatttccttcaaacatttattatgtgtgtctgtgtgaataaatatatatgttatatacttgttatgatactgcctatacaattttgtgttccacttgctttccttaccattatatcaccaatatttttaatgtccttgtaatgtatttacaaattttgtttaaatggctacatatctttccattacagaaaagtacttcatttgggtaaatattcttatacgatacaatatttaaaataaatcaatttttgctttgttattaacactggtataaatatctttataataaatcattgtctgaatctctgattatttccttagaaaagattttcaattagtatatcattaagccaaactgtatgaatagttttaatctcaatacatattgtcaaattaagcttgtcacattttatacttataat

SEQ ID NO: 425174 - DNA, 517 bp, Homo sapiens
aacttttttcaatgattataaaggcgatatgtgttaactatcaaaacttcataaaaggcgatcagttataaccttataatcaaggtttatgttgacatttccttcaaacatttattatgtgtgtctgtgtgaataaatatatatgttatatacttgttawgatactgcctatacaattttgtgttccacttgctttccttaccattatatcaccaatatttttaatgtccttgtaatgtatttacaaattttgtttaaatggctacatatctttccattacagaaaagtacttcatttgggtaaatattcttatacgatacaatatttaaaataaatcaatttttgctttgttattaacactggtataaatatctttataataaatcattgtctgaatctctgattatttccttagaaaagattttcaattagtatatcattaagccaaactgtatgaatagttttaatctcaatacatattgtcaaattaagcttgtcacattttatacttataat

SEQ ID NO: 425175 - DNA, 517 bp, Homo sapiens
aacttttttcaatgattataaaggcgatatgtgttaactatcaaaacttcataaaaggcgatcagttataaccttataatcaaggtttatgttgacatttccttcaaacatttattatgtgtgtctgtgtgaataaatatatatgttatatacttgttatgatactgcctatacaattttgtgttccacttgctttccttaccattatatcaccaatatttttaatgtccttgtaatgtwtttacaaattttgtttaaatggctacatatctttccattacagaaaagtacttcatttgggtaaatattcttatacgatacaatatttaaaataaatcaatttttgctttgttattaacactggtataaatatctttataataaatcattgtctgaatctctgattatttccttagaaaagattttcaattagtatatcattaagccaaactgtatgaatagttttaatctcaatacatattgtcaaattaagcttgtcacattttatacttataat

SEQ ID NO: 425176 - DNA, 517 bp, Homo sapiens
aacttttttcaatgattataaaggcgatatgtgttaactatcaaaacttcataaaaggcgatcagttataaccttataatcaaggtttatgttgacatttccttcaaacatttattatgtgtgtctgtgtgaataaatatatatgttatatacttgttatgatactgcctatacaattttgtgttccacttgctttccttaccattatatcaccaatatttttaatgtccttgtaatgtatttacaaattttgtttaaatggctrcatatctttccattacagaaaagtacttcatttgggtaaatattcttatacgatacaatatttaaaataaatcaatttttgctttgttattaacactggtataaatatctttataataaatcattgtctgaatctctgattatttccttagaaaagattttcaattagtatatcattaagccaaactgtatgaatagttttaatctcaatacatattgtcaaattaagcttgtcacattttatacttataat

SEQ ID NO: 425177 - DNA, 616 bp, Homo sapiens
taacaatgtttacagtgttttagaagagacaaaagatttcagtcttgtggcagttagccagaatagggagcaaatgtgcatgtaattgcactattaagttattaagggtggtaagaaatttacacaaaacagaccctgaattgttttaaattctgttagttgaaaggttaacaaaggagaaattatattctttaactcctttttttgtttgtttgtttttaattcacctttattttccacttggccacattattttcttgttaaataaagaagagttatgaattttcttaatgagttaataatgtaagctgaatgtccacaggtaaagggtcttatgtttcaagttcatgacattaggcgacaaaaatcagtatatccaagtatgaatgaktagggaaaaaaagttatttcatttctggaaccatatttttagttccagggatgtaacactgtaggagataatatatgtgaaagcgtcttgaaattgtaaagcactatctaaatgtaaaggattagtattagtagtgtggtaaatcatttttctgaaggttggtttggaccatttatattttcaaagtagatgaatagaagaaaaatatgttttactccaagaatg

SEQ ID NO: 425178 - DNA, 363 bp, Homo sapiens
acaacttgtaaaactttcagtgaacttaggcaaggagaaagccaaccctggcagggcaggccctctctgcaggaaacccctaactgggaggtgcccagctctggcaagtctttgaactgtcagatgccaggtgctgttagggcacctccactcagcccctgcctaatgcaagctcttgaaaactcagagatagcttcctccktcattagcatttgtgctctgtactgaacacaggtcaaagggagatgttaaaatacaccccagagttcacagggccaggatttgaccctattgaaacctgataaataccacccctctattgttctctgggtggaatctggcaccagggtgagaactgggata

SEQ ID NO: 425179 - DNA, 486 bp, Homo sapiens
gttggtcattttatgttcattttactgttaagaaagaaaaaaatgcagtgagatcgtacaactaagaaatggtaaaacccagactggaactcagtaaatttgatatcaagccctgtgatcttaaaaaaagttrctgtggttaaacacgtataacaaaaatttcccattttattcaattttaagtgtgcagtttgtggcatcaagtacattcacacggtagtgcggccaccaccatctgtctctagaacttctgtcttcctaaactaaaatgctgtactcattaagcagtaactcttccttaatctctccacctatcccctggatactaccattctgctttctgtctctatgaatttaactgttctaggtatgtcatataagtggaatcattatatctgtccatgttgtagcatgtgtcagaatttccttttttttccaggctggataatatttcactgtgtgtgtgtgtgtgtgtgtgtgtgtgtt

SEQ ID NO: 425180 - DNA, 486 bp, Homo sapiens
gttggtcattttatgttcattttactgttaagaaagaaaaaaatgcagtgagatcgtacaactaagaaatggtaaaacccagactggaactcagtaaatttgatatcaagccctgtgatcttaaaaaaagttgctgtggttaaacacgtataacaaaaatttcccattttattcaattttaagtgtgcagtttgtggcatcaagtacattcacacggtagtgcggccaccaccatctgtctctagaacttctgtcttcctaaactaaaatkctgtactcattaagcagtaactcttccttaatctctccacctatcccctggatactaccattctgctttctgtctctatgaatttaactgttctaggtatgtcatataagtggaatcattatatctgtccatgttgtagcatgtgtcagaatttccttttttttccaggctggataatatttcactgtgtgtgtgtgtgtgtgtgtgtgtgtgtt

SEQ ID NO: 425181 - DNA, 551 bp, Homo sapiens
ttttttgtcacattgtttcttcgtggaaaaactcattctctctcccattccaattttccagtagagatttgattgagtcttgagcatgcgttgaccatcttcatatcatgtattatgactgaagtattaaggatctaaaaggtacagagatagaytgcacttagcttaggattgttacatgcactctcattcaatgtttggacaacttgatggaataccctggaaagtttgccattatctttccctgtgcattggctccatagacttaatgcacctatcttatggatggaatgacgatactttgtgcttggagacctgaaattgttgctttgtagccctttgctcttatttagccccagaaccagaacttctagaatgaaactctagtaaagaatcagtcaatgttttttgtttgtttgttttttccccactccaaagagaatgtgttttacttttttgtggctctgaaagatatgccaactcaaactcctaggtctctcaggattgatgggtacccttttatgttgcatcaaaattgaagatatactagt

SEQ ID NO: 425182 - DNA, 591 bp, Homo sapiens
tcttcgtggaaaaactcattctctctcccattccaattttccagtagagatttgattgagtcttgagcatgcgttgaccatcttcatatcatgtattatgactgaagtattaaggatctaaaaggtacagagatagattgcacttagcttaggattgttacatgcactctcattcaatgtttggacaacttgatggaataccctggaaagtttgccattatctttccctgtgcattggctccatagacttaatgcacctatcttatggatggaatgacgatactttgtgcttggagacctgaaattgttgctttgtagccctttgctcttatttagccccagaaccagaacttctagaatgaaactctagtaaagaatcagtcaatgttttttgtttgtttgttttttccccactccaaagagaatgtgttttacttttttgtggctctgaaagatatgccaactcaaactcctaggtctctcaggattgatgggtacccttttatrttgcatcaaaattgaagatatactagtgtaaggtctagctacctttctagaattaccatccaaaaaagctgttaatttaaaccc

SEQ ID NO: 425183 - DNA, 591 bp, Homo sapiens
tcttcgtggaaaaactcattctctctcccattccaattttccagtagagatttgattgagtcttgagcatgcgttgaccatcttcatatcatgtattatgactgaagtattaaggatctaaaaggtacagagatagattgcacttagcttaggattgttacatgcactctcattcaatgtttggacaacttgatggaataccctggaaagtttgccattatctttccctgtgcattggctccatagacttaatgcacctatcttatggatggaatgacgatactttgtgcttggagacctgaaattgttgctttgtagccctttgctcttatttagccccagaaccagaacttctagaatgaaactctagtaaagaatcagtcaatgttttttgtttgtttgttttttccccactccaaagagaatgtgttttacttttttgtggctctgaaagatatgccaactcaaactcctaggtctctcaggattgatgggtacccttttatgttgcatcamaattgaagatatactagtgtaaggtctagctacctttctagaattaccatccaaaaaagctgttaatttaaaccc

SEQ ID NO: 425184 - DNA, 521 bp, Homo sapiens
ctaaaccaatgagaattctccttaaagcatttgtcctcagtttcaaaggaaatcagttctgagatactctttttctcttataggatactattatggtcttcagacattcactgtatgaagggtttaggttgtagaacaaatcaaatatacttgaaatgcattttgctttctgagggactatggtgtgcttttcttcaagacttgacaaaatttacttttttaaaaattaacttcctcctgtgtttacaccagcttttatactttgttggaaatacagccacttccagagagaatttggcrttgcacttatcaaacaggataacttaattattggcacagattattttttatttgagcagtgtgcactgccatgagagagcatccacattttcattctgggcatggaaacaatgtaaaacaggtttggcatgaagcatgtatgtatgtgtgtatgtgcatcaaactctaccctatgtgaaaggctgccaatttttaaaatccttgggaactagagtaattaa

SEQ ID NO: 425185 - DNA, 556 bp, Homo sapiens
atagcatagagctgccacatcaacacttgcccaagacctgttctatttctagacctattatgttcaatactgtggccactagcctcctgtggaaactgagcaagtaaaattcggctagttcaaagtgagatgcattgtaagtgcacaatacacattggattttgaagacttagtatataataataatgtagattgtctcattaatccttttttgtattgattgcaygtttaaaggttaatattttggatatattatgataagtaaagtatgtgaaattcattgcacttattttttaagtatggctactaaaaaaattgaaatcacgtgtgtggctcacattatatttctattggacagtgtgacttcagacatttcagttaccttaacaataaattcctttcattgctcaagtcagtttgaatcaaattttctgctgcttgcaacataaagatttctaatcaatgcttggcataacatttctatttaaactttatttctgcccatttatgcttgcaaccatgacacacatacaaatgtatatgtgtgtgcactggc

SEQ ID NO: 425186 - DNA, 556 bp, Homo sapiens
atagcatagagctgccacatcaacacttgcccaagacctgttctatttctagacctattatgttcaatactgtggccactagcctcctgtggaaactgagcaagtaaaattcggctagttcaaagtgagatgcattgtaagtgcacaatacacattggattttgaagacttagtatataataataatgtagattgtctcattaatccttttttgtattgattgcatgtttaaaggttaatattttggatatattatgataagtaaagtatgtgaaattcattgcacttattttttaagtatggctactaaaaaaattgaaatcacgtgtgtggctcacattatatttctattggacagtgtgacttcagacatttcagttaccttaacaataaattcctttcattgctcaagtcagttkgaatcaaattttctgctgcttgcaacataaagatttctaatcaatgcttggcataacatttctatttaaactttatttctgcccatttatgcttgcaaccatgacacacatacaaatgtatatgtgtgtgcactggc

SEQ ID NO: 425187 - DNA, 592 bp, Homo sapiens
caagctactttcatcagttgatacaattttcccctaaagaaattctagctgtgagggccaatggacttgggttacatataagaattatatatacattatcatttgcttttgaaagtaattattctaaggctaagttaggtttgaatttgattctgaacaatgatgatgcatttgaactgttagggtaattaggactatatcccattcacccacacactctttttcatgtgtagtcctttaaactgcacagcctttgaaggatggttagtttgtatctggggtttgtgttttgtttttttttttcatctactttttgattgctatgtcattgaaaagtgcttaatcacagagaggattacaaaataaaatcaccattagcataaatcatttatactcattttaatgcttcyttcttgtttgtggagttgggtatttggaagagtggagaatatataaccttcttttttagtgtattttgtgaaacagtttttctctcctattttgttttaacatttaaaataagagacaaagtcatcagagtcaaattatgtatttacatttttattagaaaaataattggttagatgaactg

SEQ ID NO: 425188 - DNA, 592 bp, Homo sapiens
caagctactttcatcagttgatacaattttcccctaaagaaattctagctgtgagggccaatggacttgggttacatataagaattatatatacattatcatttgcttttgaaagtaattattctaaggctaagttaggtttgaatttgattctgaacaatgatgatgcatttgaactgttagggtaattaggactatatcccattcacccacacactctttttcatgtgtagtcctttaaactgcacagcctttgaaggatggttagtttgtatctggggtttgtgttttgtttttttttttcatctactttttgattgctatgtcattgaaaagtgcttaatcacagagaggattacaaaataaaatcaccattagcataaatcatttatactcattttaatgcttccttcttgtttgtggagttgggtatttggaagagtggagaatatataaccttcttttttagtgtattttgtgaawcagtttttctctcctattttgttttaacatttaaaataagagacaaagtcatcagagtcaaattatgtatttacatttttattagaaaaataattggttagatgaactg

SEQ ID NO: 425189 - DNA, 413 bp, Homo sapiens
aatcaagtgatctggctccataactgtccttccatgcacacagcttgcctcctctcctgcccttaaattggggctgggaagggactacctgcctctctctgattccaagtgacctcagaaagtacacctgctcttcacattcacatgtttaattcgtacctttctaatgcctggaggtgatttggatatctggatgattttttccctttttctttcctacttcttcagaataaaccacttcttaatattctttgccacttttgtttcaatgctgccagaaggattttcttaaatcacaggcctaatacttttatttcwgtttcccagaaacttttgctagatccttactgtgtgaaaaatgaatgcctcatagcatggcattcaagggccactctgatctgacctgcagtttc

SEQ ID NO: 425190 - DNA, 421 bp, Homo sapiens
agtttggtagatcaaggagaaaggatctggggaaatctctttgcaatgaagggtgccccgtctcttgtcggaatcgcggtctggggaagggttggtgtgcagcctggtggtccagatgctcccttggtgcttctttggagagagaaaagctggtttctgatgtggtgtcacttcccacgttgaggttattctaaaacaaacaaacaagcaaacacctgttaaggagacacatgattaaaaaatgtcacccttaacagtccattatattcaggagcaaggrcaattccagtggctgaaattaagccagtagggcattccaaacttgttttgcaaacccatggtttagtttcttcatgtcttaaaagccagatcatcagaaaacttctagcctgctacttgggaattttctgagtgttaatga

SEQ ID NO: 425191 - DNA, 548 bp, Homo sapiens
aggccaagttactatcatcatggttttaagatggctcctctttttttttttgagacagagtctcgctctgttgcccargctggagtgcaagtggtgcagtcttggcccactgtaacctctgtctcccgtgttcaagcgattctcctgcctcagcctcctgagtatctgggactacaggtgcacgccaccacacccagctaatgtatttttgtatttttagtagagacggggtttcaccatgttggtcaggctggtcttgaactccagacctcaaatgatccgcctgccttggcctcccaaagtgatgggattacaggtgtgagccactgtgcccagccaagatggcgcccctttatactgaaaagctatctgatgctgcaaaagcctccccacgatgaacccatcagcaaggataaatctcagaccatccaacacctaacttttacttttcctgattaaagcaatgattcatgtatgaaggtgaagaaggacaatctaattgttcccagcatgtacacagcagccatcatcaaagccaaatggtccct

SEQ ID NO: 425192 - DNA, 548 bp, Homo sapiens
aggccaagttactatcatcatggttttaagatggctcctctttttttttttgagacagagtctcgctctgttgcccaagctggagtgcaagtggtgcagtcttggcccactgtaacctctgtctcccgtgttcaagcgattctcctgcctcagcctcctgagtatctgggactacaggtgcacgccaccacacccagctaatgtatttttgtatttttagtagagacggggtttcaccatgttggtcaggctggtcttgaactccagacctcaaatgatccgcctgccttggcctcccaaagtgatgggattacaggtgtgagccactgtgcccagccaagatggcgcccctttatactgaaaagctatctgatgctgcaaaagcctccccacgatgaacccatcagcaaggataaatctcagaccatccaacacctaacttttacttttcctgattaaagcaatgattcmtgtatgaaggtgaagaaggacaatctaattgttcccagcatgtacacagcagccatcatcaaagccaaatggtccct

SEQ ID NO: 425193 - DNA, 566 bp, Homo sapiens
aatccactgacatgaactctacccttgtgaaactggaagctgtctttgactcttcacttcttaactctgaaatgcaatccaccagcatatcctgttggctctgtctcagaactgtgccttgcatccatccactcttctctaccctggtccacatcccatcacctcttacctgaattattgtgaaattttctaacatatctatgttcttccctctcattatccactgatcagatggagccatcatttaaaagctcttcaatggctgcttcctcaccaatcctagaacagccatattctttatcatgacctgcaaaatccttgcttttttctgcaagttcatgtgccacttttttccttacacactgttctccagtctcttttccatcccttagtcatgccaaagtccttcctatctcaaggctttggtgtttgtgattccgtctgcctgactggctctcctgagttctttgcagagctggtccttttattcccccagctcargactcaagtgtcacttttccatcaagtccttccttgaccacccttttttagaaggaacttccagt

SEQ ID NO: 425194 - DNA, 502 bp, Homo sapiens
acacccaaacaaattctaaaaggaagaaagagcagaagttgcaatattaatatgacacaaaaaagtattcaagacaaaaggcaataaaagagataaagagtttcaccttgataaaaatacagtcacctaaaaggacactttatgtccttgcactatgggttctaaaaatgtaaatcaaaaattaggagaacaaagataaaaagatgcctatgattcctccctgtacscatgctcttctttaatgtgactttgctgctcctcccatcaagaagtggaaactatttcttgtccactagaatctaagcaaccacatggtttggctaatagaatacagctgaaatgaagttgtgcaaactcatcaataggtcttgcaatttctgcttttattctcttgctgctctgagtccaccatgtaaagatatatgagctacactccttaaggatgagagattatatggagagcaaacctaagtgacagcaagcaccaactatcagacaaatg

SEQ ID NO: 425195 - DNA, 502 bp, Homo sapiens
acacccaaacaaattctaaaaggaagaaagagcagaagttgcaatattaatatgacacaaaaaagtattcaagacaaaaggcaataaaagagataaagagtttcaccttgataaaaatacagtcacctaaaaggacactttatgtccttgcactatgggttctaaaaatgtaaatcaaaaattaggagaacaaagataaaaagatgcctatgattcctccctgtacgcatgctcttctttaatgtgactttgctgctcctcccatcaagaagtggaawctatttcttgtccactagaatctaagcaaccacatggtttggctaatagaatacagctgaaatgaagttgtgcaaactcatcaataggtcttgcaatttctgcttttattctcttgctgctctgagtccaccatgtaaagatatatgagctacactccttaaggatgagagattatatggagagcaaacctaagtgacagcaagcaccaactatcagacaaatg

SEQ ID NO: 425196 - DNA, 561 bp, Homo sapiens
acacaacatacttctaaataacacatgggtcaaagaaaacatctcaagacaaacttttaaacactttgaactaaatgaaaatgaaaacacaacttaccaaaatttgtaggatgaggcaaaagtagtgcttaaagggaaactctgaaaaggtaaataaattcaataagcttctgcgctggccaactgtgaataaaagagaaagggtacaaattactaatatcagaaatgaaagagtggatatcactacagatatcatggayattaaaaggataataaaggaataccatgaataactttatgcccacaaattgataacctaaatgaaatggatcaattcctggaaaacacactctgccaaaattcacacaagaaggaacagacaatctgaaaaggtctatatctattaaggaaattgaattgataattaataacctgtcaaaacagaaagcactagcccaggtaggttcaatgttgaattataccaaacattttaaaaagaaattatttcaattctctacaatatctttcagaaaatagaagtagagggaattattattaact

SEQ ID NO: 425197 - DNA, 561 bp, Homo sapiens
acacaacatacttctaaataacacatgggtcaaagaaaacatctcaagacaaacttttaaacactttgaactaaatgaaaatgaaaacacaacttaccaaaatttgtaggatgaggcaaaagtagtgcttaaagggaaactctgaaaaggtaaataaattcaataagcttctgcgctggccaactgtgaataaaagagaaagggtacaaattactaatatcagaaatgaaagagtggatatcactacagatatcatggacattaaaaggataataaaggaataccatgaataactttatgcccacaaattgataacctaaatgaaatggatcaattcctggaaaacacactctgccaaaattcacacaagaaggaacagacaatctgaaaaggtctatatctattaaggaaattgaattgataattaataacytgtcaaaacagaaagcactagcccaggtaggttcaatgttgaattataccaaacattttaaaaagaaattatttcaattctctacaatatctttcagaaaatagaagtagagggaattattattaact

SEQ ID NO: 425198 - DNA, 561 bp, Homo sapiens
acacaacatacttctaaataacacatgggtcaaagaaaacatctcaagacaaacttttaaacactttgaactaaatgaaaatgaaaacacaacttaccaaaatttgtaggatgaggcaaaagtagtgcttaaagggaaactctgaaaaggtaaataaattcaataagcttctgcgctggccaactgtgaataaaagagaaagggtacaaattactaatatcagaaatgaaagagtggatatcactacagatatcatggacattaaaaggataataaaggaataccatgaataactttatgcccacaaattgataacctaaatgaaatggatcaattcctggaaaacacactctgccaaaattcacacaagaaggaacagacaatctgaaaaggtctatatctattaaggaaattgaattgataattaataacctgtcaaaacagraagcactagcccaggtaggttcaatgttgaattataccaaacattttaaaaagaaattatttcaattctctacaatatctttcagaaaatagaagtagagggaattattattaact

SEQ ID NO: 425199 - DNA, 486 bp, Homo sapiens
cttggcttccaaaagtgaaaaaaaaaaaaacaaaacctaatttttaaatttttaaaacctaaattttaaaagagttgaacaggctcttctccaaagaagatataaggatggcaaataaacatatgaaaagaagctaaacatcattacctattaaggaataggaaactaagtccacaataagataccactagacacacattagaatggcttaaaaaaattgacaacaccaagttttgacaaacatgcagagctactggaactcacatgcattgccagtggggatgcaaaatattataaccagtctggaaaactacttggaactttcttaattaattaaacatatacttaccatatgacccaaaaaccccatccctggatatttatcctggagaaatgaaagcctmtcctcacacagatacctggtcacgaatgttttagcatctgtattaataaatttccaaaattgggaaaaaccaacacatcctt

SEQ ID NO: 425200 - DNA, 585 bp, Homo sapiens
attatgttaagccactgagaacttgggggtatttgtgtcagcatttagttaccctgtgtaataaaaagcgtaatccttaaaattaaaatatatccatccacttattacctgaacttascttttgtaccacctgtgatccatatgccacacttagaaaaaacactactgtgatccagatccctgatatacagtcagggaaactgagcatcagagagggaagatgccaccaagtgtgtgtagtgagttaaagcaggagctggcgatacctccaggaatgctgtccatgcatccagtccaccaagacccacagggccagctcccctcaggattctgaagtagcttgttgcagacactgccaatgtcccgtatcacctgggcaatatggatagatgccaaggactccctgctctgatgacttgtaactctgcctgagggtgttctctgaccacaggagtgcgtctctgtctgacctgcacccggtgatggaggtcctgagagcagtcctcaaacaatgacagacaggaggagagggtaaatactctgatttccttcccatgtgggtgtaacttgggggactgttctatg

SEQ ID NO: 425201 - DNA, 585 bp, Homo sapiens
attatgttaagccactgagaacttgggggtatttgtgtcagcatttagttaccctgtgtaataaaaagcgtaatccttaaaattaaaatatatccatccacttattacctgaacttaccttttgtaccacctgtgatccatatgccacacttagaaaaaacactactgtgatccagatccctgatatacagtcagggaaactgagcatcagagagggaagatgccaccaagtgtgtgtagtgagttaaagcaggagctggcratacctccaggaatgctgtccatgcatccagtccaccaagacccacagggccagctcccctcaggattctgaagtagcttgttgcagacactgccaatgtcccgtatcacctgggcaatatggatagatgccaaggactccctgctctgatgacttgtaactctgcctgagggtgttctctgaccacaggagtgcgtctctgtctgacctgcacccggtgatggaggtcctgagagcagtcctcaaacaatgacagacaggaggagagggtaaatactctgatttccttcccatgtgggtgtaacttgggggactgttctatg

SEQ ID NO: 425202 - DNA, 616 bp, Homo sapiens
aattcccatgtttgatgagaggaatgagcagcagcattgttgtggtggagaaggactctgtgatggagcttcctgggtatttttctgctaaagtgttggctgactctctcaaaacactctcataataagcagatactgttctttagctttccagaaagtcaacgagcaaaatgcagtgaatacacacacacacacacacacagacacacacacacacacacacacaatgttgccatgacctttcctcttggcccgtctgctttgctttaattggaccactgccacctgttggtagccattgctttgrttgtgctttgactttaggatcatactggtaacgccatatttaatacagttctttgaagaaatgcttcaggatcttgatctcacttgtttaaaatttctatagaaggctctgctcttgtctgcagctgatctgggtgaaacagcgttgggagccatcaagtggaaagtttgctcaactttaaattttcaggcagaattgtgtaagttgtaccaattgagatgtctatggtgttggctcttatttctgctgttaatcatctgttctctttaatcagggaacaaacaagtgaatttttttcctgaaaaattt

SEQ ID NO: 425203 - DNA, 614 bp, Homo sapiens
cttgggtggagcttttggtgttctttaagccattggacaagctgtatctaaatgtttatttaaggaataatgactctcttggtcttatgtgacagtcatgaatgctaaacaaccttaacttgatttccaagagctgttgatctatggacgaccagtgtatgtcactctaatagctagaagatccagtaaatttgctggcacccgttttcttaaaagaggtgcaaactgtgaggtaagatgacaaacagtatcttcactgaccttttaaccttttatatcagctttgctgatgtagaagcacagtgaaattttaagaagtggtatttcttagtttgggatattatcaagagaatacagktgccttttagtatcaacaagggattggttctaggaaccctcttcccatccaaaatccacagatgctgaagtctcttacataatatggcctagtgcttgcatataacctatgtacatccatctgtatactttaaatcatctctagattacttctaatatctaatatgatgtaaatgctatgcaaatagttctaatactgtattgttaagggaataatgacaataaaaaaggtctgcacgtattcagttcagatgcaa

SEQ ID NO: 425204 - DNA, 599 bp, Homo sapiens
gcacttactaaaacctcccttaactatcttccaccttatccagagaagctgcttcttttagaaaatcaagcaaaacaactaagccaagacatgttaaaaaaaaagtttgaaaagaaagctgtaaggaaatacaagggaagggattattagaaatgagttttaaatttcttttcaaagaattaatatgtccatatgttcaattcttctacttttaaacttcctctttaagcaacctttttcgattatatactccaccctgactcattctgatcacctgctccaccctacattccaatcacctgctccaccctaactcattccaattacctgctacctgctacctkctctgccgtgactcccaccaaagcactcaccccatcattctctttagccaattggaattagtttagcctgtgcggtctaaccctagccaataggggaacaacacagcagcaggggccacgtgagccagggataagaaccccttcccctcccttgtccaagtgtgcgctcaccattgttccatctgtaagggcgcacccttctatatagaagtaacttgccttgctgagaattaaaaagaaaattttatatttgag

SEQ ID NO: 425205 - DNA, 605 bp, Homo sapiens
tgcttcagtccactgcctgtggggtgggggagcagagtacactttgatttttgcttcctgaagcccaggagctaaaaggaatagccagagggctgcccacacagccaaaggactgaccacactgagcagtcaaagagcagcataggggccttttttgttccagctaactttctcctgcaaatacacacttgagggccatcctccaagcaaagcagtctgtgctggggctttcagcatccacccctcgtacactgtctctggtcttggtggcttcctgctcccttgctgctcacctacacctagcattgagagactttagcctgtgggccttactcactgctgctctctccatcacctcatctgaagaactcggyctgtcaaggtaggaaccaaatctttccttattccctatagtcttcctctctccccctaatacatcctcaaaagaaatagggtttacaacaaattcccagtctctagagacttacagctagcagttagaagccaggcacctgggagtataggtgtgtttatgtgtatttgtattcatgttggaatgcaggaggtcattttttttaacacactgcataggaaccttcccttgg

SEQ ID NO: 425206 - DNA, 633 bp, Homo sapiens
ctgaagacccagggaactgaattgaataccgtgttaggaagagggcctgcagcctccatggtccttaagacttaccaccacccagtgtacagaagcctgtctaccgccccgtctctctaggaaggccagtgctaagactcgtgggccatccaccaggactgagttcgagttactgctggcagaatggtgactggtccctgcagcctcccttctgggcttcaggaatcccctcccaggctgactgccccaccctgaggctagtctggaatcctggttagaggaaaaagctggaaaacagagtcattcacaatgggcaaaaagaggagggagaggtttctggttaagatatgaaaggaggagcctaaagaaggaaggaaggaaggaagctccaaggctctgcccasacatcttccctgagatgcctaaggacaaaagaggagctagacacaactctccccatttttcctttgctgtcttaagagtgctccatcttccagcactgactgccctctgtggctggctcctttctctaccctcccccttccctaggctaaagggcccacaggggctggaagggagggaggctgagtggctgtgctgtgggcctgcctgctcctttcccttcccccttcc

SEQ ID NO: 425207 - DNA, 569 bp, Homo sapiens
aaaatatcattgtgtattgactgcctttgacaggtattaaaagaaagagttggttgggtgcagtcactcatgcctgccatcccaggattttggaaagaccagacaggaggattgcttggggccaggaatttgagaccagcctgggcaacatactgagacctcatctgtactaaaaaattttttttaaagttaaactagggaaagaattagccaatttgtaggcagaaataaggaggtacagaaatttggggcatcaaagaactacgacttctagacactaaacaggaagagataagattgagaccttaagcaaaaaaggcccaataattgttttcaactgaataaagtgactcagccttcgggcaaagttcargttaaaggtgataccttcttacccatgactattattccgcatagcctcaactttcttgccagtaagttgagagagaagggcatggaggggcaaggaagcaaagaaacaggataaactcaaaaactacgtctaggaaagaattttggggggcagggggttactgatacatgaaactaattggaagcaaacagatgag

SEQ ID NO: 425208 - DNA, 563 bp, Homo sapiens
tatgggtcatgtaactctgttctagccaatgcaatgctggtggaagtgattatgctacttacacgcttggccctaaaaatctattatgtgtggccgggtgcagcagctcacgcctgtaatcccaacactttgggaggccgaggtgggcagatcatgaggtcaagagattgagaccatcctggccaacacggtgaaaccccatctctactaaaaatacaaaaattagcggggtgtggtggcacacaccagtagtcccagctactcagtcctcaaggctgaggcaggagaatcgcttgaacccaggaggcagaagttgcagtgattcaagatcgctccactgcactccagcctgggcaacagagcgagactccgtctcaaaaaaaaaaaaaaagaaaagaaaaaaaatcatgtgtgagtcttcctattctctctttttccccatctgctggttgaatgcagggaatccagtagaagatcctgaaatccaagagrttggtggggccattagctagaaagagtgttcctgagttattggtggagcaagctgcccctccccacaacaa

SEQ ID NO: 425209 - DNA, 531 bp, Homo sapiens
atgatgtataacataaccacatttatttaagaatgtattccartgtcaaatggaaacttccaacaatgcaaaaaacacaattactattgcagtcaatattaccagatggtgttctactttttgtaacacacaaagtctcatcctgaggccctgtccctgcatttttgggagtgggaaggcagagactactctgataattcttctttcaaggaaaggttgagaacaactcacccatagtttttttggaaggaacagcattcattttttccctgagatcttttccctttgtgaggagaaaacagggatcagaaacattgcccattttcaaactagagatcacatctgttatggaagatactgtgacaaaacagcatttccacacaaaaagtcatattgttgcttggctggcctcacaataatattctgtcgtataaatgattcactatttaattcctgccctactcaatggctccccacaattttcaaaagaatatttcaacatcctagcttagcattgtttatacatgaagt

SEQ ID NO: 425210 - DNA, 531 bp, Homo sapiens
atgatgtataacataaccacatttatttaagaatgtattccaatgtcaaatggaaacttccaacaatgcaaaaaacacaattactattgcagtcaatattaccagatggygttctactttttgtaacacacaaagtctcatcctgaggccctgtccctgcatttttgggagtgggaaggcagagactactctgataattcttctttcaaggaaaggttgagaacaactcacccatagtttttttggaaggaacagcattcattttttccctgagatcttttccctttgtgaggagaaaacagggatcagaaacattgcccattttcaaactagagatcacatctgttatggaagatactgtgacaaaacagcatttccacacaaaaagtcatattgttgcttggctggcctcacaataatattctgtcgtataaatgattcactatttaattcctgccctactcaatggctccccacaattttcaaaagaatatttcaacatcctagcttagcattgtttatacatgaagt

SEQ ID NO: 425211 - DNA, 568 bp, Homo sapiens
atattctgtcgtataaatgattcactatttaattcctgccctactcaatggctccccacaattttcaaaagaatatttcaacatcctagcttagcattgtttatacatgaagtgagtcctgctttctaccttagcctcctctgcttggctggaagtgttgcccatcaaaatctgttctccttcttctataataacagagttgaggctaggggcataagttagagactgtattttctaatatcctctatatctaggactaagttrtcccaatgtgagccaaaagggtgagctttagagcaatggacattttctcctcctatgatcttttccttttcccataggtgggaacataatgggaaaacttcaatcaatcaaatgaggtaacactcaaggaagaagcggatcaatgaggaaaaaggagcctgggttcttgaatgacctcatggagcagagttgcttgtgagcctaaaccatctggactgttgcatcggagagaaatggcattctctcttatgaaagctgtttaatgcttaggtctctttgatacactagcttaggctttgcccca

SEQ ID NO: 425212 - DNA, 568 bp, Homo sapiens
atattctgtcgtataaatgattcactatttaattcctgccctactcaatggctccccacaattttcaaaagaatatttcaacatcctagcttagcattgtttatacatgaagtgagtcctgctttctaccttagcctcctctgcttggctggaagtgttgcccatcaaaatctgttctccttcttctataataacagagttgaggctaggggcataagttagagactgtattttctaatatcctctatatctaggactaagttgtcccaatgtgagccaaaagggtgagctttagagcaatggacattttctcctcctatgatcttttccttttcccataggtgggaacataatgggaaaacttcaatcaatcaaatgaggtaacactcaaggaagaagcsgatcaatgaggaaaaaggagcctgggttcttgaatgacctcatggagcagagttgcttgtgagcctaaaccatctggactgttgcatcggagagaaatggcattctctcttatgaaagctgtttaatgcttaggtctctttgatacactagcttaggctttgcccca

SEQ ID NO: 425213 - DNA, 589 bp, Homo sapiens
gtcccttggcaggggagtaccaagaaataggcttttgctgtagtacttgtcccttggcaggggagtaccaagaaataggcttttgctgtagtacttgtcccttggcaggggagtaccaagaaatgctccatggattacgtgggtgcaaaacatacagttttcttcacccctaaagtaacagcagccctacctccacctgatgatcagggtcaagtatccayggcagaatggtgactccttttttgcctactggtttgttggcataatcaagcctaagtgaccagatggcaattcttgcctaataatggaacttttgttatatcctccagcgaaagtgctggttctcgaaaaccagaaattgtaaacacactgatcacagagttgtgcagggagaaaatgcaaatttcccaagtgggtcactaagagtgacagtaagagaattcccttccgcttctactcttctgttcctggaccaatgtattctttctattgtgaacaaaacattaaatcatcattgatgtagagtagataccacatcgtataggatggggccacattctcatgaggtatcatctccaaattggtgccc

SEQ ID NO: 425214 - DNA, 589 bp, Homo sapiens
gtcccttggcaggggagtaccaagaaataggcttttgctgtagtacttgtcccttggcaggggagtaccaagaaataggcttttgctgtagtacttgtcccttggcaggggagtaccaagaaatgctccatggattacgtgggtgcaaaacatacagttttcttcacccctaaagtaacagcagccctacctccacctgatgatcagggtcaagtatccacggcagaatggtgactccttttttgcctactggtttgttggcataatcaagcctaagtgaccagatggcaattcttgcctaataatggaacttttgttatatcctccagcgaaagtgctggttctygaaaaccagaaattgtaaacacactgatcacagagttgtgcagggagaaaatgcaaatttcccaagtgggtcactaagagtgacagtaagagaattcccttccgcttctactcttctgttcctggaccaatgtattctttctattgtgaacaaaacattaaatcatcattgatgtagagtagataccacatcgtataggatggggccacattctcatgaggtatcatctccaaattggtgccc

SEQ ID NO: 425215 - DNA, 547 bp, Homo sapiens
tttagcattaaatattcttgaactgcacataagggacagggtaggaaaggaacaatgacaggcaactggtgtagtgggtgagaaccagggattaggagtcagaaggtttgggttttagtgttgatgtgacagggcatttctaaccttggacaagtccttaaaccttggaaaggaaaatgaagaggttgaactacataagctccaaagtcccttgaaaccttaaaatttacaagttgtagtagcctctaatttaaaaacaaaatctttcattttctaatacttatcttatgatttatggttaataatgtttattctgctcatggactatgcatactcatttaagttaattctacttctgctaattaaattaaatatcaagaaacatgggtttcagaaattggcactagaagtgacttttaagatatgaggatgatcttgagtatcttttttktttgtttgtttgtttttttttgcatgtgttgtatgtgaaacatacaacacaattttattctgaccatttttcttgttcataccattccttcagagg

SEQ ID NO: 425216 - DNA, 456 bp, Homo sapiens
agtctagttagagaataacaaagattttttatagmccctaatcatatggaaagtctcatatgggctatgcataaatgttttagtgtctattgaaagtctgggtcttttttatcaacaatgaatatgagcaattcatctgctctcaaattatttgtgattcaatttcaaaataaaattttcctactacccatcttcaggctactaggtcagtttatttgaagtgtatcttaagaattgcaaggtaagtttttttttttttaagtcacaatcagcaactgcttatctgtgtgcaccaggattttcttgatatgttgcacccaaaataaaatgtagatatgagctggatgctggcgtgggtatgagaccagcactgtcacctaactcccatttgacgtattcatgttcatccaaacaggtccatggttctcatcaactggctttttaaacagtttgtat

SEQ ID NO: 425217 - DNA, 456 bp, Homo sapiens
agtctagttagagaataacaaagattttttatagaccctaatcatatggaaagtctcatatgggctatgcataaatgttttagtgtctattgaaagtctgggtcttttttatcaacaatgaatatgagcaattcatctgctctcaaattatttgtgattcaatttcaaaataaaattttcctactacccatcttcaggctactaggtcagtttatttgaagtgtatcttaagaattgcaaggtaagtttttttttttttaagtcacaatcagcaactgcttatctgtgtgcaccaggattttcttgatatgttgcacccaaaataaaatgtagatatgagctggatgctggcgtgggtatgagaccagcactgtcacctaactcccatttgamgtattcatgttcatccaaacaggtccatggttctcatcaactggctttttaaacagtttgtat

SEQ ID NO: 425218 - DNA, 629 bp, Homo sapiens
tttgagtgtttatcatattttttaatgtctcattcccctgctagaatgtaaggtcctagaggtcaggagtctatgtccgcattgttctctgataaatgcctagaacctaaaacagagcccacagagtaggtgttcaacaagtattagctaaatgaataccaaacatttgagaccatccaatgaatgttaactctcttctcccttctttgttgcataaaagttaggtcagttgccaaagagagaactaagatattcttaaatctctctgagtagccataagagcagaatctagaaaccttctgattcctgagcaagcaagaagttggggcaaaacagatagcttaaaaatcattaaaggcatttcccattttagkgaaaggaccaaatgataatttgacaagtggttgggagaaacaagcactctcatatatgttttatgggagtaaaaattaattcaacatctttaaaggaatatttctaatctctatcaaagttgtgaatacatatatgccctttcacccatcaatcacacatctagaaatttctcctatagatatacttacatatgtaaagatgataaaaggatattcctttcatcactgttttaattgctgaagattagaaacaac

SEQ ID NO: 425219 - DNA, 427 bp, Homo sapiens
aaagagagaactaagatattcttaaatctctctgagtagccataagagcagaatctagaaaccttctgattcctgagcaagcaagaagttggggcaaaacagatagcttaaaaatcattaaaggcatttcccattttagggaaaggaccaaatgataatttgacaagtggttgggagaaacaagcactctcatatatgttttatgggagtaaaaattaattcaacatctttaaaggaatatttctaatctctatcaaagttgtgaatacatatatgccctttcacccatcaatcacacatctagaaatttctcctatagatatayttacatatgtaaagatgataaaaggatattcctttcatcactgttttaattgctgaagattagaaacaacctaaatatccattggtagaagactggttcaaa

SEQ ID NO: 425220 - DNA, 601 bp, Homo sapiens
caatgaatacatttttgtggggaaaaaagataaccaagctttgacacatattctgtatgctcccaggcaaatagcacaaaacttctgagtgaaatgtctgtatctgtaaaatggatataaaaataattaatttaccatgtctgggaatacattaaataagattatatctaaaaaatcttatccctgtgccttattatgatatcttgtcaatagatatcagttctctcctccttgacccctcttctggtagtttaagtgaagaaaatgatctcttcaataaataaacaagtgatttattaaagacatatgatttgctcagattacacagtgtttcaagcagccaaggwgataaaaatataaaagaaaaggtcccagctcttacggagaccaggagacagtggagaatctgaagtggaaaaataaaataataacctgagttccacaacaatacaataacagcaaagcaagctttttcagaaacctgcacaggacaagttgccaggtaagctggaagtgctaagggggaggcactgggaaccaggtagggccttttaagaggatagaccggaggtaggtagagaatgcggtatatgtgggtgtt

SEQ ID NO: 425221 - DNA, 593 bp, Homo sapiens
aaggaactacctgggtttcccctcacattagagaaaagtaaacagacaagttacaagcatgtaggcaaatgaattatagtcagccataacttcttcattatgccaccatttagtgaactcttgaggttaagtgctgtgcttatccataggaaagaggtaatagtgaagccacgaagccctgggttccaatttctctctgtcacttactagatttgatcttggttaaatcacatgatttccccagaactcagtttcctcatctgggacaccagctttgmagaggtattgtgaagactgagtaaaatatgaatatttaaaagctgacacagaggaaacaataaatattagcttcttgtcccattattcatcttagcatcctcacaagatgagcacccaattatttatttgttaaattgctctgagtacaggcatacgttggagatttttcaggtttggtttcagaccactgtgacgaagcaaatatcacaatacagcaagtcacacaaacgtttcggtttcccactgcatagaaaagttatgtttacactgtactatatattaagtatgcaatgacattaagcccaaaaaagtaa

SEQ ID NO: 425222 - DNA, 592 bp, Homo sapiens
tatatcaaatctctgctttgaattttcttatctcttcrtttttaaggagaaaaaaatgattaaaaattaaggccacatgattctagatagcgtaagagaatgtggggtggagaattatgggtgggagtagctggggaacaggtttgcccaccttcaaactcatattgcagttctagatatagggagtggtttgttataattttggagtatttttatttgttttttgttttgttttataaatggaagttataaagcacaaagtaaaatgaatgacatcaaccaaccttatgattcagagtttttgttctgtttttcagtagaaaaaaataatttctattgataccccactggctgcgccatctgctcctgacattaagctccttcttcctctgctgttccatctttcatgagtggtcccatgaatgctttcctctcctccagggtctggaagccgccatggccaacttggaggtggtgttagtgttctccagaggacactgctctgtaccagcaaagacttgcagaggctgagcactcacttcttggttcccaccacacagcctttcggcatgacaaactcattggtcacttc

SEQ ID NO: 425223 - DNA, 592 bp, Homo sapiens
tatatcaaatctctgctttgaattttcttatctcttcgtttttaaggagaaaaaaatgattaaaaattaaggccacatgattctagatagcgtaagasaatgtggggtggagaattatgggtgggagtagctggggaacaggtttgcccaccttcaaactcatattgcagttctagatatagggagtggtttgttataattttggagtatttttatttgttttttgttttgttttataaatggaagttataaagcacaaagtaaaatgaatgacatcaaccaaccttatgattcagagtttttgttctgtttttcagtagaaaaaaataatttctattgataccccactggctgcgccatctgctcctgacattaagctccttcttcctctgctgttccatctttcatgagtggtcccatgaatgctttcctctcctccagggtctggaagccgccatggccaacttggaggtggtgttagtgttctccagaggacactgctctgtaccagcaaagacttgcagaggctgagcactcacttcttggttcccaccacacagcctttcggcatgacaaactcattggtcacttc

SEQ ID NO: 425224 - DNA, 592 bp, Homo sapiens
tatatcaaatctctgctttgaattttcttatctcttcgtttttaaggagaaaaaaatgattaaaaattaaggccacatgattctagatagcgtaagagaatgtggggtggagaattatgggtgggagtagctggggaacaggtttgcccaccttcaaactcatattgcagttctagatatagggagtggtttgttataattttggagtatttttatttgttttttgttttgttttataaatggaagttataaagcacaaagtaaaatgaatgacatcaaccaaccttatgattcagagtttttgttctgtttttcagtagaaaaaaataatttctattgataccccactggctgcgccatctgytcctgacattaagctccttcttcctctgctgttccatctttcatgagtggtcccatgaatgctttcctctcctccagggtctggaagccgccatggccaacttggaggtggtgttagtgttctccagaggacactgctctgtaccagcaaagacttgcagaggctgagcactcacttcttggttcccaccacacagcctttcggcatgacaaactcattggtcacttc

SEQ ID NO: 425225 - DNA, 592 bp, Homo sapiens
tatatcaaatctctgctttgaattttcttatctcttcgtttttaaggagaaaaaaatgattaaaaattaaggccacatgattctagatagcgtaagagaatgtggggtggagaattatgggtgggagtagctggggaacaggtttgcccaccttcaaactcatattgcagttctagatatagggagtggtttgttataattttggagtatttttatttgttttttgttttgttttataaatggaagttataaagcacaaagtaaaatgaatgacatcaaccaaccttatgattcagagtttttgttctgtttttcagtagaaaaaaataatttctattgataccccactggctgcgccatctgctcctgacattaagctccttcttcctctgctgttccatctttcatgagtggtcccatgaatgctttcctctcctccagggtctggaagccgccatggccaacttggaggtggtgttagtgttctccagaggmcactgctctgtaccagcaaagacttgcagaggctgagcactcacttcttggttcccaccacacagcctttcggcatgacaaactcattggtcacttc

SEQ ID NO: 425226 - DNA, 654 bp, Homo sapiens
cttgaccgcatcatcaaggaatggtaccctacgttcactgatgccctgcgagacctggacaacgccctctccatgtgcttcctcttttccaccttcccacggactggcaagggccatgtgcagaccattcaccatggagttcatgcactacatcatcgctgctagtgccctgccacaaggtcttcctgtccatcaaaggcatttactaccaggtcaaggtcctgggacagcccatcaygtgaatcaccacttatgccttctcccatgaccacccaacagacatggactacagggtcatggccaccttcaccgagttctacagcaccctgctgggcttcatcaacttccacctctaccagtggctcaacctccactacccactgaagctcgagggtcaggcccaagaagaggcaaaggccagtgagggcacccatgcattggactctgagagctccatggagaaaatggctgccctcactgccagcctggcccgcgtggtggtgcctgccacagaggaggagcccgaggtggatgagtttcctgccaatggggagatgtcagcacaggaggaagaacgcaggaaggagctggaggggcaggagaagcacaagaagttttctgagggcctaaagttcttcctgaaccaaggggtgc

SEQ ID NO: 425227 - DNA, 654 bp, Homo sapiens
cttgaccgcatcatcaaggaatggtaccctacgttcactgatgccctgcgagacctggacaacgccctctccatgtgcttcctcttttccaccttcccacggactggcaagggccatgtgcagaccattcaccatggagttcatgcactacatcatcgctgctagtgccctgccacaaggtcttcctgtccatcaaaggcatttactaccaggtcaaggtcctgggacagcccatcacgtgaatcaccacttatgccttctcccatgaccacccaacagacatggactacagggtcatggccaccttcaccgagttctacagcaccctgctgggcttcatcaacttccacctctaccagtggctcaacctccactacccactgaagctcgagggtcaggcccaagaagaggcaaaggccagtgagggcacccatgcattggactctgagagctccatggagaaaatggctgccctcactgccagcctggcccgcgtggtggtgcctgccacagaggaggagcccgaggtggatgagtttcctgccaatggggagatgtcagcacaggaggaagamcgcaggaaggagctggaggggcaggagaagcacaagaagttttctgagggcctaaagttcttcctgaaccaaggggtgc

SEQ ID NO: 425228 - DNA, 656 bp, Homo sapiens
gttggagacagaaagggcaggcccttggtgccaccaaacccacatcttctcatgtgtcacctcgcttggttcaccacaagggctcagcatgcgattctggcctaggagggtgaagagttccaggatatggcagaggaggagaaggaggggggctggctggtaacaggctggcagtgtgcatcaagagccaggcatttcctaagttggcatccaatataaaaataattgatggagggaaggggatgggggtgtaatgcacaggccatatgtttgaaacccctgcccataatggctggctgcggttaccagcrtctggtgccaccaactacattaaattatggtaccctacggaggcacagaaatcagaaagatttctcttccttccagcatttgttaaaacatggaccgacctaggaactatacccacacataaaacttctctttaaaaaaaaaaaagtagcttcattttagtctactcattttggtgacaaaatcacccaaacttgctaaattatcttttttcacaaatctcagttcccataggaaatgcctgtatcagaattctacagggaacaccttttctccatgtttgagtcttcataagtttattctctgaggtgtccagaccaacatcttgacccaatgtttgaaaaagt

SEQ ID NO: 425229 - DNA, 515 bp, Homo sapiens
tttaaagtaattcaactattttataataattttaaatgaaatgtgatactataactttaaaratagggttaactgcattattcactttgggttcaatttttcatttattgcaaagatgttgattgaatggcatgtgccttttctatcttaagcactgggaaagcaaagacgaatcagatacagccctgctcacaatgagcttttaatctagtagaggagtctgatatgtaaatcaacaattccaataatagctttatgtaaaaaaaaaaaaaagtattagaaactcagaggtatcagggagggcatcacagagcgcgtgaagctttaattgtatctcaaaaaaaaaaaaaattaggagtttgcaagtagataagaccagaacagcattcttgtaaggagaaatagcacgcatgaaatcaaaaggaatgaaataccacagcatgtctgggaaactcaaagaggcttagtttttatgaaagccaagtagtagtaaagggtgctgtggatgtatgtaa

SEQ ID NO: 425230 - DNA, 597 bp, Homo sapiens
gttctaaatattcttattggaagccatggagaattatatctcaactaaggtggagacaaggaaaaagttttgtaaagcaaagataataacctcggttttaaatatagtttgaattatatttgtgatatctagatggtgttatccattcacagtttggtatatataggtcctgatcatagcagaaagttaaagaatggacacacagacttataaatcattagtagctacatagattttgaaaaagtaacaggaatagaaaaattggtgagactgagtgtaactcagactagaaaccaagaaaacacataccaataaatactggagcatatcatcacaatgtaaaaattatcagatttgcatattgttcagttatgaacaacattataaaaattcattttgtaaaactgaggtcaaatgtatacagagggaaataatgcaccaaacttaagtatatgagctgatgagttttaytgtattcatcatctatctatatctctatatgtgtataattatcacttcaaacaagatatagaatatacccagcatcccaaacagttcttttatgctccttcctggacaaagaccacttcttttcct

SEQ ID NO: 425231 - DNA, 537 bp, Homo sapiens
ggggtgagggatgagaaattacttaacaggtacaatgtacattattcaggtgatggttgcactaaaagcccagactttaccactatgcaatatgctcatgtaacaaaactgcacttgtactccttaaatgtatacaacattttttaaaacaagatacagyaggtcaattttgtccatacgattgaatgttggataaaatttgagtagatgttgtttaggaagactaaatatgacttggagaacagtaaccagtggaatgacctttccaattctatctagcagacattgttcaatttacactataccattctctcagtgacaacttcagaggttttctcacagccctgacactcacttaatatgaccataagccgtaaatcaagtagccttcttagatgaatataaacataatgtttgtgcaagcaaaagaaagagtaggatggaagaaggagaccataaaaaatggaactcatagaaattgatatcaaggcatcttaatttatcatttggtagcagctaagcataaacgtgtagcta

SEQ ID NO: 425232 - DNA, 499 bp, Homo sapiens
tataaatcagaggacagaccttcacaccacgttttaggcctgaatatcaatagtggcaagactgagaaactttttctaaggaaaagtgagagcataattaataccaattttaggaaaaattttaaaatatggaattagcattattgattttccctttagatttttccttttactaacactgtctttatttaaaatgttgatatctttttcattattgatttctaagttgatttgaattattttaacatactgcattaaaatattatttattctgattcctgaggtttttggcacccccttaaggtttggggcctgagagtgagcctccctggcctcactgcagtttcagtcttagagaaggagtgcaggtagaaggacggaaggggttagagagcttcaaaratattgatattctatttcttaatctagggtatagatacaggtgggggttcactttattatttttattaaactatccatatagcttatatacagtctt

SEQ ID NO: 425233 - DNA, 595 bp, Homo sapiens
tggattagatggccacagctttgctctgttccaaaacactgtggagctcatgtccatgcctccttgccctgtgaccatgagagtggagaacagcaatggaatatagtcctccctccagtttcctctccaggtggagggtgacaacagccacagaaaggtacagagaaaaagaggctgagtatgagggaggcagctgagaaactctcctagatccagagacagagaggctgcatgaggtgaagcagtgcaggaatgaggctccaagcactcaaaatatactccatttccccaaaagctcaacttgctaaacaagaatttaaagataaaaccaatatggatttcaagatgcgaaccaaacmgcattaaatctcaagtactaagctctggatcctatgtaaccatactgttcacttgcccatgaagctagcccttttcccattttacaaatgataacattgcccaaagtctgtttgtcagcatgagataaaatctgtgtgtatgtgttgtagggactcatcagggaacagggatagatcaatagtttaaactctaacttatgttttttccactacgtctaattgcctgtatatattta

SEQ ID NO: 425234 - DNA, 466 bp, Homo sapiens
taaagtttcatccaagttttttgcttgttcatctttgcttttgcttttgagttaaggcacaggatataaaactatkttcattatgtgtaccaacctataacagaaggtttcagttctctaccattgttacttatatgcatttatttacttaagttgttacttatttgcatcggttgtggaaggagcactgtccagcccagagtgcttctagcgtttaaagtttgttttacatatttatgctaataactctaggctatcacgtacattggtagattattgagaatcttatctacttgaagttcctttgggtctgtaagatgcttatgaggaggacttggggctgctagtcatctacctgacaaaataacctcctggactggtcaaaaggaagacacagaagcttgcctgaaatggaaaagcttcaaaagccaaatctggtaagtcttagggattcctataaagataa

SEQ ID NO: 425235 - DNA, 388 bp, Homo sapiens
gagtgatttttggctagccatttacatttattaactttgtgataatttgmaaattattgaaagaaatgttctgctgtggtttggatatggtttgtccccaccaaagctcatgtttaaatgtgattcccaatgtggtggtattgggaagcagggccctgtggaggtatttggcagcaccctgtagaggtggatctctcatgaatatcttagtgacattctcttggtagtgaattatcttgcactctcccaagactgtattagttctcttgggaatgaattagagagagagagagagagagagagagagagagagtgtgtgtgtgtgtgtgtgtgtgtgtgtgtgtgtgtgtgaggtgcactctggctgttataaagcgaggttcctcct

SEQ ID NO: 425236 - DNA, 388 bp, Homo sapiens
gagtgatttttggctagccatttacatttattaactttgtgataatttgaaaattattgaaagaaatgttctgctgtggtttggatatggtttgtccccaccaaagctcatgtttaaatgtgattcccaatgtggtggtattgggaagcagggccctgtggaggtatttggcagcaccctgtagaggtggatctctcatgaatatcttagtgacattctcttggtagtgaattatcttgcactctcccaagactgtattagttctcttgggaatgaattagagagagagagagagagagagagagagagagwgtgtgtgtgtgtgtgtgtgtgtgtgtgtgtgtgtgtgtgaggtgcactctggctgttataaagcgaggttcctcct

SEQ ID NO: 425237 - DNA, 581 bp, Homo sapiens
aatttaattgctctgctgaaaaagaaactcaactcacacaaaacagggccaaccttttccatttgatcttacagctcaaatgtcaactatgccatacgttttatgtgacttgaaagaacaaaaatggaaacaaagattttaaacattccattcttcctcactatcattttatccactgaaaaagggaaaaaccctcastggcattcaacaaacttaaaacaagcatcaggaatgtgtcaaggtcgccacaaactacagtagcatatgtgaagctccttgactgtatttagtgaaatttgttgatggtgttgtgtattaaattactgaaacctttcagaattctggcttgcaaagcacatggaaaataaatagtgtggctactgttggtgcattcatttgcatatcaatgaagataattctgctagtttcatagaaatgatagtgactaaggtctaagaaggaaagtgaggggcttggatgtacacagaggttgctaaaattcttcctgcttgcatgccaacatttcaaataattttcccagtaagataagctagatccttcattgttttgtgttctctgag

SEQ ID NO: 425238 - DNA, 581 bp, Homo sapiens
aatttaattgctctgctgaaaaagaaactcaactcacacaaaacagggccaaccttttccatttgatcttacagctcaaatgtcaactatgccatacgttttatgtgacttgaaagaacaaaaatggaaacaaagattttaaacattccattcttcctcactatcattttatccactgaaaaagggaaaaaccctcactggcattcaacaaacttaaaacaagcatcaggaatgtgtcaaggtcgccacaaactacagtagcatatgtgaagctccttgactgtwtttagtgaaatttgttgatggtgttgtgtattaaattactgaaacctttcagaattctggcttgcaaagcacatggaaaataaatagtgtggctactgttggtgcattcatttgcatatcaatgaagataattctgctagtttcatagaaatgatagtgactaaggtctaagaaggaaagtgaggggcttggatgtacacagaggttgctaaaattcttcctgcttgcatgccaacatttcaaataattttcccagtaagataagctagatccttcattgttttgtgttctctgag

SEQ ID NO: 425239 - DNA, 617 bp, Homo sapiens
ctgttggtgcattcatttgcatatcaatgaagataattctgctagtttcatagaaatgatagtgactaaggtctaagaaggaaagtgaggggcttggatgtacacagaggttgctaaaattcttcctgcttgcatgccaacatttcaaataattttcccagtaagataagctagatccttcattgttttgtgttctctgagrcagcattatggaagcctgaatagggctaaagaggcggatgttttgaattctcatccaacaatttttttcataaaaaataattctctgccaaaatttcaaagtccaacagcttgagatctctgtctcttttcctttttagtttcatccatttgaaaaaaaatcagattaaataaaatatgaacattttatttcaagaaagccaagttatgagcaataccaagaaatgaacagatttttttcattatattttacttgccaattgcaatcatgctacttgtaaaatctacagttcagtatatagacattattagttctgtcaaaaatgtgaaggaacattgggaaagcttaagctaacttttcagataatgaaagataaattttcatattcagcttgggaattcgtataacagacaac

SEQ ID NO: 425240 - DNA, 569 bp, Homo sapiens
ttagttcaaaatacttcacaatatatttgtatgttaggatattgcataatccagtaactatgtacaatattttaatattttaaggttaatttttgtttataactgaccattaacctgtaaaaaatacttacaccattaagtattaaaaatattattctttggtgggggggctgaaaagatgaataggtgactcacagataatttttagagcagtgagaatattctgtatgatacaataatgttaatacatgtcattatacatttgtccaaatccacacaaagtacaataccaagagtcaaccctaatgtaaactatggtatttggatgatcatgatgtattgatgcatcagctatgacaaatatgccgctctggtgggggatgttgataatgggtgaggctatgcatgggttggtgtaggaagtattgggaatctttgtaccatcctctcaattttgatgtgaatttaaaggtgctccaaaaagaaaaaaatagtctcawaaaaggccacaattatttttaaacatagaactccagactgctgtttaccatttttatttttaatgttat

SEQ ID NO: 425241 - DNA, 537 bp, Homo sapiens
atctgataaaagtgactataaaaaagtaaaaaagcaagtgacttccttcaagattcagtttagggtaatgaaatatatgccatgtatgttctctgaccctttaytcatctatataaccaaattttaaattaaccacaataattttataagacagctgaacagtttctacacttttgaactcctgccaagacaagatgtactggaaccaaatttcgcaatgtcagaaagcctagaaagtctttataaagcttagattaacatcagatcaaatttggactcttaaaaggggcttggctattttcaagcttttcccaaaatgatatttagcaagagacaagcaataatccctctttaagcttaatctcagatttaaaatcctttgatcaatcaacaaacacttattgaacacaaaatattttagttacacaggagaaaataaaatctaagtcaaaggaaaaaatagataattttttatcacttcaattctggaactataggctatatgttggttcacttccccaagtatatgctccaaga

SEQ ID NO: 425242 - DNA, 537 bp, Homo sapiens
atctgataaaagtgactataaaaaagtaaaaaagcaagtgacttccttcaagattcagtttagggtaatgaaatatatgccatgtatgttctctgaccctttactcatctatataaccaaattttaaattaaccacaataattttataagacagctgaacagtttctacacttttgaactcctgccaagacaagatgtactggaaccaaatttcgcaatgtcaraaagcctagaaagtctttataaagcttagattaacatcagatcaaatttggactcttaaaaggggcttggctattttcaagcttttcccaaaatgatatttagcaagagacaagcaataatccctctttaagcttaatctcagatttaaaatcctttgatcaatcaacaaacacttattgaacacaaaatattttagttacacaggagaaaataaaatctaagtcaaaggaaaaaatagataattttttatcacttcaattctggaactataggctatatgttggttcacttccccaagtatatgctccaaga

SEQ ID NO: 425243 - DNA, 602 bp, Homo sapiens
tatgctaggcactttcatgtgaacattataaattagccttcacaatcacactaaaagtccactatcactattcaaatttttagacatgaatctctacctttcacarataaaaattaagtaaatcaaggtcatatggctaaatagtaggtcctctaaaataagagactaaactctttccattcttttttttttttaatttttttcctagtgagtaggattatcagatcgaggttaagagttgggctctgtatcttcatttcgagttatgtgatttacaacaagttgcttagctctgttttctaatcttcacaatggataatacaataaaatccacattatatgaatgagcttgtgtaatgtgaatgacagtacctgtataataaatcacacagaacatcacagagcacatggcaaccacccaataaaagttagctaatattactacaagttcactctgtgatccttagtgagtcactttgaacagattatagtttcctaatatggccttagcagtagtccacttgctcatatcgcaatgtgaccttgcaacttctccataatatgatctcttatttgtggaatctgaaaaagttgaactcata

SEQ ID NO: 425244 - DNA, 602 bp, Homo sapiens
tatgctaggcactttcatgtgaacattataaattagccttcacaatcacactaaaagtccactatcactattcaaatttttagacatgaatctctacctttcacagataaaaattaagtaaatcaaggtcatatggctaaatagtaggtcctctaaaataagagactaaactctttccattcttttttttttttaatttttttcctagtgagwaggattatcagatcgaggttaagagttgggctctgtatcttcatttcgagttatgtgatttacaacaagttgcttagctctgttttctaatcttcacaatggataatacaataaaatccacattatatgaatgagcttgtgtaatgtgaatgacagtacctgtataataaatcacacagaacatcacagagcacatggcaaccacccaataaaagttagctaatattactacaagttcactctgtgatccttagtgagtcactttgaacagattatagtttcctaatatggccttagcagtagtccacttgctcatatcgcaatgtgaccttgcaacttctccataatatgatctcttatttgtggaatctgaaaaagttgaactcata

SEQ ID NO: 425245 - DNA, 602 bp, Homo sapiens
tatgctaggcactttcatgtgaacattataaattagccttcacaatcacactaaaagtccactatcactattcaaatttttagacatgaatctctacctttcacagataaaaattaagtaaatcaaggtcatatggctaaatagtaggtcctctaaaataagagactaaactctttccattcttttttttttttaatttttttcctagtgagtaggattatcagatcgaggttaagagttgggctctgtatcttcatttcgagttatgtgatttwcaacaagttgcttagctctgttttctaatcttcacaatggataatacaataaaatccacattatatgaatgagcttgtgtaatgtgaatgacagtacctgtataataaatcacacagaacatcacagagcacatggcaaccacccaataaaagttagctaatattactacaagttcactctgtgatccttagtgagtcactttgaacagattatagtttcctaatatggccttagcagtagtccacttgctcatatcgcaatgtgaccttgcaacttctccataatatgatctcttatttgtggaatctgaaaaagttgaactcata

SEQ ID NO: 425246 - DNA, 563 bp, Homo sapiens
gtgtgttctgcaaagttagatcacaaaatgcaatagtgtctgtgtgccactccttcatctccatctctatctcttcttgctgttggaatccagtcaccatgctgtgagtaatcacaggccacaagtagaggttatgtgtacactttcaagccaacaactccagataggcttccagccagctgccatcatcaactgccaagctaaagcctttgaagtaacaccagcctcctccattgtctcccccattttcatgagaaaccctgagggaaagccaccgagcccaacccagtcactcccagagtaataagagatattattattctgatattatatattatgtattaatgatattatatattaatgagtgatcagtattgttttaagaaactgtttggggatgatttgttacatagcratagataaattagcataatcaccaagatttctttttcattattttttacttaaaaaagccaaattaaatatatttcagaattagtttgatttacaaatacatacacagtcacagagccgaagtgtattttttttcttttttgagacaa

SEQ ID NO: 425247 - DNA, 550 bp, Homo sapiens
acagaaggaggtgagcagcaggtgagcgagcactactgcctgagctccacctcctgtcagttcagcagcagcattagattatcacaggagtgcaaacactactgtaaactgcatatgtgaggagtctaggtgtgtgctctttataagaatttaatgcctgatgatctgtggtggaacagtttcatcctgaaaccaacccaccctctcccattgccctcagtttgtggaaaaattgtattccacaaaaccagtccctggtgccaaaaaggttgggggctgctggcctagacctctacagggtcagtatcatcaatatctttgtcttccatctccacatcttgtcccactggaaggtcttcgggggtaataacacacatgcagctgtcactttgataacaatgcctttctctggaataactcctgagggacctgcttgarttacagctttttttttttttaataagtaggagtacactctaacataataaaaatacagtatactatataaaaagtgatggaaaattttagctccattataatcttatgggac

SEQ ID NO: 425248 - DNA, 550 bp, Homo sapiens
acagaaggaggtgagcagcaggtgagcgagcactactgcctgagctccacctcctgtcagttcagcagcagcattagattatcacaggagtgcaaacactactgtaaactgcatatgtgaggagtctaggtgtgtgctctttataagaatttaatgcctgatgatctgtggtggaacagtttcatcctgaaaccaacccaccctctcccattgccctcagtttgtggaaaaattgtattccacaaaaccagtccctggtgccaaaaaggttgggggctgctggcctagacctctacagggtcagtatcatcaatatctttgtcttccatctccacatcttgtcccactggaaggtcttcgggggtaataacacacatgcagctgtcactttgataacaatgcctttctctggaataactcctgagggacctgcttgaattacagctttttttttttttaataagtaggagtacactctarcataataaaaatacagtatactatataaaaagtgatggaaaattttagctccattataatcttatgggac

SEQ ID NO: 425249 - DNA, 615 bp, Homo sapiens
gcaaacactactgtaaactgcatatgtgaggagtctaggtgtgtgctctttataagaatttaatgcctgatgatctgtggtggaacagtttcatcctgaaaccaacccaccctctcccattgccctcagtttgtggaaaaattgtattccacaaaaccagtccctggtgccaaaaaggttgggggctgctggcctagacctctacagggtcagtatcatcaatatctttgtcttccatctccacatcttgtcccactggaaggtcttcgggggtaataacacacatgcagctgtcactttgataacaatgcctttctctggaataactcctgagggacctgcttgaattacagctttttttttttttaataagtaggagtacactctaacataataaaaatacagtatactatataaaaagtgatggaaaattttagctccattataatcttatgggaccattggggtatatgtggtccatcactgagtgaaaygtcattatgtggcacttaactgtaattttgtcaagtggttttttattatttcctttgagctatccttgccttacactttgtgtcaatgatttgagaaattcaactaatcagttatcagata

SEQ ID NO: 425250 - DNA, 568 bp, Homo sapiens
tagacacgtttttgcttctcaattaactgcctgtgatacaaggagaaaaggttgcctatatctggtcctaaacaatttgcctatatctgctccacagcataacattactttgcttgctccactcaaatctttatgtaattatgtacttgacctctaactggagaggaggtactggtagagaaaggctcccaggggctatggcaaaccaggggcatccttctgagcaaaattgctaggcaaagagtcaaaatcaccatcagagagaaaaattcatagccaggaggtaaacagtatgcatcatatccaattgattaggcaagcacagaaataaaagagtaatgataagaatatcacagartattacaaagggtacaatttgggctgacttcctaaatcaaaatgatttatatggtgccatatacatttcatcctttgcttcctctctgttagaatagctgtaatatctgagaggagagacatctgaccccacctggaccagtcaggcgctcaacccactaaccacctcaactggtctatgcatgggcatagaccaacgtaggccaagctg

SEQ ID NO: 425251 - DNA, 541 bp, Homo sapiens
aacaaaacaaaacaaaaacctagaggatcatagaaactagacacctgctatcaaatgaatcttagaattcacgtgacacatgctttttcaaatggaaaaaaaagaaatgctctatgtcatttgaaataatatatgagttaagtrtaatatctcaatgactggcattgctaatgttatgaacatttgaaattgagctaccctggtggagttcaattgaaattaggacattaaaatcagacatagatacagacaaagaaagatacattataactttgtaaaagtaaaacaatataaatgctcagtaaaataatgagaacaaagtcaaagaatgttgtgtgtgtgtatatatacatatgtatagagagagttggcatttaatttgatccaatctaagcttctaagaaagactgtactagtatatttatatagtcttcagagaaaacaatgatgcagtataatttctagtgtttaaaaatccaaatcagttaatctaaaataattatgctaataacatggtttaacagagtaagaaacgaatgga

SEQ ID NO: 425252 - DNA, 491 bp, Homo sapiens
ttttcagaggatatatgggaacacctggaagtccaggcagaagtttgcttcaggagtggagtcctcatggagaacctctgctaggacagtgtggaagggaaatgtggggttgaagcccccacatagagtccccactggggcgctgcctagtggagctgtaagaagagggctgccatcatccagaccccagaattgtagatccattgacagcttgcaccatgttcctggaaaggtcacagacactcaatggcagtccacaaaggcagccaggagaggggctgtaccctgcacagccacagggttggagctgyccaagaccatgggaacccacctcttgcatcagcattacttggatgtgagacatggagtcaaaggagatcattttggagctttaagatttgactgccctgctggattttggacttgcatggggcctttagtccctttgttttggccattctctcccatttggaacagctgtatttacccaa

SEQ ID NO: 425253 - DNA, 596 bp, Homo sapiens
ctatctggccattaaaattttggaatagtttctatgctctgagaaacttattattaggtgaatacagtaaaagtgaaataaaaatcacacatatctaatgatcttgtttatgtaaaagatttacttgtagagaaaattttgtcaaaatttatgctaaaaaaatatgctaaaaaaatagtgattaacagccaggtgtggtagctcatccctataatcccagtactttgggatgctgtggcagaattgttggaggctaggagttcaagaccaacctaagcaacatagcaaacccccatctccatctttttttttttttttttttaaataattggctgagtgtggtagtgtgcttgtttagtcttagctactcaggaggctgatgctggagaatcgcttgaacccaggagttgsaggctgcagtaagctacgatcatgccactgcacaccagcctgggcagcagagcaagactctgttgctataaataataataataataataataataacgataataataataatagtggttataacagaggggcagcattttttatttgttatttttaaatgttctaaatttgtaactatgtattat

SEQ ID NO: 425254 - DNA, 596 bp, Homo sapiens
ctatctggccattaaaattttggaatagtttctatgctctgagaaacttattattaggtgaatacagtaaaagtgaaataaaaatcacacatatctaatgatcttgtttatgtaaaagatttacttgtagagaaaattttgtcaaaatttatgctaaaaaaatatgctaaaaaaatagtgattaacagccaggtgtggtagctcatccctataatcccagtactttgggatgctgtggcagaattgttggaggctaggagttcaagaccaacctaagcaacatagcaaacccccatctccatctttttttttttttttttttaaataattggctgagtgtggtagtgtgcttgtttagtcttagctactcaggaggctgatgctggagaatcgcttgaacccaggagttgcaggctgcagtaagctacgatcatgccactgcacaccagcctgggcagcagagcaagactctgttgctataaataataataataataataataataacgataataataataatagtggttataacaraggggcagcattttttatttgttatttttaaatgttctaaatttgtaactatgtattat

SEQ ID NO: 425255 - DNA, 609 bp, Homo sapiens
gccatacaaaaatcaaaataaaaacctgacttccataccagattttttgatcttcaactccttggaaaacacttcaggctcaatratgacaattaaatttaaatggaagttttcttcagcataaaaaattgtggtattggatgcatgtggagtatatcttgacttgaatgcattatttctttcaaatatacaactagaatatagactattttctgatcctataagaaatgatctgaaatatatattgtacagtttttcctaacattatgtaaattctttgtcataatattttattttacttatttttttatgtttcttttgtagtctggagtgcagtggtgcaatcatagctcactgcagtcttgaactcctgagctcaagtgattctccttcctcagcatcccaggactagaagagtgccccaccatgtgcagctaatagaaaagaaaaaaatgtagagatagggtcttgctatgttgcccaggttggtcttgaacttctggcctcaagtgatcttttgtttcggcctcccaaagtactgaaattacagacctgaaccatggtgcctggcctggacctaacattttaatagataatactaagtgtaga

SEQ ID NO: 425256 - DNA, 609 bp, Homo sapiens
gccatacaaaaatcaaaataaaaacctgacttccataccagattttttgatcttcaactccttggaaaacacttcaggctcaatgatgacaattaaatttaaatggaagttttcttcagcataaaaaattgtggtattggatgcatgtggagtatatcttgacttgaatgcattatttctttcaaatatacaactagaatatagactattttctgatcctataagaaatgatctgaaatatayattgtacagtttttcctaacattatgtaaattctttgtcataatattttattttacttatttttttatgtttcttttgtagtctggagtgcagtggtgcaatcatagctcactgcagtcttgaactcctgagctcaagtgattctccttcctcagcatcccaggactagaagagtgccccaccatgtgcagctaatagaaaagaaaaaaatgtagagatagggtcttgctatgttgcccaggttggtcttgaacttctggcctcaagtgatcttttgtttcggcctcccaaagtactgaaattacagacctgaaccatggtgcctggcctggacctaacattttaatagataatactaagtgtaga

SEQ ID NO: 425257 - DNA, 609 bp, Homo sapiens
gccatacaaaaatcaaaataaaaacctgacttccataccagattttttgatcttcaactccttggaaaacacttcaggctcaatgatgacaattaaatttaaatggaagttttcttcagcataaaaaattgtggtattggatgcatgtggagtatatcttgacttgaatgcattatttctttcaaatatacaactagaatatagactattttctgatcctataagaaatgatctgaaatatatattgtacagtttttcctaacattatgtaaattctttgtcataatattttattttacttatttttttatgtttcttttgtagtctggagtgcagtggtgcaatcatagctcactgcagtcttgaactcctgagctcaagtgattctccttcctcagcmtcccaggactagaagagtgccccaccatgtgcagctaatagaaaagaaaaaaatgtagagatagggtcttgctatgttgcccaggttggtcttgaacttctggcctcaagtgatcttttgtttcggcctcccaaagtactgaaattacagacctgaaccatggtgcctggcctggacctaacattttaatagataatactaagtgtaga

SEQ ID NO: 425258 - DNA, 609 bp, Homo sapiens
gccatacaaaaatcaaaataaaaacctgacttccataccagattttttgatcttcaactccttggaaaacacttcaggctcaatgatgacaattaaatttaaatggaagttttcttcagcataaaaaattgtggtattggatgcatgtggagtatatcttgacttgaatgcattatttctttcaaatatacaactagaatatagactattttctgatcctataagaaatgatctgaaatatatattgtacagtttttcctaacattatgtaaattctttgtcataatattttattttacttatttttttatgtttcttttgtagtctggagtgcagtggtgcaatcatagctcactgcagtcttgaactcctgagctcaagtgattctccttcctcagcatcccaggactagaagagtgccccaccaygtgcagctaatagaaaagaaaaaaatgtagagatagggtcttgctatgttgcccaggttggtcttgaacttctggcctcaagtgatcttttgtttcggcctcccaaagtactgaaattacagacctgaaccatggtgcctggcctggacctaacattttaatagataatactaagtgtaga

SEQ ID NO: 425259 - DNA, 556 bp, Homo sapiens
aatgggaacaaattattttaatagatacagaatgcttcttaagaagatagctacctgtgttgagaaaaatttcagtacacatacttggagtggaaattattgacttagcatgtccaccataaggatagctctgctatgctaagaatatctggaccaatttgttggttgactccagaaaaaagtagagaacagaagataaatgagtaagagatmaggtaagtggaagcccattctgtacagaatattttagtaggtcatgcttctgctccttctaaccttagaatgaggtaaatataatctgcacatacaagtgatatattgaggcccagaggccagacaatgacagccaacatctaagatgacaccaaggagcccttccttctggtgtttatgcccttatgcaatcccctcccactttggcctgtatggccaataggatacaacagaagtgatgatatgtcacttccaagattgttattttgtagcttctgccttggcattgtctctctttcatgccctctcgttacttgttctagaggaagtcaacttccatggc

SEQ ID NO: 425260 - DNA, 556 bp, Homo sapiens
aatgggaacaaattattttaatagatacagaatgcttcttaagaagatagctacctgtgttgagaaaaatttcagtacacatacttggagtggaaattattgacttagcatgtccaccataaggatagctctgctatgctaagaatatctggaccaatttgttggttgactccagaaaaaagtagagaacagaagataaatgagtaagagatcaggtaagtggaagcccattctgtacagaatattttagtaggtcatgcttctgctccttctaaycttagaatgaggtaaatataatctgcacatacaagtgatatattgaggcccagaggccagacaatgacagccaacatctaagatgacaccaaggagcccttccttctggtgtttatgcccttatgcaatcccctcccactttggcctgtatggccaataggatacaacagaagtgatgatatgtcacttccaagattgttattttgtagcttctgccttggcattgtctctctttcatgccctctcgttacttgttctagaggaagtcaacttccatggc

SEQ ID NO: 425261 - DNA, 586 bp, Homo sapiens
attttagtaggtcatgcttctgctccttctaaccttagaatgaggtaaatataatctgcacatacaagtgatatattgaggcccagaggccagacaatgacagccaacatctaagatgacaccaaggagcccttccttctggtgtttatgcccttatgcaatcccctcccactttggcctgtatggccaataggatacaacagaagtgatgatatgtcacttccaagattgttattttgtagcttctgccttggcattgtctctctttcatgccctctcgttacttgttctagaggaagtcaacttccatggcatgagaacactcaggcagtccatgtagatatagaggcaaagaatttgaacttccagcacacagccaacgaggacattcactgaggctgtttaccatggttggtaaagttgataacctagaacatgtatggtgtgggcagattttggggatggagatcactaacggtrctgaagtatatgtccaggtgatacagaggagaactgaaacagcactcacagatactgaagagactaagcaaatgtcagaaagaaaataaagaaaaaaagctgatgg

SEQ ID NO: 425262 - DNA, 579 bp, Homo sapiens
acaaccagctaacaccacaatgacaggatcaaaactcacagatcaacattaatcttgatggaaatgatctaaaaacctgacttgaaaagcacagaattgtaagttgaattaaaaaaaaaaaaataagrcccaaccagctattgccttcaagagacccacgtcatatgtaatgacacccacaggctgaaagaaaagaaatggagaaagacctatcatgcaactgcaaaaccaaaaagagcacaggtcgatattcttatactagataaagcacactttaaaccaaaaacagtcaaaaaggacagagcaagacattacataacaataaaatattcaattcaacaagaacacctaattatcctaaatacatatgcaatgcaacattggcactcagattcataaaacaagtacttcttggactgcagtaagatttagacagctgcacaagaatagtgggggacttcaacgttccactaacagtgctagatagatcatcaaggcagaaaactaacagaaattttggacttaaactcgacacttgacgaattgttcctaatagatatttacagaatactcaaccta

SEQ ID NO: 425263 - DNA, 579 bp, Homo sapiens
acaaccagctaacaccacaatgacaggatcaaaactcacagatcaacattaatcttgatggaaatgatctaaaaacctgacttgaaaagcacagaattgtaagttgaattaaaaaaaaaaaaataaggcccaaccagctattgccttcaagagacccacgtcatatgtaatgacacccacaggctgaaagaaaagaaatggagaaagacctatcatgcaactgcaaaaccaaaaagagcacaggtygatattcttatactagataaagcacactttaaaccaaaaacagtcaaaaaggacagagcaagacattacataacaataaaatattcaattcaacaagaacacctaattatcctaaatacatatgcaatgcaacattggcactcagattcataaaacaagtacttcttggactgcagtaagatttagacagctgcacaagaatagtgggggacttcaacgttccactaacagtgctagatagatcatcaaggcagaaaactaacagaaattttggacttaaactcgacacttgacgaattgttcctaatagatatttacagaatactcaaccta

SEQ ID NO: 425264 - DNA, 346 bp, Homo sapiens
cccaaagcaatttaaagattcaatggtattcctaccaaactatcaacatcatttttcacagaatttgaaaaaaaaagctattataaaattcatatggaaccaaaataaaaacctgaatggcaaaaggtattcytaagcaaacaaacaaacaaacgaaatgagctggagatatgttatcctacttcaaactggactacaagggtacaggaaccaaaccatcacaaggctaggacaaaaaccagacacactggccagtggaacagaatagaaattacatgaataaagccctgtacctacaaccatctgatcttcaggaaagtgaacaaaaataaggaatggggcaaag

SEQ ID NO: 425265 - DNA, 608 bp, Homo sapiens
tcgttagatattaatgaatcagctaaggagcctctatatggctgctgaaacgatctgtcagcattcccattataaatctctctctctaatggattataatgytaacaaaaaaatcatttcagaatgaaatttggcatgtggtttatacatttctgggataatactgattttttttattagccaaaattaaaaataaaattagtattaaactacagcattgtactataactcaaccaacaagaaaagtaggtaagacttgccggcccacctctggaaaaactgaaaaaatataaagtctcctcctttatcaggaaaaaaaatatgaaaataaacacaccgatttttcaaaaaattaatttttatatatattcagtatccccccacgaaaatatctacagagttaccctgtgacaatgaatattagaaggtttagattacattttaataactattcaaagacattgtaaaaattgagatttctgtttccataaaaattcatttaggaccacatcaatttcttgatgaagccacatataatttcaggcagattaaaatgaatgcttgcatgtgtttgtttgtattgttgaccctttaacaacacagtttta

SEQ ID NO: 425266 - DNA, 571 bp, Homo sapiens
ctcctttatcaggaaaaaaaatatgaaaataaacacaccgatttttcaaaaaattaatttttatatatattcagtatccccccacgaaaatatctacagagttaccctgtgacaatgaatattagaaggtttagattacattttaataactattcaaagacattgtaaaaattgagatttctgtttccataaaaattcatttaggaccacatcaatttcttgatgaagccacatataatttcaggcagattaaaatgaatgcttgcatgtgtttgtttgtattgttgaccctttaacaacacagttttaaactgaatgggtccatcttcttctgcctccgccacccctgaaataccaggacccacctcccctcttcttcctcctcctcagcctaaacaatgtgaagacaaagagaaagaagacttttatgatgatccacttccacttaataaattgtaaacrtattttctcttacttatagttttcttaataacattttctgttctctaccttactttattggaagaatacagaatataatatatagaacatacaaaatatgagttaatca

SEQ ID NO: 425267 - DNA, 499 bp, Homo sapiens
cttctgtctcagacccccgcttaactgggattacaggtgcccccaccacacccaactaattttttgtgtttttagtagagatggggtttcaccatgttggccaggctgttctcgaactcctgacctcatgatctgcccacttcggccccctgaagttgttggggttacaggcgtgagccactgcacccagccatttatgttcttttctatactgggtattttatctgtcagctcttgtatagttttaccatgtttaatttttaaacatttaatcagccatgcattttagtgataacccccattttgtaataatgaattgctctgttaatacactgttggatttggtttgctaaaattctgttaggaatttctgttctagtaccaaaatagcagcytagaagcaagctagcttcactgccactcataggaaaccagaaacaaatacataatgctgtggttattaccatcaacatctcaggatttaaaaccagggaggaaa

SEQ ID NO: 425268 - DNA, 406 bp, Homo sapiens
gaatgatattccatacaactggaaaccaaaaaaagaggaggagcagctctacttatatcagaataaaatagactattacaaacaggtatacaccaataaattggaaaacttattgaatacattcctgggcacatataatctgacaagtttgaagcatgaggatattgagaacctcaacaaaccaataacaagtaatgagattgaagtcataacaaaaaggtttcataaaagaaaagcccagaatctgttggcttcactgctgaattttacccaacctttcaagaagaatgaataccaattcttctcaaagatyatagcagaaccaagaacaaaaaccatatggttattttaatagataccaaaaaagcattcaatacaatataatattcctttatggtaaaaatcc

SEQ ID NO: 425269 - DNA, 590 bp, Homo sapiens
catttgcacaaagacctctcaacaaaaatttactttacagtttgctggagtttagtgattctttctttggaatcccaactggtcccatctatttactgagagctttgaacttggcctttcgaattccttccagttctaacttgcagtgagtatctgtaaggttactaacaccatatttctraaataaagacagtaggtacatcgctctccaatactgaaacttttctcccttcagccgtgaaggaaaatctgccctggggggcggaaccaggtgcaacggaggttttctgctttagaaagatgctcctctgctttcatgggttattctgccacatctgtagaaataactatttgtagctgaccccaggacttcatcacctctcactagaattgtggcaaaggtcccccacctggtctaacctagctctcctattcatactttacaatctggctagaattatctttcctaaatgtagtttggagtttggtcactttattccacttgtcaaaaattggcagttttcagttttctctttgtttatggaatccatattaaattatttagtttgacattgagaagtctctacaat

SEQ ID NO: 425270 - DNA, 492 bp, Homo sapiens
agtatttcaaacactcttctatactttttaaggatcatttcctttcacagccacaactctaatgagatgttatattagttagacttaagtttggcagtgactgacagaagaaaaaaataacaaggattttcatttaatttttttttttttttttgagacagagtcttgttcaggctggagttcagtggtatggtcccggctcactgtaacctctgcctcctgggttcaagcaattctcctgcctcagccttccaagtagctggcactacaggcacccgtgaccatacccggctatttttttttttttttttttttttgkatttttagtagagacagggtttcactatgttggccaggctggtcttgacctttcaacaagcatttgtaacaggatgaataaaaacggaagggaatattgtacaatgccaggcatgagccttaacatctctatgtctcactttcctcatttggaaaaggaaggtaatgattgag

SEQ ID NO: 425271 - DNA, 559 bp, Homo sapiens
tacaagatctttgatgtcactaataagaggacctcactcataacattttcacttgaataataaatttgtcaatatatgtaaagtgctttgaaaacatctggcacaaattaagtgccagaagtattagttcccactaccatgactcttaaattacattcttaggtcacctgaacatccgtcgaaagacaaaatgttatgtaacacccctctgcatagactctgggtactcttttaatgccttatcatttcctataagaaaagacagcaaatgctaattcattatagtaaggtgacaaattagtattaaaattgtactatatttaaaggaattgccttcaagggaaaattcatatgaaaaaagtgagaataattcaaccctacagtctgaatataatacatcatggtaggcatagttacctcagggttaaaatatacataaaacaaacaaacatagtgcagtggactgaatgtttgcatrcccccagaatttacatgtcagcatcctaacctgtaaagtgatagtgttcagaagtggggctcttaggaagtgattaggcca

SEQ ID NO: 425272 - DNA, 571 bp, Homo sapiens
agaataggtacagtatgataatttctagtgtagcaacactgacaggtcagagtatatgctgtgaaaaacaggagtagtggtcaggcatgaatgatagtgcctgaaaggaagatggagttaggcagcatcttacaaccattggccaagtatgagcagcagtaacaaatggagtacagtaatagaagctgaaagttgtaatgattgcctgaagaggcgggtcaaaaaaagattcacaggacatttgatgcctgaaggcattagcattatgggcataattggaaaaaatgagaagcaggatccattacaggactgttagaggcaaggacaaaggtaacattgaaaggataaaatgaaatttcatttttactgatggtggttaatcaaaaccttggaagcagataaacaactgaaaaggtttacttaatatcatacctattctgcagyagattaataagcctttttagttctccaagatagaaaaatgaatccattattcccagtgataatttattttatcatatgtttctttacaaaattggcttaaatattaccgttgtaaatgtatgagatg

SEQ ID NO: 425273 - DNA, 549 bp, Homo sapiens
atgatattttctttcagcagctctcctatttggactaattagcttaaaaatacttaggtgtactataggttaggattttcctgtctgacatcaaaatatactatcggtgtattaaatcaacattagagcttattgctgttattcaccctctttggtggtatataatggtggtaggggtactgggggaatcaaattaagattcagagtccagttgtgtctgaagaactgtattcccctcctctgtcatgcccatttacatgggttaatacgtaagggaggaaggggctttcaaggaggaagtttttttttttttttcctcaggtcttagaggtagaagaggaatcataaggagaatgagggatggaaagaagggaaagaaaaatgatcaaatgatgtrggaacttccctagattaaaaaatgagggttcttcttgttgaaacataaaagctttgtatataaagacctatgtagagtagcaaggaatctgtaaacactgtatttttttccagagactggagtgcttgcggaaacactggtggatctaggta

SEQ ID NO: 425274 - DNA, 578 bp, Homo sapiens
ttgacctttttaaaaaagaaaacctctctttttctctaggaatttatagaatcttctctttgtctcctgagttctgaaatttcacagtgatgtaccttacaaacttaggttgaaatggattcttttagttccagggaattttcttgaattattacactgacagttttctcagctctattttcccagttgtttttggaacctcaagtgttagacctcctagaatgccttaattttttttcttttcactcttatatttcatttcctttactttttgctctatcatcagagatgtcttcaactttattgcctaatccttccattgagtttattgcttttgtgatcacatgtttagtttccaagacctcctttttattctgtaaatattcttttatagtgttctcttttttcattattatatcttccctcatgtctctaagaatattaatgataatttaaaattgttattcttctccctacattgtctttatcttttccaaattattttttatgtttgtatgttttgttttctttcttttgtatataaagycttcctcaaatgtctgataatctttggttgc

SEQ ID NO: 425275 - DNA, 579 bp, Homo sapiens
tatagaaaaattgagtggaaagtagagagaattcccacctatactgcttcctacctccccacagcttcctttataattagcatcttgcattggtgtgttacatttgttatagttgatgaatcaatattggtacattgttactaactagagtccatagttatcaataatgatawcaaacaaactattgtacttgtttatgtatctaccatactcggcttgttattattttagtgtacttgttctatttgtttttttgtttgtttgtttgtttctcagcttaataaaagtttattttcacagtgctgcagaggtaagtccccaaactttacaatgctcatttgtttctctcaaaaagatctctttttttaaaaaaaggctttagaataccacaccatgtttaaaatcctgcaagctatttttgaaatctaaattaaattctgacaatgataaaatgtttgccagccaatcaaagtcccaaactaattaacattcaaagtaaaaaagaatcatcattgggatctcattatattttgatagctgtaaaggctgattgacttctgtcattcctagtgttagtgt

SEQ ID NO: 425276 - DNA, 579 bp, Homo sapiens
tatagaaaaattgagtggaaagtagagagaattcccacctatactgcttcctacctccccacagcttcctttataattagcatcttgcattggtgtgttacatttgttatagttgatgaatcaatattggtacattgttactaactagagtccatagttatcaataatgatatcaaacaaactattgtacttgtttatgtatctaccatactcggcttgttattattttagtgtacttgttctatttgtttttttgtttgtttgtttgtttctcagcttaataaaagtttattttcacagtgctgcagaggtaagtccccaaactttacaatsctcatttgtttctctcaaaaagatctctttttttaaaaaaaggctttagaataccacaccatgtttaaaatcctgcaagctatttttgaaatctaaattaaattctgacaatgataaaatgtttgccagccaatcaaagtcccaaactaattaacattcaaagtaaaaaagaatcatcattgggatctcattatattttgatagctgtaaaggctgattgacttctgtcattcctagtgttagtgt

SEQ ID NO: 425277 - DNA, 431 bp, Homo sapiens
catgcctggatattttttgtatttttagcagagatggggttttgccatgttggccaggctggtctcaaactcctgacctcaggtgatccacccgtctcagcctcccaaagtgctgggattacaggtgtgagccaccgtgcccagccagaagtgtttctattctcattggcaggcatttatctatggctttaaaatattggtgatttaaatgcttcagacaktgtattggcttgctagggttgccacaacaaaataccacaaactgaaggtggttaatgagagaatttcaagttcacgagtgtagcattatctcattggcctttctagctgcctacttcatggacaaaaattaaatccctctttgtggataggaaataaaggagaaaaatagggaaattcaggagagtcttcaagactgaagaaatccttta

SEQ ID NO: 425278 - DNA, 598 bp, Homo sapiens
taatcctttctttgtgttacaaacaatccaattgtacactttagtttttgttgttgttgttgctttgttttgttttgagatgaaatctcactctgtcacccaggctggaaggcaatggcacgatcttggctcactgcaagctccgcctcctgggttcaggcagtttttgtgcctcagcctcctgagtagctgggattacaggtgtgcaccagcatgcttggctaatttttgaatttttagtagtgatagggtttcacyatgttggccaggctggtctcaaactccttaactcaagtgatctgcctgccccagcctcccaaactgctgggattataggtgtttgccactgcacctggccactttagttatttttaaatgatcaacaaattattgttgactgtagtcatcctgttgtgctatcacatacttgatcttattcattctattgaactatgttgttatacccattaactgtcccctcttctcccccccactacccttcccagcttctggtaaccatcattctattctctatctccatgtgttcaattgtcttagcttttagctcccgcgaataagtgataacatgcaaagtttg

SEQ ID NO: 425279 - DNA, 514 bp, Homo sapiens
actcgctgccaggcttgaacatatggcccaaggcactgggggtagctggctggcgttttctgccatgaaccattggagscttccccttccctggccaagagattcagcaacatcagaaaataattaaacttttctccctggtggagaaaccacttccataagaataagaggtttttccccaggcagttttaaactattttttttctttccccttctctatcccatccacaagttaacttttaaagtttattttttttcttttagaatatattttgctaggccagtccatccaactatcactgtttatattttctgcgaagttttggttatgaaatcaagcctccatcttgttttacattctgactcttataactttggtggcaaggctttgtttagcaatcctgtcttagggaataagtttctttctggtttgatatctgcatgttttcctagtgctgactcttaaagggccccacccagtgcctgggttttcttctgcctgtgtgtgtgtgta

SEQ ID NO: 425280 - DNA, 540 bp, Homo sapiens
gggcccttcccttcaagtcactgagttcccttctggcccagggtgtgtctagaaatatcatctggtagctagagcctgaaataggggtatcaggactctgcccagtgccctatcctactgtgtcttagctggtatccaagatgtacgacaaagtcttctttacccgtccctcttctctcctcaaatggaggaaggaayatctcctgaagctgcaaactgtgctgcctgaggttgagggaggggtggtgcaagcactcccttggacaccctggctggtgtcttaccaggttgcttgtcccccaaatccagtggttccgagcccagcatagcaccaagacttgcccagtaattgtaatccttgtggcctaattaacttgaaactgcctttcaagtttgtttaggatgctggagtactttagcctgtggtggcaaggcttgccataacttaggttccaactactgggataggtgattcccctctgggtatgtctggtctaaatgctcctctgcagatgtcagctaagttctgccaagtgttgc

SEQ ID NO: 425281 - DNA, 540 bp, Homo sapiens
gggcccttcccttcaagtcactgagttcccttctggcccagggtgtgtctagaaatatcatctggtagctagagcctgaaataggggtatcaggactctgcccagtgccctatcctactgtgtcttagctggtatccaagatgtacgacaaagtcttctttacccgtccctcttctctcctcaaatggaggaaggaacatctcctgaagctgcaarctgtgctgcctgaggttgagggaggggtggtgcaagcactcccttggacaccctggctggtgtcttaccaggttgcttgtcccccaaatccagtggttccgagcccagcatagcaccaagacttgcccagtaattgtaatccttgtggcctaattaacttgaaactgcctttcaagtttgtttaggatgctggagtactttagcctgtggtggcaaggcttgccataacttaggttccaactactgggataggtgattcccctctgggtatgtctggtctaaatgctcctctgcagatgtcagctaagttctgccaagtgttgc

SEQ ID NO: 425282 - DNA, 500 bp, Homo sapiens
taagttctgccaagtgttgctttccactgtgacagggcagcactgagttccagtgcaaaactgtactccccctccctcaagtgcacagattctctccatgccacatagctgctgccctgggatgagggagtggtggccctggaaattcaagactgtctttcctaacctcctcagtgcctctttcagtgatactaagttaaaaccaggtattgtgatcactcatgtgattttggctcttatgaagatgcttttttgtatggatagttgtttgatttggtgttcctgtggggaggatgattggtggaggcttctatccagctgtcttgctctgcctcctcctcgtgtaaatgaaattttagtgctaaggaatttattattgttgacartgggttccctgattacaatggtctatgtaatcactcctggataaatgacatctacaataaattgtctaagatttttactttttctgtttttaaggcagagcaagaaccgaaaaa

SEQ ID NO: 425283 - DNA, 446 bp, Homo sapiens
ttttgaaccagtcacgtttcttctctggtcttcacttttctcttgacatggtgacatcgtcctggaaggctgagcctacactcagaaaggagggaaaagaaagagtcgcatgcaacttttatacaataggtccrcatagacctctgtgtgtcttttcacactaacctgaggaaatggaagagcaggtgaactttccacttgttgaggttggagaaggatgactcctctgcgttcctggtttcccacttcatccccaccccactacgctttcatgcctggcaccaattgtacatgttcaagcaatagtttccatctccggatgttcatcagaaaggtgggtagagctatttttatttcacctttttacaaactaaaaatttatttacacattttaagacaaattcagggctctgccacagtctgagtttagattcactcaagagtcc

SEQ ID NO: 425284 - DNA, 446 bp, Homo sapiens
ttttgaaccagtcacgtttcttctctggtcttcacttttctcttgacatggtgacatcgtcctggaaggctgagcctacactcagaaaggagggaaaagaaagagtcgcatgcaacttttatacaataggtccacatagacctctgtgtgtcttttcacactaacctgaggaaatggaagagcaggtgaactttccacttgttgaggttggagaaggatgactcctctgcgttcctggtttcccacttcatccccaccccactacgctttcatgcctggcaccaattgtacatgttcaagcaatagtttccatctccggatgttcatcagaaaggtgggtagagctatttttatttcacctttttacaaactaaaaatttatttacacattttaagacaaattcwgggctctgccacagtctgagtttagattcactcaagagtcc

SEQ ID NO: 425285 - DNA, 694 bp, Homo sapiens
gccctgggccatacaccaggctgtgcacctgcccttcttccttccatgccctcccggattcccttcaaacacagggagtgacttcacctcgggctacatctgcttccaaactgctcagcacggttctcacccaaacccaccatttgattcagaaattacatgcaggactaattgttgcttgaggctccttatgaaatggggatcatttataacaaaaaaaaaaaaacccagcacaaggcttcaaggtatgaaataaattgttccaggaggagacaacacacactcaaccacaaacatatcatttgagcccaatactacacctcctacccagaaaagcaaaggcctcctattgttaaaaggacagtgaaggtacgtcttcttattttatttttttaacccartaataaaatggaggcaggaagatgaagcagagatgttccagatgttccaggtgctgagaacagggctggttgtgccctgagaaatcacagcaagctctcctctctctggatgtcagcttccgcttgttttgaaggaggagagaggttacctgcagactcctctcgtggtaagagccataatgtagttttctcattattaaaatgcttgcctgctcccagggcccctgggaggcctaaatgaggaaccaaacgagaggctcttagcacggggcccagcgctaataagagccagt

SEQ ID NO: 425286 - DNA, 614 bp, Homo sapiens
tatcacctgcgaataagggtagtttttcttcttattctttcaatttctgtttttttcctttttttatgttgtagcattaaacaggatacttggtactatttagtaaaatgacagcatgtatctttatcttgttggcaatcttaatggaacatatttgaatttttttcattaagtttaacttttgtcyaagttctggcaccaaacatttatcaagttaaggaaagattttttaaattactttttttctgaattaacaaaaatcataattaggtgtcagattttattaaaaacatattctggatctattgagataaccatataattattcttaggacattttcttcagtacattaatctagtgagttacattaagagcttttctgaggttaagccatctttatactgtgaaatatactctactttgtcattattattttagttacatgattggatcttgttggctaatgtttctctaggatattgtatttttctgttcttatctactttttcaatcgaggcatatttctgtcataaaatatattagacagcttttcctctttctgctttctgacacagcttgtgtaaggtaggaattatctcttacttaacaattt

SEQ ID NO: 425287 - DNA, 564 bp, Homo sapiens
tcagcatctagctgttttccctcaacctttctgaggggcacctgcagacagtccatgggcagtctgctggcttcctgtgtcacctgtctgagtttgttctctgtcggttgaagcatacttggtctatggacatgtggaatagcctgaatgtgctcatgttaatgtccctgagcaaccctcagccaatgggagtgggagttactgggtaaacattccagcttccttgcttctcagrgtgacaactgtaaggtgtgttctacacagtctgtcaagtggttctagaaagatggaagccccaactagtcacagtgtccaactcattagcgtgtccatatattggctttcctctcatccttgctttccacattctccattccctcatcatgcttcctgggatcacctcccaaagaaactgcttgcaccaaacctttgtctcaggctctacttcaggggacccccagctaaatattattaacgttggatagagtctcagaagcagaattactaagttaaaccagatggattccttaaagattcgggacacatatagattggcaagtaatt

SEQ ID NO: 425288 - DNA, 650 bp, Homo sapiens
gggagaaagtgatgcagccaaagcattgcacagctagaggggatactggaaaacaatggaggcacacagagacatggaaggggcccctgggctgttgccacaatgctgccctcaaagcatttacccagaaattatgcacacacaccacatctggaaatcatcagacttttttgyggggtgaggaactaaagatcattcagtcattcattccacaagtgtttactgagcacctactatgtgcccagcagtgctctagggagtaaagaagacaggttgggttccagccttgtggagttacattttcacaatgaaattgctcagtcacgtggctggtcttcagataaattcctaaaatcttcattgatcagagaagacatcctgcagggaagtccctgctttttcttgtggtctcatagcccccctgcctgttccattaacttccacttttgggaggaaggagcaatggaaatgccttgttaactgggcatgagcccttcccagctctgctgcaaggccccaagctcagttcagtatgttcatatccactggaaattcattggtactgcacgtcccattctctgacctggaaggcactaggatgcccccacatttgtgaaaggaatgcatttttgagcatacgtattgaagag

SEQ ID NO: 425289 - DNA, 605 bp, Homo sapiens
tgtgtttcgttgttgtgcataggaaaggggaaattctgggagaactgggagagtttcatgcttttgaagggctccagtttggccaggaagagattttcttttcttatctgtgggccaggagcccaggcctcctgccgcctcctagcgttcttccagaggcctccagattcagctgcaggactcctttcgggggaaggtttgatctccccatctgtaccatcttggggtgtcttggctgaaaacaattctccaggcttgtgaagaaatgtatttgtctaatctgtgtttaagtgaaatttgtagtagttgatggattaactccatttaacaagggtttgtgttgcaaaatagttgrcctccttgaaaaattaaaaacagagtcagggttttaaatgctgagtcacacactcagctggggtggcagaagttgtgtgtcagccttctgatattaaagacagttaggaagcctgacccagggagggtcagggaagattcttgcaagatgggcttttgctgtgaactctgcacaaacatgttcctttgactgaaaagaaatgacgggaccaggtaagtttaaaaagaaaaaaggtggctacttgaataga

SEQ ID NO: 425290 - DNA, 594 bp, Homo sapiens
tttgtctaatctgtgtttaagtgaaatttgtagtagttgatggattaactccatttaacaagggtttgtgttgcaaaatagttgacctccttgaaaaattaaaaacagagtcagggttttaaatgctgagtcacacactcagctggggtggcagaagttgtgtgtcagcyttctgatattaaagacagttaggaagcctgacccagggagggtcagggaagattcttgcaagatgggcttttgctgtgaactctgcacaaacatgttcctttgactgaaaagaaatgacgggaccaggtaagtttaaaaagaaaaaaggtggctacttgaatagacggtacttttagtaagaacaagcaaacacttgatactttactcaaaagttgagaataagcccttagatggagtctaagtcatggaagatttgattgaagcaactcatagattagaatggaatcagcaacctaatagggaaacagtttttgcaaaaattacattggcaagggaaatctgacttaactgactccatcttgcttctacttggctaaattgctcttgctcattcttgtgcagaggccatagtggtcctttcct

SEQ ID NO: 425291 - DNA, 596 bp, Homo sapiens
acctaattgaccctgtaccatttattgaaaatactatctttttctcatgtgctttagtggcaactttctcataaattaggtgactatatatgtgtgagtccattttttggatcttctgttccctgggttaatttttctcttcttgcaccaatactccactgtcttaattccttcagttttataataaggcttgatatctgatgtgtaacctcaaaattgttcttgagactttcttggctattaatggcccttcacattcccatgtaaattttaaaatcagtttgtttccacaaaaaataaaaacaaacttgctgggcttctgattggaattgcactaaatctagagatcaatttgggaaggatttacatctcatcgataatgaggatttcagttcaagaaagtggtatttacttaggccttctttaataactctcagtaatatagttttttgtatgtcttgaacatttttattakattaattttaggtattgaagtttctgatgctgttgtaaatggtattaatagttttttaaaaattcagtgccaaattggtttttgctcacatatagcataccattgattttaatttgtatcc

SEQ ID NO: 425292 - DNA, 541 bp, Homo sapiens
tgcagtgcgatctcagctcactgaaacctccacctccagggcccaggtcatccccccacctcaacctcccaagtagctgggactacagaagtgtgccactatgcctgggtaatttctgtattttttttggtagagatggagtttcaccatgatgcccaggctggtctcaaactcccggrctaaagagatccgcctgcttccgcatcccaaagtgtgagggttacgggcgtgagccactgcacccagccttgtgtgtgttctcaagccagtatcaaaataagcggcccacgttcagaaagctgactgtagcaattagtaaaatacaagtggtttctggaaaggagcagggggcatgtattgctcacagaaaatggacagagggaacagccctagacaacacctccacagacactgaacagtgccaagcagcactggcaaccctgagaaggagcaacagagcaggcccaggtctttggacacagaacccagccagcctgctcctgcagcagacccagttatatcaggctgagttggtcatttc

SEQ ID NO: 425293 - DNA, 450 bp, Homo sapiens
tccctgtacttgggtagctcatggtattcatatttgtcttagatctttcttccttggatattacaaagtggaagcttatgaagtgtgaaaattaaccaaaggatcttagaatccttcagattattttgagtcattcaytatacttaataattgcattcattgtattttactaaaactatgtgtatgaagcatgaaaatacatttgttcttgaaagaagggaacactcaaagtatatggtacatttggctctttcttatcttgcttctctgctacctaggccaacactgattcttggcgatggggtctctgagaggaaacatccttagctacacgatcctgtgggtatgacaacagtggagtcagttggggctgtgattcaaaccccgccacagccatactttgaagcctgggtctgaaactgggccctcattgaagtatcttcaatgtgt

SEQ ID NO: 425294 - DNA, 549 bp, Homo sapiens
aggtattttgatggactccatccattgatcgacaatgaataggttcaaatattcctaaatatggtcacacttgattttcctatcataccccaaggttttacatttgtatttcaaccatgctggcacatgtaacaggaaacccaacttacctcagacctaaatatcaatagtatgataaataaaagtgagactgtcattctctggcatgacccacataaaccaaatttctaaaaactgaagaaaaggttacctcaaatagcctattaaaaaatactgtagaaagataaccattaaaaactactgtcacacaatgtcaaagcttatatattgttttctcagataatgatcaactcctagcttgtttccagtgttaaatgtaacaagactagtacactaaacgaattcacctcacactcagattggaatacggtttatayctcatcatcctataaagactgataagtcaacttaaactataaacaagttacttcgggtccctaaatctgtaagaaaatcctggtgcttatcagttcaactccccaaactgaa

SEQ ID NO: 425295 - DNA, 548 bp, Homo sapiens
tagccaagcaggagaagcccagtggcgttcagaacacagagtcaaacacagctgcttctgcctttcctttcccaaacctctcccaacccgtaatagcttccttcccaaacactcttcccctgtcctctcctcagtccatcacccttacmtgccctcactctcagatgctggctgggggatttcttctcttccctgctcttttgttccaagtcacactgtctgcaaaatgttttctattctagttttgcaataacaggcagcagcagagatttccgagttagcagtgctattactgctggaggccaagaggctggagagaggaaataaatagtgttatatcctcctgaggccaccagcagagccagttgttgtggtgaggggaggaagggagggaagtgagagattcacctttgcttttctgggcactttccttgggccaggaaatctgttgaattgacagaatgatggggccaggtgggacctgagtcttcattaatccagattggagtttgcaaggaagctctccgccggaaatgcgatgctttagt

SEQ ID NO: 425296 - DNA, 548 bp, Homo sapiens
tagccaagcaggagaagcccagtggcgttcagaacacagagtcaaacacagctgcttctgcctttcctttcccaaacctctcccaacccgtaatagcttccttcccaaacactcttcccctgtcctctcctcagtccatcacccttacatgccctcactctcagatgctggctgggggatttcttctcttccctgctcttttgttccaagtmacactgtctgcaaaatgttttctattctagttttgcaataacaggcagcagcagagatttccgagttagcagtgctattactgctggaggccaagaggctggagagaggaaataaatagtgttatatcctcctgaggccaccagcagagccagttgttgtggtgaggggaggaagggagggaagtgagagattcacctttgcttttctgggcactttccttgggccaggaaatctgttgaattgacagaatgatggggccaggtgggacctgagtcttcattaatccagattggagtttgcaaggaagctctccgccggaaatgcgatgctttagt

SEQ ID NO: 425297 - DNA, 548 bp, Homo sapiens
tagccaagcaggagaagcccagtggcgttcagaacacagagtcaaacacagctgcttctgcctttcctttcccaaacctctcccaacccgtaatagcttccttcccaaacactcttcccctgtcctctcctcagtccatcacccttacatgccctcactctcagatgctggctgggggatttcttctcttccctgctcttttgttccaagtcacactgtctgcaaaatgttttctattctagttttgcaataacaggcagcagcagagatttccgagttagcagtgctattactgctggaggccaagaggctggagagaggaaataaatagtgttatatcctcctgaggccaccagcagagccagttgttgtggtgaggggaggaagggagggaagtgagagattcacctttgcttttctgggcactttccttgggccaggaaatctgttgaattgacagaatgatggggccaggtgggacctgastcttcattaatccagattggagtttgcaaggaagctctccgccggaaatgcgatgctttagt

SEQ ID NO: 425298 - DNA, 595 bp, Homo sapiens
tttctcaattagatcattatttgtgtatagaaatgctactgatttttgtagtttgatttcatatcctataactttattaaattcatttatcaaatctaagaggtttttggtggagtctttaagttattttagatataagatcatatatttagcaaacagggataatttgacttcctcaattccaatttggatgccttcccatttctttctcttttcactctggttaggactttcagtactatgtagaataggacaggcaaaagtgggcatctttgtcttgcttcaggtcttagtggaaaggctttcagcttttcctcactcagtaagatgttagctctttgtttgtcacatatggcttttattgagstatgttccttctatgcctagatggtcgagtgtttttttgtgaagagatgttgaattttattaaagacattctctacatcatttgagatgatgttatgatttttgtccttcattatgttgatttaatatatcacatatattgatttgtgtatgttgaaccatctttgaatttctaacataaaactgaattaatcatggtgtattaccattttgatgtgctgttggattc

SEQ ID NO: 425299 - DNA, 582 bp, Homo sapiens
gagttctcaaaatttggaagttcagagagtggaagcaatggatgaggaatacttagtttgaattaggrctggggtgttgatgtgatgcagaattgacaacaataaggggaaagttttgaatactgagtacaagagatcatcaatatacaaaaacatattactttctaacaagtccctaggccagcaataaattaattatgcttttagagtctccaagtgacctgtgtcatgttaaacattgtgtagttaacaccactgaaatagactagattctctcaacatgtgtagacaaagacagtcctctcccttggtaacatcagcttcacacagttttctaagcttgccatgttgaaaattactcttaagtaagaagaacagtgcagtcacaaaccagtattaacatttccatctcttgacttgagcttggttacttagcattaataaggtagtatatcctatcttattaatgatagtagccatattctacttgctgggctcaaatctaaagagcaccccttctacatcagaggcaggccacggcattttcctgcacctcaccctcagaaacagattcacagccac

SEQ ID NO: 425300 - DNA, 582 bp, Homo sapiens
gagttctcaaaatttggaagttcagagagtggaagcaatggatgaggaatacttagtttgaattagggctggggtgttgatgtgatgcagaattgacaacaataaggggaaagttttgaatactgagtacaagagatcatcaatatacaaaaacatattactttctaacaagtccctaggccagcaataaattaattatgcttttagagtctccaagtgacctgtgtcatgttaaacattstgtagttaacaccactgaaatagactagattctctcaacatgtgtagacaaagacagtcctctcccttggtaacatcagcttcacacagttttctaagcttgccatgttgaaaattactcttaagtaagaagaacagtgcagtcacaaaccagtattaacatttccatctcttgacttgagcttggttacttagcattaataaggtagtatatcctatcttattaatgatagtagccatattctacttgctgggctcaaatctaaagagcaccccttctacatcagaggcaggccacggcattttcctgcacctcaccctcagaaacagattcacagccac

SEQ ID NO: 425301 - DNA, 412 bp, Homo sapiens
ggcttatagataaaactcccatctcactgtactgagaacctggaagaaggggtggcagtgggtgcagcttcggcagacttaaatgttcctgcctgctggctctaaagagaacagcagacctcccagcaggggtcaacagacacctcatacaaaagagctttggctggtatctggcaagtgtccctctaggaygaagcttccagaggaataaacacacagcaatctttgctgttctgtggcctcctctggtgatacccagtcaaacaaggtttggagtggacctcaagcaaactccagcagacctgcagcagaagggcctgactgttaggaaaaaaactagcaaacagaaaggaatagcatcaacatcaacaaaaaggatgtccacgcaaaaaacccattcaaaggtcaccaa

SEQ ID NO: 425302 - DNA, 412 bp, Homo sapiens
ggcttatagataaaactcccatctcactgtactgagaacctggaagaaggggtggcagtgggtgcagcttcggcagacttaaatgttcctgcctgctggctctaaagagaacagcagacctcccagcaggggtcaacagacacctcatacaaaagagctttggctggtatctggcaagtgtccctctaggacgaagcttccagaggaataaacacacagcaatctttgctgttctgtggcctcctctggtgatacccagtcaaacaaggtttggagtggacctcaagcaaactccagcagacctgcagcagaagggcctsactgttaggaaaaaaactagcaaacagaaaggaatagcatcaacatcaacaaaaaggatgtccacgcaaaaaacccattcaaaggtcaccaa

SEQ ID NO: 425303 - DNA, 420 bp, Homo sapiens
ctggacagagaaagaatttgatgaattgacagaagtaggcttcagaaggtgtgtaataacaaactccactgagctaaaggagcatgttctaacccattgcaaagaagctaagaaccttgaaaaaatgttagacgaattgctaactagagaagaacatgagtgacctgatggagctgaagaacacagaatgagaactttgtgaagcataaataaatatcaatagccaaattgataaagcagaagaaaggatatcagagattcaagrtcaacttaatgaaataaaatgtgaagaaaaaagttaaaaaataagaataaaaagaaatgaacatagcctccaagaaatgtggtgctatgtgaaaagaccaaatctacgtttgattggtgtacctgaaagtgatggggagaatggaaccaagttgt

SEQ ID NO: 425304 - DNA, 420 bp, Homo sapiens
ctggacagagaaagaatttgatgaattgacagaagtaggcttcagaaggtgtgtaataacaaactccactgagctaaaggagcatgttctaacccattgcaaagaagctaagaaccttgaaaaaatgttagacgaattgctaactagagaagaacatgagtgacctgatggagctgaagaacacagaatgagaactttgtgaagcataaataaatatcaatagccaaattgataaagcagaagaaaggatatcagagattcaagatcaacttaatgaaayaaaatgtgaagaaaaaagttaaaaaataagaataaaaagaaatgaacatagcctccaagaaatgtggtgctatgtgaaaagaccaaatctacgtttgattggtgtacctgaaagtgatggggagaatggaaccaagttgt

SEQ ID NO: 425305 - DNA, 420 bp, Homo sapiens
ctggacagagaaagaatttgatgaattgacagaagtaggcttcagaaggtgtgtaataacaaactccactgagctaaaggagcatgttctaacccattgcaaagaagctaagaaccttgaaaaaatgttagacgaattgctaactagagaagaacatgagtgacctgatggagctgaagaacacagaatgagaactttgtgaagcataaataaatatcaatagccaaattgataaagcagaagaaaggatatcagagattcaagatcaacttaatgaaataaaatgtgaagaaaaaagttaaaaaataagaataaaaagaaatgaacatagcctccaagaaatgtggygctatgtgaaaagaccaaatctacgtttgattggtgtacctgaaagtgatggggagaatggaaccaagttgt

SEQ ID NO: 425306 - DNA, 595 bp, Homo sapiens
ttggcaaaaattttagtgtcatcattgttttgccttttccagtatgtcatatagttggaatcacacagtatatagctttttcaggttagtttattttagttactggtatgcatgtttctcctatgtcttttcatggcttgacagctcatttctttttaacaataagcaatattccattgcatggatttaacaccatgtttattcacctattgaaaaacatattggttgcttccagtatttggcaatgacaaaaagttgttaaaatcacccatgtgygggtttttgtgtagaaataagttttcaactcatttagataaatactgagatctcttggtgctgagatgaagctgtccctattcgatttggactggtcccatattggaaagaagtgatcggtgactaggagtcagtgccaaaactcttttagccacatctgggcaacaaagaagtttcagaaaagtggtccccaggctgtctgcctggagtttactgttaagtttaattttgtctgttctgtagataatggctataatctcaaagtgctgggccagcattcttctgttaggaattgcacttctgcagaaatttaacaagt

SEQ ID NO: 425307 - DNA, 556 bp, Homo sapiens
aatggggtcaagtgcaatggctcaagtctgtaatcccagcactttgagagaccaaggtgggtggattgcttgagtccaagagttgaagaccaacctgggaaacataatgagaccacatctctacaaaatattaaaaaattatacaggcatggtggcatgcacctgtagtcccaactacttgagggactaaagtgggaggatggcttgagcccaggagctcaaggctacagtgagccatgatcccatcactacactccagcctaggcaacagagaaaaaccctgtctctgaaaataaataaataaataagttagtaaaatgggcaaaggatttgagtagacatttttcaaaagaagacatacaaacagccaataaatatattttttagtactcaacaaatttaatcatcagagaaatgcaaattaaaaccacaatgagatatcayatcacaactcttagattggctattattatgtgtattgtaaaacagctataaaagagaggattttaaatgttcttactacaaagaaatgacaaatatttgagatgatggatat

SEQ ID NO: 425308 - DNA, 561 bp, Homo sapiens
gggactaaagtgggaggatggcttgagcccaggagctcaaggctacagtgagccatgatcccatcactacactccagcctaggcaacagagaaaaaccctgtctctgaaaataaataaataaataagttagtaaaatgggcaaaggatttgagtagacatttttcaaaagaagacatacaaacagccaataaatatattttttagtactcaacaaatttaatcatcagagaaatgcaaattaaaaccacaatgagatatcacatcacaactcttagattggctattattatgtgtattgtaaaacagctataaaagagaggattttaaatgttcttactacaaagaaatgacaaatatttgagatgatggatatgctaattatcctgatatgatcaattcacaatgcatacatgtatcaaaatgtaaaattrtaccccattaatatatacaattgtcatttatcacttaaaaataaaataaaactttaagaatcgtgaggttaaatacaccttatacattactagaggagcataaagcatacttacattggttaaggattt

SEQ ID NO: 425309 - DNA, 385 bp, Homo sapiens
gggagactctaggagaacagatgacctgtccagtgtcccacagctcataaatggcaggctgggatttgaactgagatcttccgatgcccactgtggtgctttatcatttacaccagaactgccttgagaacagttttagtaaaattaaataaatcctacaaccattcatcactctgaatgtataccacactgttcacaaaataacagggctgtacattctcaagagaagtaaaaacttgtgtttctcccctctctgtcactgcagaggtgaatcctactcagtataactgaggaaagagccaatctcagagaatttagtgggtaagatctcagaaactayggcttctcaacctcccagttgcctccagacacagctgtttctgtt

SEQ ID NO: 425310 - DNA, 584 bp, Homo sapiens
ccacctgccttggcctcccaaagtgcagagattacagacgtgaggcaacttacgtgacctccgctatttctcatagcaatgcaagaactgcctactacaggcagttcctaatgttggattcacatacaggaaacctgagactctgtggtggtcaaacagtctgcagtttctacagtctcattacaaactttgatctgrctgacaccaaggatctgtgacacagttctgctgaggagtctgacagctgctttgctgaaaatgtttgtggctctggaccaggctcagaatcagcacagcctcatctgtcatttgtagtgtaagaagggtctgagcctcagacccaggacttcttgcctaaattcctgagacctcagctgtgctttcttctctcacaccttcccacatgccaatcctggggatatgcttgactctgtttcagccccttgtggctgctgagcagagctacttctgtactttgtcctcaagcagcaaagtcccacacccaagcttttgggaaagatgcctatgatgacattaacaggtgaagcccaaagacagcattttggcaaggaggtgatatgggg

SEQ ID NO: 425311 - DNA, 556 bp, Homo sapiens
atggggtctcaccatgttgcccaggctggtatagaactcttggactcaagcgatccacctgccttggcctcccaaagtgcagagattacagacgtgaggcaacttacgtgacctccgctatttctcatagcaatgcaagaactgcctactacaggcagttcctaatgttggattcacatacaggaaacctgagactctgtggtggtcaaacagtctgcagtttctacagtctcattacaaactttgatctgactgacaccaaggatctgtgacacagttctgctgaggagtctgacagctgctttgctgaaaatgtttgtggctctggaccaggctcagaatcagcacagcctcatctgtcatttgtagtgtaagaagggtctgagcctcagacccaggacttcttgcctaaattcctgagacctcagctgtgctttcttctctcacaccttcccacatgccaatcctggggatatgcttgactctgtttcagycccttgtggctgctgagcagagctacttctgtactttgtcctcaagcagcaaagtcccacac

SEQ ID NO: 425312 - DNA, 543 bp, Homo sapiens
aaaacatactctgctagacacagggtcatggaatttcaggacaccagaattaaagggaaaatcacaaaaactttcagagctataccaggtcatattgaaagaattaggattcagaattctcaagaggaactattaatattatttagcatattaatagaaatagtgtgttttcagacttgcacatttgccaaaattttaccttctattgtccctttctcagaaaaatattggagaatgtgcttaattcaaatgcctgaagcctagttatagaaagtcctgagctccagcaatcagacctcayataggacaatgagagtgtcagggaggctgccttgcaccaggcctagaaaacaactacttcagaatgaacctggtggataattcagaagtgagatgagacagcaagaacaagagatgtgacagattttatgagagtttccaataactaaaaaggagtttcaaacatctgcctgaacatttgtaagtatttctaacttgggaaacagaaaattacaaatagaaataaagagatgtggttaagtt

SEQ ID NO: 425313 - DNA, 580 bp, Homo sapiens
attttttattgaagtttttcatcattttgatgtaggaacttgtaactataaacttccctcttagtactgtctttgctggagcccctagattttggtatgttgtgtttccattgtcagttatttcaagaaacttttcactttcctttttcatctcttcatggactcactagtcattcaggagcaaactgtttcatttctatgtatatgtatagtttccaaaattccccgtgttattgattcctagttttatcccattgcagtcaaaaaagatacttgatatactttcaaattgtgtggatgttttaagaattgttttgtgacctaacatatagtctatccttgagaatgatccatgtgctgaagaaaagaatgtgtattctgtagctcttgaataaagtgttctgtaaatacctattatatatatttgttctatagtgcagattcagtctgatgtatctttattgattttctgtctgaaattctgtacaatgttsagagtgcggagttgaagcctcctcctatcattgtattggggcctatttccctctttagctctaatattttctttatatatctggct

SEQ ID NO: 425314 - DNA, 499 bp, Homo sapiens
ttgttttttggtcttttcctccctctttttttttttcttgtcttccttttaatgaaggttattttctctagccatataagttagtttcttgcttttaacttttgtgtctccattgtactttttttttgaggttacatggagcttgcaaatactatcttataacccattattttaagctgatatcaacttaataytgtgtacatttaaaaaaagcaaaaagagaactaaaataagactatacaccttaatttcatttcccccatatttaaaatcctttttggttgcttttgagattgtcttatggttggctttatacattttatttatggggtacattcgtgtaaatttctttatgtttcttgtacttagagcttgttgagttacttggatcttttggcttatagttttaatcaaatttgaagaaaatatagccattatatttcacatactttttttacccacatttatgagctatgattgcatatttttaaatttaatt

SEQ ID NO: 425315 - DNA, 619 bp, Homo sapiens
ggatggtcagaggaattattactagcactgtgtaagcccttgtgttgtttcctgtgctcttttaattggggggggcattagttttatttatttattttttaaatgttacaaatttatttattctttttttatttttccataagttgtcagggtacaggtagtatactgctgaggggaattcagccagaattgtttggaggacagtccagccactggccagccctactccaggggaagaccaccttcccaaccatctcccttctaactcctcactcacctctataggagctaccatcaccacacaataaaactttgcattcatcctccaaacccacatgtgatctgatttctccagtaactagrgcaagaacctgggatacagaaagccctctgaccttgcgataaggcagagggtctaattgagctgattaacacaagccatctgcagacagcaaagttgaaagagcacactgtaacacaacccggttgggcttcagtagttacagacacccctagatgctgctgtggtgccagagcctaaaaagcactccccatggcctctgtacctgcctgtcagcatgctcccacttgcggtttgagcagtgaagcaccaaggaag

SEQ ID NO: 425316 - DNA, 584 bp, Homo sapiens
aggatttcttgattcttttctttttttttctctttgtactcttctgaccagctaatttaaaatgaacttgcttttgaatttcctgtttcttcttcttaataaaatctgctgatgaaaaaaataaataaataaataaataaaatgcccacaaycacatttgaagtactgagtacttgcgtacttgggtgcaaccttctgaatctgtccttttcatcaagcttgggctttagtgcctgtccactcctgctgctctatttcatcacttcagttttcacaaatcttatgtgtagactatgacttaaaggcacaagacagggatgttctctctcaccactcctattcaacatagtgttggaagttctggacagggctatcaggcaggagaagggaataaagggcattcaattaggaaaagatgaagtctaattgtccctgtttgcagatgacatgattgtacatctagacaaccccatcgtctcagcccaaaatctccttaagctgataaacaacttcagcaaagtctcaggatacaaaatcaatggacaaaaatcacaagcattcttatacaccaataacagacaaac

SEQ ID NO: 425317 - DNA, 535 bp, Homo sapiens
tttttgttctgtttttcttactgcttacacttgtagcagtgtctgggaaatgatagctgcctgataaatatttgttgaatgagccttaatatttaacaaaaacagtacaataatctggagatgtgttaggagttctttaagaagttaaaccagcatctgtcctatgacccagcaattccactcctaagtatttacctaaaagaaatgaaaaygtgtcgaataaaagtcctgtacaagtgttcatgttatcctcattcctagtagctgttaaccaaaatgtgactgagtcagggctcggttgattagaggtttatttagccaaagttgaagaaatgcctggggaaaaaagtacaaattgtaggagcatctgtgacttacgctttttcccaaaggaggttttggaaattcggtatttaaaggggaatgagcaagcaagagaaggagaaaaaggagtgaggcaggccatgaggcagatggttacattcttgtgatgctctgatgaacctcagtgaatctacattttacatgtgaaaag

SEQ ID NO: 425318 - DNA, 277 bp, Homo sapiens
  misc_feature (1)...(277): n = A,T,C or G
nnnnnnnnnnntttgcttttgttgcaattgcttttgacgttttcgagctagactggtattttaagttgtccttaaataatctcacactctgggccatgacaacagccttctaactggcctccttgcctgctgtctctgyccccaccccattcccttctccactgagctacaatgatctttccttctcgactgcagggcagcttaatcctctgttcaaaagccttccaggcctcctattgtccccagtataaagcccaaatgcattaatgaggcttaa

SEQ ID NO: 425319 - DNA, 544 bp, Homo sapiens
gaactttccagatcttctttgtgctctgctgaagccaagagagagctagggtgggctagaatgaggctatctcaggccctggctatacaggcacccacttctgcccatgctgcccattagtacccaaacctgatgtacacggcaccctttggaaatgcagacttttcccacaggctgtggctctcccaggctgtacctggggaagcagagcaccagccatggtcttgctaggtttctccaaagtttccttaagttcctagcgcatgcgcacacccagcccagccwggggttttgatttggttgtgggagggaattcaggacactgtcacacttgcccatcctctcttcagccctcttctcagctcctccctccacggaaagcaccttctatcttccccttctctccagcaagaactgtcctcatatcctccttcttccttgttctttaccctttgccttccctttcccaggtccaaaatgacaaaaggattataggagcagaaacaagatttccaaccaaggaaaaatatggaaaagaaaggga

SEQ ID NO: 425320 - DNA, 578 bp, Homo sapiens
gtaatttttgggtaagaaaaatacagcagggtatttgctttttgagaaaagtgagtaatttagccagaagtatcaaaatcactagttaacattcatggctcaattggttttgctactctacctcccattaggtcatctcccctgtctctcctcaaaattgctgagtggcatagatctttctaaaggttaattaaaattgagactaagaaatgtgtrcaatcatttgagacgctccagctatcaggaaagtcaagaaatcaagttcataaacctctgatctaaaaaaaaaaacaaaaaatgacattaattccatactgcacagccagaatggtaatcaagtagattgctgatttgcttccctcaaacgtctaatattagtttattgcacatcaacttatagtcttttctaccttaatttgcagcttttatgaactatcatcttaataaaagtccttccaggcaaacttaaaatattaaacaatataacttctctagtattactacaggaactttatatattgctttataaaatattataatatctaatctcacttttgtttgctgagttaatcttccat

SEQ ID NO: 425321 - DNA, 434 bp, Homo sapiens
caaggctgagtttctttccccaggtttccaacactgccccagccctgattggctgtttataaatatttgttgaacaaatttataaagttctggtacataaaagctccccctgtccctctctgttttgaggttggaagttgagagcttccaccaaattctcagatggacccgccccmaggggagagattcgaacaaacctcgacctggcagctgagggggccgctacagcactctccgtcttcagcttcctcctcacacctgaggagcctcctcgccgccaactaatctttgtactccctagagccctccccggaccctttaaccacagctgctcaccatctccggtttcagccggcgggagccagttcccacgcctcccagcgccaggggatcccggctggtacgaacacacaaacccgacaccgggccgcgca

SEQ ID NO: 425322 - DNA, 605 bp, Homo sapiens
aagatggataagtgatatgaataagcatttcttggagaagaaaatacaaacaatgaacaaacatttgagaaaataaccaaccttaatagtaatcagataagtgcaaatagaataaaataagttttggtgttgtttttatttctgctgtttttctgctttgctcatctgctcatcatattgagggaagagaacgttgtgagttgatagcagccagtgtagggtgtagagaaatgagaatgtcctatgtcattggtggaagtgtgaaagactacaacatcttgagaaagtaatctgtcaggacttgttaaaatagaaaagtgcattctttcactcacagtttagctttggggatttatcctacacaaagaaatgcattaggacatgtagatataagcaatggatgtttcctgaacattatttgtagtggcaaaaaatggaaattacttaaaagtctatcaacagcggacaggttgagtaaattctgctacatccaaactggggaatattatacagctattgaaaaaaaaaagtctattagatctggaarggctgatcttgaatgatatccatgatctattataatgtgaaatgtcaaatcacagagt

SEQ ID NO: 425323 - DNA, 620 bp, Homo sapiens
cagccagacctctgctgctgttctgggcctggctggggcaacatggagcctctgaccctttgagaagaaatcatctaagttaggaggagccttggactgggtgtggggatgcttttgaccctttccaccaagccatagcatccatgtactgtgctgtgacttggtaatagtgcaaccaccttaggttcagatcctggccctgccgtttactagctgtgtgaatttgggcatatcattcaacctctctgggcctcattttcctcatgtgtgtaaatggagccaccaagagtccttacttcatagggatgacatgaggactaactgagataacccatctgcagcaggcaacacagccctggtgtgaaggaggcgctcaataaacatgggctattattaatccattatcctgayggtatctcacggtactgctcctcacattatgactctagattttacctaccaggctgtttcgttttgagacggagtctcactctgtcacccaggctggagtgcagtggtgtgatcttggttcactgcaacctctgactcctgggttcaagtgattctcctgcctcagcctcccaagtagctgggactaaaggtgcgcaccaccacggctg

SEQ ID NO: 425324 - DNA, 620 bp, Homo sapiens
cagccagacctctgctgctgttctgggcctggctggggcaacatggagcctctgaccctttgagaagaaatcatctaagttaggaggagccttggactgggtgtggggatgcttttgaccctttccaccaagccatagcatccatgtactgtgctgtgacttggtaatagtgcaaccaccttaggttcagatcctggccctgccgtttactagctgtgtgaatttgggcatatcattcaacctctctgggcctcattttcctcatgtgtgtaaatggagccaccaagagtccttacttcatagggatgacatgaggactaactgagataacccatctgcagcaggcaacacagccctggtgtgaaggaggcgctcaataaacatgggctattattaatccattatcctgatggtatctcacggtactgctcctcacattatgactctagattttacctaccaggctgtttcgttttgagacrgagtctcactctgtcacccaggctggagtgcagtggtgtgatcttggttcactgcaacctctgactcctgggttcaagtgattctcctgcctcagcctcccaagtagctgggactaaaggtgcgcaccaccacggctg

SEQ ID NO: 425325 - DNA, 590 bp, Homo sapiens
gtagggagggatgcagaattcgtgtttaatgggtacagaatttctgtttgggaagaggaaaaagttttggaggtggtcacggttgcacaacaatgtgaatggacttaatgccactgaattgtgcactcgaaaatggttaaaattgtaagatttttgtatgtatattttaccacaataaaaatatacataccagccgggcacggtggctcatgcctgtaacccagcactttgagaggcccaggcagacagatcacctgaggtcgggagttcgagaccagcctgaccaacatggagaaattccgtctctactaaaaatacaaaattagctgggcgtggtggcacacgcctgtaatcccagctacttggaggctgaggcaggagaatcgcttgaacctgggaggygcaggttgcggtgagccgagatcacaccattggactccagcttgggcaacaagagcgaaactctgtctaaaatacatatatatatatatatatacacacacacatatatacatatcataacatttgctgttttagcccttttgactgtgcaatccagtagtggcattaagtccatgcatattgttgtg

SEQ ID NO: 425326 - DNA, 552 bp, Homo sapiens
caactggtaagggtctttgtgctgcgtcatcccatggcagaagtggcagaaggtggaagggcaagacagtgtgcaagaaagagaccagaggggcccaaactcacttttataacaagcccactctcacaataacactcatcgccctcatgacctagtcttctcttattagaacccgcttcctctcactgttgcactgggggtgaagtttccaacatacaatctttagggggccattcaaaccatagcaggaggtaaacaaatagtcgcttgggaacaacttggttaaaactcacatggtagcattgaaagtccagggtcttccttccaacagaacaatctgatattggaaagtgtctacagattcctaaaggaattctaggactttgracaacatctgcagatgatgagcaattatttaaggaggaagttctttcctaaattgtaggttacaagaagagctctcccttctataacccaaccttgacaaaactttagccctgatatttgagttgtagctttgtattacaatccaattgtggtttgccagcctta

SEQ ID NO: 425327 - DNA, 593 bp, Homo sapiens
gggccattcaaaccatagcaggaggtaaacaaatagtcgcttgggaacaacttggttaaaactcacatggtagcattgaaagtccagggtcttccttccaacagaacaatctgatattggaaagtgtctacagattcctaaaggaattctaggactttgaacaacatctgcagatgatgagcaattatttaaggaggaagttmtttcctaaattgtaggttacaagaagagctctcccttctataacccaaccttgacaaaactttagccctgatatttgagttgtagctttgtattacaatccaattgtggtttgccagccttatgtgtttcagggaatgagttgagcctacatgaacatagtctgcttaaggagtttgcaaacaggaacataagttgtgatgaaaagtggaaaattaatatttattaaatattattatgtcagggacaacctttggttctttatctaagcatcacaaccaagctttaccagagttccttgggcaagtgtaaatagaaaagctgatgttttgaaaacaaacatgaggtgactaattcaaggccaaaaaattggcaagtgatcgaccctgaaa

SEQ ID NO: 425328 - DNA, 621 bp, Homo sapiens
ttaacttctgtcagacacagatccctcactccccaaatggagatattaatatcaatctgaccgagttgttcttgggattaaacgtgatattttcttgtacctggttatgccagatgctcaacaaatttaagttaaacggaataacagctacaacactgagcaactgtaccgttcttaactgctttctggatacacgcttatcttagctttataactgacgtttgagaggagctctgccgccatttcccttaccatagagatgaggaaactggggccagagagattaatgagtcctccaaggtcactcagcagcggaaaggacagcttaacgctcactgtcttgtgttctgattggagaatcagactagagccagaccgcgccttcccacaaccctgtcagccyggagccatcttgacccagaaggacctcaggagaagggagaaaataggagttaggctttttttagccctagtatgcacattaagcagaaaatgaggacttaaagaaagaaaactgagcctggcatgttccggaatatgaaggcagcattgtggtgctcttctgcagcgaagacagtgcatatcacagtgcagacaggcgtagaaacagtcctagcccgt

SEQ ID NO: 425329 - DNA, 486 bp, Homo sapiens
ttgttcttggaagccattcaccatgagatgagaagcagagaggctacatggagcatttatgcataggtgttcttacagatggcacactgaactgccaggtgacgcccagtaccgacctgcagacatgtgagtgaaactcaaagtgayctcagcccagccactgcaagagagacaccaagcaagaaccatcttttagagtctagctgtggtccaaaatcatgagagttaataataaaatgattgttgctttttaaagctactctgttatggaagcacttattatgccccaatagacaactagaacatatatttttctggaccttaaccaacagttaagtgaaagtgtctttcatttaacaattctgcacttctttttagttccaataaatatattctatggtcctaggtaaattcagagggataatgaatatttctttctttaccaataactatcgatttgattgaaactagaggattccaagggaa

SEQ ID NO: 425330 - DNA, 486 bp, Homo sapiens
ttgttcttggaagccattcaccatgagatgagaagcagagaggctacatggagcatttatgcataggtgttcttacagatggcacactgaactgccaggtgacgcccagtaccgacctgcagacatgtgagtgaaactcaaagtgatctcagcccagccactgcaagagagacaccaagcaagaaccatcttttagagtctagctgtggtccaaaatcatgagagttaataataaaatgattgttgctttttaaagctactctgttatggaagcacttattatgccccaatagacaactagaacatatatttttctggaccttaaccaacagttaagtgaaagtgtctttcatttaacaattctgcactyctttttagttccaataaatatattctatggtcctaggtaaattcagagggataatgaatatttctttctttaccaataactatcgatttgattgaaactagaggattccaagggaa

SEQ ID NO: 425331 - DNA, 486 bp, Homo sapiens
ttgttcttggaagccattcaccatgagatgagaagcagagaggctacatggagcatttatgcataggtgttcttacagatggcacactgaactgccaggtgacgcccagtaccgacctgcagacatgtgagtgaaactcaaagtgatctcagcccagccactgcaagagagacaccaagcaagaaccatcttttagagtctagctgtggtccaaaatcatgagagttaataataaaatgattgttgctttttaaagctactctgttatggaagcacttattatgccccaatagacaactagaacatatatttttctggaccttaaccaacagttaagtgaaagtgtctttcatttaacaattctgcacttctttttagttccaataaatatattctatggtcctaggtaaattcagagggataatgaayatttctttctttaccaataactatcgatttgattgaaactagaggattccaagggaa

SEQ ID NO: 425332 - DNA, 512 bp, Homo sapiens
aatatatatatatataatttgtgaaaactcccacaagaacaagtagataatgtgaatatgccatatttattttgtaattaaattaataataattatttacccttaaatatagaaagtatcagacccaaatggttcacttgtgaattctaccaaacatctaaagaagaaattatatcaattctctacaatctcttccagaagatagaggtagagggaatacttcytaggtcattctatgaggctagtattaccctaataccaaaaccagataaagacattactggaactgacatctctcatgaatatagaggcaaaaatctttaacaaaatattagcaaatcaaatccaacaatattcataaagaattatataatacaaccaagtgggatttatctcaagtgtgcagggctaggtcaacgttagaaaataaactaatgcaattcattacatccacagactaaagaagaaaaattatattaacttatcaatggatgcagaaaaagtacttgaca

SEQ ID NO: 425333 - DNA, 585 bp, Homo sapiens
taattaggtataaattgaacyaaatatgtgcaagacatatatgagcaaaactacaaaattctgatgacagaaatcaaagaaaaaataaataaatggagagctatttatttataaagaaataggaagagtcaatatttttaatatgtcaattcttcacagtttgatctatagattcaatgcaacctcaataaaaatgccagcaaattactttgtagatattaagaaactgattatgagttttatttcgagagaaaatagaccccaaatgaccaacacaatatggaggaagaacaaagtcagaagatcggtactacctgacttcaagacttactataaagctgcactaatcaagacagtgtggttatggtgaaacaatagataaatagttcaataggacagaattgagagccctgaaacaaactcacataaatacggtcaaataatatttgaccaaagggcaaagataatgcagtggagaaaagaaggtagtcttttcaagaaaaagagctggaacaactggaaatccacatgcagagaaaaaaaaaaactggaaacagaccttttactcttcccacaaaactttta

SEQ ID NO: 425334 - DNA, 543 bp, Homo sapiens
tacttttagacataataccaaaggcatgaatcacaaaataaatattttataggctggacttaattaaaatttaaaagtctgcaaaagacrttgtcaagaacactaaaagataaggaagataagtcacaaacaaaaagaaaatatttgcaaaatgtctatctgataaagtggttatccaaaatatacaaagaactttttaaaattcaacaatgaaaacatcctaattttctaataaggaaaagacctgaacagacacctcaaacaaagaagatatatgtgtcaaataagcatatgaaaaaatgcttaatatatgtcattaggaaattgtaaattaaaacattacccacatattagaatggtccaaatccaaaatgctgacaataccaaatactggagagaaagtggagcaacaggaactctcatccattgctgatgggaattcaaaatggtgcagccacttcggaagacagtcagtcagtttctcacaaaactaaccatactcttgtatatgatccaacaatcatgctccttagtatttaccta

SEQ ID NO: 425335 - DNA, 543 bp, Homo sapiens
tacttttagacataataccaaaggcatgaatcacaaaataaatattttataggctggacttaattaaaatttaaaagtctgcaaaagacgttgtcaagaacactaaaagataaggaagataagtcacaaacaaaaagaaaatatttgcaaaatgtctatctgataaagtggttatccaaaatatacaaagaactttttaaaattcaacaatgaaaacatcctaattttctaataaggaaaagacctgaacagacacctcaaacaaagaagatatatgtgtcaaataagcatatgaaaaaatgcttaatatatgtcattaggaaattgtaaattaaaacattacccacatattagaatggtccaaatccaaaaygctgacaataccaaatactggagagaaagtggagcaacaggaactctcatccattgctgatgggaattcaaaatggtgcagccacttcggaagacagtcagtcagtttctcacaaaactaaccatactcttgtatatgatccaacaatcatgctccttagtatttaccta

SEQ ID NO: 425336 - DNA, 543 bp, Homo sapiens
tacttttagacataataccaaaggcatgaatcacaaaataaatattttataggctggacttaattaaaatttaaaagtctgcaaaagacgttgtcaagaacactaaaagataaggaagataagtcacaaacaaaaagaaaatatttgcaaaatgtctatctgataaagtggttatccaaaatatacaaagaactttttaaaattcaacaatgaaaacatcctaattttctaataaggaaaagacctgaacagacacctcaaacaaagaagatatatgtgtcaaataagcatatgaaaaaatgcttaatatatgtcattaggaaattgtaaattaaaacattacccacatattagaatggtccaaatccaaaatgctgacaataccaaatactggagagaaagtggagcaacaggaactctcatccattgctgatgggaattcaaaatggtgcagccacttcggaagacagtcrgtcagtttctcacaaaactaaccatactcttgtatatgatccaacaatcatgctccttagtatttaccta

SEQ ID NO: 425337 - DNA, 559 bp, Homo sapiens
tataatgccattgttgctcaaaactcatagaacaggggtcaccaacccctgggacatgaaccaatacctgttaggaaccaggcagcacagcagaaggtgagtggcgagcaagcaaagactcatctgtatttatagccrctccccatcgctggtattaccacctgagctcctcctcctgtcagaggagctgcagcattagattctcattggaacactaaccctattgcgaactgcccatgcaagggatctaggtcatgtgctccttatgagaatctagtgcctaatgatctgtcactgtctcctatcacctccagatggaactgtctagtttcaggaaaacaagatcagggctgccactgattctacaatatggtgagttgtataattattttaatatatatcataacatagaaatgatagaaatacagtgcacaataaatgtaatgcacttgagtcatccccaaaccatccccccaccctattggtccatgaaaaaattgtcttccacaaaactggtcccgccaaaaagttttaggactgctgccatagaatatgtaca

SEQ ID NO: 425338 - DNA, 606 bp, Homo sapiens
taaatgaagcaaaatatgtctatgatctctttcagaataaatgcatttcattgattcagtgcacatctgttcaagccattcttttagtcttttcttccctaagcatcttcataaattaatctgcaaatagaaagaccaaatggtatcaataaagataaagtggacacaaccagggatgcatttatttgctgaaatttagagttggaagatgggtaagtgagcaaacatcccaactccttatcattataaaacacactgggtccaggtgggttgcggtgacccccggggctggtgcaggatcctgtcagctgctctcttaccactgmcctttggtctcagtccagcacccaatgggttaaaacaggtgtgcccacactcctccattactccaaatgccccagtgatttcccatctcagagcaaaaaccaaagtccacatagtagaggagatggcctaactgctatatataaaaacaataaaaatgttaattgactccctggaagtaagacatacctatagatttccatgccaataaagagttctctatccctgttttagttcttccctccccagttttaagaattaagatataaaattctaaaaatt

SEQ ID NO: 425339 - DNA, 653 bp, Homo sapiens
cctaactgctatatataaaaacaataaaaatgttaattgactccctggaagtaagacatacctatagatttccatgccaataaagagttctctatccctgttttagttcttccctccccagttttaagaattaagatataaaattctaaaaattaaggtgtacaaattaaaaattaaggtataatctacatagggtaaaattcacccttttattacagaatttagtgagttttgacaagcatatatagcattagttcttaaatgctgtggaccaggagtgcacttgtcttcctctttttattctctatatttttattttttaaatcatattgttttctaattgtttttaagttttttaaaaaaacttttaagttcaggggtagatgtgcaggtttgttatataggtaaatttgtgtcgggggtggggggttgttgtaaagattawttggtcacccaggtattaagcctagtacccattagttatttctcctgattctctctctcctcccagcctccaccttccaatagtccccagtgtgtggtgttctctctttattcttttctgtccttgagactgtgttgcaattaacctgtccccatcccacagcactgctgttggatggaaggcacggacaacttgtctaccgggatat

SEQ ID NO: 425340 - DNA, 502 bp, Homo sapiens
ttaggtcatttctccaggaattaaaggccctgaaattatttggcatgtttctgtgatataaagttactattggcaagatcaaagacagtgttaattaagcacagggtttactagtctctataaagttagtagaccattagttgaaattgcaggctaatccagccagtagagtaaaaamaaataaaaattagtttattgttgatgtaaattaaaaaatgttctagtcaatataaatgtttattctttcccacaaaaaaccttttttttctgattcatgaaaatgttttgatagtaatgatttctttttaaataaatcacgtgcacataatcccattgtctttcaaatcaaatgcatggaattttgctagccatttactgtgcatcaagaaattactcagaaaaaaaggcagcggtttgtttgaaaagctgagaatcattaactttagttgccattatcaattaaaagggcaacagtgattagcagagatctcttggtcttagc

SEQ ID NO: 425341 - DNA, 566 bp, Homo sapiens
ctgtgaaatctaaagttggattttcaatgcagaactaattaagatgttacagacaccaagttaatttgatatgtctgaaagcataaaamgggattattttaaaggtggttcagtgaacaccccaagatgatgtatgtgagtatttctccttgcacatgtcacagaggtgctactttaaggtactgggaagtttttcaaaagacacaatgtttgagttgtaaaagaataaaaatattggtcatacaaatttattaaaaattatgttatcattatataccactgatgtgtactcagtgttttatatataatatttcagtgtggggtagatatcatatgatagtagataccaaatagtgtatatattattattgtccctactttccaaataaggaaactgaggctcagggtagatagataactcacttagttcacaaagtcagtgagtagcagagtcagaatttgctctacttcccttgtgtgttaactaaagacgcactatcctttttaattccaacactttctggccctttttaaaatgtactgaaaaaataaatttaacaaagtag

SEQ ID NO: 425342 - DNA, 614 bp, Homo sapiens
tcttgtctactcagcaagtccagtgatctctgcttgggaccattacccttccccgtagttgaaaatgtgtcttcaggctaaaagggatcgcaatattgtgtgtgtcagggatggggggtggtggtttacagtcctgcactgcatgtttctcaatgtctacaaacaagcattttatttattttgggcagtttttcaaatactcagggcagaagaataagcctacttctgattgctccattatgattagatgtggaacaagtagattttatatatttattttttcatcaatttctgaattgatgttagttttgaaatttttctgtagatactgttgtgatttttcaaaaaaattatacacataatgacacttttgatattttattcatgattcttatatctacacatttatttatttaactttggtgttactgaaatgctagtcctcaaattaatttgaacagaagtgctaatattgtgcattgtttcttatgattttaaaggaagccatctactatttcaccattkcatatgctttttttttggtagaaattacctatgtgtagttagtaaataaactctcctgtatttctagtttatttaaaatacaagtcata

SEQ ID NO: 425343 - DNA, 596 bp, Homo sapiens
ggcaaacccctgattctggtttacattttagaaggagtactctggcagctcagaagtgagtgaattggtttttggatggttgaggtgaggggaagaaaaagaccagttaagaaatggttacaatagtccaggtgaagagaaagaaaagaacgggcagattttgaactccttcagagaaagaatctacctaacttgctgattaattggttttgaggttgcgataaggaagttgaggatgattgtcaggttgtcatgctatgaaagacaaaaacattttgaagagaatatagtgtatttagtttgatacatatcaagtttgagatatttataagacaaatgagcagagatgtctaccaggatgcaatgtctacaacactaaacagaggttaaggtatakatttcagctatagatatggaagtcatcagtatgtaaagcagcaattctcaacattgtctgctaattatatttacttggaatgttttttgaaaatattcaagcctgggttctatctccatagattttatttagtgcttctgaaataaatttggggattcaatgttattaaatcctacgtatttgattctgatgcatagtc

SEQ ID NO: 425344 - DNA, 526 bp, Homo sapiens
tctgaaattttctccatcctggtcagcctcctctgaatacattccggttaggcagtgttccttataaaacttggcactcagatcagacagagtgctccaggtgagagctgagcagtgccaataacagagtgcctatgtctttagcactatattcttcacaatctaaaatccacattaatttttaaaatcgctttaaatagttgtaaaaataggaaaatttacgttattcatagatttagtattatatatttgagtactttctttttttggaaatttaattttatccaaggacttaaagctcgacaacacagccaggaaccaataagtaactattaaccttagtgatgatctattgagaaatattcctaggtacaatggatgggaaagatttgccacttacctgacttgtcatagaaatgtgttttctgatacctataaacaatcattttgtggatagaaggtaatcatcaaagtaaagaatagttggcagcttraaaccagttggtagcttgacgggctcacacat

SEQ ID NO: 425345 - DNA, 573 bp, Homo sapiens
tgtgcaatttaggtgtttttagcaaaattatagagttgtatatccttcaccataatccagtcttggaacatttccatcaccccaaaatgctccctcatgtggatctgcaatccatcctcatttcttcctccagccccaggtacttactaactgctttctatatctatagttttgcatttttggacactcatataagtagaataatttaatattgtgtaggcagaatttagggtggcctttatgaccctcactccttggagttataatcatgaccatggtactttttatgataaaagtgagattattcaggtgagcttaagctaatcacatgagccccttaaaagcagtgcgctttttatggttgggagcagagggaaaggcaagaaggtgtttgaagcactaaggggatttgctgagcccttcctggcttctgagttgaaagaggccccaatcagggactgaaggctggaccccaggacctgacagaatctcccrccgagaaccagcaaggcagtgaggtgctcagtctgacagcttcaaggagctgggtctgccagaagtttggatgaacta

SEQ ID NO: 425346 - DNA, 599 bp, Homo sapiens
ggccttacatctctgcagcacttgtttggaaccattcacctgaatggccaggaagcagtctgagagcgtgggccctttactttctacctccttctgtctctgtttcttcttccagtggcacctaaaatgaaagctaccacaaagggacacctgaaagtacctattgtctgctaaatatatctattgtctgctaaatgccagtcagtcagtaagctaggaactgggatcccaacaatgaaaaagactgacttgtcctgtgaggtggagggggtctcactaaaatctgcagtatgatgatgactgctatggtcayggacaaagtcctgcagagaaagctataggagtttactttagagttatatatcaagacttatttgggatttttttctagaagagaaaggaagaaaaagaagaatttaagaaaagaaaggtcacggggttgtttatggtggcaaaaaaggaatttgcttatttttggtacatgtgtcatcgagaaatctctctctctgtcatgtttcaatgtatcagtccatctgtgcacacctaggctgtttgtgaggggccagtgcaccaattttagaattgtaacttactctaca

SEQ ID NO: 425347 - DNA, 599 bp, Homo sapiens
ggccttacatctctgcagcacttgtttggaaccattcacctgaatggccaggaagcagtctgagagcgtgggccctttactttctacctccttctgtctctgtttcttcttccagtggcacctaaaatgaaagctaccacaaagggacacctgaaagtacctattgtctgctaaatatatctattgtctgctaaatgccagtcagtcagtaagctaggaactgggatcccaacaatgaaaaagactgacttgtcctgtgaggtggagggggtctcactaaaatctgcagtatgatgatgactgctatggtcacggacaaagtcctgcagagaaagctataggagtttactttagagttatatatcaagacttatttgggatttttttctagaagagaaaggaagaaaaagaagaatttaagaaaagaaaggtcacggggttgtttatggtggcaaaaaaggaatttgcttatttttggtacatgtgtcatcgagaaatctctctctctgtcatgtttcaaygtatcagtccatctgtgcacacctaggctgtttgtgaggggccagtgcaccaattttagaattgtaacttactctaca

SEQ ID NO: 425348 - DNA, 649 bp, Homo sapiens
tgaggggccagtgcaccaattttagaattgtaacttactctacagacaggagagaaccatgagctggagtttcatgcagaatgggraaaaattatatgatcatatctatattttataatcaacactgtcgtagcagtttccaggaatagggtggaagggtggagttgctaaaggagaaagaccatttgatgtgtaggagattatgagggtctgagcagtgtagcagcagagatctgcagaggagaggatgaagtaaagggacattgcagagattagataaataagactctctgattaattgaatgaggactctaaagggagactgagtattcatggatatttccagacattgtaactgcatgactggtaatgtcagcaactgagataataaatgcagaaaggaatctgaaatatttagagagaaaaaagtgtcattgttatagacattgcagtgtggaaaacagagcttgtgaaggagccctggaatggcagtcaggcaaattaaaggccccagagctttgtctttcccaggaattgagaccttgggtgagccataggctctggcctcttgatccgtaaaactgtgataactgaacatcttttctgacactgttgctgtcagaggcatccaagccggagtgactccatc

SEQ ID NO: 425349 - DNA, 649 bp, Homo sapiens
tgaggggccagtgcaccaattttagaattgtaacttactctacagacaggagagaaccatgagctggagtttcatgcagaatgggaaaaaattmtatgatcatatctatattttataatcaacactgtcgtagcagtttccaggaatagggtggaagggtggagttgctaaaggagaaagaccatttgatgtgtaggagattatgagggtctgagcagtgtagcagcagagatctgcagaggagaggatgaagtaaagggacattgcagagattagataaataagactctctgattaattgaatgaggactctaaagggagactgagtattcatggatatttccagacattgtaactgcatgactggtaatgtcagcaactgagataataaatgcagaaaggaatctgaaatatttagagagaaaaaagtgtcattgttatagacattgcagtgtggaaaacagagcttgtgaaggagccctggaatggcagtcaggcaaattaaaggccccagagctttgtctttcccaggaattgagaccttgggtgagccataggctctggcctcttgatccgtaaaactgtgataactgaacatcttttctgacactgttgctgtcagaggcatccaagccggagtgactccatc

SEQ ID NO: 425350 - DNA, 649 bp, Homo sapiens
tgaggggccagtgcaccaattttagaattgtaacttactctacagacaggagagaaccatgagctggagtttcatgcagaatgggaaaaaattatatgatcatatctatattttataatcaacactgtcrtagcagtttccaggaatagggtggaagggtggagttgctaaaggagaaagaccatttgatgtgtaggagattatgagggtctgagcagtgtagcagcagagatctgcagaggagaggatgaagtaaagggacattgcagagattagataaataagactctctgattaattgaatgaggactctaaagggagactgagtattcatggatatttccagacattgtaactgcatgactggtaatgtcagcaactgagataataaatgcagaaaggaatctgaaatatttagagagaaaaaagtgtcattgttatagacattgcagtgtggaaaacagagcttgtgaaggagccctggaatggcagtcaggcaaattaaaggccccagagctttgtctttcccaggaattgagaccttgggtgagccataggctctggcctcttgatccgtaaaactgtgataactgaacatcttttctgacactgttgctgtcagaggcatccaagccggagtgactccatc

SEQ ID NO: 425351 - DNA, 515 bp, Homo sapiens
aagctattatttttactcagtgagataaatagaatgtagtgccaatgcaaaggagacaaagtatcaggaggaaggagatgactccrtatcaggtaatgaagacaggtcaaggaagatgaaggttcggcagatggctcatgtggatgcgagaggaattcccatagaaatgggaagcaagcagacagcaactggggttaaaaatagatggaaaaagcaaatatgagaaaacaaactagttgaggacaagtttagaggtaaaagcaaggagagaggaaaaggggaggttgagaaagagaatgagagtaggtgaagtaacaaatcttaatcttcttatttaatttcttagatagtcttttggtgaattattctcttcagttacctgcattttacagataaagaaaatgaaacaaatgagagatagcaacatgtttagggctacagtataaatctattcatgagagaggtttctattaatattcagaacttgatatttctcagtcctctccactgagcct

SEQ ID NO: 425352 - DNA, 548 bp, Homo sapiens
attcagttatatgtaagcaaacacacacacacagacaagcatacataattgaatacttccttgctttttttttttttttttacaatctgttatctgttaaagaatagcaaacgtttttatttaacttcacttatatcttcttcaatacttctttttctttaaacctgagtttatgactatagagaatgtccattttcaattctaagtgctttagtataagtttaagcaggcttcatggaaataaagraataaagaagcagaatgtactgagctatgagccaccaccttgcctttctgctttccctgtcactcagtggccaggcccctattagtcaggctatcccgcttaagtccccccttcccaccccatgaaagaatttagtttaggctagcctgcaacatagataattgtaccctttcttatccgtgtagccactggggccataaatcaaatgtttaaagagtcctgagccagctgcaatgcattatgggctgcaataaaatgcagcaaaaagaccctaaagaacagacttgaagccttcaccccg

SEQ ID NO: 425353 - DNA, 485 bp, Homo sapiens
acgggggtaaaaccttccctgccccaggccccaagcaaggatttccctagcggggaggaaggtagaatcgagagacctctaacctgggagaggagggagggaaatctccgaggaccagggttatgcaacaacacaagggaagtacctgctggttctggggttggggaggaagatccctactgcccaagagccagcacagacacaaggcagagctagactgccwcggggctggggtcaagaacactgagaaggtgcagctcgcagctcctgagggtagggcttaccccaaatggaggaaagatcagagtggacttctgaaagctgatgatagagctgaaacaccaagaaacctctgtcacctgaggcccaactgctaagcacaatgcagcagcaatccactgctgaacaaacttaaatcctgtggtgctttgcaggtaaggaaagcaacagtgacctgcacatccaactcaactgatgagactgag

SEQ ID NO: 425354 - DNA, 555 bp, Homo sapiens
aagggagcctgacatacagtggggcatggaagacttacagcagttttgtaatcaggaacactggatgaccaaaggcagtggaacaaatcttaaacatactcataggagagataaacacaatcaactcaaaaatctctacccactaaaaaatccktcagtaattaagatgaaacatgtagactattgatgagaaatgaaatgtgaaataatccattacctgtagacatgtactagaagaaatgttaagaaaattatttaggcagaagagcatgaaagcaggtggggatttgaatctaaacactaaatcacgagaaacagtaaaaataaagataaacataaaatatagtttgtgttatctttagctgctttcaaagataattgtttaaataaaagtagttacaatctattaaagcacttgtgtcatagctagaagtaaaatttgtgaaaacaatagcacaaagcatgggagaggaaattgaagtaaaatgtaaacttcttattctctttgtgaagtggtgtaatattatttgaagttggactgtggtaagtgaacac

SEQ ID NO: 425355 - DNA, 523 bp, Homo sapiens
tacactttcacaggcgcactttgcacactttccttttcacaaagcatttctcagaagcctctccaaatactcaaggggaacatcaaggagaatccctggaaagcttcctcctggtgcagtttgcggaaagggaatgttcacyaccacagaaattctgcccagagccatctctgtcttctctcctaagaaacattttcaatctgcggggaaaaaaaagcaataaaacggtggattgaggacaccggtggaaatcccactgaaggtggggtaaagagaaaaagataacaaatgctctacccctgggtgatggggagaaatacttggcagccccacttaaacctgagggctataatgcttgtgaagaccacaccctcagacccagaatcacagcatctgcttaagagtgagacttcaacagaacaccagaaaatgccgcctctgcatagtctagtaccacccaaagaagtgttaagaataaatcgcgcggaatagagctggaagagctgcagggacagtttctctc

SEQ ID NO: 425356 - DNA, 523 bp, Homo sapiens
tacactttcacaggcgcactttgcacactttccttttcacaaagcatttctcagaagcctctccaaatactcaaggggaacatcaaggagaatccctggaaagcttcctcctggtgcagtttgcggaaagggaatgttcaccaccacagaaattctgcccagagccatctctgtcttctctcctaagaaacattttcaatctgcggggaaaaaraagcaataaaacggtggattgaggacaccggtggaaatcccactgaaggtggggtaaagagaaaaagataacaaatgctctacccctgggtgatggggagaaatacttggcagccccacttaaacctgagggctataatgcttgtgaagaccacaccctcagacccagaatcacagcatctgcttaagagtgagacttcaacagaacaccagaaaatgccgcctctgcatagtctagtaccacccaaagaagtgttaagaataaatcgcgcggaatagagctggaagagctgcagggacagtttctctc

SEQ ID NO: 425357 - DNA, 603 bp, Homo sapiens
tctgggtttgtgtctgggagttactacctcttgtcagtatcatcatgaacttcctttcctttatccataaaatatggattataaaagtacccatgttacagtgatgttcaattaagtgtattaatacatgtacagggtttaaaataatatttaccacacaacaagtgtttaaataaaatgaactaatattatgtacagtgacactaaactagtatctagacatgatttactcatagggctatattaactagacaagcagctgctatttttttttttttttttgagacgkagtcttactctgtcgccaggctggagtgcagtggcgcaaactcagctcaccgcaacctccacctcccaggttcaagcattctcctccctcaatctcccgagtagctgggactacaagtgtgcaccactacacccagcagctgctattcttaaaggggctatatgtttatcaactaacatttcaaaatgtatttgaaacagataaaaataaaagtctcaacacatgattataatctgtgttgaaatgtgcctcccaagtcatataattctatacatgactccataaagccatgaagacattcatacatgacagac

SEQ ID NO: 425358 - DNA, 578 bp, Homo sapiens
aacaattttaagaggttggtttttgtttttagtgtagataatgaattattgagtgcaatgataattttgtgttttatcttggttagtccaaggtactcggatatttagtcaaacactttggtgttgctttcaaggtatttttaagatgagattaaggtttgtcttagtccattttgtgctgccataatataatacctgaaactgggtaatttataatgaacagaaatatcttgactcatagttctgctggctgagaagtccagtatcaaagcatctgataagggccttcttgctgcgttatcccacggcagaaggtgagacagcaagagagcaagaggggacgatacttatccttctgtaatcacattaatcccactaatgaggccagagccttcatgccttaatcacctcttaaagttcccactccttaatactgtcaatggcaattaaatttcaacatgagattttgaggggacattcaaactatagtaatatttaaatcagaagactttgagtaaattacccttcataatgtgggtrggcatcttttaatcagctgaaagccataaggaaaagat

SEQ ID NO: 425359 - DNA, 521 bp, Homo sapiens
tctgttaacttggcttctattttcttgtcagctttttttgagggagaaatgtctaagttgtattgtctaattttgcatatttcctttatagtttatggtttttgtgactgttttaaatgttctaacttatcttaaaatcataaatatatcctcctatgtcatgttctataacagcactctgttactaatttctgcaataatagacatattttatatctgtgctaacctacatcgtagccactagatacatgttgctactgagcacttaaagtatggctagtgtgactgasgaaatactttaacatttttatttgattttaattaatttaaatttacattgctatatgtggcaattgctagtggcaatttaaattaatttaaatcactagaggccaacatattggataaaaatcattcaattatgttctcagaccacaatataattaaactagaaatcagtaacagaaagatagctgggaaattccaaaatatttggaaagtagcacacttccaaattatcc

SEQ ID NO: 425360 - DNA, 567 bp, Homo sapiens
acattccaatacctctcatgaacatagacacaagaatccttaccaaaatattaacaaattgaacccaacaagtataacaggaattatacaccatggctgagtgggatttatttcaggtactcaaggctcattcaaaatttaaaaatcaatcagtgtaattcatcacatcaaaacactaaataagaaaaatcatatgatatatcaattgatacagaaaaagtgtttwacaaaatttagaatccatgcatgataaaagctctcagagaattaggaataaaaggaaactctcaacctgataaagaacatctgtaaatctacagccagcatcttaattgtaagaaactggacataaggcaagattgtcctcttgtattaaaaagtttattcaaagtcctagatagtgcaataaaacataaaaaagaaaaattatggagattattaaaaaagaaaaggatcatattcacagatgacataattttctatgtagaatgctccaaaatacctatttaaaaactcctagaactaatacatacacacacacagtaatacacttagtatatactaata

SEQ ID NO: 425361 - DNA, 547 bp, Homo sapiens
gaaacttaacgataagggaggctaagaaatatagtcgccctaatgtctaacaccataaatagtgaacacagttcactgcctctgtcatagttatttgacccaatctatatataaaaagactggggcttagatatactaagtagtttgcctagggtcacacagttaayaagtgatgactatgagagacacaggatcaaaagaatccagggtttaccttaactaacctctaaattatgcaaacctctaagtctccttccatttgcagtattgtcaccacgatgactgcacccagaaaacagagtaactgatagcacaaattcttttgatttgtttttcttttttcagttctttgttacaatgtataatctgtttccatgtagccacacagatgagcacatggcagagatttttatcacagacttttgtaaccagttctttctatttatcaaaacccagtctgattgtgaagacttacatcaagtccaccccaagtaactagtaaacagatgtatcttaaaataaccttaatcccctcatattggaatac

SEQ ID NO: 425362 - DNA, 576 bp, Homo sapiens
ggcaccacgcaagtccaaaatccagtggggcagtcaaatcttagagctccaaaatgatctcctttgactccatgtctcctacccaggtcacactgatgcaagaggtagattccaatggttttgggcagctctacccctgtggctttggagggcacagcttctctccctgctgctttcatgggctggcaatgagtgtctgctgctttttaaggagaatggtgcaaagtgttggtggatctaccattctggggtctggaggatggccttctkctcatagctctactaggtgtgccccagtagggactctgtgtgggggctccagccccacatttcccttctgcactgccctagcagaggttccccatgagcaccctgcccctgcagcaaacttctgctcttttgaaatctaggcacaggttcccaaaccccaattcttgacttctgtgcacttgcaggctcaacaccacatggaagctgccaaggcttggggcttgcaccctctgaagccactgcctgagctttatgttggcccctttcagctgtggctggggcagctggaacacagggcaccaagtc

SEQ ID NO: 425363 - DNA, 501 bp, Homo sapiens
cgaagagtgagtacagctgaaggagccagggaacagaaagtgtacgcgtcaggtatgaggatgaaaatagattttggaagttatgagaaatgtagagagtgagttgagcatagtttgtcgttttgaggtcctctaaaagtattaaagcagtggcagccgctgtacgcagacatgagggctaggctaaaacagtaaggtcaagttgtttggacagaaaggctacatggtgtggtcctggctctygtgtaagaattctgactgcactaaccatgcctaggaaggaaaggagttgttgttctgtaagggattgaggtttggaagcttaatcggacatgatcatcagggagagcacgtgtgtttttacgagaattatgccgagataggtaacagatgaggatgaaatttgggcttgactgaagtaatggggtctgtctgtgaagtcttgcagcagtacagcccaggtaatttgctgagcctaatgggcgtcagggtcagtccaag

SEQ ID NO: 425364 - DNA, 390 bp, Homo sapiens
ccttcctcttcaatttttgtgaagagtttgagtagaatgtgtatcagttgattttaagtctttggtaaagtttagcagtgaagttgtcagatccagggcttttctttggtgggagacttttaaattaccatttcaatctctttactcattattgttctgttcagattatcagtttcttcatggttcaattttagtaggttgtatgtgttttttyctccagaaatgtatccacttattccaggttttccaatatgttggtgtgtagttgttgttcataaatgtctctaatgatttttgtttttatttagtaacaactttaatgtttcttttttcatcttggagtttatctatttaggtctgctctccttcttgttagtcaaactaaaactt

SEQ ID NO: 425365 - DNA, 609 bp, Homo sapiens
aatgataaagaaaatggtttctgggtttaaaaaaatgattggaaacatttttttctctcttctccaatgatgcacgcatgatcaaggcaaagagaaagaagccttgttaaagctataagcccaatcactaatgagaaaactgtacatttttatcccttccaggtctttcctgtcctatacagaacactgaatacatgggtatgtctgggtatctgataaaatatttctttcttttcaaaatgagtgaaataatgttactacccagtgacaagaagagaaatgttttcagagaagaaaatatatttttctcaagttgaaaaggatacaatcctaaatttaaagatcaatttaaaaggaagggtttgtattatccagaaaattgtaactacaaaatgactttcagcatgaaattttagaggtatgaagccaaaataatgaagataaagctaatattctcatttaactttttcttttcttctgtgttcttctaaggtaacaaggaccattgaatattaaatatgtaattattaagtttatttccaagaaaaarggctaaatgtttaactgtaaaggcaatttgtactgtctaatttggatatatttacattc

SEQ ID NO: 425366 - DNA, 491 bp, Homo sapiens
gtacatactatcaaaacaacagactttaacacattttacaaattgtagctcatgatattgtttcagcattcagttcttgagttctcaactaaaatacagttctttcgtttatgagggcagtatgcaaagaaatgaaattggcttagtggaattggttttgcattagcagtgtttttttcataaaaattcaagtttaattccatattgctttttgaaataatactgtggcaatgagtcaacaggcctttcccctggcattcttagctctctaatggggcaaactgtcttatgataatgcctattaattttatgtgatagtatrgtttattacttaattttaaaaattagaatttaagatgattttattgcattgttttaaagttcattttattgtgaaaatacttcaaatttgacattccatattttctttttggttagtggctaattaagttttaagtttttttcttacttttatttagattcaggggtac

SEQ ID NO: 425367 - DNA, 505 bp, Homo sapiens
acagtggtaactctttggactagataagatatctttgaaatatttccttcattcttccagcactgtcttcctttgtggcacaaccagatgtttcaagaatattttctactttacttatcagccctgcataaagcatctctctatgaaggtttggttttttaaatgaagagtactatctaaaaatcaaagtctgggtgctaggtatgttaattgatacgcgagtctcgctgcttgacttgtaccttttatttagattttctattaaatcttttctagcagtctacactacagagtttaagttcactcagatcttcctttattccatacttatwttcgctccttcattggtgataagcctagccccaacatcttcaacctctttgcttatttgcccaatctcctatgttgcccatgtctcagcttatcagacttccctcatctcccatctctgacccccatcctggcaccacccaccattacttgttctgcttgtgtcaagaaagga

SEQ ID NO: 425368 - DNA, 565 bp, Homo sapiens
gcaggccaccacacctggctaatttttgtagagacagggttttgccttatagctcaggctggtctctaactcctggattcacgtgatctgtcctccttggcctcctawagtgttgacattacaggcatgagccactgtgaccagcctacatcttttcaaaactgagaatgttaggatctgagtaaagagtagtggatacgcagaaaatacatttgttatgtcattctctagatttttgtttgtttaaaatatcgagtaaatacaaaaaaatactaaagttaattttcagatcttcgaaaggttatttacagcaggggtccccagcccccgagcctgttaggaaccaggccacacagcaggaggtgagtggtaggtgagcgagcattaccacctgagctccacctcctgtcggatcagcacagcattagattctcataggagcacaaaccctattgtgaactgtgcatgcaggggatctaggttgcacattccttgtaagaatctaatgcctgatgatctgagatagaacagttttatcctgaaatcattccccctccaatttgtc

SEQ ID NO: 425369 - DNA, 538 bp, Homo sapiens
aacacaaaaagaccatcagaaaatgaaaatatattttcaaatcagtaatacggcattctaatccatctgctctctttttctgagccacacactaatttttctgatatccacgataaaaagattgactgttcttcctcattacacattttttatttccctatcagcagctttaagcccacctccacctaaaaaattgaaaactcaaaatcagcttttaaaatactagttctccattttcccctaatacaggattgttaagtctaatagaccgtactcttcaccttctcgattctaaattacaaaactttattataacaatttgcattcaactactgttgtttcattctcatgacaagaaaagtctgtttttttaaaaaccatatattaactgctctaagggttcagttraaaacgtctctctaaaggtagagcagtttaagacctaggttttatgtgtaatcctataatcatctctatcttcaatgaaaggtttcaaactcaagtttatgtcctttatattttatgatgggcccaacct

SEQ ID NO: 425370 - DNA, 538 bp, Homo sapiens
aacacaaaaagaccatcagaaaatgaaaatatattttcaaatcagtaatacggcattctaatccatctgctctctttttctgagccacacactaatttttctgatatccacgataaaaagattgactgttcttcctcattacacattttttatttccctatcagcagctttaagcccacctccacctaaaaaattgaaaactcaaaatcagcttttaaaatactagttctccattttcccctaatacaggattgttaagtctaatagaccgtactcttcaccttctcgattctaaattacaaaactttattataacaatttgcattcaactactgttgtttcattctcatgacaagaaaagtctgtttttttaaaaaccatatattaactgctctaagggttcagttgaaaacgtctctctaaaggtagagcagtttaagacctaggttttatgtgtaatcctataatcatctctatcttcaatraaaggtttcaaactcaagtttatgtcctttatattttatgatgggcccaacct

SEQ ID NO: 425371 - DNA, 561 bp, Homo sapiens
aaaccagcacacttaatcctcaaatttgtaactagccaaatggaaattcttaggctgacaagcatatttttaaaaagcttattctttgaaaaatattttaaaataaaaaatttaaaatctcatttaaaattcctaattatcagaaaatacatctactctaagcacgatgttaacttcatcaaaccaatcactaaagtaaaatttttactaaattttatctaaatttaaaagtaatttttcagccaagcattataggcaaaaaaaaaaaagtaatgcctaaccagaaacaaaagtcatgatcaatttgttttggacaatgacaaaccacaaaggggtaaagcacaagatgccaaatttcacaattaaatcatccagaaaaaaaartgtgatggacttcagaaaccaatatttttcttaagtcaaattaagtttataacaaggctaacaattacaggaagccgcttattccacactaaggaatagccctttttcctgcatgtttgtactggtctgataaaaaacaatcaaacttcctcgtcattatattgcccattttaaaca

SEQ ID NO: 425372 - DNA, 511 bp, Homo sapiens
tttcttgtttttttctagcttttctaaccttgcatttattttccttcagatctcaacatctgctgcaatttgactgttcaggttagtgacaatttgcccatttatcagttttgtgccttaggcagtattcaccagcattctcctacttgagatgaataaggatctttatttatctgaccacttgtttactcattcatggggacatttaatatttacagaacactttcatcaaaacaagcytgttttttcttttcaaaatataatatactagcataggaacttgacagaagaggtaataatacagaagaaatctagagaactgatcatggagaaataattaaactaaaacaaagctgctgcttatagtaaggtagaccaagtttgtcctgtgttccaaattatacttagccaaaaataaatatttatagataattgaatagtagtttttagaaatgattcatggattactcaggggtggaaattatccctgtaatgtaggccccaaacttct

SEQ ID NO: 425373 - DNA, 512 bp, Homo sapiens
ctgttatgcaatccctgtatctctgtatccatgttaaattgaactgatgcttttttgaagtaaaatggtaagaacagtggcaacatctagtcttcagagcatagtttaagatttttgcccaatcctccaacccatgcaatggtgtgctttgaaaaccacaggtttcttttagacaaatacaacatttatttcccgcatttctttttgatttaacattttagttaacatttttattaacattttagtctacaagatgcttccacattatctctcattggagtctcaggaccactgtgtgaaatgggcaatatcagggcttctatctagcaagaaaagaaccagatttggggtggcgaaacaacttgctcagggttgcaagratggtacatggtgcagccagggcttgagcttgggtcttcttaaaagtgtggcttttaaataaaatacttaagtgcctgccaaaaaagtataacattaacttaggacctgaaaggcattgtacagatcaggta

SEQ ID NO: 425374 - DNA, 522 bp, Homo sapiens
gaaaacatcctaaatgaaatgttgtacattatgcactgacattttccctccatgcatgtctttctctcctccaccaatggatattatgggctgtttgtgcagaggctgacttccagccattgattctgtttgagaaaaaccacygtcttgtctatagatcagtgtttgtacaggttgagcatccctaatctgaaaatctgaaatccaaaatgctcccaaatccaaactttctgagcactgacatgatgaccacaagtggcgaattccacacctgacctcatgtgatgacttgcagtcaaagtgcagtcaaaactttgtttcatgcacaaaattatctaaaatattgtataaaattaccttcaggccatgtgtataaggcatatagaaaacataaataaatttcatgtttaggcttgagttccatccccaaagatctctcgttacgtctatgcaactattgcaaaatccaagaaaatccagaatccaaaatatttctggtcccaagcattttggataaggggt

SEQ ID NO: 425375 - DNA, 561 bp, Homo sapiens
ataatcttaaggaaactcagatagatctgagagaatacagatagacaattcagcaaaatcaggaaagcaattcgtcatcttaatgagaaattcaataaagaagaaaacagaaatcttagagctcaagaactgagtgaagaaaataaaaaatacaatagaaagcttcaacagcagactagatcaagcacaaggaagaaactctgcatttgaagataggtcttatgaaattacccaatgagaaggaaaaaaaaaaacgaaaagtgtgaagacagccaatgggacataygggacatcattaagcaaacaaacttttgcattatgggagctctacagggagaagagacaaatgtgcagaaagcttatataatgaaataattgctgaaaacttcccaagttttgaaagagatttgaacatccagattcaagaagctccaaagttcctaaacagattgatctcaaataggtcctctccaagttgcattacaactaaactgtcaaaagccgaagacaaagagaatttcaaaagcagcaagagaacagcatcaaatcatatatgagagg

SEQ ID NO: 425376 - DNA, 409 bp, Homo sapiens
tgcacccttaccactcagcaacccccaaaggagaaacatcaggggtgagttaccctccagcagggctttactgctcagatttaggaaggygagaaacctgctgcccagtcataggactgcagcatgccagggaccctccagaagcaatatgcttttaatcacagatgaaaagtatttaatagttactgaactacataaaaacaacgacaagcaatccaaggagagaagttaattctgttaagccaaccaagtgacacaaggttttgcctgtaggaaggaaaacagagaagcaagctgtgatcttccttttttttgtagcaagtgctttgaatctccttggagaaggaagtccacagagaacaatttgatttctaagtgagtaataattagatgctctaagttttcaatt

SEQ ID NO: 425377 - DNA, 409 bp, Homo sapiens
tgcacccttaccactcagcaacccccaaaggagaaacatcaggggtgagttaccctccagcagggctttactgctcagatttaggaaggtgagaaacctgctgcccagtcataggactgcagcatgccagggaccctccagaagcaatatgcttttaatcacagatgaaaagtatttaatagttactgaactacataaaaacaacgacaagcaatccaaggagagaagttaattctgttaagccaaccaagtgacacaaggttttgcctgtaggaaggaaaacagagaagcamgctgtgatcttccttttttttgtagcaagtgctttgaatctccttggagaaggaagtccacagagaacaatttgatttctaagtgagtaataattagatgctctaagttttcaatt

SEQ ID NO: 425378 - DNA, 594 bp, Homo sapiens
ataaagctttgaggaaattatatcatgtttaaagactttttaaaagaaggcgccacatgatgttataatattgggtagcattttrccaccaagtagtgatgggatcagaacaagtcatcccaaaatatgccactttgatgtattattttgagctaaaagaaactgagaaccagtcaatgcagaaaaagcacttcgcctccccatctgcttaaagtataatttcccatttgtaaaggacatttttattagtaaatgtatctatctttgccagaaagagagttactcatagataactttttctcactggagagacttttatctgcatagcaaggtaacctttattcaccacacatttcctcctctcgccttcccacaattcatctctaccactccccagtacccccaaatccttattcctattccttactctagcttaagatagtatctgtctcagtcatctggctgcttcctggagtctcatattttggtgggactcctgtgcatatgtgagtaattaaatgtttttttctccttttaatctgtctaatatcaatttaattcatagaccagccaaaaaacctcaaagggtacaca

SEQ ID NO: 425379 - DNA, 594 bp, Homo sapiens
ataaagctttgaggaaattatatcatgtttaaagactttttaaaagaaggcgccacatgatgttataatattgggtagcattttaccaccaagtagtgatgggatcagaacaagtcatcccaaaatatgccactttgatgtattattttgagctaaaagaaactgagaaccagtcaatgcagaaaaagcacttcgcctccccatctgcttaaagtataatttcccatttgtaaaggacatttttattagtaaatgtatctatctttgccagaaagagagttactcatagayaactttttctcactggagagacttttatctgcatagcaaggtaacctttattcaccacacatttcctcctctcgccttcccacaattcatctctaccactccccagtacccccaaatccttattcctattccttactctagcttaagatagtatctgtctcagtcatctggctgcttcctggagtctcatattttggtgggactcctgtgcatatgtgagtaattaaatgtttttttctccttttaatctgtctaatatcaatttaattcatagaccagccaaaaaacctcaaagggtacaca

SEQ ID NO: 425380 - DNA, 587 bp, Homo sapiens
atactttgaaatctcatgtctcttctaaagaaataaaagtgtagctaaatatctatatacaaatgtgattaatgattttcagcaacaatttagaaataaactaaatatccaccaaagaatctttaagtktatgtggcagatttatgacaaaaatactacacaggaatttcaaattatgttttgggataataacaatgtgagaaactgctcaaagtataatggtgagtgaaaatgcaaaagatatatacatatacctatccaaatgttaacatttctttccacttacttgtttaatataatttcattttctcataaaattcacatatacttttcaaagtccttaatatctacgagtgcttctcatttttcacgctgcattaatgtacatttgtctttaatatgagcattactacttttatagtcagaaaatgtggaataataaagcaaatgcaatgcaatccggtcttctctactttttatcactaaattcctagacgttgtggtatttttgtactaatgttatacaaaagtcatgtaaaaactgccattaaataaatcaaactctaacaatgtagaaaagtaaataa

SEQ ID NO: 425381 - DNA, 360 bp, Homo sapiens
gaaaactgatgacttttaatctgaatccaggtaaaaagattaaaatccccagtaacatcattttaggcttgtgcagtaatgtctttaatttacaaaacaatttctccattggactttccttccactcctgtgggagaagtttgattgtaactagttgtctaaatattttaatttaaaattctagtctatgtctctggagactggagaacacaccacacacacagagagagagaaagagagagagaaaagaagaagagaaagaagaaggggaaaaaaagcagtggacatcccacaytcccagaaataatattttgataacaaattacagcacaaggatatgttcatttgtttactgtattt

SEQ ID NO: 425382 - DNA, 288 bp, Homo sapiens
ttcaccataaagaaatgataaatatatgaagtgacagtcatgctrtttgatcattatacatcatatatgtatcaaaatatcaagttttaccctataaatatatataatcacaatgtcaattttaaatataataaaaatctcaacatcctttcttgataaaaattcaacagtttaggagtagaaggaaattcaacataacaaaagccatttatgaaaaactcatagttaatgtcatgattattggagtgaaactgaaagctttttttttaagatctggtacaaagcaag

SEQ ID NO: 425383 - DNA, 288 bp, Homo sapiens
ttcaccataaagaaatgataaatatatgaagtgacagtcatgctatttgatcattatacatcatatatgtatcaaaatatcaagttttaccctataaatatatataatcacaatgtcaattttaaatataataaaaatctcaacatcctttcttgataaaaattcaacagtttaggartagaaggaaattcaacataacaaaagccatttatgaaaaactcatagttaatgtcatgattattggagtgaaactgaaagctttttttttaagatctggtacaaagcaag

SEQ ID NO: 425384 - DNA, 530 bp, Homo sapiens
tcaaaaaaaaaaaaaaaaaaaaggaaacattacggctcacaccacagaaatacaaaggatacttacagattattacaaataactatacaccatcaagttggaatacctagaagaaatgaatacttttcaggacacatacaacctaccaagaatgaaccatgaggaaatagaaaacctgaacagaccattaatgactaacaagcagtaataaaaactctgttgttaaagaaaagtgctggacctggtggatagtgctggacctggtggattcactgctgaattctaccaaacatttaatgaacaaataataccaattctactcaaactatttcaaaaaattgaatgagggtaaatacttccaaactcattctacaagtctggcacagccctgtgacaaaaaccaggcaaagacacataacaggaggaaactaaaggccaatatccctgatatgttgcaaaaaatcctcaacaaaatyctagtaaacagaattcaacaacacattaaaaagatcattcaccatggacaagtg

SEQ ID NO: 425385 - DNA, 648 bp, Homo sapiens
ccccaaccaataggggctcagctgtgtcaaccaatcagaactcaactattttgactaattagaagtaagcacatttgaatccttcatttgcataaacacacttgattggaaatctcaatgggaacttttgctataaaaccccaaccctctctttgttctctggaatcacctttcattttacacgggaggctgagtcttcccagtatgcaatttatttattagaataaagtawcttttctccaaattcctttgccagacaacttttgtttacatttcttataattctgaactcaaaacccagagagttatttaacaaatggtgttacatccatattatgaatagttgtcagcaagaagaagcaactaagtattaatgcaccagtcaactaaggagaatcaccacagttgtaggctgagtgaaaatagccagtcctaaaaggttacattctgtatgactgcatgataaaatatcttgaaaagacataattatagaacgggagaaccattttactatgggttaaggccagtggggtaaaaagtgggagggaggagtgtgcgattatgagaacttttgtggtattggaatcgttttatgttttgataatatcatgtcaatattctggttctgatattgtaatatagtttttc

SEQ ID NO: 425386 - DNA, 648 bp, Homo sapiens
ccccaaccaataggggctcagctgtgtcaaccaatcagaactcaactattttgactaattagaagtaagcacatttgaatccttcatttgcataaacacacttgattggaaatctcaatgggaacttttgctataaaaccccaaccctctctttgttctctggaatcacctttcattttacacgggaggctgagtcttcccagtatgcaatttatttattagaataaagtatcttttctccaaattcctttgccagacaacttttgtttacatttcttataaytctgaactcaaaacccagagagttatttaacaaatggtgttacatccatattatgaatagttgtcagcaagaagaagcaactaagtattaatgcaccagtcaactaaggagaatcaccacagttgtaggctgagtgaaaatagccagtcctaaaaggttacattctgtatgactgcatgataaaatatcttgaaaagacataattatagaacgggagaaccattttactatgggttaaggccagtggggtaaaaagtgggagggaggagtgtgcgattatgagaacttttgtggtattggaatcgttttatgttttgataatatcatgtcaatattctggttctgatattgtaatatagtttttc

SEQ ID NO: 425387 - DNA, 594 bp, Homo sapiens
ttgttttacatttaatacaaatgacacaggttttgaaccagcaatgtgtgactccagaactgcttcttgtaacccatatgcatacacttcattaaatcattaaatgactctgtttaaagttatcgtgcacagtgaatgcacttggattttgtgtgatttatataacgatttcaaagttatttcctttttttacattattagtcagagcttgtttcattttactataaaataagggaagaataccacaaagtccaaacaatttctaatgcaaactaaggaagagcatgctgtactataatttcyatttaaatttcactttttttcagtaaataagtgaaaatcctcatttaaatactttgacaaatatagataaatttaacaagaaaaatggaaagtattcatggataacaaatgttaacatttggtgtcgacacatatagatgtatgttgcttctcagccttttagctaagatccactgatatagatgtatagatttatgtggatcagatttgaatatctgaatctttctattagaataacttgtgattataaaaaaaattccctattgctatccagtacataatgcattgagg

SEQ ID NO: 425388 - DNA, 627 bp, Homo sapiens
agtttcagttttgctaaaagaaaaacaatatgaatgtagttaatacccctgaactggacatttaacagtggtttagatggtaaattttatgttacatgtttccaatgtattcacaacttaaaaactcatcaacatagatgaaattggaggacattatttgaaatgaaataatccagtcacagaaagaaaaataccrcttaaactcacttataagtgagatctaaaaaactcaaacttacagaaggagaaagtagaatactggttagcacattattcagtggaaagaggaatttggaagatgttggtcaaagaatacaaaatttcagatagaagaatgatgttcaagagacttactgtacaacaaggtaactaaagttaataaagtattgcatatttgaaatttgctaagagagtagattttaagtgttctcacgacaaaaaaactatgtaagataaaccatatggtaattagctcaattcagtcattccacaatgtatacctcttttaaaatatcatcttacaatttttatttttcaatttaaaaatttagagaatgatgtcagcaagatggtagactaggaagctccaactcttgttctcctacagaaacataagaaaacacccag

SEQ ID NO: 425389 - DNA, 627 bp, Homo sapiens
agtttcagttttgctaaaagaaaaacaatatgaatgtagttaatacccctgaactggacatttaacagtggtttagatggtaaattttatgttacatgtttccaatgtattcacaacttaaaaactcatcaacatagatgaaattggaggacattatttgaaatgaaataatccagtcacagaaagaaaaataccgcttaaactcacttataagtgagatctaaaaaactcaaacttayagaaggagaaagtagaatactggttagcacattattcagtggaaagaggaatttggaagatgttggtcaaagaatacaaaatttcagatagaagaatgatgttcaagagacttactgtacaacaaggtaactaaagttaataaagtattgcatatttgaaatttgctaagagagtagattttaagtgttctcacgacaaaaaaactatgtaagataaaccatatggtaattagctcaattcagtcattccacaatgtatacctcttttaaaatatcatcttacaatttttatttttcaatttaaaaatttagagaatgatgtcagcaagatggtagactaggaagctccaactcttgttctcctacagaaacataagaaaacacccag

SEQ ID NO: 425390 - DNA, 547 bp, Homo sapiens
cccaaacctaagaataattggtgttcctgaggaagaagagaaatctaaaagtttgggaaacatatttgagggaataatcaaggaaaactttcctggccttgctagagatctagacatccaaatacaagaagctcgaagaatacctgaaaaattcttccccaaaagatcattgcctaggcacatagtcatcaggttatctraagtccagatgaaggaaagaatcttaagagctgtgaggaaaagcatcaggtaacctgtaaaggaaaacttatcagattaacagcaggtttctcagcagaaaccgtacaagttaatgggattggggtcctaaactttagcctccttaaaacaattatcagtcaagaattttgtacccagcataactaagcttcatacatgaaggaaagatacagtcttttccagacaagcatatgctgacataattgaccactatcaagccagcactacaagaattgctaaaaggagatctaaatcttgaaacaaatccttgaaatacaccaaaatgaacatctttaaagcaaaagac

SEQ ID NO: 425391 - DNA, 613 bp, Homo sapiens
catgtggcttgatgcacttgtcactagttggctgtttttattgttgaatcttattcaatggtgtggatataccacagtttgtgtaactaacatgcataaagaacattttgtgtagttgcagtgtttggcgattacaaatcagcctatataaacattcatgtgcagaatttatgtaaatattaattttaaatttctgggaaaatgttcaagaatataatctctggtttgtaagatggttgcatggttrcatgtttagtttttcttaaaaagtcaccaaaatattttctggggtggctgtaccattttgtagtcccaggagaaaattttgcctctgtgtcttctcagaagagtggtttatttttatttctgtgtatcaagggagggaagagaggtaaatgagcgtattcttcaccaccctgactgtcctgtctggatttctccaggctctgttatgcattgaattgtgtccccgaagtgatccactgaaaccataaatacctgtatttcagaatgggacctttatagaccctagcgtggctgtagatgtagttagttagaatgaggtccctctggagctgggccctatattcagcaggatggatatccttacaca

SEQ ID NO: 425392 - DNA, 565 bp, Homo sapiens
tatggctgctgggactggccaagactcagcgattgttacaggcacacactcctaagttaggttttcaatcttgcctgcgtattaagttaggtaataacttactcaaatacagaagtacagagtccttctcagaccatcaaactaaatatagtttgcttttacaatgctctggtgttgggtgcatacatatttaggttggttacatccccttgttgaattgactcctctatcattatataattactttctttgtcttcttttttattttttttaccattttgatataaaatctgctttatctaatgtaagtataactactcctgcttgcttttggtttctgtttgtgtgaagtatcttttaccactcctttacctttcacytgtaagtgtctttaccactaaggtcagtttcttgtaaggagaatatagttgtttcatgtctttaaatccatttagccaatctgtatcttttaatttatttatattaatttatttacaaatattatttacatttaatttatttacattcaaggttaatattggtatttgaggttttattccttcat

SEQ ID NO: 425393 - DNA, 504 bp, Homo sapiens
gtgtgaacccctacaaactattttgctatttccaagtggktatagcaagctggcaaagcctgtcttctgccatcttggaaaaaaacctgaagaatttcttgtaatatttaattcaagaaaggtctaatagcaacaaattctctcagtttttgttatctgagaaagtctttatttctccttcacttttgaaagataattccacaggttccagaattctagatgcatggttttttcctctcaacactttttatatttcattccactcttcttgctagcatggcttctatggataagttagatgtaattcttttctttcctcttctagaaggtaaagttttatccccccactggacattttcaaaagttgttctttatcattgtttctataatttaaatataatgcacccaggtgtagcatttttttcatttattttgcatgttgctctctgagttccttggatcaatggtttggtgtctaacattaatttcggggaatttttagtc

SEQ ID NO: 425394 - DNA, 504 bp, Homo sapiens
gtgtgaacccctacaaactattttgctatttccaagtgggtatagcaagctggcaaagcctgtcttctgccatcttggaaaaaaacctgaagaatttcttgtaatatttaattcaagaaaggtctaatagcaacaaattctctcagtttttgttatctgagaaagtctttatttctccttcacttttgaaagataattccacaggttccagaattctagatgcatggttttttcctctcaacactttttatatttcattccactcttcttgctagcatggcttctatggataagttagatgtaattcttttctttcctcttctagaaggtaaagttttatccccccactggacattttcaaaagttgttctttatcattgtttctataatttaaatataatgcacccaggtgtagcatttttttcatttattttgcrtgttgctctctgagttccttggatcaatggtttggtgtctaacattaatttcggggaatttttagtc

SEQ ID NO: 425395 - DNA, 634 bp, Homo sapiens
cattaatttcggggaatttttagtcattcttgcttcaaatatttcttctgctccttttcttttaatttgtcttctaatattcttattaagcaaaagttacaccttttacagttgtcacatagttcctggatattctgttccattttttcaacttttttcttcttgctcttcagtctttaaagtttctgtaaagacatactcaagctcactttcttcagccatcttcagtctactgtgagcccaccaaaaacaatcttcatttcttttatagtgtttttaatgcctggcatttcactctggttttttttcttagaactgctatctctctgctttcattacctatctgttatgcatgctgtctactttatttattagcacctgtagaatattaatcagaggtacttcamattcccagttgttcacattctgagaaaatggaggtgaaatttttaaaaattccccattgttaattccaatttcttgtcacaccaggttcaattctaatgggtgctatgtctcttcaactaagtatttgccttttagtatgtcttataattttctcttgataggcataataaacttggtaaaaagaactatggtaattattaagaattgttgtagtaagatgtggggg

SEQ ID NO: 425396 - DNA, 562 bp, Homo sapiens
gttaggtcccatgagagctggttrttagaaagagcctgacacttcccctctctctcttgcttcttcttgtcatttgatctctgcacagaccagctctcttttaccttctgccatgagtggaagcagcctgaggccctcaccagaagccaagcagatgccagcaccatgcttcttgtatagcctgcagaaccatgagccaaataaacctcttttccttataaattacaagcaatggagaaaggactccctattcaataaatggtgctgaggtaactagctagccatatgcagaaggttgaaactggaccccttcctttcaccatatacaaaaatcaactcaagatggattaagtacttaatgtacttaaatggaaaaccaaaaactataaaaaccgtaaaagaaaagctaggaaatgttactctagacatgaaccctggcaaagatttcttgatgaagactcttaaagcaattgcaacaaaaacaaaaattgataaatgggacctaattaaactaaagagcttctgcacagcaaaagaaactatccacagagtaaacagacta

SEQ ID NO: 425397 - DNA, 562 bp, Homo sapiens
gttaggtcccatgagagctggttattagaaagagcctgacacttcccctctctctcttgcttcttcttgtcatttgatctctgcacagaccagctctcttttaccttctgccatgagtggaagcagcctgaggccctcaccagaagccaagcagatgccagcaccatgcttcttgtatagcctgcagaaccatgagccaaataaacctcttttccttataaattacaagcaatggagaaaggactccctattcaataaatggtgctgaggtaactagctagccatatgcagaaggttgaaactggaccccttcctttcaccatatacaaaaatcaactcaagatggattaagtacttaatgtacttaaatggaaaaccaaaaactataaaaaccgtaaaagaaaagctaggaaatgttactctagacatgaaccctggcaaagatttcttgatgaagactcttaaagcaaytgcaacaaaaacaaaaattgataaatgggacctaattaaactaaagagcttctgcacagcaaaagaaactatccacagagtaaacagacta

SEQ ID NO: 425398 - DNA, 438 bp, Homo sapiens
tgagcagtttataatttccctattttgcttttttccctcctctttctttcagatgcagttcgaacattaagcaatgccgaggactatctcgatgatgaagactcagattaattcctttctggagctttgagatctaaaacttctgttgcttttgccattccaaaactttgtctttgccagaaaagtgttggtaactataaagaaaattatatatgaacacggcagtgttgcactgtgtttgagtagaacgtgtaaatgaattgttcccacctttggtttgccagtaagtgactggattcttggcacatttrtgttcaccaaagtagaacaagaagatattatttctatttatcaagcaaaaggaattttaagatttttttttttctttaaaaacaaattaggattttttttttttttttttttttagttaaaatgctt

SEQ ID NO: 425399 - DNA, 530 bp, Homo sapiens
tcttattacacagctgatgttgcaaagcacacattttttgggtagtatttcatttttgaaatatgtaaaatgtaaaaatgattacatcctttgactacataagtgacacttctgggaatttactccagggatataattcaaaaagaagacaaccaacaaagagtaggtgtagatattttttatggcatgtgatatatccatgtgaaacacttgtaacaacagtaaatatccaacaattgggaaatggttaagtgatcttatgttaatttggactactgtaccagataattatactataattttataatgagattatattttatatttaatgagaaaaatacaaacatctgataattaaattttrttttgcaacttcttattcttttgatttggaactagacatgtgacatgtttcttctgtactaaagggtcaatgtcaagtcttacatttctcttcagtgtacaaaacagaactcagccttgattttttttttaactggaagagctacttagtttcattatataatgaa

SEQ ID NO: 425400 - DNA, 564 bp, Homo sapiens
ttcctaaactgcctaaaaagcaacgtttacggcatacttgcactatgctatggatgtcctttcaccagacatcagaataggttacactcttatttgcacccagctagggcagcgcaagcacatctgcagacaacactgctttcatgttcgatcacgcagggaacagagggaatcaagtgcacgaagagattcccttgaacaaaatcagcaatggtgtaagcagactgacatttagagatatcagaagcagtagtcatagcatctcctgacagatgagcttaaaatcaagtgctttgctctccattctatctatatataattttttgacaacgtattaaagttttggagcatagataaaattatgccctgtgtgaaattcgcaaacaatattttatgagcgatctaactccaaatagcctaactgcccccaaagagttcagattctcttaatccactcgaactcstttcttcctaaggctttacttacacttgtactttctaaagctaaataaatgagatcttttgattcattttgggaaaaaaaagacaaaaaaaaaagaaact

SEQ ID NO: 425401 - DNA, 632 bp, Homo sapiens
agggtgggcacagtggctcatgcctgtaatcccagcactttgggaggctgaagcgggtggatcacttcaggtcaggagttcaaaaccagcctggccaacacagtgaaaccccatctttactgaaaatacaaaaagttagtggggcgtggtggtgcatgcctgtaattccagctactggggaggctgaggcaggagaatcgyttgaacccaggaggcggtggttgcagtgagccgagatcgcactactgcactccagcctgggtgacagagtgagactctgtctcaaaaaaaaaaaaaaaaaatccatataggctggtttgcttaaagtaaggttcacttgaacacatgggaatgagaaattgtttagagaatctttacacaaatctttattgaataagatgataaatgtagaaagaaataattttctctatatacataaggaaaatccagaaattctctaatatgggtaaaagcatagtagtcaaaggaaaatgaatattaagtgctttcatcattccaaggaatgttgggaactggtaggacacgttgaagaacacttctggcacatgttgtgttaataaggagagaacctgcccttggtggttaataatctagtacccttgacaagcact

SEQ ID NO: 425402 - DNA, 479 bp, Homo sapiens
gaaccctaacataaaccatggactttgggtgatagtgatgtgtcagtgtaaattcatcaattgtgacaaatgaccccctcttgtgggcaatgctagtaaggaggagagctatgcatgcgtagggatggggatatatgggaagtctccataccttctactcaattttcctgtgaacctaaaactgatctaaaatataaagtttgtttgtttgtttgtttgtttattaagacggagtctcactctgtcgcccaggctggactgcaatagcatgatcgcagctcactgcaacctccgcctcccaagtttaagcgattctcctgcctcagccgcctgagtagctgggattacaggcacccaccattatgtctgcctaatttttttttttttttttgyatttttagtagagacggagttttgccatcttggccaggctggtcttgaactcctgacctcaagtgatccgcttgcctcggcctccc

SEQ ID NO: 425403 - DNA, 537 bp, Homo sapiens
tcaatacagtagcaggtgtattttacataaatgaccaaaatgtaacaatataagtatgcctcacatcttgatctccatctgtttccttgttagaaaattaaacagtcttacagcagataatcctttcacaaattattctttcagatggcctcggtgtgtggcatattcatttgagccttacatctcttaaagttagaatgacctcttcgggctccgctcttgggacatcactgtttttccaacacaaactccgtctttatgttgtgccagctgactatgaaattcactagactacagagaagtctggccttcatgaggagttcaggagttaactgctactgaaaaaraaagtctgtgggaggaaaagtctgtcatggtttatgatatgatttattgcaattacagaaaactaccctgattgttcaaattgcggtctgtgggcctcagccagattaaatgccaggctgtgactagcacaggggaggtaatcaaataattgcctttgctaaataacactgttcttaattcacacagaaa

SEQ ID NO: 425404 - DNA, 631 bp, Homo sapiens
ttagctatcgggatatattgatgagtaagccacaggacctgagtttaggatatgtaaacagccacaacagaacatcactttaaccctaatatgaaatatagggttgaagagttcagggtacaagacaaccaaatgaaatgaattcaaaaagtgacagagccctctgaggagaggtaagagacacagattgttttactctcagcagactatgaaagaaggaggtgacaatcttaaaagcaagaagaacaaaaacatctgaaagataaatgcatttgtgaagactgcaggtagactagcacagcagtttagaatcccagggagcccagcacaagtggactcctcacccactcagcaactcttttctgtgagtctctgctgggtgcttatgagaaagattgaaggcagggcaggaaacccaggagtgccgtctcacccctgatggtgcagggctcagagcctgacgagttatgagaggagcaggatgaccccgggaagcccatttgtgtttgagcccttgcatgcgtagaagtctgtgattgacggcgtctggaaggcaagcacaaccttatgtgtaccccamattttaccctgatgtagaccaaaagacatctgcccctgagtaaggagtaag

SEQ ID NO: 425405 - DNA, 542 bp, Homo sapiens
  misc_feature (1)...(542): n = A,T,C or G
nnnnnnnnnnnnnnnnnntggcttatttacttaacataatgccttcccatttcatccatgttgctgcaaatgacaggacttcattttttcttgtggctcgataatattccattttgtatatataccatgttttcttcatccattcatctgttgttggaaatctagtttgattccagatcttggctattgtgaatagcattgcataatgtggttggaactgtaggcccttttcctaagtgaaatgactcagaaacagaaagttaataaccacatgttctcacttgtaactgggaaccaagtaacaggtgcacatgaacatacagcatggaataatagaactrgagactccaaaaggtgggaggatggtgaaggatgaaatgctatccgttgggtacaatgtacactactcaggtgatgggtgcaccaaactcccagaccttactactgtgcaatgtattcatttaagatgactgcacttatactcctaaatctattttaaaatttttttacgtactgcaataaacatggaggggcagatgtct

SEQ ID NO: 425406 - DNA, 500 bp, Homo sapiens
tttcaaacctcctggaaagggcccagaaaaatctaatgcaacaaaataagctgactcaatctagtggtcttcccaatatgccatattgtcttatctaaaaggtgaatgtggatttagtttacatggtctcaaactatccagtgacctttttagtacttgttttgttttgttttgttttgttttgttttgttttgyttttgagatggagacttgctctgctcccccggctggagtgcagtggcttgatctcagctcaccgcaacctctgcctctcaggttcaagcaattctccttcctcagcttcctgagtagctgggactatggacatgtgccaccatacccagctatttttttgtatttttttaaagacagggttccaccatgttggccaggctggtctcaaaatcctgaactcaggtggtccgcctgcctcaccctcccaaactgctgagattacaggcatgagccactgcgtccagccccttttttgtagtttaaaa

SEQ ID NO: 425407 - DNA, 472 bp, Homo sapiens
ctaactggaacttcaaagaatcaaatgctctatggtggggggcagagcgccaaagagttcctgtaaatggaaaagaaaaatcacaactattcctgggagtcaagagataaaaaccatattaaattgsttaagagaatggattctaaatatcatctatggagactggtggagagagagtagagctgaccattggaaggactaagcaccagccctggctctttatgaactagctaagggagtctgccaatgtattccacctctgtgaactacagtctctatatctatattctatagattaaaaacttaatgttcattgcctgtagttgacacgttctccgcttttttgatctgctagccttgacatctaagaaacggaattcatatactgaaggatttgctatctgtggaaacaaaataagaaaacttacttctctgagaaagaaaaaaatatgaaatcagaagtgaatgccct

SEQ ID NO: 425408 - DNA, 472 bp, Homo sapiens
ctaactggaacttcaaagaatcaaatgctctatggtggggggcagagcgccaaagagttcctgtaaatggaaaagaaaaatcacaactattcctgggagtcaagagataaaaaccatattaaattgcttaagagaatggattctaaatatcatctatggagactggtggagagagagtagagctgaccattggaaggactaagcaccagccctggctctttatgaactagctaagggagtctgccaatgtattccacctctgtgaactacagtctctatatctatattctatagattaaaaacttaatgttcattgcctgtagttgacacgttctccgcttttttgatmtgctagccttgacatctaagaaacggaattcatatactgaaggatttgctatctgtggaaacaaaataagaaaacttacttctctgagaaagaaaaaaatatgaaatcagaagtgaatgccct

SEQ ID NO: 425409 - DNA, 501 bp, Homo sapiens
tgtttttctcaaacaggcctgtagaaagtcatgcacagacaaaagaccctgatacttactgaatggcactagaatgcaagctcgataaaatcagtgatttttgttttattcacagttcatggcaggtagactccaagatagcccccaataacccccacctcctggattcrtgtccctgtgtcatctctacccaagtgtggatggaccttgtgactaaccaacaaaatgtgataaagatcatggaatgtcacttccatgattgggctccataaaattgagacttttatcttgctattagactccctttcttttgctggctttcataaagcaagatgccatgtaaggcaagcccatgcgccaaggaactcagggcaccagggaacagctagcaagaaattgagttgaattaagccaacaatcacatagtcggctcagaagaggatgctttactagtcaagtctttgtatgagactttggcactagctggatccttgattgtag

SEQ ID NO: 425410 - DNA, 607 bp, Homo sapiens
taaccctaggtatttcccctaggaggaatgttagtggcaccttcatagaacatagctgccataaataacaacatttgactatattttacaataacaatgccttttttagggtgcttagcaaagagatcccagtaactactaaataatctctctaagttcagagctcctgccttaaccccaaagaatgaataccgttgactttgaggtcacatattcttggtagacgaggtattttggctcatgggcttcccagcckctcagatccaatcatacacagtgtttcacctattctgcctggatgtaagtcaggatctggtcataaaaataaaaggctgcctaattatgaactaactcaccttcctgaactcagagctgggccctctcaaaagcacaagtgactcagaatataaagtgcttcctcaagctcctctcacatagtttacagccaagaacaaaactggcccatgtagaagggacctaatttttttctgaagttcttcataacaaatcctttatgaaatctttatggtaatgctaatattaatcattgataaaattgccttattgtgtttcatttattatttcttcagatggatgtattggtttc

SEQ ID NO: 425411 - DNA, 558 bp, Homo sapiens
agagcttactcaaatgtcttttgatgcaactctgctttataatcacacaagtgctggaaatgtgtggacaaggatatttactgcctaaagagattgcaaacaacttaagaaggtgattaaatacatttggtacagccatactatggaatacaatgtagctatgttaaacaggagggaaactggatagtagtactgatgtggagcaatctccatgacatggtggtaagtgaaaaaagcaacgatgcacaataggttctgatctakacatagaactctctggaaggataaaaaaagaaacattaaaagtgcctcaagagagaagaactgggagcctttgggtgagggtagcagaggagacttactcttcaccatggactcatttcttttttctctcttttccaggctgtgtgccccattcttattactctatctcagtgggtctcaatcccggctacacattggaatcacttggaaagctttaaaaataaaaccaaacctgtgcttgggctccaccataggtgttcaccacagctgtcagtaagtatctgcagcaaatta

SEQ ID NO: 425412 - DNA, 558 bp, Homo sapiens
agagcttactcaaatgtcttttgatgcaactctgctttataatcacacaagtgctggaaatgtgtggacaaggatatttactgcctaaagagattgcaaacaacttaagaaggtgattaaatacatttggtacagccatactatggaatacaatgtagctatgttaaacaggagggaaactggatagtagtactgatgtggagcaatctccatgacatggtggtaagtgaaaaaagcaacgatgcacaataggttctgatctatacatagaactctctggaaggataaaaaaagaaacattaaaagtgcctcaagagagaagaactgggagcctttsggtgagggtagcagaggagacttactcttcaccatggactcatttcttttttctctcttttccaggctgtgtgccccattcttattactctatctcagtgggtctcaatcccggctacacattggaatcacttggaaagctttaaaaataaaaccaaacctgtgcttgggctccaccataggtgttcaccacagctgtcagtaagtatctgcagcaaatta

SEQ ID NO: 425413 - DNA, 604 bp, Homo sapiens
ttggggctgcaggaatggagtgaccgtttccccatcagcatcccctctgggtccttcaggtctgagctagaagagcaagggccagcgtcccccagcacatagttgtcttgatgccacagacaaaataatttaattcatgtatgcgtcctcataaatctgacaaatgtttagaaaatggaagctttgaaacgtgctgaatttgggagagaaaggtgtgccttttacaggaccatcaggtcatcgctgtgacccgggaatttttacatagtgaatacagatttcccagcccataaactgaactcggttaccaaagcatttttaaaatctcgatttacagttttctttctgtgagttggcggaaaatttaaactagttaattcttggtatattcaggaatttcaaaaatttctctcttttaggaggtacaagtcctttcttcccctttttttcccyaagtgggcaggcatttgtggcacctagcatcaggaagaaagtccttgctcagcctttctctgtgttgtcatatcacacagtgataggatcatagttaaagctaatatttatacttcgctctctattttaagagctttacataaaaaaatta

SEQ ID NO: 425414 - DNA, 531 bp, Homo sapiens
catagttttgcattcttaccaacagtgtgcaaaggctctcttttctccacaaccttgctaacacttatcttttggttttttatartatccattccaataggtggtagggtgatatcactttgtggtcttgatttgcatttctctgattggtgaaattgaacaatttttcatattcttgttggccatttgcatgttttctttgaagaaatatttatccaaggtccaagtccttggcccatttttatttgggttattaggatttcttttactatcgagttgcaggagttcctcatatattttgaatattaaccccttatcagatatatggtttgcaaatattttcttccattccataggttgctttctccttttgttgaatgtttcctttgttgtgcaggggctttagtttgaggtagttcaattcgtctacttctgtttttgttgcctgtgcattttgtgttatatccatgattcattgccaagacctttctcttacgtttttactataagttttacagttttgattcttac

SEQ ID NO: 425415 - DNA, 531 bp, Homo sapiens
catagttttgcattcttaccaacagtgtgcaaaggctctcttttctccacaaccttgctaacacttatcttttggttttttatagtatccattccaataggtggtagggtgatatcactttgtggtcttgatttgcatttctctgattggtgaaattgaacaatttttcatattcttgttggccatttgcatsttttctttgaagaaatatttatccaaggtccaagtccttggcccatttttatttgggttattaggatttcttttactatcgagttgcaggagttcctcatatattttgaatattaaccccttatcagatatatggtttgcaaatattttcttccattccataggttgctttctccttttgttgaatgtttcctttgttgtgcaggggctttagtttgaggtagttcaattcgtctacttctgtttttgttgcctgtgcattttgtgttatatccatgattcattgccaagacctttctcttacgtttttactataagttttacagttttgattcttac

SEQ ID NO: 425416 - DNA, 575 bp, Homo sapiens
gctttgcagttgcctggttgcctagtgctaaaggagagaggaaggagtgtaaaaggataatgactgtgaagaggcacacaatttctttttggaatgatgagaatgttttaaaattagattattgggttggctgcacaactctgtaaatatactaaaaactactggattgaacatttaaacgtgtacattatatatcaataaacctatttttttwaaaaaaataggagttttattaagcagaagtcaatgacctatgtcttttaaaggaactctaaggaagaaaattatcaaatcagcaagcaaaatagttgaagaaaccttaaaaagtaacttacaaaataatgaatcagtttctgtctttgcaaatggaactggaattttttattaatatttcctttaattatgaacataactctgaaaccatacataaaaatttccttcagaaaattccggtccctaggtagaattcaccccagactaagaaacatgataaataggattccaaccacataataaaaaataatccactgattcagtgtttttagttgtgagcagtataaactaactcagataat

SEQ ID NO: 425417 - DNA, 512 bp, Homo sapiens
caggttggggagaagacctctgcctatgtcaaagaattggtaggaaagaagagataaacaggraataattttcacaaagagatgcttgagctgaatcctaaagaataaatacaaattatctgaagaggagaaaaaaggcaagcacagagaacagagtatgcaggaacaaggaagcctaagtaatacacaattttttttccactaactgctaaataactttcgaagttaagaaagctaatggtatatcatcaggcaccaataaaactatcttgagatttgacaatgccaactgaaaaatttcttctgcaaggcagagccagttaccttttataatatcaatttagattcacacaaatgaagacattctcatgtcttcctcgcattcttctcagattctctcagccagccatcaaagtcatttgactgtacactaatctgattacaaatgatcaaagcctttcctaactgtaacatgtcagatcaaacttggtgtgcagtgtgtttcctgaatc

SEQ ID NO: 425418 - DNA, 553 bp, Homo sapiens
ttgctgtaattttctatgttagccatcttatcaggtgtgtaaaaaattacattgttgtttaaatttgtattttactgatgaccaaagctaagcaccttttaaagttgctcaccttttaaaacaagtattgccgcttaaggtggatcaccttttaaaacacttattgtacaaggttactcactttttaaaacacttactacacctatggcatttgatgatcaaagttgagcaccttttaaatatttattggccatttggagctattcttttgtgagcacttaacatttttgctcatttttttaaattggattacttktttcttctaattgatatgtagaatatttatatatatattttttaagtatgaatgctttatcagttatatacatttaagtatagtcttccactctgtcacctgaattttctgacatttgagtggtatcttttgatgaacaatagttctcaattttaatgtactacaatttaccaatcttttcctttatggttagtacagtgtcctccaaataaacaattgcctacccaaaacccatga

SEQ ID NO: 425419 - DNA, 553 bp, Homo sapiens
ttgctgtaattttctatgttagccatcttatcaggtgtgtaaaaaattacattgttgtttaaatttgtattttactgatgaccaaagctaagcaccttttaaagttgctcaccttttaaaacaagtattgccgcttaaggtggatcaccttttaaaacacttattgtacaaggttactcactttttaaaacacttactacacctatggcatttgatgatcaaagttgagcaccttttaaatatttattggccatttggagctattcttttgtgagcacttaacatttttgctcatttttttaaattggattacttgtttcttctaattgatatgtagaatatttatatatatattttttaagtatgaatgctttatcagttatatacatttaagtatagtcttccactctgtcacctgaattttctgacatttgagtgrtatcttttgatgaacaatagttctcaattttaatgtactacaatttaccaatcttttcctttatggttagtacagtgtcctccaaataaacaattgcctacccaaaacccatga

SEQ ID NO: 425420 - DNA, 581 bp, Homo sapiens
agcagatacaaccactgaggcaaaaatctgattgcaaggaacctgaactccctgacttgaacacctgcaaaggacagggattagggcccttaggtacactactctgcacccaggagttacaaatcactaacactctgaactgtgacttttctggcgycccattcagatgatttttatgatgtatgtggtttttatttgctctgtgggcttgcacaagccatcctaagaccttcatggtaaaatttcaatcctgtctcaaattgacagtttaaacccttaataaagccttatattttaaagcacacatacacacacacacatacatgtcaggcctctgaacccaagccaagccatcgcatcccctgtgacttgcatgtatatgcccagatggcctgaagtaactgaagaatcacaaaagaagtgaaaacgccctgccctgccttaacagatgacattccaccattgtgatttgttcctgccccaccttagctgagtgattaaccctgtgaatttccttctcctggctcagaagctcccccactgagcaccttgtgacccccgcccctgcccaccagagaaca

SEQ ID NO: 425421 - DNA, 572 bp, Homo sapiens
actgaggcaaaaatctgattgcaaggaacctgaactccctgacttgaacacctgcaaaggacagggattagggcccttaggtacactactctgcacccaggagttacaaatcactaacactctgaactgtgacttttctggcgccccattcagatgatttttatgatgtatgtggtttttatttgctctgtgggcttgcacaagccatcctaagaccttcatggtaaaatttcaatcctgtctcaaattgacagtttaaacccttaataaagccttatattttaaagcacacatacacacacacacatacatgtcaggcctctgaacccaagccaagccatcgcatcccctgtgacttgcatgtatatgcccagatggcctgaagtaactgaagaatcacaaaagaagtgaaaacgccctgcccygccttaacagatgacattccaccattgtgatttgttcctgccccaccttagctgagtgattaaccctgtgaatttccttctcctggctcagaagctcccccactgagcaccttgtgacccccgcccctgcccaccagagaacaaccc

SEQ ID NO: 425422 - DNA, 572 bp, Homo sapiens
actgaggcaaaaatctgattgcaaggaacctgaactccctgacttgaacacctgcaaaggacagggattagggcccttaggtacactactctgcacccaggagttacaaatcactaacactctgaactgtgacttttctggcgccccattcagatgatttttatgatgtatgtggtttttatttgctctgtgggcttgcacaagccatcctaagaccttcatggtaaaatttcaatcctgtctcaaattgacagtttaaacccttaataaagccttatattttaaagcacacatacacacacacacatacatgtcaggcctctgaacccaagccaagccatcgcatcccctgtgacttgcatgtatatgcccagatggcctgaagtaactgaagaatcacaaaagaagtgaaaacgccctgccctgccttaacwgatgacattccaccattgtgatttgttcctgccccaccttagctgagtgattaaccctgtgaatttccttctcctggctcagaagctcccccactgagcaccttgtgacccccgcccctgcccaccagagaacaaccc

SEQ ID NO: 425423 - DNA, 532 bp, Homo sapiens
tgggtaggcctggagaaatgactccaggaacagcattacagaactcacctgcccagtggtaacagtgcccagattgctcttctccattatccagccagagttccagatcagcctgaatacttcacctctgggaagactttgcagaacctccagatttatgccacctctataacctgtgtaatattattacaatgcatattatgttctatttcacttacagtcagccctccttatctgtgggttccacawacatggattcaacccacagtaaaatgaaaatatttggggaaaaaattaatgtttgagtctgtattgaacatgtagactttttcttgtcactgttccctaaacaatacagtataacaactatttacatagtatttacattatattgggcattataagtaattaaagatgatttaagtatatggaaagatgtatataggttatatgcaagtactgtgccattttatataaagcacttgaacatcacagattttggtatcaatgaggggtgctgaaaccaattgcc

SEQ ID NO: 425424 - DNA, 532 bp, Homo sapiens
tgggtaggcctggagaaatgactccaggaacagcattacagaactcacctgcccagtggtaacagtgcccagattgctcttctccattatccagccagagttccagatcagcctgaatacttcacctctgggaagactttgcagaacctccagatttatgccacctctataacctgtgtaatattattacaatgcatattatgttctatttcacttacagtcagccctccttatctgtgggttccacatacatggattcaacccacagtaaaatgaaaatatttggggaaaaaattaatgtttgagtctgtattgaacaygtagactttttcttgtcactgttccctaaacaatacagtataacaactatttacatagtatttacattatattgggcattataagtaattaaagatgatttaagtatatggaaagatgtatataggttatatgcaagtactgtgccattttatataaagcacttgaacatcacagattttggtatcaatgaggggtgctgaaaccaattgcc

SEQ ID NO: 425425 - DNA, 595 bp, Homo sapiens
tttctgaggtttaggtttaggttataaaagggggcatatgttcagagattaastcaattttttctcagtacttctattgtgtttttactaagtaccttttcttatatttgctataatctgtataaacttattgtcatacaataaatcaatattttaaaatcccaatgatttctttatggctacacaaaaacaagtagtaatcttgtttttcaaaaatgtttgtaaatttggtgaaagttttctatattttatgtggagctgttattatcttagcattttaacgtatgtaattccaaaattaaaaatgcatattttttttttccatcaattttattttaagctccggggtacatgtgcaggatgtgcaggtttgttacactacacaggtcaacatgtgccatagtgatttgctgcaaggatcaacccatcacctaggtattaagcccagcatccattacctattcttcctgatggtctctctccctccaccaccaccccccaacaggtcccagtatgtgttgttccctgccatgtgtcccatatgttctcatcattcagctcccacttataagtgaaaacatgtagtgtttggttt

SEQ ID NO: 425426 - DNA, 595 bp, Homo sapiens
tttctgaggtttaggtttaggttataaaagggggcatatgttcagagattaagtcaattttttctcagtacttctattgtgtttttactaagtaccttttcttatatttgctataatctgtataaacttattgtcatacaataaatcaatattttaaaatcccaatgatttctttatgrctacacaaaaacaagtagtaatcttgtttttcaaaaatgtttgtaaatttggtgaaagttttctatattttatgtggagctgttattatcttagcattttaacgtatgtaattccaaaattaaaaatgcatattttttttttccatcaattttattttaagctccggggtacatgtgcaggatgtgcaggtttgttacactacacaggtcaacatgtgccatagtgatttgctgcaaggatcaacccatcacctaggtattaagcccagcatccattacctattcttcctgatggtctctctccctccaccaccaccccccaacaggtcccagtatgtgttgttccctgccatgtgtcccatatgttctcatcattcagctcccacttataagtgaaaacatgtagtgtttggttt

SEQ ID NO: 425427 - DNA, 580 bp, Homo sapiens
ccttcctctgtgctgtcttagcattctgtacacaccatcatcacagcatttaacgcctaatatttaaattgcttatttgtatgtctatctcttcagctggactataaggttcttgagggcagggctatgtcatattcatttttctgtccccagcagtgtctgcacatagtaggtctttaataaacatggagcggaaccgtgggcatgcatgccctcaaggatttactgctaccactccacaaataaggatcatatgtaaaaacctaggtgaagagtggaaggaaaattcccatatcctctctcaagcataccctagagcatatcagtaatgcactcaagagggttacaatggggaacagccaccctgactgtgggctgaggatgggcgagtttggaatagaaactactattgaacatttctcaaatgccaggcattaaatatttcacatgcttggactcattttgattctcacaagaactgcataaggtgggtattattactcccaagaaggatacagagctrttaagtaatctgcccacagctggtccaaatcacagctggatttcaaaacccgcgctc

SEQ ID NO: 425428 - DNA, 587 bp, Homo sapiens
ggacgcgaagctcgcgggctatttaaatagccccgccccttctttcaccctccctctcccgagaggcgtcgcttccgccgcgcgtaggtttcaagacccgggaattcttgtaggcatgcgaagagccgcgaggtgccaaaggcgaagaggtcatcgctagtaagaatgatctgaccaataccccgatctgaagcyttctcttttaccatcatttaaaaggcttaagttgatgctttaactaaataaaaataataacagcgattaaatcactatactgccagaactgaggaagaaaagaaaaatgatagcttttccatcccttccttagtttctcttattgatgtaatgtaggcgtttagcggacacgtggctttccacggcagctgctggaagttgggacacaccctccggggaggctactcacaaactgaccacagagagggccacatgtaacccaagccagcgtcctgagggtttggggtcggatgtgttgacttctctgttcatttgtgctttggtttggcttcttaagctagcacccaaaagaaagagggtgtaatcagacgatatattagaaaaggcgtccc

SEQ ID NO: 425429 - DNA, 515 bp, Homo sapiens
tcatctaattggaacaatacagtgtatagtcttttcagattggcttctctcacttagtaatatgcatttaagtttcctccatgtttttttcatggctttatagctcatttttttagcactgaataatatttcattttttggatgtaccatagtttatttattcatttatctagtgaaggacatcttgattgactccaagttttggcagttaggaataaagctgctataaacatctatgtgcaagtttttgtgtgratataaattttcagcacctttggataaaaaccaagaagtgtgattgctagatcatatggtaggagaatgtttagttgtgtaagaaaccatcaaactgtctgtcacagtggttggcagcaataagtaagagttcctgttgctccacatcctcatcagcttttggtgttgtcattgtttgaattttggccattttaacagggatgtagtggtgtctcattgttgttttaatttgcatttccttgatgacttaatgatgtgaa

SEQ ID NO: 425430 - DNA, 515 bp, Homo sapiens
tcatctaattggaacaatacagtgtatagtcttttcagattggcttctctcacttagtaatatgcatttaagtttcctccatgtttttttcatggctttatagctcatttttttagcactgaataatatttcattttttggatgtaccatagtttatttattcatttatctagtgaaggacatcttgattgactccaagttttggcagttaggaataaagctgctataaacatctatgtgcaagtttttgtgtggatataaattttcagcacctttggataaaaaccaagaagtgtgattgctagatcatatggtaggagaatgtttagttgtgtaagaaaccatcaaactgtctgycacagtggttggcagcaataagtaagagttcctgttgctccacatcctcatcagcttttggtgttgtcattgtttgaattttggccattttaacagggatgtagtggtgtctcattgttgttttaatttgcatttccttgatgacttaatgatgtgaa

SEQ ID NO: 425431 - DNA, 608 bp, Homo sapiens
atccagtctgatttgtacaggtgagaatccaccacaccccactttccatctagccaaaaatccagactgtaagctctgttgtatcccagcacatagcacagtgcctggcacacraaaaggtgctaaacaaatatttgtttaatgatggaattttattcattaagccttgagtagagaaacagaacacataggccatctttctgatggcatacttcctctaccatgagaaggctgcgaaacgtaggaaagtgtgtgcatttttaatgattaaactacattgtatccaatgataataaatagtaaattatccactaaacataacaaaaatgtcaggactttaaaattatattattctcttcccatacagacattagcatgggatgacagaagctaattttaggagtcacctctactgcttaaatgtgtataaatcacactcctaaaaatgagactttcataccgaaataaaactgaaatttgccaatacacctcagagtaaaatgttatttaaggattagtaaaacatttattttcctagcatgtgaataggacacttgttctcataattttccttcacgtccttctccagaactgaatcttctggcatc

SEQ ID NO: 425432 - DNA, 568 bp, Homo sapiens
acacataggccatctttctgatggcatacttcctctaccatgagaaggctgcgaaacgtaggaaagtgtgtgcatttttaatgattaaactacattgtatccaatgataataaatagtaaattatccactaaacataacaaaaatgtcaggactttaaaattatattattctcttcccatacagacattagcatgggatgacagaagctaattttaggagtcacctctactgcttaaatgtgtataaatcacactcctaaaaatgagactttcataccgaaataaaactraaatttgccaatacacctcagagtaaaatgttatttaaggattagtaaaacatttattttcctagcatgtgaataggacacttgttctcataattttccttcacgtccttctccagaactgaatcttctggcatctggaagagattctttcaaatgcattcatacacctgcttcaaattcagactccccagcattggttaaagggagctcttccagatgatgccagaaggatggggctgcggtcaccagggcacactttgctaaggaaagagtggggt

SEQ ID NO: 425433 - DNA, 590 bp, Homo sapiens
gtaatgatgttatccaccgctatagtatcatgccgaggagttgtgaaactactctgccctacaaatcctctgtggagaagctgtacattaaacaaggaaaaacaagtcaatgaaagtataaaaattcaaaatacgcagagttcggggaaagaattataaaatacctcagttgaagaatattttgtttctggggttttactaaagtggtccctaaggaagtaattttgatagtctatgacaatgtgggatttatttttatagtgcttctatgtgttgacaacaaatccatcagaaatctttcttttttctttctttgtttttaagtctaggagtttaaaaatcttttttcctccgcatagtttsactgaggtgtctgtcaccatagtacctagacaatccctcaggcagagatatgagtgattaaatttctccctggcttgtgccctgtttgatccatgctaggcaggatttgggggagtaaaataaagaagcctgaagaatgaacaagaattataggaattttgtgcttgtgaattattaaaatttgggggggttattaggggagaggttaaatatttttcctttctgaa

SEQ ID NO: 425434 - DNA, 560 bp, Homo sapiens
atagtacagctccttaagttattttttaaaattctgccaaaacaaagcaacaatctcacactacttttattttctctagaaggcatttaaagtacaactataagaaaaatatttaactgcattataaagttgtgtgtttcttaattcttgatagcctgcctttaaaaaatgctgtgattcatcagaaaatgctgggaatcactgagtttgatcggctggtgcatgaatccacagcgttccatctgcttactggtgaatataaatgtttcttaatttactattgccttgaggtacaccttgattttgatttgatgatcattgatttatattagatatcttgttcaaaatttcaacccttttgatatgttattcttcctttaatatctcttatgtttaaatggatattgctatggtctgaatgytcatgttccccccaaatttttatgttaaaatcctaacctccaaggtaattgggagtgaggccttttgggaggtgatcagttatgagagcagagtcctcataaatgggattagtgcccttgtaagataggcccggggga

SEQ ID NO: 425435 - DNA, 507 bp, Homo sapiens
tgaagggtttcctcatcccagagagacattcttaggcaattgccttctttccagatggtgagactgagtaggtctggggcccatctggccttctggcttagagctgaatatgcggtagggaaggagggggtcagacactcatttattcgttcaccgaatgctcatagaatgcctgctccctgcaggtgctgtgggatacaacagatgctaagagagatatggttgctatacagatgaacctttctttccaaggagggagacaaaagcaaatcaacctgggaagaaaaacacttgaagytgtgatgggtgctaggaaggaagcctgcagaggcttgaatgggaaaatagtagactcgggatggggttgggccagggcaggtcccttcctcccagggaagagtggcgcaggcagagggagcagcgtacatccacctcaaggtagaaagaccgtgactggctcaagcttggctagagcatccgtggtcaagagcagtgggacaggttggg

SEQ ID NO: 425436 - DNA, 539 bp, Homo sapiens
tgtatttctttatggccttttgccttaaagaatggctgatgtcacttattatcctattatctcagcaaggcaaatacttacacttttacagctgcagatacataaaagttcttacttttacagtaagaactagtagatagtaagataggggagaatttggaggtttttggagaaaactaatatttagagcaatgttaactgaatgttccaaatagcacccagtcatgtaatagaacagttttgtgaaataactgtcccctacctgcccaccatttggggaggttactctttccttcccactgtcttctctgcccttgtggtctgacttccatccccatccatctgctgaaagtgtttcgttgaaggcagctaatgactgtcctgagtcytcatcctcctttccaaaagccttgatcatgttgacgatgcttttttccctactgggctattttttagcgcttctaaaaaatcctctccttagtttctacaacactgcctgctcactcttggttcctttcctgtcttgaagactgctgctg

SEQ ID NO: 425437 - DNA, 561 bp, Homo sapiens
accagcctatctatgattcccaactccactgagctttgagggagagaacatggggggtaagagccaagggagggtgtggaggcagggcgattggcatccaagtggtgcagaaatcctcctgggaaattcgtgaaacagaatctcacaggagtccaggctcagggcctgccaatctggctgcttgcactgcccggggttctgattggacaagaattttcacaatttattggaaccaaatccaaggttgagccacctccaggaagcattctaaggaaattctcatgccagtcaataaaatttgtagtgggtgggggccagggtggcagaggaccagcgctgttccttattctaacttttctgctgcttctgacttagtaaattcctccccttgctctcttcctctcctctccttccaccctcaccccccgcccccaccccgcctccaggtttcctggcagctctggggaaatgttttattgcctyttgggggtagtcctaacctggacaaaggggaggaagactggcgctcctggctacttcacagagaatcgtgttacagtc

SEQ ID NO: 425438 - DNA, 555 bp, Homo sapiens
tattaaaaaacaaagtcttattagtcctcctccatggggttgcttttcatttatggggagttcacatggcttcaaagaagtgagaggcgtgtgaccatcctcagtcgccatgattccagatatccacgggctgtcagtcttctcatcttgtccccaggcactgccttccctcaaccctgatgcctgctgatgtgtctgtgtttctgcctgagccccagccacctagtccaggctcgcatctgctgctttcatactgcatggcattttcagagctgccagctgcctattccccagcacaggatccacaggcctatctgggagttctgttgctctcattcrcaagctctgtccatgggtaaggctcgtactcagaggcctgtggcactgatgctcttcactcttgctccttatggccccttgacttggagattctttttgtgtctgggaaggagtggagggaggtacacctggctcagcatgtgttctgtcaaacctattacttatcaagggtcttgactcttgaaacttgaaagccaaaagttgggccatttggtt

SEQ ID NO: 425439 - DNA, 518 bp, Homo sapiens
tacattctgggagaatgaaaaataaaacaggaaaagagtgcttgactggaaaattggaggcttccaagatactggtcctcctccaccactaattacctatggaaccttaggcgagccatgtaccttctttgagcccagtcactcctttgcagaatgaaaccgattagacttccaacactaacattctatgactttatttgtagacccttagtgccaacttgtattgagtcccataggggtagtttataatttcatcagtgaatcttgccaagatctcaacttggaaactaacaacaataaacaacagaaaaaaaaagttttttgcattaaawctctcactgtgaagagtgagaagtgttagagttggaattctaacaacaaaaggtggagagaggaaatgagtgaatacaatgaagaatcttctggctgagccctattcacaaaggccagtcttttatttttgagttacaataaccaaggaatccatggtttggtggccccgctggtcacacccagct

SEQ ID NO: 425440 - DNA, 539 bp, Homo sapiens
aactgatactccaggttctctcactggaaagaataacaaaaacaaaaaccagcataactgacttccacaacaaagagcatatacaagattgtgcgcacacactcacacaagttcatgaaggatcttggacccaattatgcaggaatcaagctgggacccgacttgccatatggatttacttttactagaggtttccaaatattcaagtttacagcaggcttcagtaccatatttttcaagaagtctcttctccccacagctttaaatataaccgagcaaaagtcaagcctgatctccaaagaacaaagcaggaaaagttcatagatcatcactggrtgaagtaccaaggatgtatcgtatgacaggatcagggtgtcaggccaattttaagactgatgtctacccatactacgaaaaataatactggagaaaaatagatttctggagatcagaaagaaacagtatggtgtgcatttcccaaatgcattcagattagctttaaacaacaacaacaaaaaggctattttgttggccaaaaa

SEQ ID NO: 425441 - DNA, 565 bp, Homo sapiens
aattaaagtaagaatatcaacctaacgagattaaaattaagtaagaaaaaaatttgcaggtaacagctgaaaaacattttttaagattaacaaagggataatttaaatttaggtttgtaaaatcactttcatatgatgccacattccaactttatagtctttggagatcttttacttttttcagttttaattaaaactgaacgtaatacagacttgctggggaaatgtgatatcaatgcctgctcttaacttacatatttgaatgtaaatgtaaatttatttttaaaaaaaatttttagagacaggatcttatatgttgcccaggctggtctcaaactcctggcctcaagggatcctcaaggcttggcttcacaacgtgccacgattacagatgtaagccactgctcctggccttaaatgtaaatgtaagtggcatagtttgatctttaatagctayaacagtatcttaacaccatttttttaattaagaaaaacaaattcaaacacacaacctgattacagtaaatataaattccaatgcatagggttattctataaaacagat

SEQ ID NO: 425442 - DNA, 604 bp, Homo sapiens
aaaaaaaatttcatgcacagtaggtatttgtttgtttctgtctttttcggagaccgggtcttgctctgttacccaggttggagtgtagtggtgcgatcacagttcactgtaaccctgaactcttggactccaggtatccttccacctcaaccccctgagtagctaggactacagacacatgccattawgcccagctaattcttaaaatttttttgtagaagtgggaatctcgctatattgcccaggctggtctcaaacttctggcctcaaggaatcctcccaccttaacctcccaaagcactcgaattacaggcataagtcaccatgactggcagcccagtgggtatttcaaagattcaacaagcactcctttataatacatgcatataaattaggaattgatggatatttcaacataaattgactatttcactctagtgttcaaaaccctcactgtgggccgagcatggtggctcactcctgtaatcccaggacttcgggaggccagagcaggagaatcacttaaggccaggaatttgagaccattccttttggcttctccaagcatgcatttcttccttctatgtgtgtagcaggaccctct

SEQ ID NO: 425443 - DNA, 496 bp, Homo sapiens
agctaggactacagacacatgccattatgcccagctaattcttaaaatttttttgtagaagtgggaatctcgctatattgcccaggctggtctcaaacttctggcctcaaggaatcctcccaccttaacctcccaaagcactcgaattacaggcataagtcaccatgactggcagcccagtgggtatttcaaagattcaacaagcacwcctttataatacatgcatataaattaggaattgatggatatttcaacataaattgactatttcactctagtgttcaaaaccctcactgtgggccgagcatggtggctcactcctgtaatcccaggacttcgggaggccagagcaggagaatcacttaaggccaggaatttgagaccattccttttggcttctccaagcatgcatttcttccttctatgtgtgtagcaggaccctctctggaatgagagtcttactagctacatccatataaggcaggtcagataattt

SEQ ID NO: 425444 - DNA, 601 bp, Homo sapiens
gccacaaggcaaaaaatttggtcagcttttagaaacctaaaaaaggcaaaggacagaattcctcctagagcctcagaagtaatgcaactctgcagacmacttggtttatttctttaaaacccaatttgtacttctgacccctcaacatgtcagagaatatatttgtgttttatcaaaccattaagtttgtggtcatctgctacagaagcaataggatattaatatctttctatactttgctacattttggtttttaataagtttgtaggagatgatagaattatttttatgtgtctctcatttacagagataaagtaatatatgtgtttttttaaactgattttttcttatgttgattaataaatcattgtttttcctgatgttcacaattcagaatatgctagctttggtcaagtgggtgaacattttctgaagagttttcaaatcagtttctgagtctgttttacttcatatatgagattgttttccttaatacatatattaccacaggtatgcaaaataacatgccctgaaaataatattattttttctaaaaatgattaattcaactcatagagaaatgtataattctgaaaaacta

SEQ ID NO: 425445 - DNA, 601 bp, Homo sapiens
gccacaaggcaaaaaatttggtcagcttttagaaacctaaaaaaggcaaaggacagaattcctcctagagcctcagaagtaatgcaactctgcagaccacttggtttatttctttaaaacccaatttgtacttctgacccctcaacatgtcagagaatatatttgtgttttatcaaaccattaagtttgtggtcatctgctacagaagcaataggatattaatatctttctatactttgctacattttggtttttaataagtttgtaggagatgatakaattatttttatgtgtctctcatttacagagataaagtaatatatgtgtttttttaaactgattttttcttatgttgattaataaatcattgtttttcctgatgttcacaattcagaatatgctagctttggtcaagtgggtgaacattttctgaagagttttcaaatcagtttctgagtctgttttacttcatatatgagattgttttccttaatacatatattaccacaggtatgcaaaataacatgccctgaaaataatattattttttctaaaaatgattaattcaactcatagagaaatgtataattctgaaaaacta

SEQ ID NO: 425446 - DNA, 490 bp, Homo sapiens
gctaaaaatatgtaagaaattatttcagaaagatatgtgggccaggttttaaaatttattttattttttttattttttattttttattattattattattattttttgagatggagtctcgctctgttgcccaggctggagtgcagtggcacgatctcagctcactgcaagctccacctccagggttcacgccattctcctgccttggcctccygagtagcagggactacaggcgcccaccaccacgcccggctaatttttttttttttttttgtatttttagtagagacggggtttcaccatgttagccaggatggtctcgatctcctgacctcgtgatccgcccgcctcggtgtcccaaattgctgagattacaggtgtgagccaccacgcctggatttttttttttttctgttggagtgaaacccagagcaattcatgcaagatccacatggttcttgagtataatatatcaacagaaacactgcca

SEQ ID NO: 425447 - DNA, 574 bp, Homo sapiens
acagtagtgtctatcttatgtaagtttttaagtgggctgtcaactctacaagggacagaactccaatttttattcttaatccaactgggtgggtacagaagaccttgagttagttggttgcatttcagaataytgcaaaactcaggggaaagttacaactgctctacccttctcaacaatgttgctgataccttttctctttaataggctgttgagtagggttgtgaacctcaggtaagaatggccagtcttaattcattacagccaggattcccaagtattctgtgggaagcccagctaatggggttccaggtgagtgggagctgcaagcaagacttcagtgacttccttgtattctgatcaaggatacacctggagtttcagggctctgtgccagagtcagcttcaaagctgagcacaggataccaaaccacttaccaggatgaagaggcacaatgctgaaaaggcctgaggtggtgagatttccctccccttctgccactgtgccactcgagcaccctgtgaccagagttagaggccactcactgacagcagggtgatttggcagttcttt

SEQ ID NO: 425448 - DNA, 532 bp, Homo sapiens
aacactggcaagaggatgatgactcatgttatttcacttaacctttttatcttttaacatgaaggrctcatacaggttgataagaaaccagtgacataaacagaccaaaaaatgatcagatctttcaaattagcaaaaaaataatattttttaaacaatgggtgaaaatacagtgtaacagtaccaattatcaacatgtgttgagaaccagaaaaatgttctttttctttgatcagcaacactatttgggaaaatctatcctcagggcctagcctggggccctggcacacagtaggcactcaacgaatatttgctgaacacacaaatacttatgatattttaaaaaattggcaacaatctgatacctaacaatagagggattaaatattatggaactgttaaataagatgcttatgaataccatgcagtaagatgggcaatatttatgccataagctttaatgaaacaaatgggtattaaatgtatgataaggttataaattactttttaaaagattacagggaaaaaaatt

SEQ ID NO: 425449 - DNA, 532 bp, Homo sapiens
aacactggcaagaggatgatgactcatgttatttcacttaacctttttatcttttaacatgaaggactcatacaggttgataagaaaccagtgacataaacagaccaaaaaatgatcagatctttcaaattagcaaaaaaataatattttttaaacaatgggtgaaaatacagtgtaacagtaccaattatcaacatgtgtygagaaccagaaaaatgttctttttctttgatcagcaacactatttgggaaaatctatcctcagggcctagcctggggccctggcacacagtaggcactcaacgaatatttgctgaacacacaaatacttatgatattttaaaaaattggcaacaatctgatacctaacaatagagggattaaatattatggaactgttaaataagatgcttatgaataccatgcagtaagatgggcaatatttatgccataagctttaatgaaacaaatgggtattaaatgtatgataaggttataaattactttttaaaagattacagggaaaaaaatt

SEQ ID NO: 425450 - DNA, 556 bp, Homo sapiens
gcactcttggcctctgcccctagatagcaatagcagtcctccctcaaccagcccaattttgacaaccaaaaatgtttccaggcatcaccagatgctccctgggtgagagtgatgaaayagtaggggattttccccttcttttcttattttctgtaattccattatattactttaataataaagaaaaaaacataaaaaataaacgaatgttattattctacgtcagtttggatgtttggactccattttggggttctttccattatatcacttggtctgctaaacattctacggtttggtaaggtgaagtgattcatgaaattttggttttatttttttcctgatactaaaaataaaacattctttcacttggaaatttggacacagaacaccaaaaaaaatccataatctcatctctctttttctgtcttttccttccttttttccctttaaaaacaataaagagtgaaacctacctgttctccctctaatttaattcctaaatataatcactgtcaatatcttggacatttcctgtgtctaaacacacacacac

SEQ ID NO: 425451 - DNA, 571 bp, Homo sapiens
tttggcattagttctggcccactctctgctacagaaccctttgtcctcttttctttgcatttcataaccaccatgaagtaccactgattttgtcttctaaatttgttccccctcattcctactctaacagtcctacccagggcctcattccagctactcccccaccatcagccatttatcttctcaacttcagttcattttgcacattcatctcagattaatattcccaaaatgycttaccctgtggctatcccactgtttaccataaacttttgtgtgtatgtgaggttttctatgacttctggccctagcaactttgtatctgctattagtcactagagcttcctctatttttaaatttattcactctacatgtgtgcatcgcctccagctgtcctccatactggactgttcttccttctgagccatctgcaagacacgtatctccaaagtccagctctcacgatctatgatgagcctttcctaatccagtatgtatatctttgcactgagttctttgccatatcttttaaatatgaaatcattctattttgtcctattcatcagtctc

SEQ ID NO: 425452 - DNA, 571 bp, Homo sapiens
tttggcattagttctggcccactctctgctacagaaccctttgtcctcttttctttgcatttcataaccaccatgaagtaccactgattttgtcttctaaatttgttccccctcattcctactctaacagtcctacccagggcctcattccagctactcccccaccatcagccatttatcttctcaacttcagttcattttgcacattcatctcagattaatattcccaaaatgccttaccctgtggctatcccactgtttaccataaacttttgtgtgtatgtgaggttttctatgacttctggccctagcaactttgtatctgctaytagtcactagagcttcctctatttttaaatttattcactctacatgtgtgcatcgcctccagctgtcctccatactggactgttcttccttctgagccatctgcaagacacgtatctccaaagtccagctctcacgatctatgatgagcctttcctaatccagtatgtatatctttgcactgagttctttgccatatcttttaaatatgaaatcattctattttgtcctattcatcagtctc

SEQ ID NO: 425453 - DNA, 571 bp, Homo sapiens
tttggcattagttctggcccactctctgctacagaaccctttgtcctcttttctttgcatttcataaccaccatgaagtaccactgattttgtcttctaaatttgttccccctcattcctactctaacagtcctacccagggcctcattccagctactcccccaccatcagccatttatcttctcaacttcagttcattttgcacattcatctcagattaatattcccaaaatgccttaccctgtggctatcccactgtttaccataaacttttgtgtgtatgtgaggttttctatgacttctggccctagcaactttgtatctgctattagtcactagagcttcctctatttttaaatttattcactctacatgtgtgcatcgcctccagctgtcctccatactggactgttcttccttctgagycatctgcaagacacgtatctccaaagtccagctctcacgatctatgatgagcctttcctaatccagtatgtatatctttgcactgagttctttgccatatcttttaaatatgaaatcattctattttgtcctattcatcagtctc

SEQ ID NO: 425454 - DNA, 534 bp, Homo sapiens
gtgtaaaatttcagaagtggagcagttacaggtgttgtaactgtatctgttggcattgaggagaaggctgtttgaggggaagaagtcagggaactgaaatgagggttgttggaaattcacaaagacaatgtggggacatgaggtagaaaggaaaactgtgagccagtcagatgcctgtctacccgccaagtagctaagaaagaggaaagatattcttttttttttttttttgagatggagtttcattcttgttgcccaggttggagtgcaatggcatgatctcagctcactgcaacctctgcctcccaggttcaagcgattctcctgcctcagcctcccgagtagctgggattacgggcacctgccaccacgtccactaattggctttttttttttttttgtatttttagtagagatggagtttyaccatattggccaggctggtatcgatctcctgacctcaggtgatcctcccgcctcaagctcccaaagtgctgggattacaggcatgagccatggcacctggccggaaag

SEQ ID NO: 425455 - DNA, 563 bp, Homo sapiens
ttgcactgcttttatttttaacttcttaagttgaatgcttagtccacttaaggttataataatttaacacaatatattttctctgcatttattttagagtttagattttctcttttacccaacagttattagagaagttttttaaatgtagtaattaaaacaaaaaaaatgttaaatttggagatgattttatcttttaaaattaaatttgagagtagttttatcaactattggatagtgttacctgttaatgattccttgtctcctgagttaaatgaagattcatggtgccttttctgtcctaaactttttccagctctttggtagaaataaaggctkttgaattctttttgatttgcattagaatcagaagcacgaaataaatccaaactggggacagatggtaattctctccagaaagtctcatcttttgaactttcacatgtgaggccttcagactcatctgatagacatttttgctgatcagtgaataaattacctttctgagagtacaatttgttacatgcagtctgctgtgcaccatattgtaagttgaacgggtg

SEQ ID NO: 425456 - DNA, 612 bp, Homo sapiens
gatatgacactttcatttaaatataaactttattttaacccttttcccatttagaaaaaaaaagtacagcactcatttaattttacataaacacgctctttgaggctgaagcaaatctgactgattttcgatgtgaaaataaaatataaaaactgtgcttggagttatttctaaacagaamtaacatcagaatcatctgaatcatcagaattttctatttcagaaaaatcagattcatcaatggagtcttcagccaacaactgtttgagaatgatgttaacatcacgagtaggaatactatgttttctaggatttgacattttcagggactgagaattactatattttgtaatggaaataccactactaaaaatagaatgctataaatagaaagatatcttttgtttccaaagttgatatgctacagcgatgcaaaaacaataataaaaacgagatatttcgtggcaaagttgtctcagggtaaacactgcagcaacaagcctggctggtgaggattctcagggcaaatgggaaaagggttaaaagccataattttatgatggcgataatgacaattaatttattagggcaggaattctggggctcatggct

SEQ ID NO: 425457 - DNA, 530 bp, Homo sapiens
taagtggtagagaatggtatggcaatatggcacagcctcaaaggaggaggaataatgttttgaaaatgataatggaaggtaagaaatggctttctcatctctatgcggtatatatgtagagaaaattatcagcttttatatgagaggaagtagtatcatgcggagaaagttgggcttcagttaacacaaaggagatgaagaaagagcagagtttgcataacaagcaatggattctacagcaccaagtggaaagggttgacagaaggggcagtagtgggtagaaaagtgtagtaagtgaggaaaacagacaagagaactgaagaattgagaattgaagaatgatactaamacgagagtcctaggttcaaatcctgactccctaactacctgtgagatttggcatgctacatcacctttagcatgaactttagtttctttatttgtaaaactgagttaataaaacctattcatagaattgtaagtagctaatattatttagcaactagtaggcaatcaataaaagtgtcaat

SEQ ID NO: 425458 - DNA, 618 bp, Homo sapiens
aatgaggacccaaaatgtttatgacaaaatgtcaaatctcacattaaaaagtcatgcatgataatgattatacaatcaaatctgctagattagagaatcctaaacctatttttctaggtgatgacagtgttaaggacaatttcttttaatgaatacaagcagaataaaatgtatatatttcattagaattatgtcaaaatgtatgtaatscttagtataatagaaaagaaggctacatcatttcttataaggtgtatctttttcagaaaagtaagttatttcagatgaaatatttaataggaagaaaagaggaaataaaatattccccaccaacccaatgctgtgtccaagctgcatgttaaaaggacatctctaattgttaccagaagatgtaagagagcggcatgcttgaaagtcatttctctttcatcaattgtacctaagtaagcaaaaatgtattttaaaacatagactatacattacagttttagaatatgtatcagaatctgcctaataatgggagctaacatttattattgagtgcttactatatgccaggctgtatataagctggctatttcattgaatctataacaacaatcccatcagacaagttta

SEQ ID NO: 425459 - DNA, 618 bp, Homo sapiens
aatgaggacccaaaatgtttatgacaaaatgtcaaatctcacattaaaaagtcatgcatgataatgattatacaatcaaatctgctagattagagaatcctaaacctatttttctaggtgatgacagtgttaaggacaatttcttttaatgaatacaagcagaataaaatgtatatatttcattagaattatgtcaaaatgtatgtaatgcttagtataatagaaaagaaggctacatcatttcttataaggtgtatctttttcagaaaagtaagttatttcagatgaaatatttaataggaagaaaagaggaaataaaatattccccaccaacccaatgctgtgtccaagctgcatgttaaaaggacatctctaattgttaccagaagatgtaagagagcggcatgcttgaaagtcatttctctttcatcarttgtacctaagtaagcaaaaatgtattttaaaacatagactatacattacagttttagaatatgtatcagaatctgcctaataatgggagctaacatttattattgagtgcttactatatgccaggctgtatataagctggctatttcattgaatctataacaacaatcccatcagacaagttta

SEQ ID NO: 425460 - DNA, 548 bp, Homo sapiens
atctctcttaatagcacagaatcactgtagcagaaacagactctgtatgaggagcttagaagactggtctttgttttgagtctgttgccaataggagttaaagagtctctggtcctcttggccattcctctccacacccataaaatgagaggcctgtacaaggcatctcacaggactgggatttaatgaatatggttctctggttgatactgcttttggacctcagagtgtggagygggagggatgtggtttcagcataagagagtagggagtggggaatggagcgcatggcagggcaccagagaaataaaacaaggacaatcaaggaatggagggaagctgctgctcccttcccttttagtggcaattgtcagcctgctgaggccaagacgccctactgctccaagaagcactgcccaagatttctgaagggcatggcagtctgctcttcccttcacccacagcaagtcacactttattcctctcgcacctccagcaatgtctctaatatccagaggaacctgaatattttaccagccagaccaagg

SEQ ID NO: 425461 - DNA, 632 bp, Homo sapiens
atgatacattgattagcctttgaccttgggtcactgactgcagcagtgatttttggctcagctcagagtttaccttacttatccagccttcagatcctgtgtacgcatgggcttcgttcagttgtgtcttttacttacaaagtaagatctttgagatccctatttttaattgtaatggtttcttgggagatggtattcaccgagactctatcattcctttaatttagatgaatttgggtaatgaaaatgactcattgttctctgttaattattctagtttttcagctggtggaatagctacaataaggcaatcagctacctagccacagtgcccaagtaccgtatccaagctacagagattgccaagcagcagggactgctcaaaaaagccaaagaaaaaggcaaaaacaaaaagtccaaagaagaaattcgtgaygaggaggagaacatcataaagaacattataaaaagtaaaatagatataaaggggggctatcagaaaccccaaatctgtgatcttctcctgtttcaaattatcttagctccttttcacctatgctcatatatagtttggtattgtcggtggatctataattttaacatcaaaggcaaagaatatggagaggaagaga

SEQ ID NO: 425462 - DNA, 609 bp, Homo sapiens
ttgagagcctttcctggaccaaattatttttcttgagaccagtcacagtgtttgacatcagaacatcagagattcatctgatgaaaaaggagagctttaaaatattcttggtccttaattgccctccatggaaatattaatttccaaggaagtactgtgaggctgagaaaggttctggagttcttgagataaatttcatgtttcagagccagactgtctcctgcccactatttttgttttaacttctcaaatactttttaatgttttggtttaggagtgcagtggaaatgatgcttatgaatatgaaaaattaaaagggaagcaggacaaacacatttagttcaagttcatctttttaagttgttggcagagaagggttttatcttaagttaaggaatgcctaggaaaaaaaaatctgtaatgttaaatagaaccacatgtcaaggcagggggcccagagaataggggaatagtttggagaggcctcaaggatggctcaggaagcagaattgccacactgggcagagggtctaaccattgggacaaaggggcttytgagcaccatctcacacatcacgcctacaatcgacagagcagccttcagggcag

SEQ ID NO: 425463 - DNA, 379 bp, Homo sapiens
tgggtatttcttcatagcagtgcaaggatggactaataccccccacataccattacattgtctttcagcttgccactttgcactgtgatcaaattatgcagtgattataactcagtaatatctgttttcaaatttctcccctctgtgccagcatttagagcagcaactatgactcctttgcttaccagtaggtttstaattccaccaccatgcctggtacatagtaggtgctcagtaaacatttgttcaataaattttataacgtctctgcttacaaattttcaatggcttcccgtagacttcctgctgacttaggcataattaagaatcatgttgtgtagggtggggcagagggattcaaaggatttccttgggtcta

SEQ ID NO: 425464 - DNA, 566 bp, Homo sapiens
aaaaagggatggggaagactccagaacaaaattaccctatttcaaaatgtttaagcaggacattcccctgcctgcaggcyacagaaccttagcctgatcctgacttggacgttctcactgactcaggttcactgcccagatctgtgtcagtgtcattgggcaaatattggaggtggggggtgtcagcatcctctctcactcattggaaagaggccagggtgtagttccattttcacaaaacagtcttacagttcagggaccaagaatatggggtcagggaagcaaggagagaagctgcccttgttccataccttccatccacttctgctccacaaacctgtgtccccagggatagctaacacatcaggcgtggctgtgagggagacagcaagtagagtgtgggagtggtactgcactgtccctttcccaggatttgatcctcaacccaggagtacccctgctattttcatgttgcagtaagtttgtaggtcatgtttgcatttggcatgcgaacatgaaacctgttgggagtagttggctggagtaaaatggaggtaaagtttttg

SEQ ID NO: 425465 - DNA, 566 bp, Homo sapiens
aaaaagggatggggaagactccagaacaaaattaccctatttcaaaatgtttaagcaggacattcccctgcctgcaggctacagaaccttagcctgatcctgacttggacgttctcactgactcaggttcactgcccagatctgtgtcagtgtcattgggcaaatattggaggtggggggtgtcagcatcctctctcactcattggaaagaggccagggtgtagttccattttcacaaaacagtcttacagttcagggaccaagaatatggggtcagggaagcaaggagagaagctgcccttgttccatacctyccatccacttctgctccacaaacctgtgtccccagggatagctaacacatcaggcgtggctgtgagggagacagcaagtagagtgtgggagtggtactgcactgtccctttcccaggatttgatcctcaacccaggagtacccctgctattttcatgttgcagtaagtttgtaggtcatgtttgcatttggcatgcgaacatgaaacctgttgggagtagttggctggagtaaaatggaggtaaagtttttg

SEQ ID NO: 425466 - DNA, 566 bp, Homo sapiens
aaaaagggatggggaagactccagaacaaaattaccctatttcaaaatgtttaagcaggacattcccctgcctgcaggctacagaaccttagcctgatcctgacttggacgttctcactgactcaggttcactgcccagatctgtgtcagtgtcattgggcaaatattggaggtggggggtgtcagcatcctctctcactcattggaaagaggccagggtgtagttccattttcacaaaacagtcttacagttcagggaccaagaatatggggtcagggaagcaaggagagaagctgcccttgttccataccttccatccacttctgctccacaaacctgtgtccccagggatagctaacacatcaggcgtggctgtgagggagacagcaagtagagtgtgggagtggtactgcactgtccctttcccaggatttgatcctcaacccaggagtacccctgctattttcatgttgcagtaagtttgtaggtcatgttygcatttggcatgcgaacatgaaacctgttgggagtagttggctggagtaaaatggaggtaaagtttttg

SEQ ID NO: 425467 - DNA, 576 bp, Homo sapiens
tgccatccagtttgaaggttttattccaactgtgttttctcaaaaccatcataacatttgggtgttggaaacaaaagacattaggtggatggacaccaacctgactagcatggctttgatgccttggcatggaaaatctttattgagtcttccagatggcaagaggcacagacaatcattatatatttggcctctaaactgaaagtgttcctggtaccaatattggaaaaaaaagaagtggtactcatttactgagcaccaactatatataatctattgcacttgctatgaatttctttatatactcttatgtttccctcacagtrtatctgggaggtagaattactattcctctattaaagataaggaaacagtggtgtaaagtttcaagtgagatcttcaacccactttctcacagttgcccccagagcctgccgctgagaacttacaatttggagaaacgacagctgccaccaggggcttactgattggtgtgctctttttgaagaatgaacagaagtaaaagtcatacagttaggaaaagagaataaaactgtctttattcatagaataatg

SEQ ID NO: 425468 - DNA, 576 bp, Homo sapiens
tgccatccagtttgaaggttttattccaactgtgttttctcaaaaccatcataacatttgggtgttggaaacaaaagacattaggtggatggacaccaacctgactagcatggctttgatgccttggcatggaaaatctttattgagtcttccagatggcaagaggcacagacaatcattatatatttggcctctaaactgaaagtgttcctggtaccaatattggaaaaaaaagaagtggtactcatttactgagcaccaactatatataatctattgcacttgctatgaatttctttatatactcttatgtttccctcacagtatatctgggaggtagaattactattcctctattaaagataaggaaacagtggtgtaaagtttcaagtgagatcttcaacccactttctcacagttgcccccagakcctgccgctgagaacttacaatttggagaaacgacagctgccaccaggggcttactgattggtgtgctctttttgaagaatgaacagaagtaaaagtcatacagttaggaaaagagaataaaactgtctttattcatagaataatg

SEQ ID NO: 425469 - DNA, 576 bp, Homo sapiens
tgccatccagtttgaaggttttattccaactgtgttttctcaaaaccatcataacatttgggtgttggaaacaaaagacattaggtggatggacaccaacctgactagcatggctttgatgccttggcatggaaaatctttattgagtcttccagatggcaagaggcacagacaatcattatatatttggcctctaaactgaaagtgttcctggtaccaatattggaaaaaaaagaagtggtactcatttactgagcaccaactatatataatctattgcacttgctatgaatttctttatatactcttatgtttccctcacagtatatctgggaggtagaattactattcctctattaaagataaggaaacagtggtgtaaagtttcaagtgagatcttcaacccactttctcacagttgcccccagagcctgccgctgagaacttacartttggagaaacgacagctgccaccaggggcttactgattggtgtgctctttttgaagaatgaacagaagtaaaagtcatacagttaggaaaagagaataaaactgtctttattcatagaataatg

SEQ ID NO: 425470 - DNA, 497 bp, Homo sapiens
aaagtcatacagttaggaaaagagaataaaactgtctttattcatagaataatgattgtttaggtaggaaattaagaaatctacaaaaagttactagaacyaataagtgaatttagcaaggtctcaggataaaagatcaatataaaaacgtctatttctatacactagcaatggatgattgaaaaatgacatttaaaaacatttcacttacagaattcctggaaagcattaggatctgaatcatttatcattacggtagtcttctatccagaagaaaaagggagtcaacagagaagagttgctaggaaagtcaaatgtctacattttacttccaaagagttgagaatcctcagactctttacaccatgcccagagatactaaataatttgcccaaatccacacaactagtaagcccaaaaactgggatttgaattttggcatctttgattaaaaaaatgtctagttttttccacagcgcccctgcaattaattaaag

SEQ ID NO: 425471 - DNA, 497 bp, Homo sapiens
aaagtcatacagttaggaaaagagaataaaactgtctttattcatagaataatgattgtttaggtaggaaattaagaaatctacaaaaagttactagaaccaataagtgaatttagcaaggtctcaggataaaagatcaatataaaaacgtctatttctatacactagcaatggatgattgaaaaatgacatttaaaaacatttcacttacagaattcctggaaagcattaggatctgaatcatttatcattacggtagtcttctatccagaagaaaaagggagtcarcagagaagagttgctaggaaagtcaaatgtctacattttacttccaaagagttgagaatcctcagactctttacaccatgcccagagatactaaataatttgcccaaatccacacaactagtaagcccaaaaactgggatttgaattttggcatctttgattaaaaaaatgtctagttttttccacagcgcccctgcaattaattaaag

SEQ ID NO: 425472 - DNA, 578 bp, Homo sapiens
tccaggattttcaatgattatttctggtcacaccactaattagtggcagaattggtcttggaatccaattagagccagactccaggccagttctatgatacaccccaagctcaggaatttcttcctcctctttttaatttctatgagacastttcaataataactttgaggtctctagttctgagtggccatgattttgtaatgcaagtgatgctagctcagaaactccatgcctggccctctctagacacccaagggaagggctgcagaacgtgggcaactcccagggcttttgaggccctggagcttcccacccggaacacaaaatacactgtcatgtgtcatcttgctttgtgacttctcatcttaaggtcttgtcaaagctggccacgtaggcctttgaaaatatcatagagttctttgaagtaggttgtttacttttcttgaaacacatctgtgattcatcttatttgcattttaaaatgtaagtgttttggccagcaatttgagggagaagtccaatagaaaatcagtataccagtccaatttgacagctttcatctaatctatcatcactt

SEQ ID NO: 425473 - DNA, 501 bp, Homo sapiens
tggaaaacgttctcatgacatttttctaaattcttggacacacaggcacacagatgcacacacacacacacacacacacacactctctctctctctctctctgtctttcctgatcaagtattaaagacatagtctaagtatcagccactccagtaagttttacctatttatctactcatcgtcatctctgtcatcactaacaaccttgaactgcaattttaatcatatatgtaatcagatgattttgattagatttatttaaaatatacatttatatttatagatatataaaaatatacttatatttatagatatataaatatatgtatttcccccactcaaccctgagttccttaggggcatgtcttatgcaccattgcagtcccatattctactataggacctgacaccatttttcctttaactyggtgctaaaaaccctcttggcagttttcctatcctgaaactgaccctttcccagaatgagagcgatactatcta

SEQ ID NO: 425474 - DNA, 540 bp, Homo sapiens
tgtctttactttaatctcttaatcctgtcatcttgtaagctgaggaggatgtatgtcacctcaggaccctgtgatgattgcgttaactgcacaaattgtagagcatgtgtgtttgaacaatatgaaatctgggcaccttgaaaaaagaacaggataacagcaatgttcagggaacaaaagagataaccttaaattctgaccgccagtgagctgggcggaacagagccatatttctcttctttcaaaagcaaatgggagaaatatcgctgaattctttttctctgcaaggaacatccctgagaaagagaatgcacctctaagggtgggcctctaaaatggcccccttgggtgtgaccatcttctacggttgagactgtagggatgaaataagccccagcctcccatagtgctcccaggcttattaggatgaggaaattcccrcctaataaattttggtcagaccagttgctctcaaaccctgtctcctgataagatgttatcaatgacaatggtgcccgaaacttcattagcaattttaat

SEQ ID NO: 425475 - DNA, 617 bp, Homo sapiens
ctgccattcacttcaacttggctctcaccagtgcttgacacatcttctctccatttctccctggcaggtctccaaaagggctgctttaaaccattcctctctccttagcccccagtcccacatgctgagagtcaagagaacatgtgtgagaacgtaggtgtgggcatcagatggaactcagcactcaccagctgcaggaccttggttgcatttcctaactacatctggaaaagaaagatgatcataactagaacttaacctttgaaggttttatgagcatgaaaagatgtctggaaagaacttagcccaccaggacagggctccrtgaatgtcatctgtgactgtgggtacccttccttcaaatgagtgaacaataccctcctcattgacttggaaaacaagtgcccctagcatgctccttcaactacttgatattaatttccacatataactcactctttccacttaatcgccttttccaaaatgtacctccacccctgtgttactggatgccattgtttgtgcctcaggctccttgttgttgtcattatcccaccttctctgggactttccttggcctttaggaaaactttatactttgaaacaagtgggctgaa

SEQ ID NO: 425476 - DNA, 610 bp, Homo sapiens
ttttcttcattttcagaagagtaggaagatgagatcaacaggataacgaatgaatttgttgagaactaaactactataagaagtttgacaactgcatcatttgacacagaaaagagcaaaatcatgtccagtataagttggttaattcatgcagccttattgattccattatttgctggcagtagaggtagagatggaaccattaggaaaaaatcaggaattaagacacaatctcctctgtaattacttcagagtagttcagcatagacagtgggtgtctgtatgtatacatgtatataagttaacgtcaatatacactccaggtgtaattagtttaacatctgcatttcctaataagaaattcacacaattcatgcttcaggatggttggttagcatttgacagtccccggttggaaagcaaaggaaagcacttcaggaatagttatctaaatatgcaccagatggtttgttaattagtataagggatgttatgttatccttttttttttyccactggcaaatgagcgctattcaagatatgttgttggttagaaagattgcagacatctccacccttgcttgagtagggaatatgctctggtgtgccc

SEQ ID NO: 425477 - DNA, 605 bp, Homo sapiens
atttcccactttatcaaacacagacggttaatgtatgttcctgaccaatccttgaatcccagtgatgcagcctcaggcaacattctagaataagttgacattatgcaatagcctataaaaccagcacggaggaccctgccaacttctagaaatgtttcatcacctcacaaaggtaattgacctagtataatgcttatgttttggcgaaagtccagcttctgaccaatattcacagcaagacatttatgaattgggattttgtttgcacttttattgtgaaggtttgtcattcataactttgtgcaagattttccttatagattcctgctatgaattactagaagcttgaaatccatgtctccattcccttgtgcattctgtttccttgactacaattctttttctcctattactcctctttcctttcatcaagagagcccctactcattcttgaacacycagttccaaaagtctcctttgcaaggtaacttctgtctcctcaagacatttgctcaccactttagcacatttgttcactcaagaaataattagtacacgcttgttgtatgcaaacaagtgatcatttctaggaactcagcaatgag

SEQ ID NO: 425478 - DNA, 634 bp, Homo sapiens
  misc_feature (1)...(634): n = A,T,C or G
ctgcaagacttgaacacattctcacctagaatacccttgcttctcaagaagcttcagcttaacattttaatctggtaatagaaactgtagtggaggagactcaagagagacaggttgacactctcrtgtgtatttgaattcctgaatagaaagccctttgcggaggcccaagaggtttctctgggatggacctgcactgatctaaaggggttacctctgaaatatgtgtttacattgtttagaagaacatatagttagttagaacaacaatggaatcattttcaggtagactggttcccctagcagggatgctttgcagcatgaagctgggcatctcaaaaagaannnnnnnnnnnnnnnnnnnnnnnnnnnnnnnnnnnnnnnnnnnnnnnnnnnnnnnnnnnnnnnnnnnnnnnnnnnnnnnnnnnnnnnnnnnnnnnnnnnntagtataagctttcactttgctgttctgccttttatattcattttgcctctagtaaaatgggctagtgcccatcataatcctgaaaaaagactcattcttgattattgtcatctctacctgcctcatcattggccacctgcatcagaactcctcagctctgctgaagagatcataaataaagtatttgg

SEQ ID NO: 425479 - DNA, 560 bp, Homo sapiens
ttgagagtatagcctgcagctgcaggcacagtgctttttgcggagtttccagaaaacgcgagttgggtagaattggaactagaacctggcaacttggctttgaaaggacctaaatggaatcacacatgaggcaggaggtgcttggtgggcaragcagacggcttgtgcaagggaaaatgtgatattctagaaatatgcctgataatataatcaagggcagattgtgaggggctttcaaatgccaggtgaagaattttaaaatttaaagtgtttttgtttgtttatttatttatgagacagggtctcactctgtctaccaggctggagtgcagtgatgcaaccaaggctcactacggcttcaacctcctgggttcaagtgatccccccacctcagcctcacgaaaagctgggtctacgggtgcatgccaccacgcctggctaattttcatattttttgtagagatggggattttccatgttgcccaggctagtattgagctcctggattcaggcaacccgcctatctcagcctaccaaagtgttgagattacaggtgtgag

SEQ ID NO: 425480 - DNA, 464 bp, Homo sapiens
atccatggggggtcaaaatatcaacatcaacaggagtttggaagaagttgattattcaactctcatggatgactttgagcagttcaagacttcaggggaggaagtcactgtagaygtggtggaaatgatgagaactaagaattaggagtggagcctaaaggtgtgactgaattgctgcaatctcatgattaaaacctgaatggacaagaagttgcttcttatggctgagcaaagaaagtggtttcttgagataaaatatactcctgatgaagatgctgtgaacattgttgcaatgacaacaaaggatttagaatattacataaacttagttgataaagcagcatccggatttgagcggattgactccaattttgaaaaaatttctactgtgggtaaaatgctatcaaggagcattgcatgctacagagaaatctttcatgaaggaagaatcaatcagtgtggca

SEQ ID NO: 425481 - DNA, 515 bp, Homo sapiens
caaagctatgagttggtgtgatgacaagcaatcctttaggaagacacaggattcttgagaggtaaaaatacagagcctgtctacattctgctctccctcttggagagcaagctctaaagtatttagtggtgtgtgtggtggtatgtgccatagtaaaactccgctagggaagggacgtaacctgtttkgcttactgctctatccctagtggttagaataatgccaggaacacagtaagtgctcagtaaacattcattgaaagaatcaatgcatccactgtgaatgagtgaatgagtgaacaaatccacagcatgtgggttcctttgcctgcatttgtgtatatccttacacaacacaaatcaaatctatatgtggatatccattggtcttatgtttttcacatatgaaatgactttaaatcactgtgtaagtagctgtaaatgaaccctatagattttgctagctccttctctttgccagctccttaaatattagtgttcccctgagctttatcc

SEQ ID NO: 425482 - DNA, 515 bp, Homo sapiens
caaagctatgagttggtgtgatgacaagcaatcctttaggaagacacaggattcttgagaggtaaaaatacagagcctgtctacattctgctctccctcttggagagcaagctctaaagtatttagtggtgtgtgtggtggtatgtgccatagtaaaactccgctagggaagggacgtaacctgtttggcttactgctctatccctagtggttagaataatgccaggaacacagtaagtgctcagtaaacattcattgaaagaatcaatgcatccactgtgaatgagtgaatgagtgaacaaatccacagcatgtgggttcctttgcctgcatttgkgtatatccttacacaacacaaatcaaatctatatgtggatatccattggtcttatgtttttcacatatgaaatgactttaaatcactgtgtaagtagctgtaaatgaaccctatagattttgctagctccttctctttgccagctccttaaatattagtgttcccctgagctttatcc

SEQ ID NO: 425483 - DNA, 585 bp, Homo sapiens
gtaactgaaggtatagcaaacactaatcttcagaatttttagtcaaaaaggcctacataagtgaaactaaaggcaaaaaccaccaaagtttatggcctccctttctctctctctctttccacatatctccttttatctctcttacyttctctctttcatgtctacaagattctcttctttattagctctggtgcccacagtgcacctgcatttgtttctatgactttgcacaaggcaaactccatgaaatgcaatcatttgagacttcagacttcatggaaacatgtgcttttctgtcgagggcttaggctgcccaacctgcaagctctcctcagggaaaggctttgtaggacaggctcctgctgggcttgtgagcctagccagagatcagacacaaccttcaaaagcctatccgcaccttttcataattgtttctgcttttcaaaagaagaagaccttctatggcgtctagtgctatctttatatgatgactcatctgcctctttggcctgtactttcctgtttcaatcagtcttgcctctccaactgtttctgctactccttcatgtggtgtctggtacattg

SEQ ID NO: 425484 - DNA, 585 bp, Homo sapiens
gtaactgaaggtatagcaaacactaatcttcagaatttttagtcaaaaaggcctacataagtgaaactaaaggcaaaaaccaccaaagtttatggcctccctttctctctctctctttccacatatctccttttatctctcttactttctctctttcatgtctacaagattctcttctttattagctctggtgcccacagtgcacctgsatttgtttctatgactttgcacaaggcaaactccatgaaatgcaatcatttgagacttcagacttcatggaaacatgtgcttttctgtcgagggcttaggctgcccaacctgcaagctctcctcagggaaaggctttgtaggacaggctcctgctgggcttgtgagcctagccagagatcagacacaaccttcaaaagcctatccgcaccttttcataattgtttctgcttttcaaaagaagaagaccttctatggcgtctagtgctatctttatatgatgactcatctgcctctttggcctgtactttcctgtttcaatcagtcttgcctctccaactgtttctgctactccttcatgtggtgtctggtacattg

SEQ ID NO: 425485 - DNA, 585 bp, Homo sapiens
gtaactgaaggtatagcaaacactaatcttcagaatttttagtcaaaaaggcctacataagtgaaactaaaggcaaaaaccaccaaagtttatggcctccctttctctctctctctttccacatatctccttttatctctcttactttctctctttcatgtctacaagattctcttctttattagctctggtgcccacagtgcacctgcatttgtttctatgactttgcacaaggcaaactccatgaaatgcaatcatttgagacttcagacttcatggaaacatgtgcttttctgtcgagggcttaggctgcccaacctgcaagctctcctcagggaaaggctttgtaggacaggctcctgctgggcttgtgagcctagccagagatcagacacaaccttcaaaagcctatccscaccttttcataattgtttctgcttttcaaaagaagaagaccttctatggcgtctagtgctatctttatatgatgactcatctgcctctttggcctgtactttcctgtttcaatcagtcttgcctctccaactgtttctgctactccttcatgtggtgtctggtacattg

SEQ ID NO: 425486 - DNA, 576 bp, Homo sapiens
tagtatcaccttggatagagataaaagagcctccttgcaaaagaaatatgttgaaacgtgacttgagcatcagcttgctgtttagcaaaaagctctgaggttaatcttctcttttgtcagtagatattaccactgactctaggataatacatggataatgttttagctaatcctttaacatctttatttaactaccctgtaagcaatgaacttcggcctcagaattcctggtaatactgacatgaaacataaagatttagaagactcttgtattacccctgttttattgggtgaaaaagttcacagttctataaagtatatgtatctgtcagttcaaaaggcacagccaagctctttaragcctactctagagcctactttttaggtgagttgctcacacacacacacacacacacacacacaagcactcacacaaggacaggcacatgccacaaggatagctcaggaagtcatcattcatttggaatgtcttcattaataagtatatatagatagataacaaaagccatgattttgctgtctcctgctctgaaagaaatggaagatcccagtcgc

SEQ ID NO: 425487 - DNA, 459 bp, Homo sapiens
acagtaaaatcaacagaggattcaatatgccatatgttcaatagctccaagggaatattttaattattatttcactttgtcttaaacacaacagttgattacaaatataaaataaacatttgtgaacaaaaaattaaccaagttaaatacatcattgttaacaagggtagatgccaccaaatggaaaatgtcttaattgccaacactcacccttatatttaatatgttcatgtggccatgtctctagtacttattttcatgcaattttatttctacttttttttttaacatttaaagggcttgaaatagaaatggagaacatctgtttcaaagaaataaattgttctttaaaatgtcatcaaaataatgtagaaagccaatccttttcctatttttaaarctgtaattttttttttaaaccactatgcatactggggtacttttatggaaagaaataaa

SEQ ID NO: 425488 - DNA, 549 bp, Homo sapiens
tagctcccacttataagtgagaacgtgaagtatttggtttcctgttcctgtgttaattcacttaggacagtggcctccagctgcacccatgttgctgcaaagaacatgattttgttcttttttatggctgcatagcatttaatgttgtatatgtaccacattttctttatccagtccactgttgatgggcacctaggttggttccatgtcttttctattgtcagtagtactgtgattaacatataagcgcatgagtgtttttggtagaacgttttattttcttttggatatatacccagtaatgggattgctgggtcaaataatagttctaagttctgtgagaaatctccaaactgctttccacaatggctaaactaatttacatttycatcaatgtgtataactgttcccttttctccaagacctcaccaatatctaatattttttgatatttttaatagccgttctaactggtgtgagataattctcgtggttttgatttgaatttttctggtgattgacaacattaagcattttttcacgtgtttg

SEQ ID NO: 425489 - DNA, 487 bp, Homo sapiens
accatcaagctacatcacccataagaaagtagaattttcaatcattatcacaaataataaattcataacaataacctagaattaagcatttatgctattcaaggattcctgaattctgaagttggaaatttgggggataataagatatccttttggcagccatgacaagttaagtttttctagaaatttagtcaggtgcttcttggcagtcctgtgctttattctacccagaaattagggtatgtcatgtgggatctaaccaaatattagagttagaatatagctcaaggtgcccctggattaatggccatccggtgaaactgtttatcaacaagaagcagcatgagccattatcagttttygatcaataaagattgatttctataccggaccttgttttttcatacctctgtcctcatattttccttttctcttttagctctgcctatactgttggtattctttcctactcccaagcataaggttt

SEQ ID NO: 425490 - DNA, 576 bp, Homo sapiens
atgtgaaatcaaagttatgctaatatcaatttagaatcaatgttaaagttctcctcaaatccacttyactcagctgtatattttgttagcttgtttctactttatccatattataaaactattttaatttttctttcattttcatttagcaaaagcacagtctcagagttgacaacaccctaaaagtttcctctactacatatctgggatgactagccatctaaccttgaatatttccattttagggtgtatttaatatctatccatccatttagtatacccttatgaagtgctccttatgccttagataatcgtgtaaaaagataaatgcagacctactgacaaaaaaacttatattgttacagaattaataacactaaacaaaaaactacacacaccattgagataaatactgtgcagaagtaattcagggtactgtgaaagtcattaatggtgtaaactaacctagaaaactacgtcaggtgacaaagaagggtttcttattaggaagtaatatttaggctaacatgtaagggaggaataaaagtgaaatgacataggatagagggaggaaaa

SEQ ID NO: 425491 - DNA, 576 bp, Homo sapiens
atgtgaaatcaaagttatgctaatatcaatttagaatcaatgttaaagttctcctcaaatccactttactcagctgtatattttgttagcttgtttctactttatccatattataaaactattttaatttttctttcattttcatttagcaaaagcacagtctcagagttgacaacaccctaaaagtttcctctactacatatctggratgactagccatctaaccttgaatatttccattttagggtgtatttaatatctatccatccatttagtatacccttatgaagtgctccttatgccttagataatcgtgtaaaaagataaatgcagacctactgacaaaaaaacttatattgttacagaattaataacactaaacaaaaaactacacacaccattgagataaatactgtgcagaagtaattcagggtactgtgaaagtcattaatggtgtaaactaacctagaaaactacgtcaggtgacaaagaagggtttcttattaggaagtaatatttaggctaacatgtaagggaggaataaaagtgaaatgacataggatagagggaggaaaa

SEQ ID NO: 425492 - DNA, 576 bp, Homo sapiens
atgtgaaatcaaagttatgctaatatcaatttagaatcaatgttaaagttctcctcaaatccactttactcagctgtatattttgttagcttgtttctactttatccatattataaaactattttaatttttctttcattttcatttagcaaaagcacagtctcagagttgacaacaccctaaaagtttcctctactacatatctgggatgactagccatctaaccttgaatatttccattttagggtgtatttaatatctatccatccatttagtatacccttatgaagtsctccttatgccttagataatcgtgtaaaaagataaatgcagacctactgacaaaaaaacttatattgttacagaattaataacactaaacaaaaaactacacacaccattgagataaatactgtgcagaagtaattcagggtactgtgaaagtcattaatggtgtaaactaacctagaaaactacgtcaggtgacaaagaagggtttcttattaggaagtaatatttaggctaacatgtaagggaggaataaaagtgaaatgacataggatagagggaggaaaa

SEQ ID NO: 425493 - DNA, 602 bp, Homo sapiens
tctcctcaaatccactttactcagctgtatattttgttagcttgtttctactttatccatattataaaactattttaatttttctttcattttcatttagcaaaagcacagtctcagagttgacaacaccctaaaagtttcctctactacatatctgggatgactagccatctaaccttgaatatttccattttagggtgtatttaatatctatccatccatttagtatacccttatgaagtgctccttatgccttagataatcgtgtaaaaagataaatgcagacctactgacaaaaaaacttatattgttacagaattaataacactaaacaaaaaactacacacaccattgagataaatactgtgcagaagtaattcagggtactgtgaaagtcattaatggtgtaaactaacctagaaaactacgtcaggtgacaaagaagggtttcttattaggaagtaatatttaggctaacatgtaagggaggaataaaagtgaaatgacataggatagagggagkaaaaaatagaagtgtatttgatagaagaaagagcatgaactaatgtctatattaggctaatctataattcagtccagca

SEQ ID NO: 425494 - DNA, 602 bp, Homo sapiens
tctcctcaaatccactttactcagctgtatattttgttagcttgtttctactttatccatattataaaactattttaatttttctttcattttcatttagcaaaagcacagtctcagagttgacaacaccctaaaagtttcctctactacatatctgggatgactagccatctaaccttgaatatttccattttagggtgtatttaatatctatccatccatttagtatacccttatgaagtgctccttatgccttagataatcgtgtaaaaagataaatgcagacctactgacaaaaaaacttatattgttacagaattaataacactaaacaaaaaactacacacaccattgagataaatactgtgcagaagtaattcagggtactgtgaaagtcattaatggtgtaaactaacctagaaaactacgtcaggtgacaaagaagggtttcttattaggaagtaatatttaggctaacatgtaagggaggaataaaagtgaaatgacataggatagagggaggwaaaaatagaagtgtatttgatagaagaaagagcatgaactaatgtctatattaggctaatctataattcagtccagca

SEQ ID NO: 425495 - DNA, 604 bp, Homo sapiens
agcagttagaacctttgttcttttgctgtttatctatctgtttgttaagtatcccaatgcagaagtttcaggcagagaagtaaagttattgtggaagaaggaagttcacgaggagttgggtcagcagaaagatgcacaaatagcgggtgacctaccttttagaagaggacaaaagctaacatgtgagatggtatgcttttctgtgtattgactaaggaggtaagagtcttttttttttcagtcatgccagtttcttggaggatattgggctcttgagactaatgattaagcaaactgaaatgcagacagaggtcccctggttgtggttataaactasaagttctttttttttttttagacggagtctcgccctgttgcccaggctggactgccgtggcgcgatctgggctcactgcaagctccgcctcccgggttcacaccattctcctgcctcagcctcctgagtagctgggatacagcaagcctcctgagtagctgggactacaggcacccgccaccacgcccggctaattttttgtatttttagtagagacagagtttcaccatgttagtcaggatggtctcgatctcctgacctcgtgat

SEQ ID NO: 425496 - DNA, 591 bp, Homo sapiens
taaatctaaatgttgtatgagaaattcatacttaatatatttatttgaagctagataggtaagatgttcttttcaaaacacagtgcagtaaagaaatttacataaaagtaaattataagagatttaagcattcaaaaatttttctgagaatcctgttgttgtttattagacaawcgtctctccacaatctgcaatgaaagatacagcagagagactcaatacgagcaaataattatttttatctacaattaaatggcatgaactgtgaggacaagagagaaaaaatgtgaatcatacacctttgtaacctttacaaagatggtgagaagagttttacaagaaagaatactaaatatagactggtatcatgccaacttcaaattgctatattcagctcaataaaaaagtgaaatagaaaagagcaatcatgagaacgaaaatattcaaaaaagatgtcgaaaagcactgttttaaagaaagcccaaaaattgcatggaaattctctatatagtaccttgtgagactaaatctaccgcagttagtcatgagggaaataaatgacaacgatagtaagaatctaaaaagaatgaa

SEQ ID NO: 425497 - DNA, 495 bp, Homo sapiens
tgtttcaataaatgactaagacattagagcataagtagccaccctctagtaaagtataaaagaaaaagtaaagggggagagacagacagaggcattcttgccaaactcaggaatgaattactgtggtaacagctataaaggactccagtgcctcaactatgaaagaggataaaacctttgacccagcaaattcctgacacgagacagcagaaactgatggatacagtggcatctatgagatatcagatattcawagaagtaggcagcagaaggcttagaatcaggataagaggaaagcaagcattagaggaggtcaagtgatagctgatttgacttttgattgaatttacatttgaacaggtgaaatatctgcctggaacgcctaagaatatttagcatgttttacagaaggctaagaaatgcataagctagaatattttaaaaacaaatttaatttgttattactattaatatgactccatttgtagccaccta

SEQ ID NO: 425498 - DNA, 570 bp, Homo sapiens
tacagaaggctaagaaatgcataagctagaatattttaaaaacaaatttaatttgttattactattaatatgactccatttgtagccacctataggacatagaaattcacattaaagaaagaagtacaaaactaattgaaaataaaaataaccaagtgtaataatgttccaagtttgacaccatgtcaatgaggtgaaaacagcaacaatctacaatatcatactttctcaattaaacttctgagcactagtataaagtgataattagcaagattcaaattttattgccttaagaacaatcatacaaattagggtattcaggctgaaattaagtctataatatttactaataacaggtagtagttggaaaatgtcatgtaactattacaagcacttttatctacaatcatgacaatcttttttttacattttaaaaatcagcttaattgagstataatttatatacaattaaatgcacctattttaaatgagcagtttttcaaacacatatacccaggtaattactacgccaagagatagaatatatttattatcctaaaattaccactt

SEQ ID NO: 425499 - DNA, 570 bp, Homo sapiens
tacagaaggctaagaaatgcataagctagaatattttaaaaacaaatttaatttgttattactattaatatgactccatttgtagccacctataggacatagaaattcacattaaagaaagaagtacaaaactaattgaaaataaaaataaccaagtgtaataatgttccaagtttgacaccatgtcaatgaggtgaaaacagcaacaatctacaatatcatactttctcaattaaacttctgagcactagtataaagtgataattagcaagattcaaattttattgccttaagaacaatcatacaaattagggtattcaggctgaaattaagtctataatatttactaataacaggtagtagttggaaaatgtcatgtaactattacaagcacttttatctacaatcatgacaatcttttttttacattttaaaaatcagcttaattgaggtataatttatatacaattaaatgcacctattttaartgagcagtttttcaaacacatatacccaggtaattactacgccaagagatagaatatatttattatcctaaaattaccactt

SEQ ID NO: 425500 - DNA, 412 bp, Homo sapiens
agcctcatggaattctcatactttcttattcccacctgttgtgtgtggactgtgcttagtgactcaattctcctgaggtcataaaaggcagggtggcatttctttctgttgctcatgcttatttcacctctatttcctaccatgtcacaggcagccctagcaagcccacatggcaaggtattgtagttgagacatggatcctccagactgagtcagtcctgacgtggctacagaccctaactcccacccctgacaatttgattgcagccttgtaagagattctgagctagaatcacacagctgagacactctcagaaactttttagttgttttaagtcactcagyataagagtactttgttgcgcagcaacagataaataacagaaggcctaacctagaacaaaacacagaa

SEQ ID NO: 425501 - DNA, 510 bp, Homo sapiens
cagaaaaggctgtttaaaatgacagcttggtttctccttttgtgaagaggggaaaaaattgtttcgtgatggggagaagatattgaaggacagaacattacagtatctcatgaataaagacttgggaccycagctacaggtaatagccatgtcagttataggtggccaagcagtggttcaatatgtctactggtagtgagaggggaagccagctggacttactgggttgagtggggacttggagaacttttctgtcttacaagaggattgtaagatgcaccaatcagcactctgtagctagcaagggtattgtaaaatgcacaaatcagagctctgtaaaaacgcaccaatcagcgctttgtagctagcaagaagattgtaaaacacaccaatcagtgccctgtaaaatgcaccaataagcaggagtctaaaagtagccaatcgcagggaggattgaaaaacgggaacactgacaggacagaaacggaacatgggcggggactaataagg

SEQ ID NO: 425502 - DNA, 615 bp, Homo sapiens
ttgggtagtttcaaattgctagcacatggctgttttactcagcactccttgacacataggagactcaatacatatttgggactagataatattatatgatttatgctgccgtattatgcatattgcataatcctgactagtgattctgacttgacaacatttacaagcttgaaaatagaagagggtgcaacctctgcaagtagtttgaaaatagaagagggtgcaacttctaagagtagtgcataatgtgaatatggtacctgaattattgtcctatccttgatttctgtagcaaaatcaaacaggaattactatggttcatgaataaactgtccttctcaatggttccagatggttatattgttatcaacagcaaaaaaacggaaaagtgacaagataaaagtgtgagccagacttccctagaaatctgatgaccacctaaccccaaggtgaaagatttatctttcatcctgataaccatttgggtkaagaataagaaatgaaataattctgtctctagcgtgagattaatgagtcactccttctaccattctctaccccctccatccttttccactgagtagaatttctaactttgattataaagatttgagg

SEQ ID NO: 425503 - DNA, 591 bp, Homo sapiens
agacaaacatacaccacactggagaagtgggaagaaatctgaatgggtatgaagagactcagaccagatatttctggaaatacagattggaaatataagatttgaggcagttatagtttcttgagcaactacaagatgtggaaaagttggaaagaaaagaaaaacacggtgtgttatagaagtgtcactgaaccaggaacwcaatattttttttgaagggttcattactgaagactggattacatttctattacttttttgtttttaaatcttttgtctatttgggtaatcaaaagctttcacaccacaccttaaagagcctggaatgtggggggattttacacacatatacaccattacacactgggacatatatagttttcaagcaagcaaatataggttacaaagttacatagtttataaattaatttgaaaatatgattatcctgaaaagatatcagcataattttaacatagattggatatatgttttcatttatattaaatgccattgttttctaattatcacattttctaaataatattttacttaaatgtgttttttcttaatgataacacaaatacattact

SEQ ID NO: 425504 - DNA, 602 bp, Homo sapiens
aggaactgacttttcctattacaagtactaatttcctaagtggttttagtggtttgaacatttgtccaggactaacaagaaagaaaccaccagcatgtatcatatagaccaccaaagagccatcagactcaagtggctttcagtcaccatcaacctcaggtctctgaaaaatacagtttcacaatttttgcttgtaagtctttctatctttctgcctgatattacgtccccatattttaaggtctacatataaagatcttacaataaaatrtcaaaatagtgaaccaaatattttaagattgaatagtatcatcagagctctgttccacgacctgcctattatctggcaagtctgagtttcttgctcccattttgcaggtgaatcagcagaagataattcacttttctgcattgaattgtaagtagcaactttagtaagaattactttccttaaaaacaattatggaaggcaatgaaatataatgtttatatgtgtgaactaaaggagccaaactgcctaggttcaaatccttgttccacttgccagatgtttaactcttggtaaataatttggtctttatgagagtgtatttccttaactt

SEQ ID NO: 425505 - DNA, 609 bp, Homo sapiens
attgcatgttcccttggcatcctttggttccatgagatcaatggaagttatatatatcttactagtaagaatttacctttattttttcttggattttctgaaactcaaaggacactgcagctcctggacaaagtttcttttcattaacattgaaaactaaagataaaaggaaacaacagacagtttggttgacaatttaactaataacttatggtaacagcatgcaaaaggtttttaactcacctgaatggtttttgtttgcttctttgttttggtctatagattgaacgttggtaaaagagcaagcaaccctacagctcccaatctattttctgaagggttaagagttgtgctactctcaacactttctccttctttccccctctgtatatgcctatctgcttctttccttcccctctgagagactaatttctaayacaaaacacagctaaagaaatgtgattatatggctgaaaaaaacaatcagctcaagacaagcatcatagtcaagggtaaccataagaatagcagtgcaatattggagagagatgagagatgtcaagaatgttagtttctttcttatattgggcaataatattatttagcaga

SEQ ID NO: 425506 - DNA, 485 bp, Homo sapiens
caaaattgtttagagaaaagaggtagatttgttgactcataaacaaagcagatgaaagaacayaggagaaatttcagctgaaacaaaccaggaacttcggtatcattaaaatctctgtcccttgtccttttctcccaaaaaaaaaaaaaaaaaaaaaaaaaaaaaccatactggtttcattatatcccactcaaaccagggtatctatgacacattggaacatggctggattcaggtttgattcatacagtgaaggcttggcaactagaaaagagattctgccacaatttccaattacaaaattcctgtgaaagtatgcttgttggttaagtttgggtcataaatggttcatgttttaattatggtgtccaaataaatgtaatattattattttcccagttcaaattatatacacaacaaaattgatcataatggaagaagctatgattagcttaatacatttaaagcaaatgacttgaagaaga

SEQ ID NO: 425507 - DNA, 485 bp, Homo sapiens
caaaattgtttagagaaaagaggtagatttgttgactcataaacaaagcagatgaaagaacacaggagaaatttcagytgaaacaaaccaggaacttcggtatcattaaaatctctgtcccttgtccttttctcccaaaaaaaaaaaaaaaaaaaaaaaaaaaaaccatactggtttcattatatcccactcaaaccagggtatctatgacacattggaacatggctggattcaggtttgattcatacagtgaaggcttggcaactagaaaagagattctgccacaatttccaattacaaaattcctgtgaaagtatgcttgttggttaagtttgggtcataaatggttcatgttttaattatggtgtccaaataaatgtaatattattattttcccagttcaaattatatacacaacaaaattgatcataatggaagaagctatgattagcttaatacatttaaagcaaatgacttgaagaaga

SEQ ID NO: 425508 - DNA, 485 bp, Homo sapiens
caaaattgtttagagaaaagaggtagatttgttgactcataaacaaagcagatgaaagaacacaggagaaatttcagctgaaacaaaccaggaacttcggtatcattaaaatctctgtcccttgtccttttctcccaaaaaaaaaaaaaaaaaaaaaaaaaaaaaccatactggtttcattatatcccactcaaaccagggtatctatgacacattggwacatggctggattcaggtttgattcatacagtgaaggcttggcaactagaaaagagattctgccacaatttccaattacaaaattcctgtgaaagtatgcttgttggttaagtttgggtcataaatggttcatgttttaattatggtgtccaaataaatgtaatattattattttcccagttcaaattatatacacaacaaaattgatcataatggaagaagctatgattagcttaatacatttaaagcaaatgacttgaagaaga

SEQ ID NO: 425509 - DNA, 485 bp, Homo sapiens
caaaattgtttagagaaaagaggtagatttgttgactcataaacaaagcagatgaaagaacacaggagaaatttcagctgaaacaaaccaggaacttcggtatcattaaaatctctgtcccttgtccttttctcccaaaaaaaaaaaaaaaaaaaaaaaaaaaaaccatactggtttcattatatcccactcaaaccagggtatctatgacacattggaacatggctggattcargtttgattcatacagtgaaggcttggcaactagaaaagagattctgccacaatttccaattacaaaattcctgtgaaagtatgcttgttggttaagtttgggtcataaatggttcatgttttaattatggtgtccaaataaatgtaatattattattttcccagttcaaattatatacacaacaaaattgatcataatggaagaagctatgattagcttaatacatttaaagcaaatgacttgaagaaga

SEQ ID NO: 425510 - DNA, 637 bp, Homo sapiens
tttcagagacatggtagatttcataatacattcaggtattcttctttcycttttgtaaagtttcatagtttttggcatatagtgcttgttgttgcttgttaaattgaatcctaggtgttttatagattttgctctaatgcttaatttacttttaaaagtcttttattgatgctgttgttacaagccattgaattgcaaagagttttatgtattttctgaacataatatttctattcataaccataaaaccactattttttcaagatatgaaaaagaaaattaactagaattatttgaaattaaccttggctgcttggcaacttggatatttttcctatctcatttataactgagccatcaaaatcaacagttcctatttatttgctccatatttggattatccttgaagaatcgtgaaaactaaaatttttcaaggactaagactaattttacatcttttcatatcttagctttacctttcatttaatttgcatatttctaaaacatagaaacagttatttggtaccttgttgaaaatataattattggaggcaagccagagcaaggcaaaatgcataatttacatcatcttatcagctcttaagtaggacacatgtaataggaccccagattacgt

SEQ ID NO: 425511 - DNA, 645 bp, Homo sapiens
tacagattgtagtaatattgtataaaagaaatttccagatattgaaaaagataaaacattataatcctgagaaaaaaaattacaaagacaaaaagaggggtaggaaggtttccatctaggaaaagatggtaagtaattacaaacagtgttatgtattttcaaatctgaattatatgtaaaaaaaatgcagtcagaagaagcaaatttgcagagaatatatttgagttgcagtacttcaaacgcaagcatgtttcctattatacgtacaatttacatgtaaactttatgtggtaaaatttagttagcatgtaygatatcttactatattacacacaataaaccagaaaagtagttgttattattatctccattttgttggtaagataactaaaactcaggatcaattaattttcccaagtcagaattcaaagtgaggggtgtttaactcctagatgagtattcctcccactatattgtttgaaaggacattctataacttgtttgcctgttcatcaacaactaaccagaatatagcctacaagattcatttttattcatatgtgcaaaatgcatttcatgtatgtgtcataaactcaaatgaccttattttataccatttcattctctattgattggttttacaga

SEQ ID NO: 425512 - DNA, 645 bp, Homo sapiens
tacagattgtagtaatattgtataaaagaaatttccagatattgaaaaagataaaacattataatcctgagaaaaaaaattacaaagacaaaaagaggggtaggaaggtttccatctaggaaaagatggtaagtaattacaaacagtgttatgtattttcaaatctgaattatatgtaaaaaaaatgcagtcagaagaagcaaatttgcagagaatatatttgagttgcagtacttcaaacgcaagcatgtttcctattatacgtacaatttacatgtaaactttatgtggtaaaatttagttagcatgtacgatatcttactatattacacacaataaaccagaaaagtagttgttattattatctccattttgttggtaagataactaaaactmaggatcaattaattttcccaagtcagaattcaaagtgaggggtgtttaactcctagatgagtattcctcccactatattgtttgaaaggacattctataacttgtttgcctgttcatcaacaactaaccagaatatagcctacaagattcatttttattcatatgtgcaaaatgcatttcatgtatgtgtcataaactcaaatgaccttattttataccatttcattctctattgattggttttacaga

SEQ ID NO: 425513 - DNA, 564 bp, Homo sapiens
tacaaatgagaatgtgtcataaattatgtggtgagtcagtgagttgtctccttcctttattaagtgtttggacagtacatataaatttggagaaaaaatttaaaacagcatttttcacaataccttctattgagtcattcargtattcatcaaatatttgtttagttcccaacatgtgctaggcattttgctaagcactacgctgaagtagtgaatagaatatatactcacttttcttatagggcttacaaattattaaaactttaaatattgaacaattatcatgccttatgtaaaaatgtgcaatctgctaaaagagatgtgtaaccatgagttatgacttagtgtgaggagtaaggaaaagtgcttaagtcttcaaaatttcctggaagttaaccagttaggattgtgagtgtactagaagaataaagaagagtaaaattaaagagtatgcaaatgatctgaagtgataataggcctttcataagaactgaataattgtcaatgtaggtggcactattttttctaggaatttttgtattgtaaatgcttggagataacaat

SEQ ID NO: 425514 - DNA, 596 bp, Homo sapiens
gtgttcccttttgtatatataccacgttttctttatccgttcatctgctaatggacacttaggttgcttacaaaccttggctattgtgaacagtgctggaagaaatatgggaatacagatgtctttatcatatactgatttccttaatttggggtatatgcccagcagtggggttgctgtatcttatggtagctctatttttagtttttttgaggaacytccaaattgttcttcttagtggttgtactaatttacattcccaccaacagtgtagtagggttcccttttctctacatcctcattggcattcactggtgcctatctttgggataaaagccattttaactggggtgagatgatatctcattgtagtcttgatttgtatttctctgctgatcaatgatgttgagcaactttttagatatctgtttgccatttgtattttttagtttgacaaaggtctgaataaacatttgtccatttttaaatcagatttttttctatagagtcatctgagctccttatatattctggttattaaccccttgtcagatggactgtttgcaaatattttgtcctattctgtgggctgtgtg

SEQ ID NO: 425515 - DNA, 596 bp, Homo sapiens
gtgttcccttttgtatatataccacgttttctttatccgttcatctgctaatggacacttaggttgcttacaaaccttggctattgtgaacagtgctggaagaaatatgggaatacagatgtctttatcatatactgatttccttaatttggggtatatgcccagcagtggggttgctgtatcttatggtagctctatttttagtttttttgaggaacttccaaattgttcttcttagtggttgtactaatttacattcccaccaacagtgtagtagggttcccttttctctacatcctcattggcattcactggtgcctatctttgggataaaagccattttaactggggtgagatgatatctcattgyagtcttgatttgtatttctctgctgatcaatgatgttgagcaactttttagatatctgtttgccatttgtattttttagtttgacaaaggtctgaataaacatttgtccatttttaaatcagatttttttctatagagtcatctgagctccttatatattctggttattaaccccttgtcagatggactgtttgcaaatattttgtcctattctgtgggctgtgtg

SEQ ID NO: 425516 - DNA, 615 bp, Homo sapiens
tgaaaatatagcagtaaagaaaatagacaaaactatcttacctcctggagattacactttagtaggccagattaaagataaatgaatagactatatggtgggtgagacaattatacgtgctaggaaggaaaataaagccaaataggggacaatagatgtccagggtaaggaaagagactgtaattttagaaaagatatacgaaggctgggcgcgggggctcacacctgtaatcccagcactttgggaggccgaggtgggcggatcataaggtyaggagatcaagaccatcctggctaacacggtgaaaccccatctctactaaaaatacaaaaaattagccgggcgtggtggcgggcgcctgtagtcccagctactccggagactgaagcaggagaatggcgtgaacccgggaggcagagcttgcagtgagccgagatcgcgccactgcactccagcatggggcacagagcgagactctgtctcaaaaaaaaaaaaaaaaaaaaaaaaaagatgtacggggaaagtgtcattgaatggcgattcttgagtctaaagccaaaggcggtaactattgctgtaacaggtgtgatatatgcatcgaactctctcctatc

SEQ ID NO: 425517 - DNA, 445 bp, Homo sapiens
catttacctgactaccccacatgccttctccctgccaagatgaaattatctcttactattatattaggagatggatgtgcacctgtctgttaatgttaacagaggaaaggggttgctgagtgtctataaagctgacttgtaacactggtgtatctgctacaacattggctctacatacatatcaagcaattttgaactgctcaaacaccatgccaatcttaatgcaagagctgtcatagccagagattctaggataccatcagaaattgcagtcttgcaaaagaaaaaaggcaaaaccttaaagtgaacaggcttcaagttcgggtagcaagtaatatgtctgctacaaggatatacatrtcctccacgctgtgatttctcaatatgattaaggtagtctaattcaaattcattcagcttatctgaggtattgcaaaagtgctgt

SEQ ID NO: 425518 - DNA, 572 bp, Homo sapiens
tgcagggatgttaaagaaaatccggggtcttaaaatttttcgtttttaagaatcaaattttctacccctaataaaaagggagaagtctggaggcaagctttatcaggaagatatgaatgattgttctcatcctggtgaaagtatactccaataaataggtctcataagctaatggttttatgacctattttgctgggcagggagaaaacaaaaaacaaacaaaaaattaaacagaagataaattcaaccccatggcaartgtgccacactcagatgatgtcctattctcggcccaacttggtttgtccccaatacagaattttcaacagagaagcacatatctaattttctcaaacatgactttgagggtcacaagttctatccattctctaccaggcagctgagaaaatgagcagagaataaagaccatcatattcccaccctccagctaggattataaggggaatgaagcaagctagtattacaaggggaagaaagtaagtattataaggtagtattacctgagaaggtgagtcaatgcaatgttacaaacgctattttggtggcaattc

SEQ ID NO: 425519 - DNA, 535 bp, Homo sapiens
atcattgaatcaaactataaaagaaagagttccacaagcctacaaggagagttaactgtgttaattacaaaattgagaaaaaaaaacttattcaatatttccacaacttatttaaatgctagggaaattatcctactgtaagacactagtattcctgataaaaatgcttaaactcttctttgataccctgtaataagattggaacttgttctgggaagccattcatttactccagtgactcaagtcgagtcaataataacatgcaagcaggttcttccctgcatctcatttggtacttttttttttttaaacagttctgtttgtyatagatgatcattaaaaatctatcctgctcaagaaaaaaaaggagaggtgttctgaaatatttatggatgaaataatgtggtgcctgtaatttgctccacttaaaaaaatccagtggcaggggtagttaagggcatagacggtatatggatattatcaagccaatgaatgtcatttgggtgaggggcattttaggttcattctagtatac

SEQ ID NO: 425520 - DNA, 535 bp, Homo sapiens
atcattgaatcaaactataaaagaaagagttccacaagcctacaaggagagttaactgtgttaattacaaaattgagaaaaaaaaacttattcaatatttccacaacttatttaaatgctagggaaattatcctactgtaagacactagtattcctgataaaaatgcttaaactcttctttgataccctgtaataagattggaacttgttctgggaagccattcatttactccagtgactcaagtcgagtcaataataacatgcaagcaggttcttccctgcatctcatttggtacttttttttttttaaacagttctgtttgttatagatgatcattaaaaatctatcctgctcaagaaaaaaaaggagaggtrttctgaaatatttatggatgaaataatgtggtgcctgtaatttgctccacttaaaaaaatccagtggcaggggtagttaagggcatagacggtatatggatattatcaagccaatgaatgtcatttgggtgaggggcattttaggttcattctagtatac

SEQ ID NO: 425521 - DNA, 535 bp, Homo sapiens
atcattgaatcaaactataaaagaaagagttccacaagcctacaaggagagttaactgtgttaattacaaaattgagaaaaaaaaacttattcaatatttccacaacttatttaaatgctagggaaattatcctactgtaagacactagtattcctgataaaaatgcttaaactcttctttgataccctgtaataagattggaacttgttctgggaagccattcatttactccagtgactcaagtcgagtcaataataacatgcaagcaggttcttccctgcatctcatttggtacttttttttttttaaacagttctgtttgttatagatgatcattaaaaatctatcctgctcaagaaaaaaaaggagaggtgttctgaaatatttatggatgaaataatgtggtgcctgtaatttgctccacttaaaaaaatccagtggcaggggtagttaagggcatagayggtatatggatattatcaagccaatgaatgtcatttgggtgaggggcattttaggttcattctagtatac

SEQ ID NO: 425522 - DNA, 732 bp, Homo sapiens
acacctgtttcacgtttgttggatgtataattaatgcagcctaatgaacatgcttcatcaaaatttctctgtggttgaaaaataaaatcagagtggtaggtcttgccaattagaacatttgggaaatatacattaaaatgttttaagtacatatcgtgatgttttaatttaaggcagagtgtgcctagattgcaaaatcctatatgaaatcacgtaacaaatgctacgatttaccactacatagtaccacgtataatcaacacttgtgttgcctgcctggattctctagaaggcgtgtgtatttcctgcatgccttgatatattaggtgtctatgacaaagcawctgtcccaagcaacacttctcctagctcagcaagtctcctactgttcccacttcagtcttttctttcctcagccatgccctgcaatcataatgaaggcattcatccttctgacaataagtctgacttcaaccctttaatataaacaagcaggtagaactgtaagaaaaaatatctttctaataaaatacccccaatatttttcaagtatatttatctgtatatatatatatatatatatagacagaaagaaagggagagagagagagagagagaaataaagagagagagagagagagaaagcggctctaatatgtttgtttacaggtgaaattttacataaatggctattgattctctttatgattacttttgaaaataaatgatgtg

SEQ ID NO: 425523 - DNA, 605 bp, Homo sapiens
caagcataatatgtgtctgtgaggaaaagcttcattatctatgtgttcatcctcatctgcagatggcaacaaattgaggaacatgggtccagaaatccagtttctcctttctaactactattcttattcctcttagcctgctccaaggagtcttatttaatataaatgtacaattgaaaagcaacyctatttacttaagatagctctcaccaacttcagagtaataaattagacaaaagacaaatacaattggaaagagttatttatcaccaggctatggtgtgaatagacagaaactaagaataaacaattaaattgatttcaggctttgccatttctcttcatttctttaaaacagataaatatgctcgcaagtctgctcatgcctcccactacagaggcaggggcattcatgactcagtttaccaccgatgcagtaaagaacagcctcaaacagcccgtctcaaacaaatgagataagagactaggtaacaataattagtgacacacctgggaggtctgtttcaaaacacatgaactactgaatacagattatgtattcaatgataaagaggaactaagaataaaagcgtaagctaattcca

SEQ ID NO: 425524 - DNA, 605 bp, Homo sapiens
caagcataatatgtgtctgtgaggaaaagcttcattatctatgtgttcatcctcatctgcagatggcaacaaattgaggaacatgggtccagaaatccagtttctcctttctaactactattcttattcctcttagcctgctccaaggagtcttatttaatataaatgtacaattgaaaagcaactctatttacttaagatagctctcaccaacttcagagtaataaattagacaaaagacaaatacaattggaaagagttatttatcaccaggctatggtgtgaatagayagaaactaagaataaacaattaaattgatttcaggctttgccatttctcttcatttctttaaaacagataaatatgctcgcaagtctgctcatgcctcccactacagaggcaggggcattcatgactcagtttaccaccgatgcagtaaagaacagcctcaaacagcccgtctcaaacaaatgagataagagactaggtaacaataattagtgacacacctgggaggtctgtttcaaaacacatgaactactgaatacagattatgtattcaatgataaagaggaactaagaataaaagcgtaagctaattcca

SEQ ID NO: 425525 - DNA, 594 bp, Homo sapiens
ttctcatttacaatttcacaaattgttctcattttacaattttacaaattattctaaggttttattgatttatagaatgtagtttgattaatggttcttaccaagggttttttttttcttttaagtcactgccagatttggtgctaagtctgtttccagaactgcaaaactttagcaccaaaacttgacctccagtagatacacaaagatgttaccatgctctagagtctgtgaaaaacattagtcttttgataccttctcagatgtgaaagcattgyctaataaacatgtgtttagagcaactttgacctgtgagattaaaaaaatctcattcccctcttccctgacacctaccttacacataagaaacacatatatgaataatatatttatagtatatgcttcattctagtgtctttttctatataagtagtattgtgtaccatcaagacattcatcacataactgtagacataacaaacatatacatatatgttatatatatatatataagtgtacatatagcaacacttggtgaatttaaaaatatagaagaggtggaagatgctaagcaatggaggaagtaacaatgac

SEQ ID NO: 425526 - DNA, 610 bp, Homo sapiens
ttatagaataattgttctgtgtagcatataaaaactgtctcctggtattcctaattcttaaccatgtattattaactaatgtaagtactgcttttaaaagtagttgaacataatgcaatgttgtgtcaaataaccctgttagacttctacatccaaaccgaacagccctctaatcaccrgtgagaatctagagtttcaggagttgattccgatgaaggattagcttttaactaaaggaaaaaaggaaaggggaaagttgggaaaatagaaaaaaaattgtctatcatttagtctaaattaatccccttctcccccatccttgcaagacaaagtggctatgctacaggatgaaggtagcaggactcattccagcagagattaggtgcaacttggagtatgtacgtagcaatataagagtcaggctgagaactacagagagaacttgacacagatcattatgtttagacccctgagggccatgtccctatccgtcagtgtatatccactccagaagattatctcccttccttaaggagattctagtctgagagtataaatccttagctctaggaaaagccatgtgtacttctatgttgtttgtcttcttcat

SEQ ID NO: 425527 - DNA, 480 bp, Homo sapiens
tttaccactatacaattcatctatgtaaccaaaaaccacttgyaatcctaaagctcttaaagatttttaaggaccctccaagctgttttccatagtagttgtattatttacattctcacgacaagtgtacgagggttctcttttctccatatccttgttgagtatttgttattgcctgtcttttggataaaagccattttaactgggataagatgatatttcataatagttttgatttgcatttctctgatgatcaatgatttggagcaccttttcatatgtctgccattgagaaatatctatttagattttttgctcatttttagtcagattattatattttttcctatatagttgtttgagctccttatgtattctggtcattactcccttgtaagatgtgtagtttgcaaatattttctcttattctgtgcgttgtctcttcacttttttttcctttgctgtgcagaagctctacct

SEQ ID NO: 425528 - DNA, 611 bp, Homo sapiens
agtgctgaaaccttaaactccatcatgctcttgacccaaacttattatttcacactcttctcattcttctgtcttttttttctacatgatcatgtgtaacagtgtcttgacccttttgttaagtttttcagtttttcctcctatctccagccatcttagaatcccataatgcatcacatttatatccctaccactgtggacgctasatcaaccaattgctctttcctctctccaacttccattctgttgtcaaaaaataacatatctgaatgcaagaggagcactgcagatttatggcaggagatttctatttcctttcagtcttctagagaaaagagaaagaagtggccattctgctctcccatggaaagaaaaaaaaaactcacattggataagcaacaggatcttcacatggcaacagcacaggttgaggcattcctatcttctctgtatggaaaaaaggaaacctattcttgtcctaaattgggtcccatgactctcccaatagatacaatccagtttctggagattcacgttgcttgatatagtagtcttgatgatggagtttatgatgactatttgtcctagggtagatttatttacagttcaaa

SEQ ID NO: 425529 - DNA, 611 bp, Homo sapiens
agtgctgaaaccttaaactccatcatgctcttgacccaaacttattatttcacactcttctcattcttctgtcttttttttctacatgatcatgtgtaacagtgtcttgacccttttgttaagtttttcagtttttcctcctatctccagccatcttagaatcccataatgcatcacatttatatccctaccactgtggacgctagatcaaccaattgctctttcctctctccmacttccattctgttgtcaaaaaataacatatctgaatgcaagaggagcactgcagatttatggcaggagatttctatttcctttcagtcttctagagaaaagagaaagaagtggccattctgctctcccatggaaagaaaaaaaaaactcacattggataagcaacaggatcttcacatggcaacagcacaggttgaggcattcctatcttctctgtatggaaaaaaggaaacctattcttgtcctaaattgggtcccatgactctcccaatagatacaatccagtttctggagattcacgttgcttgatatagtagtcttgatgatggagtttatgatgactatttgtcctagggtagatttatttacagttcaaa

SEQ ID NO: 425530 - DNA, 537 bp, Homo sapiens
aagaggagcactgcagatttatggcaggagatttctatttcctttcagtcttctagagaaaagagaaagaagtggccattctgctctcccatggaaagaaaaaaaaaactcacattggataagcaacaggatcttcacatggcaacagcacaggttgaggcattcctatcttctctgtatggaaaaaaggaaacctattcttgtcctaaattgggtcccatgactctcccaatagatacaatccagtttctggagattcaygttgcttgatatagtagtcttgatgatggagtttatgatgactatttgtcctagggtagatttatttacagttcaaagtgggacacaagaattcagctgaggcagtctgtgcctccagttgaccattccctgagcccatcatagtgatcactagcaacatctccatgctgagaatcacagaagcacatctggatttgttatattcctgtccatccagcctaaggaggagagaatgtagtaggatacagcacagtccccacccaggcagaaagcaaa

SEQ ID NO: 425531 - DNA, 589 bp, Homo sapiens
taaggagtatgttgtggtgcttccagaagaaaataaaagacaaactcattagttacaggtacaacaaataaaattcgcaaaacgttttatcatatacctaaaaaatggttatcttacttcaaattgtatcaataggaaggaagatattacctattacacaatagcagttagtcttcagatgtgtttcaaacttaactgggggtattcccttgcagktctgggctgaaatccaagctattaggagcacttgggtttttgcagccctagcatgcctttccccacctccaaaactacattcgatcaaacaagattagggtaaaccagtctcctacaaaaggcaagaatactcaacattctaattaccggccttgaaaatgtattcctttttgcacacagacaaatcctttttattacatgaaaacaaatatgccctgaaatttggaatactcagataattttaaaaattgaaaagaagttttacaaacaagtgctagaaaaaaaccacaaaactcaatcatcagaataaacactgccaaacaaataagaaactagattcctctaagattctttcaagtaaaagacattgtaa

SEQ ID NO: 425532 - DNA, 683 bp, Homo sapiens
agcctagttaatttattacagcatttaccatgatgttttacaatttatgtcactttttgtctacctaccagactatttggtaggttcttcccaaaggggggagtttcttttttatttttgtattgcaagtgctaaatacagtgaccagcacatagtacaacctttacaagtgtttgaagaatggatggatgaatggattcactcaatgagaattttgtaagcatgtaaaaacaatattccctagtttactaaaaaccaaaacaaagcatttgtttaaggaaataaccaccagaaaaacaacacagtcttggaattgcaactcttttcacacatcttgttaggaattatgttttaaaaggtatgcatgtgaaaggaaaaactgatcacctttaccagaattactgaaaatcctatttctatattatatattttgttggggaggtttccacatccggaggcttggagacaaggttaagtaagcatcaacttcatgagagtaaaaacaaatgtaatatgagttaaatacaggacttagaaaatagaaaaacatgaagrccttaaatgcttccactgaagagaaagatttcttaaaagttttaagaatcccatgaggatctgatggaaaaacctatcttaaggacattttatatgcatacaaattatagtattaagttgcaggggtt

SEQ ID NO: 425533 - DNA, 683 bp, Homo sapiens
agcctagttaatttattacagcatttaccatgatgttttacaatttatgtcactttttgtctacctaccagactatttggtaggttcttcccaaaggggggagtttcttttttatttttgtattgcaagtgctaaatacagtgaccagcacatagtacaacctttacaagtgtttgaagaatggatggatgaatggattcactcaatgagaattttgtaagcatgtaaaaacaatattccctagtttactaaaaaccaaaacaaagcatttgtttaaggaaataaccaccagaaaaacaacacagtcttggaattgcaactcttttcacacatcttgttaggaattatgttttaaaaggtatgcatgtgaaaggaaaaactgatcacctttaccagaattactgaaaatcctatttctatattatatattttgttggggaggtttccacatccggaggcttggagacaaggttaagtaagcatcaacttcatgagagtaaaaacaaatgtaatatgagttaaatacaggacttagaaaatagaaaaacatgaagaccttaaatgcttccactgaagagaaagrtttcttaaaagttttaagaatcccatgaggatctgatggaaaaacctatcttaaggacattttatatgcatacaaattatagtattaagttgcaggggtt

SEQ ID NO: 425534 - DNA, 582 bp, Homo sapiens
aaacaagtattatttcactgactcaaattttctacatgcatagaatagtccaaatgacacagcacaatgagtcagaaagcctgtactgcagttccatttctgagccacctttcagtcatgtgactataagcacattggmgacttagagtcaagatttgctcagatacttgatttatatcatgctttgtaaaatgatttgtagaaaaaaagcaaaagccatatatagatacccagccatgattgttgtaactatatttaaagtatgtagttaatatataagattcacatttaaaaaaattatagaaatgatgagacattaaggcctaataaggaagtgaggctactacagagcctagacataatctgtgggaatgcctatccttcaaatattccctagggcatgatatctgtgtaattccccacttgtcatggaaaattgctctgaataccagaaacatgctaggacaaatacagcattcctgactgtcagcagtggttttcctgggtttggtcacatgactcaaattgagccaataagaactcttccttatgatttgttaaaatccagctggcagaaaggaa

SEQ ID NO: 425535 - DNA, 582 bp, Homo sapiens
aaacaagtattatttcactgactcaaattttctacatgcatagaatagtccaaatgacacagcacaatgagtcagaaagcctgtactgcagttccatttctgagccacctttcagtcatgtgactataagcacattggagacttagagtcaagatttgctcagatacttgatttatatcatgctttgtaaaatgatttgtagaaaaaaagcaaaagcmatatatagatacccagccatgattgttgtaactatatttaaagtatgtagttaatatataagattcacatttaaaaaaattatagaaatgatgagacattaaggcctaataaggaagtgaggctactacagagcctagacataatctgtgggaatgcctatccttcaaatattccctagggcatgatatctgtgtaattccccacttgtcatggaaaattgctctgaataccagaaacatgctaggacaaatacagcattcctgactgtcagcagtggttttcctgggtttggtcacatgactcaaattgagccaataagaactcttccttatgatttgttaaaatccagctggcagaaaggaa

SEQ ID NO: 425536 - DNA, 610 bp, Homo sapiens
gggtgcagactcaggggctcaccaatattacttttgattcccaaattcactcttatctaccttttgctgttctagcctttcaaactcttatgactaatttactgtattaactacctgccccttctcatttgaaacacctagaatagttttccttttaatgaatagaccataatgaatacttacacagcattctttttcattttatttttggatatagtcmtgagaaagttttacatgctattcagttaattaataacctgtctaacttcatcttctctctttcataaataaccagttgactatattagggcatgaagtccaacaatgatggcttggctaaatttgaaactttctaggcctctaattttctaatcaattacatgaaggaattcctaatgtagcatattttttataagccatgtattgctcatcatttgcctacagacactgtgatatacataataaatttgatttctcaaagattacacttaaaatatacaggaatatatatatataaatgtaggcacgtatttctatttaaagacatatttcaccaaaaagaccctatcatctgccaaatcattcaaacagaaacttaaaattattcata

SEQ ID NO: 425537 - DNA, 634 bp, Homo sapiens
gaatgagtagggttcaaaatcattctctcccttatcctcataggaatagtctgtttatccagcactattaaaacattttttttcattttcacatgactacctctcactcaatatttaggattctgttaaaatgttttatttactctataaatacttctgtgaaactccctctttccttcctgagcaatccctatggtacgtgactctccacccatgtgcttacatagtatgtttgcttttctctctcctagtatttagtaattagtgttgtgagagcctacatattgtctctctcagtgaactaccagtgcctttaagaacagagatacactaagtaatctttatatttcatatrcctagaaccatttttagaataaatgatatgacaatccagacttcactaaatcttaatttactgtggtcacaaaatgaaaatgaaatacttcttaatgtgtttcaaggaaaaaatctatcacatattcataataatacaaatttcaatttttgagactattattaggtaaatactatagcttttctgcaaaaaataattagaatataaaacttctatttccttaagtgataagttttcaattgtaattttatagtatattatctgtaaccagtttccaaa

SEQ ID NO: 425538 - DNA, 516 bp, Homo sapiens
catgtggggagtttgccaaggaagaattccgaatgttaaaatcagtaacctgaggtatataatccaaattcaaatagagatttagatattgaaacaaatgagggacactcattctatgtaagacatctataacaaatacaatgattttstaactacctcattgaagttcacaggaagtaagagaaatgatagatgtgtgtgtgtgtgtgcgtgcatgtgtgtgtattgttttaagttttctgggtctatctctgccctccaatcttatttttttaactaacagtttcaagtttgtcattacagagattctatccaggttgtcaggaaagcataagaggaaccgttgaacttcaaaatgctaatccattctcaggaaatgaagcagcatagtatattgaaataattactgtactctgaggtagtcggtacaggtataattccaaatctgtgactatagagaagtacacatcacccctgtcttcaggttcttatcagtaaaaggaagatacaactaca

SEQ ID NO: 425539 - DNA, 516 bp, Homo sapiens
catgtggggagtttgccaaggaagaattccgaatgttaaaatcagtaacctgaggtatataatccaaattcaaatagagatttagatattgaaacaaatgagggacactcattctatgtaagacatctataacaaatacaatgattttgtaactacctcattgaagttcacaggaagtaagagaaatgatagatgtgtgtgtgtgtgtgcgtgcatgtgtgtgtattgttttaagttttctgggtctatctctgccctccaatcttatttttttaactaacagtttcaagtttgtcattacagagattctatccaggttgtcaggaaagcataagaggaaccrttgaacttcaaaatgctaatccattctcaggaaatgaagcagcatagtatattgaaataattactgtactctgaggtagtcggtacaggtataattccaaatctgtgactatagagaagtacacatcacccctgtcttcaggttcttatcagtaaaaggaagatacaactaca

SEQ ID NO: 425540 - DNA, 479 bp, Homo sapiens
tctcacagccaacaaggttaacatgcagccctgatcctcaactccaactctcaaagttggctctcagagcagatttgaaaagcagtaaaacattcctttggttgctagacccatgtaaaaaagtataataaatttaaaaagaaaagcagtaaagtggtgtttgggggcagtctgagccatctgagagttttctgaaggtctcatttgtgctgtggttcttggtttactgactcttctgagagtatgatggaagctaccaacacactccccagaaacatgcagttcacatatgaacaarttcatgaaactatacattgggtgctaggtcaggaagtatgctaagttacatctgcttatgaaaccccttaatgtgttccagatgggagaaggtgcggaggcaggagcaggggatgtgttccagagctgtgaagaatgaggagagaaattatcacccagacactcaccctggcaaaaggcct

SEQ ID NO: 425541 - DNA, 613 bp, Homo sapiens
ctcctgtactataccaggttgccagtactagaaagcaatggcaaataacaacacaggtatgctacatacaaatagttcctgggttacatacaagtgaagcttggcacactcgaggcttcccatgtagacatttcaagatattgaaatatgggtggttttcttactaagcattttatggratagtacaatgagcattaccattctcagctgtttccttaaactaatttaggctgtgctaaatgtaaaaattatgtacttgatcactgcatttttcatgtaaataattatttttttaaaaaaatgtgtgtctaacaaaaacactgttgggcttctttattgaaaaggcagctcaataacaatggtcatttccattaatatatgccaggaaacggtagaggaaaatgcttatagtaggatacttgccatggacctattggactgaacaaaggagggtgaatgcaggaataaaagacaagagacaaaagaagagtatatttggaagaaggggtcgggggcaccatgcctttactggacaagggccctgagctttacacagctctccatatttattaggcaaaagagatagcaagaaagaggggatgattgtcgggta

SEQ ID NO: 425542 - DNA, 568 bp, Homo sapiens
ttaatataaaaaagaacacagtgatttacaagaattaagtcataatggttattaaagtaaggattttaatgtttgagtttgattctgttgggttccaatgaaaaaaagtagaagacagaaaagatatgttgttgcaggaagtcagggaccctgaacrgagggaccggctgaagccatggcagaagaacataaattgtgaagattccccaaattaatacttttataatttcttacacctgtctttactgcaatctctgaacataaattgtgaagatttcatggacatttatcacttccccaatcaatattcttgtcatttcctatgcctgtctttaatctcttaatcctgtcatcttcataagctgaggatgtatgttgcctcaggaccctgtgatgattgtgttaactgcacaaattgtttaaacaatatgaaatctgggcaccttgaaaacagaacaggataacagtgatgttcagggaacaagggagataaccattaggtctggctccctgagagccaggcggaacagagccatatttctcttctttcaaaagcaaataggagaaa

SEQ ID NO: 425543 - DNA, 521 bp, Homo sapiens
tgagggtttggcgcagtggcttacatctgtaatcccagcactttgggaagtcaaggcaggcagattgcttgagcccaggagttcgagaccagcctgggcaacatggcaaaactccatctctactaaaaaatacaaaaattagccggtcatggtggcacatgcctctagtcccagctactcgggaggctggggtgagaggatcgattgatcccaggaggtcargtctgcagtgagccatgaccgctccactgcactccagcctgggtgacagagcaagaccctgtctcaaaaaaaggaagaaagaaaatcattgaggaggaaggatatctgcttgaacaggtctttaatgtagacaaaagtgtctttgggaaaaaaaaaagtgccacaaaggacatttgttactaaggaagagaaatggacaccaagattaaaggcaggaagggaaaggctaactctactttagtacaaatgcagctgggtttatgattaggtctgcctttatctataaaactgctaacacc

SEQ ID NO: 425544 - DNA, 475 bp, Homo sapiens
taaacttcagaaatccatttttaaacaaactgggaataaagaaacaagaatctcacctgggatttgttcattttccgctcttagtggaggaaggagagctgaaggattagaaaggaagaatgtcaggagagccttcgccggccttgcagttcggagattcacctgcctatacaggtccacacacaagatacttacgtgtccatgtgtggctccgatatatgctgagctcagacatgacacttttcactgagtgaatgtaaatatttcttattgatttattaccaatttaggttctgtgacacagaaaaattaaaaacatgaaaagatgagtttaacaagttaacagtaatctgaaggaaaaaacactatgggtttgtcaaaattccttgtagggaaaaaaaaaaactgaggccatattgtttatctrtttacctgttaacaccattaatgccctgaggttagataatgcaaaaga

SEQ ID NO: 425545 - DNA, 631 bp, Homo sapiens
tgatcatttttaagattactgcctagaaaatttgtccccaaatccactccacctggaagtatgccctaccttcctttatgtggagtgttcaattattttttaaatattgtatttgcatttattgtggatgaaatcttatattttattgttttaacttgcattccatgctagtaaagcaagtgtgaccctcaatgtccaatcacaggtgtaaagaacaatgttatttctctctttatggaaaattctaagcccccatccctttcttggaccttttttgtggtctggcatcttttatggatactttctagcctcagtgaccactggccctggctacctctgagaccatgcggctctggtcggcagaccagaaactaaaaatgggcccttcatgtttgcagtctttgttgctcccatttcctccttggtcataaggccctcccacccccaactgcagtgcccactgcctgaagtcacaggtggagccccagcccctggcagccctcccaggctctgcaaggccccagccccctctgcatctcagatgttcttcctggccaccccgggacacaagcrtcctccatttagggcattgggcttttaagggagtggctgcctctgggctcttctcact

SEQ ID NO: 425546 - DNA, 470 bp, Homo sapiens
tcagaaatccatttttaaacaaactgggaataaagaaacaagaatctcacctgggatttgttcattttccgctcttagtggaggaaggagagctgaaggattagaaaggaagaatgtcaggagagccttcgccggccttgcagttcggagattcacctgcctawacaggtccacacacaagatacttacgtgtccatgtgtggctccgatatatgctgagctcagacatgacacttttcactgagtgaatgtaaatatttcttattgatttattaccaatttaggttctgtgacacagaaaaattaaaaacatgaaaagatgagtttaacaagttgacagtaatctgaaggaaaaaacactatgggtttgtcaaaattccttgtagggaaaaaaaaaaaactgaggccatattgtttatctatttacctgttaacaccattaatgccctgaggttagataatgcaaaaga

SEQ ID NO: 425547 - DNA, 470 bp, Homo sapiens
tcagaaatccatttttaaacaaactgggaataaagaaacaagaatctcacctgggatttgttcattttccgctcttagtggaggaaggagagctgaaggattagaaaggaagaatgtcaggagagccttcgccggccttgcagttcggagattcacctgcctatacaggtccacacacaagatacttacgtgtccatgtgtggctccgatatatgctgagctcagacatgacacttttcactgagtgaatgtaaatatttcttattgatttattaccaatttaggttctgtgacacagaaaaattaaaaacatgaaaagatgagtttaacaagttracagtaatctgaaggaaaaaacactatgggtttgtcaaaattccttgtagggaaaaaaaaaaaactgaggccatattgtttatctatttacctgttaacaccattaatgccctgaggttagataatgcaaaaga

SEQ ID NO: 425548 - DNA, 530 bp, Homo sapiens
tatatatccgacactttattcacatatgggttgagagcttgtatactacgttaaatatgaattacatgaggkatatattcaaggtacttgagaagcttgctctgctgctgtctaataaaaggccactcctgacttcttatgcaggacagtgtagatgtggctttctatgaaacagcatgtaggtatctgccatgtctgtgtgaatatcatccattgctacaaccaggaagttcataagcacatgcgctttctgtaggagattcagctttgagctcttttctctgcattaatcacaaccttctctgcgctttcacagcacttgacacacatactaatactgcaacagttaacagtttcttagtgattatcactttttacacagcgactctctcaccctcctgctggaatgaaagctactgcagggcagaaaccaacttatttatgtctgcattttcagagctcagcacatggcatgccaccccccccccattccatgtcctcaataaatgtttacggaatgaattaacaca

SEQ ID NO: 425549 - DNA, 593 bp, Homo sapiens
accatcattataaacagacacaccaattgtcttatgatataaaagtcagaattagaagtatagaaagtaaaaaatccaattgctgcattctagaaactcttatgcatatttttaaaagataatcaaacacaatcaccaggaaaaacctttgatctaagatatgccacttttttttggtctccgaagtatactattttcctctgattacgttaaagaagattgcctttaaaaacattagatggagataattttgagtcctattaacttgtatttcaagcttgcctcaagcactaatgagaaaaaaaattcctgcttttctcacaaagaggaatacacaactccagcctcaaaaatacactcagtgtttgcattttattaaagcacactttggacatctgtgccactgacctacaggtatactgatctagagatgtattagyatggtgtatgagatcaagtttgagaatattgctttaccaatcaaatgaaagcatctctaacatttaaatgcttacctgtggcatgatgccaccaatgactactgcctcttcactccaagtatttgcagaattgcttacacaagccccccagat

SEQ ID NO: 425550 - DNA, 527 bp, Homo sapiens
ccaaaacatggaggccagtctagagtcgggagttaccgttgtgtagcagacctctaaatatcctttatgctcgtcacgactttgaagtcatagtagttaccagacccascactaaatctttttattttaatgctcagagaagcacgtagactattcccaaataagtttttaaaaatattctatatactttgtatatttttaaaatatttgacaactggtttttaataatagtaatagtttattagatattttccttatttattttcatatttattttatctaatttaggtgttttattttcttaggtattttaatagtttaaaaatattctgagaaagggtctttaggcttcacgtggctatcaaagagacccaatgcataaaaagattaagaatgtttttagaggatttgaggaaagataaaagataactgtgaaggctgtcatcaaaagtgtaaggtgaagactctaatttgagtagaaccagggctgtatgcctggtacacagtggtgctcaagcaaagtttat

SEQ ID NO: 425551 - DNA, 521 bp, Homo sapiens
  misc_feature (1)...(521): n = A,T,C or G
tgtgttgttagtacagagctggggggaggagaggtgcctagaaccctcaatctgagtgccagacaggacctgaagggycactagccccatctacgtatttcttgattttgccattagtttcacggtgtgaccttgggtacctgattcttcttcctgctattattattgttattcacccatgttatgatattgtttagtgctggggttccggngggtttgcatctcaaatattacattgccttaggtggtctggttatgctgagttagaaaaagtctcagcccatcagggtgattataggcaggagcggaattgtggatacagcatattcactcactggatgtcaatttccactttcaggatggccaatgcatggcagccatcactaatcaatccagagctctttctctcatgccaggagatggtctcagactacttcttctgttcagagttgaaggagagaaaagaatttattagcctttctttggaaaggagtctggctctgatctcaggcagtcacacc

SEQ ID NO: 425552 - DNA, 521 bp, Homo sapiens
  misc_feature (1)...(521): n = A,T,C or G
tgtgttgttagtacagagctggggggaggagaggtgcctagaaccctcaatctgagtgccagacaggacctgaagggtcactagccccatctacstatttcttgattttgccattagtttcacggtgtgaccttgggtacctgattcttcttcctgctattattattgttattcacccatgttatgatattgtttagtgctggggttccggngggtttgcatctcaaatattacattgccttaggtggtctggttatgctgagttagaaaaagtctcagcccatcagggtgattataggcaggagcggaattgtggatacagcatattcactcactggatgtcaatttccactttcaggatggccaatgcatggcagccatcactaatcaatccagagctctttctctcatgccaggagatggtctcagactacttcttctgttcagagttgaaggagagaaaagaatttattagcctttctttggaaaggagtctggctctgatctcaggcagtcacacc

SEQ ID NO: 425553 - DNA, 513 bp, Homo sapiens
ttagctgcaccaccggccacagatgctgtgagcttctccagcgtccggaggccccgaggctgccccactcaagcagagattcgaggaaagcctgagtactcgtccatcccctggcttctgcattcctgggcactggcgacagcaggctctgaagcacaaagggctctgctctttctcaacagcacaagcaagcaacagggagggccggatgcccctcggttctagccsctgaattccaatgagttctccgctgcagcaactgcccagcctgtgcacctgctcagagggaccgccgttcacgatcgccctgtgtggaaggcagagcatggggtgggccagggcacaccaagcctctttgtggtcccttgcctgtttactatgaacgatctctgcatcaaaacaccagggaccaccacagaccacgagaatggcattcacttccggtgctgcctgtcttgttttcatatttctgaaccctctcttgggagcagacagcaagttaattagaggagg

SEQ ID NO: 425554 - DNA, 573 bp, Homo sapiens
ggatgcccgttggtttctccccccgctgcacatcactgggaagagtcctgagatgcacccatgagtcatyacaaacagcccctgatttttaacggcctgtcctgtgttcatgcaataatttttaataaggcagacagggcaggagggtcaaccagctgtaccaaccgaattaatctatccgtaccaggcaatcaatgtgctaatggtatccaatagcacacagtgcggtgtgtacaaccaagcaggaaagagggaacaacgtaaccccaggtggggacagactgtgctggccacgaaaacaggaccctgccgagctcctcgactgtgtactagttcggcttaaaaacgttttttcaagtactttcttggtctctagagtcccacagagcacagtcggaaaagctctgctccacacaatgctgaattaaacacctccacagctgacacaccgtgtgaaagaagggcgtggaaattggccccaaagcaagagtcaggtagctggaaaatgcagaccctaagagcctatttccctgtatttgtgatctggtttaaatattttcaggtttttacttc

SEQ ID NO: 425555 - DNA, 573 bp, Homo sapiens
ggatgcccgttggtttctccccccgctgcacatcactgggaagagtcctgagatgcacccatgagtcatcacaaacagcccctgatttttaacggcctgtcctgtgttcatgcaataatttttaataaggcagacagggcaggagggtcaaccagctgtaccaaccgaattaatctatccgtaccaggcaatcaatgtgctaatggtatccaatagcacacagtgcggtgtgtacaaccaagcaggaaagagggaacaacgtaaccccaggtggggacagactgtgctggccacgaaaacaggaccctgccgagctcctcgactgtgtactagttcggcttaaaaacgttttttcaagtactttcttggtctctagagtcccacagagcacagtcggaaaagctctgctccacacaatgctgaattaaacacctccacagctgacacaccgtgtgaaagaagggcgtggaaattggccccaaagcaagagtcaggtagctggaaaatgcagaccctaagagcctatttcyctgtatttgtgatctggtttaaatattttcaggtttttacttc

SEQ ID NO: 425556 - DNA, 573 bp, Homo sapiens
agtgtaccgaagaaagggcgagctccgggtagtgctgaggtcaacttcatcctcccctcaaggggcacacaaccaggtccagggccaagggactgcttccagaatgaagggggctcagtgtggcactgtgcccatgtgggtgtgcatacatgtgtctgctgaaactcactcctcactccccaacacaaacatacttagttttgaaattggcttatttgtgacaataccaggttcctcgcaaaagagaagtgactttctagtggctgagggcccactgcaggaagcgcagagtgacactaagccggcccccacaccctgggctcatgatttcaccgatttgtaactagatcctgctacgccttcctggagaaaggccagactgaatcaagtgtcaggagaaataaagaaaaaagagcctcggaccacccttttggtttccttgccttcgcacacagatctccccaaaatctctttgtasctaaactccttgattaacttaaattggaatcttaaaactcaggtttggccgggggcggtgtcacatgcctgcaatcccaggactttgggaggcca

SEQ ID NO: 425557 - DNA, 550 bp, Homo sapiens
atcctgctgccttggcctcccaaagtgctgggattacaggcatgggccactgtgtctggccttctcttcattcttaaaaggtatttcactggatatagaattgtargttgatggtttttttctttcagcacttgaaaaaatgtttgccacatccttctggcctccatggtttctgatggaaaaatctgctgtcattcaaatacagcttttgtttgtttgtttgttgtttgctttttgttccgcccccacctccataggtaaagcatcatttctctctagctgctttcaagatattttacttgtctttagtttccagaagttggctatgatgattcttgccatggattactctgagtttatcccatttggggtccattcagctagctttttgaatctaggtttatgtcttttgctaaatcagggacattttcagtcattatttctttggtccctttctgccccactctctttcccctctcctcctggggttctgatgacatataacgatatttttgttatagtgccgtaggtcccttaggctctgtttatt

SEQ ID NO: 425558 - DNA, 550 bp, Homo sapiens
atcctgctgccttggcctcccaaagtgctgggattacaggcatgggccactgtgtctggccttctcttcattcttaaaaggtatttcactggatatagaattgtaggttgatggtttttttctttcagcacttgaaaaaatgtttgccacatccttctggcctccatggtttctgatggaaaaatctgctgtcattcaaatacagcttttgtttgtttgtttgttgtttgctttttgttccgcccccacctccataggtaaagcatcatttctctctagctgctttcaagatattttacttgtctttagtttccagaagttggctatgatgattcttgccatggattactctgagtttatcccatttggggtccattcagctagctttttgaatctargtttatgtcttttgctaaatcagggacattttcagtcattatttctttggtccctttctgccccactctctttcccctctcctcctggggttctgatgacatataacgatatttttgttatagtgccgtaggtcccttaggctctgtttatt

SEQ ID NO: 425559 - DNA, 453 bp, Homo sapiens
ttcctgcagctgctgtaacaaatcacaaacttgatggcttaaaataataccaatttattctcttacagttctggaggccagaagtccaaaatcagtttcacttggctaaagtcaaggtcagcagggctggctgcttccaagactctagggaagagtctgttcctctagggcctgcttgcatcccccagcttgtgaccacatcactctcatctctgcttcggtagtctcattgccttctgcctctctgagtgtgtgcytccctcttataaagaccccttgagtatattgggcccacctggataatctaggatcattttcccatctcaaaatccttaacttcatcatatttgcagagctccatttgtcacataagctaactttcccaggttctggggattggagcaaggatgtctttggggccattattctgcctatcacatgtccccattctgc

SEQ ID NO: 425560 - DNA, 423 bp, Homo sapiens
tcacatgttgtctgggcttgaatcttctcctgagcccccaattcctccttttttttttttttcaaaaaagccccagttttattgagatagaattaatgtatcatacaattcgcccacttaagtgtacagtttagtggtttccagcatattcacagagttgtccagccatcaccattgttcaattttaaaacattttcatcacctgaaatggaaaccctgtgccctttagtggccatcctcttatcttccagccctaagcaaccacgaatctactttctgtctgtagacattcctcctctggacatttygtatgaatggagttatataatacgtgtttttctgtgactgccttctttcacttagcatgatctttttaaggtttatccatgtagcacgtgccagtcctacattcctttttagggc

SEQ ID NO: 425561 - DNA, 589 bp, Homo sapiens
tgagactccccctcaaaaaaaaaaaaaaaaaaaaaaaagacttgatcatcaggtttctggtttgagcacctgggtgaataaggtcccaggtgttgagatgaggaagatgggggtggggctgggttcgtttgaatgcacatttgtttttgttttaagaggaagatggtcatcagagttctacgttggacatgttgagcctgagctatccaggagaaatccaagaggagatatgaagtaaactattgaattaaggctgggcacagaggctcatgcctgtaatcctagcattytgggaggccaaggcgggagaatcacttgagcccaggagctcaagaccagcttgggcaatatagggaggccctgtctttacaaaaaatttaaaaattagccaggcatggtggcgtgcacccgtattcccagctactcgggaggctgaggcaggaggatcacttgagcctgggagatgaaggctgcagtgagccatgattgtgccactgtgctccagtctgggtgacagagcgagaccctgtctcaaaaaaaaggaaaattacagtgctcagatgagagggaaggctataaattggggcat

SEQ ID NO: 425562 - DNA, 496 bp, Homo sapiens
catgaggaaaaaaatgaggaaccacaattagaactcatctgccaacttttaaaaacatttttcagatgaggtgcaaaagcacaaagccatctaaacgtccttagccttaataggtaaaggttctgctgcgataacaagatagggtttgaaatgagactsgagttcaaatcctgacttctccctcgttagctgtgtggcctgagccgactgtttaaccatactgaaccttatttcctcagctggcaaaagaggaaaagcatctatttgcaagggcattggaaaaagtaaattaaataccatctatgaatgcccaggaccaggattcttatttataagaaaaaatttccccccaagtatagtaccataaaggaaattaaggcagcattaaagtgaagtgcttttacgtagaatcccaacaactgcaaagttatgatgtagtgacagggcatattacttagtgggacaacaccatctcacggctgtcaaaaacacaatc

SEQ ID NO: 425563 - DNA, 607 bp, Homo sapiens
atggctcccgcactggccatttgcagcaagggctgtgtcttactccctttaccctcccagtcctcaatctttcattaaagaacagcttctagctgttgacyaagtactgaatgaatggtgctttgaatgttctttaatggtggttttaacctctgaaatatttcactttaactctgaaaattactctaaattgcatgtcaggtacacagtgtaagaaggaatatagtgactttctggccagttgtttagtgttaaatggaaacaagtgtcatgtttacagagtgatagcttgaagtgcacaaagcatgggctggtttcagtcctgctgggtatggatttgatcttgatttgcaactttctccctccagccttaggcattacggtgtgtgtgctacatttcaagtggaacagtcttctcagggcctagggatgactctccagttgctttgtgtatgctcaggctcagcaggagattgacaagtagcttcttgttgcttcttatgtgtccttttatggtatgtgggacagggctggatctgaatgactgctagaagggtggagaattcagtcctcaatcaggtgaaattggtcagtattattagaagca

SEQ ID NO: 425564 - DNA, 569 bp, Homo sapiens
cggattggggtcccaggagtccagaagattccagacccccacacaatgcggtttttcagcagcgaaggtaggggtgggaccacggtgttgggaaaaggttggtgtagcaggtgggctggtttccaaaggtggcctggataaggggatctgggtgaatcaaaacaacaaaacacagggtgataccacagacttccccacatccctgcacctcacactgcactccacaccccagccatatggtgtgcccaagtgtgtttaaccaagaggccaaccaattaggtcaaaagagccaagccataggattggacagcaggtacaggtcagccagggaagaagaggtttggtgttggtggtggaggtaactcagcagatgattgtgagacgtcgtgttccttttgacatggtgtggctgaagactaaagatctcagtactagccagcaggataagacattaagaacacgccaagcagagggacccctctgctccccagttcatgtyccccttcctgtcagcttcccagtaaccctgaactccgctggtcttgaggatctgggagatgggcaacagc

SEQ ID NO: 425565 - DNA, 556 bp, Homo sapiens
gtctggccccaggttctcctccatacctagcatgtctgttagctaaggacaatggccagacccagtacatctatgcattccatgaggcggggcttctgagttctgggtctctgtcttctgagactaatgtgcttctgaggctgtcctggatcctcactcgggaaaggcagccaggctgtggcttgcctgggcagagtcctaggggagaaagtgggggtggagatggggaaaggaaggagttgcccctgctgctggggctyccataggggaggggtgtggtaggcagtctctgagatgaccccccgtgacccctggttgctgtggaattcccaagcccttgtgaaatctcccccactcgagcgtgggctgtacccagagacttgctgagaatgaatggcagaagtgataagatgtgactttggagattaggtgacttaaagacaggacttctatcttgcttgttttctcagcctctcttgagtacatgctctgaagcatttgccatgttgtgagctgccctattgggagattcacatggcaaggaactgggtgaggc

SEQ ID NO: 425566 - DNA, 591 bp, Homo sapiens
attattttttaaatctcggagatttcgatgttttcaaagctctcgggctgccgggtttgctgagggcgagacagaaaccagggcggggaacactaaccctgcggtctaggggagkggcagctccggctgttttgatttttctctgcatgtggcgaatgcaccggcccgctccttcctcgcctccctcggccttattgcagttgacttctatttcctcgggccttttttcctcatgtgggaggggaagaggtgggcagtcaggtcctgacttgcaagtttcaaaatcgatctttcctccccaccctctgagagaaaagtctgttttcgatgccatttctgcctcctaatgcccactaatgctgtttttaagattcctccctccctcccgcatttcctcggactgactgttggagtccggctcttagggacaatgcagggggaaatccaaccaaccaactatcgaaaacagaacccaaagccctataattattttgtactctttttagaatttttttgcatgtgacagagacagagaggaggccgacccaagccctcacctcacctcctccacagctctgggtctctcttgcc

SEQ ID NO: 425567 - DNA, 592 bp, Homo sapiens
gctgtgcctcaggcgctgccgctgggaccggcgatgtgagagagcctcaaatcccaagttcgggcccgaggcctcttagctcacgcctgccgggcctgtctcgggatactgcaaacagcagtggtgtgttcgcccaagtgtaggctccaagggagcggggcttgtgtattgcgtgtctgtttcttctcctggtctgagtgtacgagggagcttggcctgggttgtgtgaggggctgtgggccctacgcccattcttctggcgtagttcgttaaggcttggtatcctgtgggctgcctgcccttcgggcctgagttccatcacctcctagagccctttgcccatctgttcccccaggactctgggctctctacggacccactttcggttccgggctggccaggagaggcggctcggctttgtctctcccttccccgttgtgtcccggggctcgacggggcttgccaagtcccgggacgcgggtagtttctgctctccagtctrggaacccctccgcgcgcggacggccgatcccgcttgttcggcttcccctcgctccgcctttcccggcttggtggcctggcgagcggcgcg

SEQ ID NO: 425568 - DNA, 536 bp, Homo sapiens
  misc_feature (1)...(536): n = A,T,C or G
gaaattccaccatttcagatttttacctgnggatttagagtaatctgctgttttcctagagctcccctaaaatagaaattttggaaggctmaatatatgctaacatttgaaaactcattttctccccttcgtaatgctatgtactgaaggagggggccctacgggctgtgcagggacatcctggaggcatggggagaagaaactgaaaggcaaggttgtatggaacaaagaataccgatctcaggattctctcttgaacctgccctaactttgttcaaatagacttagccactgacctgctgtcaaaagaccgcagccaatctgacttgttttcaacataatgatgaatattgatttggtcccttcatccaacattctcagctggatctttttttgaccaaggatatacattactaggcgagtacaggcagttaattcttccacacgggactttggagtttctgagttgaccagaatcacccaccttaacatctgccagtttataccccaagtcctgaccagtgccccctacctgc

SEQ ID NO: 425569 - DNA, 448 bp, Homo sapiens
gtcccctctgctctatcctttacagaaaagtaacccgaagtaacaacagattacttayaagaaagcaatctcagccagacacagtggctcatgcctgtaatcccagcactttggaaagccagggcgggtggatcacctgaggtcaggagcttgagatcagcttggccaacgtggcaaaaccccatctatactaaaaatacaaaaattagctgggtgtggtggcacatgcctgtagtcccagctactcgggaggttgaggcagaagaattgcttgaacccgaaaggtgaggttgcagtgagccaagattgtgccactgcactccatcctgggtgacaaaaaaataaaaaagtaatctgatgttaaccaatcagttttttttttctatactgttgccttgttcccaccttacaaaatccagtgttctgctattttccaatgggattagag

SEQ ID NO: 425570 - DNA, 448 bp, Homo sapiens
gtcccctctgctctatcctttacagaaaagtaacccgaagtaacaacagattacttacaaraaagcaatctcagccagacacagtggctcatgcctgtaatcccagcactttggaaagccagggcgggtggatcacctgaggtcaggagcttgagatcagcttggccaacgtggcaaaaccccatctatactaaaaatacaaaaattagctgggtgtggtggcacatgcctgtagtcccagctactcgggaggttgaggcagaagaattgcttgaacccgaaaggtgaggttgcagtgagccaagattgtgccactgcactccatcctgggtgacaaaaaaataaaaaagtaatctgatgttaaccaatcagttttttttttctatactgttgccttgttcccaccttacaaaatccagtgttctgctattttccaatgggattagag

SEQ ID NO: 425571 - DNA, 448 bp, Homo sapiens
gtcccctctgctctatcctttacagaaaagtaacccgaagtaacaacagattacttacaagaaagcaatctcagccagacacagtggctcatgcctgtaatcccagcactttggaaagccagggcgggtggatcacctgaggtcaggagcttgagatcagcttggccaacgtggcaaaaccccatctatactaaaaatacaaaaattagctgggtgtggtggcacaygcctgtagtcccagctactcgggaggttgaggcagaagaattgcttgaacccgaaaggtgaggttgcagtgagccaagattgtgccactgcactccatcctgggtgacaaaaaaataaaaaagtaatctgatgttaaccaatcagttttttttttctatactgttgccttgttcccaccttacaaaatccagtgttctgctattttccaatgggattagag

SEQ ID NO: 425572 - DNA, 448 bp, Homo sapiens
gtcccctctgctctatcctttacagaaaagtaacccgaagtaacaacagattacttacaagaaagcaatctcagccagacacagtggctcatgcctgtaatcccagcactttggaaagccagggcgggtggatcacctgaggtcaggagcttgagatcagcttggccaacgtggcaaaaccccatctatactaaaaatacaaaaattagctgggtgtggtggcacatgcctgtagtcccagctactcgggaggttgaggcagaagaattgcttgaacccraaaggtgaggttgcagtgagccaagattgtgccactgcactccatcctgggtgacaaaaaaataaaaaagtaatctgatgttaaccaatcagttttttttttctatactgttgccttgttcccaccttacaaaatccagtgttctgctattttccaatgggattagag

SEQ ID NO: 425573 - DNA, 503 bp, Homo sapiens
ggaagggaaggactttgggactagactgcctcggctggagtcctctttctgcttcatagccacgtgatcctaggcatgttacctgtgcctcagttttcactctrtcaatatgtaataactgaatctgtctttgtggtgaggattcagtgagttaacatatttgaagtgcttaaaaatgaggcttgtgtccatagattaatgagtgaatacacaaatggtgatatggacatacagtggagtattagtcataaaaaggaaggcagagctgatccatggcaccatgtgactgaacctcaaaagcattaggttaagtggaagaagccagacacaggtcacctattgtgtaattccatttataggaaaatatacagaatatgtaaatctgtggagaaagaaagccgatttccaggggctaaggggaggggagaatgggaagtggctgcttcatgggtacaaggtttcattttgagctgatgaaaatgttttggaactacatagagata

SEQ ID NO: 425574 - DNA, 424 bp, Homo sapiens
gaggcaggagagcatagtggttactaggaagggaaggactttgggactagactgcctcggctggagtcctctttctgcttcatagccacgtgatcctaggcatgttacctgtgcctcagttttcactctatcaatatgtaataactgmatctgtctttgtggtgaggattcagtgagttaacatatttgaagtgcttaaaaatgaggcttgtgtccatagattaatgagtgaatacacaaatggtgatatggacatacagtggagtattagtcataaaaaggaaggcagagctgatccatggcaccatgtgactgaacctcaaaagcattaggttaagtggaagaagccagacacaggtcacctattgtgtaattccatttataggaaaatatacagaatatgtaaatctgtggagaaagaaag

SEQ ID NO: 425575 - DNA, 503 bp, Homo sapiens
ggaagggaaggactttgggactagactgcctcggctggagtcctctttctgcttcatagccacgtgatcctaggcatgttacctgtgcctcagttttcactctatcaatatgtaataactgaatctktctttgtggtgaggattcagtgagttaacatatttgaagtgcttaaaaatgaggcttgtgtccatagattaatgagtgaatacacaaatggtgatatggacatacagtggagtattagtcataaaaaggaaggcagagctgatccatggcaccatgtgactgaacctcaaaagcattaggttaagtggaagaagccagacacaggtcacctattgtgtaattccatttataggaaaatatacagaatatgtaaatctgtggagaaagaaagccgatttccaggggctaaggggaggggagaatgggaagtggctgcttcatgggtacaaggtttcattttgagctgatgaaaatgttttggaactacatagagata

SEQ ID NO: 425576 - DNA, 491 bp, Homo sapiens
gtgaatataacataaaggaaacaattctatgaggcgtgagaatgtaacactgaggagaaagatttccaggatttgggctaaaaatcattaatctgaccctgatcaaccctgggccttcagcagtaactcagcctctcaggcctttgatttgttsatgtgtaaaatgagggtcattgtcatttagacaacgaccttcagggtatgttttaatgttaaaattcagagtccttccatatcagataagcatcaactattcaatagtttatgctgaagagtacaggggaccaagagaccacccaaatgggttcatgagcccatcatgccacttctttgttggatcactttgggcacctcactaaatttttctgagctaggtcctctgcaccttgcttgtctatcatcaaagggtcactgtgagactataataatataagaggaaagaaatcgtgattattaaggcatatactgaaccacatacctccattggcaac

SEQ ID NO: 425577 - DNA, 566 bp, Homo sapiens
gaatgattccaccagctgccttgatcttcctgataatgcaggagaccgcaggtgtcaacaagatgccattctgtccaataatcagtcgtccaatctaaaccatccaaaaaaaaaaaaatcaatccagttgcttgggattaaaggcatttcaacaggaaagtgccccaggctctgttaacatacagccaatcacttgataaaagaaacagagtaggctttagattaggggaggcagggtagggggagcactgacattgtctctcctatctaatgtctctaagaccatttggtgcacctgcatctagyagccaattattaacctgtaaataggatatgcctcactgatcttcagtcgtttgaaacatctgcttctgataatcgaggggttagcttgaatcacacaagaagttcttagtttgctactgactcagaaactatgcatgtgaacatgctagagattacaagaaaaaagaaatggagtgcttctctgcttcttctgcttcctgtaacttagaacaagctcagagagcaaggggactgatttactacaacctcatcatctgtag

SEQ ID NO: 425578 - DNA, 566 bp, Homo sapiens
gaatgattccaccagctgccttgatcttcctgataatgcaggagaccgcaggtgtcaacaagatgccattctgtccaataatcagtcgtccaatctaaaccatccaaaaaaaaaaaaatcaatccagttgcttgggattaaaggcatttcaacaggaaagtgccccaggctctgttaacatacagccaatcacttgataaaagaaacagagtaggctttagattaggggaggcagggtagggggagcactgacattgtctctcctatctaatgtctctaagaccatttggtgcacctgcatctagtagycaattattaacctgtaaataggatatgcctcactgatcttcagtcgtttgaaacatctgcttctgataatcgaggggttagcttgaatcacacaagaagttcttagtttgctactgactcagaaactatgcatgtgaacatgctagagattacaagaaaaaagaaatggagtgcttctctgcttcttctgcttcctgtaacttagaacaagctcagagagcaaggggactgatttactacaacctcatcatctgtag

SEQ ID NO: 425579 - DNA, 566 bp, Homo sapiens
gaatgattccaccagctgccttgatcttcctgataatgcaggagaccgcaggtgtcaacaagatgccattctgtccaataatcagtcgtccaatctaaaccatccaaaaaaaaaaaaatcaatccagttgcttgggattaaaggcatttcaacaggaaagtgccccaggctctgttaacatacagccaatcacttgataaaagaaacagagtaggctttagattaggggaggcagggtagggggagcactgacattgtctctcctatctaatgtctctaagaccatttggtgcacctgcatctagtagccaattattaacctgtaaataggatatgcctcactgatcttcagtcgtttgaaacatctgcttctgataatcgaggrgttagcttgaatcacacaagaagttcttagtttgctactgactcagaaactatgcatgtgaacatgctagagattacaagaaaaaagaaatggagtgcttctctgcttcttctgcttcctgtaacttagaacaagctcagagagcaaggggactgatttactacaacctcatcatctgtag

SEQ ID NO: 425580 - DNA, 522 bp, Homo sapiens
tctgataatcgaggggttagcttgaatcacacaagaagttcttagtttgctactgactcagaaactatgcatgtgaacatgctagagattacaagaaaaaagaaatggagtgcttctctgcttcttctgcttcctgtaacttagaacaagctcagagagcaaggggactgatttactacaacctcatcatctgtaggcatattttaactgtaatcttcaggaatgacttttctcctgaaagtaggaattctctttctgctgttaagtgacagcatgtgctggagacattggagaaattacccagtcatgctaagcagagatctggaggtcatccatggatgcagccagattctttctagagctacaaaactgactttctaaaaagtcagcaacacagcgctgaagaacatttattgctacaycttgttttaaaattggattcaatatcatccaatctagtagttctcaatatttctacaaaatagaatcacttatgaagcttttcaaaatcctagtactcaa

SEQ ID NO: 425581 - DNA, 542 bp, Homo sapiens
ttcatggcagctgaattagcaagaaactccttggatggggttaatggcagctgtattttwctgggagctctgctttaattggataaagtaagttctggtaagatttcttcatcttcagtatctcaaatgttttcatttaaataatctttataacaacttttgatgtctgagtggattcccacacagtcatctattgtaagactttctgattccttttttttcctttggtcattatgaatagggcttctgtaaataactgcatggtagcttttgatgggaaataacatcaaagtagttgtcaaaatacttaggaatgttatttttggattgtaaggtgagacttgtttagctttggaaaaaaatgcacaacttgtaataggggaggaaaaataattttctgtttttggaattcttagatggaacgctctgtaaaaactgacagattaaaatgagaaaaacagaaaagtttaaaaacatgtatatcttatggttacatgggagatactcagggaaaaatgagtaaatctccaacaggtggcttt

SEQ ID NO: 425582 - DNA, 542 bp, Homo sapiens
ttcatggcagctgaattagcaagaaactccttggatggggttaatggcagctgtatttttctgggagctctgctttaattggataaagtaagttctggtaagatttcttcatcttcagtatctcaaatgttttcatttaaataatctttataacaacttttgatgtctgagtggaktcccacacagtcatctattgtaagactttctgattccttttttttcctttggtcattatgaatagggcttctgtaaataactgcatggtagcttttgatgggaaataacatcaaagtagttgtcaaaatacttaggaatgttatttttggattgtaaggtgagacttgtttagctttggaaaaaaatgcacaacttgtaataggggaggaaaaataattttctgtttttggaattcttagatggaacgctctgtaaaaactgacagattaaaatgagaaaaacagaaaagtttaaaaacatgtatatcttatggttacatgggagatactcagggaaaaatgagtaaatctccaacaggtggcttt

SEQ ID NO: 425583 - DNA, 600 bp, Homo sapiens
catatttgctggtgcatgacactctcatcactaatccatagatagcccttctttctaatataaatttatagtgaactcctttgacctcattcctaacstaaaagcattaccagtaagttacacgtacctatgtgcaccgcccctgcttccaatccacagcctgccccataagatagtaacaacagtcatgaattggttctggattgctgatcattcccttttagttttatcacatatcccacgtatgtacttagagaatatgttgtttaattttgggtgtttttgagcttcataaaattatccatataatatataaactcctgaggcttgctatatttttcagcatcactgctgtcttgtattctattgtgtggctacacggcaatttattcatttcctctcaattgttccaggttttgctcttatgaacagggctgctatgaacatttttcctgacatatgtgtgtgcaacttcctcttgagtgtctgtgtaagagctgaattgctgggtcctagattattcaaatgttttacttcacaagaaaatgcacaattatttttcaaaatgtttgtacaaattgatacattttcccagcaaat

SEQ ID NO: 425584 - DNA, 600 bp, Homo sapiens
catatttgctggtgcatgacactctcatcactaatccatagatagcccttctttctaatataaatttatagtgaactcctttgacctcattcctaacctaaaagcattaccagtaagttacacgtacctatgtgcaccgccccygcttccaatccacagcctgccccataagatagtaacaacagtcatgaattggttctggattgctgatcattcccttttagttttatcacatatcccacgtatgtacttagagaatatgttgtttaattttgggtgtttttgagcttcataaaattatccatataatatataaactcctgaggcttgctatatttttcagcatcactgctgtcttgtattctattgtgtggctacacggcaatttattcatttcctctcaattgttccaggttttgctcttatgaacagggctgctatgaacatttttcctgacatatgtgtgtgcaacttcctcttgagtgtctgtgtaagagctgaattgctgggtcctagattattcaaatgttttacttcacaagaaaatgcacaattatttttcaaaatgtttgtacaaattgatacattttcccagcaaat

SEQ ID NO: 425585 - DNA, 600 bp, Homo sapiens
catatttgctggtgcatgacactctcatcactaatccatagatagcccttctttctaatataaatttatagtgaactcctttgacctcattcctaacctaaaagcattaccagtaagttacacgtacctatgtgcaccgcccctgcttccaatccacagcctgccccataagatagtaacaacagtcatgaattggttctggattgctgatcattcccttttagttttatcacatatcccacgtatgtacttagagaatatgttgtttaattttgggtgtttttgagcttcataaaattatccatataatatataaactcctgaggcttgctatatttttcagcatcactgctgtcttgtattctattgtgtggctacacggcaatttattcatttcctctcaattgttccaggttttgctcttatgaacagggctgctatgaacatttttcctgacatatgtgtgtgcaacttcctcttgagtgtctgtgtaagagytgaattgctgggtcctagattattcaaatgttttacttcacaagaaaatgcacaattatttttcaaaatgtttgtacaaattgatacattttcccagcaaat

SEQ ID NO: 425586 - DNA, 563 bp, Homo sapiens
gttttacacgttatccaaacaagaaagtgtattcatgttgaatatttaaaaaacaatattgtaaccacaaagcagaaaactaaaccaccaaaccacaaaggtagacaacaatagaggaagaagagaacaaattatctacaaagtaaccagaaaacaattagcaaaatggcaggagtaagtcttttactatcaataataaccttgctggtacatgggttaaactgtccaatcaaaagatgtagaatggctgagtggatcaacaacaagatccaactagatgctgcctacaagagacccatttttaaactttaagaataggcatatactgaaagtaaakggatagaaggagatattccatgaaaacagacagttaccaaaagagagcagggatgcctatacttatatcagataaaacagacttccagtaaaaagctgttccaagagacaaagaaggtcatgatttaatgataaagaggtcatcttatcaagaggacataacaattgtaaacatatatgcatccaaaattgaagcacttaaatatgtaaagcaaatattagtggac

SEQ ID NO: 425587 - DNA, 590 bp, Homo sapiens
tgggatagcagtccacaaaaacttaggaagcccttccatagcacagagtcaatgctgaggaacaactgcccagccaggtgctacattttccaacccacccttgcatctaggtgtggccacatggtgcatttggacaatgggtgataaactagtatgagaataagaacagaagtaatgtgtgtttyttctaggctgaggatatcagaaaacagacatatcatctctacactgctcatttctctttctacagattcaatacagggtaatcatgtggctctaggcaatgccagagtcacaagagggaaagaaactgagtccccatcccatttggcagacaagagtctttgcccaccagggacatcctcatgggactattgtgtgagtgagaaataacattctattgtttttaaggcaataaaaatcgcctacatttcaggtttatttattacaaccacccacattttcttaagcagtcgcgaaagaaacataaacaatagtttaatgccaaatcaaaaatgtcaaatgcaaaattattttatgctatcacagtataaaattatgtccactttggggcaaggacttagaaaaat

SEQ ID NO: 425588 - DNA, 616 bp, Homo sapiens
tccacaaaaacttaggaagcccttccatagcacagagtcaatgctgaggaacaactgcccagccaggtgctacattttccaacccacccttgcatctaggtgtggccacatggtgcatttggacaatgggtgataaactagtatgagaataagaacagaagtaatgtgtgtttcttctaggctgaggatatcagaaaacagacatatcatctctacactgctcatttctctttctacagattcaatacagggtaatcatgtggctctaggcaatgccagagtcacaagagggaaagaaactgagtccccatcccatttggcagacaagagtctttgcccaccagggacatcctcatgggactattgtgtgagtgagaaataacattctattgtttttaaggcaataaaaatcgcctacatttcaggtttatttattacaaccacccacattttcttaagcagtcgcgaaagaaacataaacaatagtttaatgccaaawcaaaaatgtcaaatgcaaaattattttatgctatcacagtataaaattatgtccactttggggcaaggacttagaaaaatgcagaaataaacatgtaaagttattaagtaggaacga

SEQ ID NO: 425589 - DNA, 499 bp, Homo sapiens
aattcacaaccctccccacacctccttgcagtcagctacccccatctctgccccaggcaacctcagatctgatttcatcactaaggattarttttgcctagagtttcgtataaattgcatcatacatatgtacttttttacatctgacttctttcaatcatcatgttgttacatggacctgtagtttgtttctgttgaagagcaatattccattgtatagatggaccaccatttgtcatctattcacaatccatgcacattgggttgtttccgtttgagggttataatggctacagccgcaatgaacattattttgcaaatttttcagtagacaaatgattttatttctgttgggtaaataggaatgcaatggctgagttgtatggtatgtatatattgaaattctgtagaaactacctgttttccaaaggagttgtacaattttccatgtcccccataatatatgagggttttggttgttctgcatcctgggaatatt

SEQ ID NO: 425590 - DNA, 499 bp, Homo sapiens
aattcacaaccctccccacacctccttgcagtcagctacccccatctctgccccaggcaacctcagatctgatttcatcactaaggattagttttgcctagagtttcgtataaattgcatcatacatatgtacttttttacatctgacttctttcamtcatcatgttgttacatggacctgtagtttgtttctgttgaagagcaatattccattgtatagatggaccaccatttgtcatctattcacaatccatgcacattgggttgtttccgtttgagggttataatggctacagccgcaatgaacattattttgcaaatttttcagtagacaaatgattttatttctgttgggtaaataggaatgcaatggctgagttgtatggtatgtatatattgaaattctgtagaaactacctgttttccaaaggagttgtacaattttccatgtcccccataatatatgagggttttggttgttctgcatcctgggaatatt

SEQ ID NO: 425591 - DNA, 499 bp, Homo sapiens
aattcacaaccctccccacacctccttgcagtcagctacccccatctctgccccaggcaacctcagatctgatttcatcactaaggattagttttgcctagagtttcgtataaattgcatcatacatatgtacttttttacatctgacttctttcaatcatcatgttgttacatggacctgtagtttgtttctgttgaagagcaatattccattgtatagatggaccaccatttgtcatctattcacaatccatgcacattgggttgtttccgtttgagggttataatggctacagccgcaatgaacattattttgcaaatttttcagtagacaaatgattttatttctgttgggtaaataggaatgcaatggctgagttgtatsgtatgtatatattgaaattctgtagaaactacctgttttccaaaggagttgtacaattttccatgtcccccataatatatgagggttttggttgttctgcatcctgggaatatt

SEQ ID NO: 425592 - DNA, 611 bp, Homo sapiens
ctccacctctgatctactatcacatgaatcattctagccttctcgccttgctaatttgtaacctcccacttcaacagtaagaaacctggttcccaccatctgcgacttatgtaagtcattgttttattccagatacagacactgtggttttacaattgttcacaattgcttctkttggaaagaactttataaaatggaatccaataatgaagtatagttcatgtgccttcagcctacagattctattcattttcaaagtttttacctagatttgtgtcttagtccattttgtgcttctgtaacagaatacctgaggctgcataatttataagtaaaaaagtttcatttggttcacaatactggtggctggaatgtctgagattgggcagttgcatctggcagggcctcagtctttttcacctcatggtggaaagtggaaggggagcaaggggtgcaccagagatcacatagcagaagtgaaagcaagagggaagccaaggaagccagactctttttaattacctactcctgcaggaattatctattcctgtgagaacagaactcactcacccccatggaggacattaatctattcatgagggatccgtccg

SEQ ID NO: 425593 - DNA, 611 bp, Homo sapiens
ctccacctctgatctactatcacatgaatcattctagccttctcgccttgctaatttgtaacctcccacttcaacagtaagaaacctggttcccaccatctgcgacttatgtaagtcattgttttattccagatacagacactgtggttttacaattgttcacaattgcttctgttggaaagaactttataaaatggaatccaataatgaagtatagttcatgtgccttcagcctacagattctattcattttcaaagtttttacctagatttgtgtcttagtccattttgtgcttctgtaacagaatacctgaggctgcrtaatttataagtaaaaaagtttcatttggttcacaatactggtggctggaatgtctgagattgggcagttgcatctggcagggcctcagtctttttcacctcatggtggaaagtggaaggggagcaaggggtgcaccagagatcacatagcagaagtgaaagcaagagggaagccaaggaagccagactctttttaattacctactcctgcaggaattatctattcctgtgagaacagaactcactcacccccatggaggacattaatctattcatgagggatccgtccg

SEQ ID NO: 425594 - DNA, 611 bp, Homo sapiens
ctccacctctgatctactatcacatgaatcattctagccttctcgccttgctaatttgtaacctcccacttcaacagtaagaaacctggttcccaccatctgcgacttatgtaagtcattgttttattccagatacagacactgtggttttacaattgttcacaattgcttctgttggaaagaactttataaaatggaatccaataatgaagtatagttcatgtgccttcagcctacagattctattcattttcaaagtttttacctagatttgtgtcttagtccattttgtgcttctgtaacagaatacctgaggctgcayaatttataagtaaaaaagtttcatttggttcacaatactggtggctggaatgtctgagattgggcagttgcatctggcagggcctcagtctttttcacctcatggtggaaagtggaaggggagcaaggggtgcaccagagatcacatagcagaagtgaaagcaagagggaagccaaggaagccagactctttttaattacctactcctgcaggaattatctattcctgtgagaacagaactcactcacccccatggaggacattaatctattcatgagggatccgtccg

SEQ ID NO: 425595 - DNA, 611 bp, Homo sapiens
ctccacctctgatctactatcacatgaatcattctagccttctcgccttgctaatttgtaacctcccacttcaacagtaagaaacctggttcccaccatctgcgacttatgtaagtcattgttttattccagatacagacactgtggttttacaattgttcacaattgcttctgttggaaagaactttataaaatggaatccaataatgaagtatagttcatgtgccttcagcctacagattctattcattttcaaagtttttacctagatttgtgtcttagtccattttgtgcttctgtaacagaatacctgaggctgcataatttataagtaaaaaagtttcatttggttcacaatactggtggctggaatgtctgagattgggcagttgcatctggcagggcctcagtctttttcacctcatggtggaaagtggaaggggagcaaggggtgcaccagagatcacatagcagaagtgaaagcaagagggaagccaaggaagccagactctttttaattacytactcctgcaggaattatctattcctgtgagaacagaactcactcacccccatggaggacattaatctattcatgagggatccgtccg

SEQ ID NO: 425596 - DNA, 321 bp, Homo sapiens
ccatggaggacattaatctattcatgagggatccgtccgcatgacccaaacaccgtccactaggccccaccgccccacactgacacagtgggagtcaaatttcaacatgagtttttgtggggacaaaccacatccaaaccatagtaatttgtagcataaattctttttcacatgatgtattctgtcctgggatactccacatcctgagtaatttgatttaatttgaatagagtttgctttaaccayttggctgtaaaattctgcatatttagacaaatgcattgtggcagatatcccactattaaagtatcatatggaatg

SEQ ID NO: 425597 - DNA, 565 bp, Homo sapiens
tttctatggctaaatagtattccattacatgaatgtagcacaatttggttatgcattttggggagcagaaccttcctcttctaactttgttccagggttggagaccttcaaattaactgacaatagatacattagtaggagagacaatacttggcttcttgttccccaagtatcattgtgggacaaaattcatcagatggcaggatccagtttacaaagaggtaaaaatagcccagaaacaagaaacaagactagaatctgataactcacaatggctatagttttcctttaaaaaaattttttttgagacagggtctggctctgtcrcccaggctggagtgcaaaggtgcaatctcagctcactgcaacctctacctcctgggtgcaaacgatcctccctcctcagcctcctgattacctgggactacaggcacataccgtcatgcccatctaatttttgtatttttggtagagacggggtttcaccatgttgcccaggctgatgttgaactcctggccttccaaagggctgtaattataggcatgtgccaccatgcccggctgt

SEQ ID NO: 425598 - DNA, 565 bp, Homo sapiens
tttctatggctaaatagtattccattacatgaatgtagcacaatttggttatgcattttggggagcagaaccttcctcttctaactttgttccagggttggagaccttcaaattaactgacaatagatacattagtaggagagacaatacttggcttcttgttccccaagtatcattgtgggacaaaattcatcagatggcaggatccagtttacaaagaggtaaaaatagcccagaaacaagaaacaagactagaatctgataactcacaatggctatagttttcctttaaaaaaattttttttgagacagggtctggctctgtcgcccaggctggagtgcaaaggtgcaatctcagctcactgcaacctctacctcctgggtgcaaacgatcctccctcctcagcctcctgattacctgggactacaggcacatrccgtcatgcccatctaatttttgtatttttggtagagacggggtttcaccatgttgcccaggctgatgttgaactcctggccttccaaagggctgtaattataggcatgtgccaccatgcccggctgt

SEQ ID NO: 425599 - DNA, 565 bp, Homo sapiens
tttctatggctaaatagtattccattacatgaatgtagcacaatttggttatgcattttggggagcagaaccttcctcttctaactttgttccagggttggagaccttcaaattaactgacaatagatacattagtaggagagacaatacttggcttcttgttccccaagtatcattgtgggacaaaattcatcagatggcaggatccagtttacaaagaggtaaaaatagcccagaaacaagaaacaagactagaatctgataactcacaatggctatagttttcctttaaaaaaattttttttgagacagggtctggctctgtcgcccaggctggagtgcaaaggtgcaatctcagctcactgcaacctctacctcctgggtgcaaacgatcctccctcctcagcctcctgattacctgggactacaggcacataccgtcatgcccatctaatttttgtatttttggtagagacggggtttcaccatgtygcccaggctgatgttgaactcctggccttccaaagggctgtaattataggcatgtgccaccatgcccggctgt

SEQ ID NO: 425600 - DNA, 500 bp, Homo sapiens
gatgagtgggagtactgaagcccagaggaggtcaagtaatttgttcccaatgtcttagataagaagaaaatgaccagctgggaaatcccactcatgtcaaggcagaggcacagggccacagactgtggttgaattgtgccacactcctacatccttctttaggaatcacagaacattcctgtgttgagtcggagtcactgacttccttttcaggctgattgagttctgtccttacgggctgcgacaagaagttttggtattatgcyacaccaagaccatttatctagttcaagaaatgagcacagtccttagagcccagcaactttccccatgtccagtaaatgtagcttctccattagaagctgtcagaatggagccttctggctcatcttgattttgatttgtgcaagaatgaatggttgtgctaagacagctttcctagctgatagtgagcaaaacttttttctcataatctataaaaaaattaaattagaactttt

SEQ ID NO: 425601 - DNA, 605 bp, Homo sapiens
ttggacttttgctaacaactatatcatcgtggaaataagagtattcagtaaggatttcaaaattctggaaaaatcaggcaagaaaaaaagataaacgcttaatttctgtttacaaaagtataatctactaaattgttgtaagttacagttagagtaagagaaagagatttcttaaatccagaaactagaatattaaccagcaatgctccaaaagctataccaattataatcaattttcatcagttcattcagtgccatgtaatcaattccagtcttgtggatcttgagttagcagtgtcatgaacccatcaggttcccaaccggacttctggagaccttaactgagtcaagtgtatggtcttaaagttatttaagcaatatcatcagaagcctataaccagagtacctgtcatagtcttttctgtgagtctcagagggagtcctgtcttggagacgaacattctgacctgtagttgattgcaggagctttcaggaaagcatcagggggaaataatatctaaatgacaaaaagtatgaaatggctgtgatgaaagatctgatgagarttcgttataccacaactgacaaggatattcgattttttc

SEQ ID NO: 425602 - DNA, 605 bp, Homo sapiens
ttggacttttgctaacaactatatcatcgtggaaataagagtattcagtaaggatttcaaaattctggaaaaatcaggcaagaaaaaaagataaacgcttaatttctgtttacaaaagtataatctactaaattgttgtaagttacagttagagtaagagaaagagatttcttaaatccagaaactagaatattaaccagcaatgctccaaaagctataccaattataatcaattttcatcagttcattcagtgccatgtaatcaattccagtcttgtggatcttgagttagcagtgtcatgaacccatcaggttcccaaccggacttctggagaccttaactgagtcaagtgtatggtcttaaagttatttaagcaatatcatcagaagcctataaccagagtacctgtcatagtcttttctgtgagtctcagagggagtcctgtcttggagacgaacattctgacctgtagttgattgcaggagctttcaggaaagcatcagggggaaataatatctaaatgacaaaaagtatgaaatggctgtgatgaaagatctgatgagaattcrttataccacaactgacaaggatattcgattttttc

SEQ ID NO: 425603 - DNA, 577 bp, Homo sapiens
tgaaagatctgatgagaattcgttataccacaactgacaaggatattcgattttttctgtggcagacaacatttatttatttatttatttagagacagagtcttgctctgtcgcccaggctggagtgcagcggtgcgatctcggctcactgcaagctctgtctcctgggttcacgccattctcctgcctcagcctcccgagtagctgggactacaggtgcctgccatcacgcccggctaattttttatatttttaatagagatggagattcaccgggttagccaggatggtctggatstcctgaccttgtgatccacccgcctcagcctcctaaagtgctgggattataggcatgagccactgtgcctggcacaacatttaaagtaataattggaattatgactcattactctatagtggcacatagcatggataaggaggacattgacaaacttccaggaattttatataatttctgaaaacataacattttacccatacaaatataacacagggaaggttaggtatctctttttatttgtatcttctgtatggttttccttataaaaaatgcaac

SEQ ID NO: 425604 - DNA, 586 bp, Homo sapiens
tgagactcggcctcaaaagaaaaaaaaaaaaaaagacagcagaggacagtgatttctcataatcaaagctraggtgaagaaatatttaaagaaaatgacaaatgtataatttcaaatttagattccagaagcttgccaaacatttgttaaattttcttacaaggaaaaaaaacatcattggtcagattcaagatttttttttctttaatgcacaaacatataagaaaaacatctcctttatcttaggactgaccaactgtgcctgctttctttattctcaacagtctatcacatactcgtactcgtggcaacaatactgtgttagattacgaatgcttgtcttggcaaaagagagacaaattcccatcttattactccaaagttctatgttagtagactataacagcaactcaaattctgggcattttagatgtacagaattagaaaaatgatcaagcaaagaagcaaatgttctatgaagaaatttttgaatatcagtttacactaaaaggccaaagtcttaatattaaacatatttcctttttcaccccccacccctccccccactactgagcatatttatatt

SEQ ID NO: 425605 - DNA, 586 bp, Homo sapiens
tgagactcggcctcaaaagaaaaaaaaaaaaaaagacagcagaggacagtgatttctcataatcaaagctgaggtgaagaaatatttaaagaaaatgacaaatgtataatttcaaatttagattccagaagcttgccaaacatttgttaaattttcttacaaggaaaaaaaacatcattggtcagattcaagatttttttttctttaatgcacaaacatataagaaaaacatctcctttatcttaggactgaccaactgtgcctgctttctttattctcaacagtctatcacatactcgtactcgtggcaacaatactgtgttagattacgaatrcttgtcttggcaaaagagagacaaattcccatcttattactccaaagttctatgttagtagactataacagcaactcaaattctgggcattttagatgtacagaattagaaaaatgatcaagcaaagaagcaaatgttctatgaagaaatttttgaatatcagtttacactaaaaggccaaagtcttaatattaaacatatttcctttttcaccccccacccctccccccactactgagcatatttatatt

SEQ ID NO: 425606 - DNA, 665 bp, Homo sapiens
ttaagttttcatagcccttgggcatgtgctttgtcagcatttcccaaagttgagtcattctcatcctgccttcataattgtgctctgtcaattacctctactattatttatttcatatatttttaaatagccccacttttgaaacttaaatacatgtcttttaaaaggaagctttyttactactatacatcaaaagccattattacttgttctaagtactcataacaacatgttcataactattaaaatttagtaatgtgcatccacatactctctaaattcatggagcatctgcacacactttaagaaacaattctgcattactcactcaattttcttgacatccttctgaggcaggacaaaccttgggcccaaagaattgaggtaggagtccaagcaagttgccagccacataaaggcaaaccttggctcggaagtcaggactaccagcccctaggttatggttcatgctctttcctctgctctccagaacctcctatctccaagtgtagttagcagcccagatgcagcagcatcctctagagacttgttaaaaatgcagaagctcaggctccaccccaggcctatgcagactgaatctgcattttaacaaggtccaggtaattcacgtgcacattaagtttgaaaaggcctggtctagatca

SEQ ID NO: 425607 - DNA, 558 bp, Homo sapiens
ccaggaaaaaaaaaaagaaaaaaaggccctttcccggctttttaaacttgagtaagagaatgaagtaacaaaaaagggaaagaaaagcttcaaaagttcattttttcctaattcttgaactctctattccagaagtacctaatgtttttcttaaaagagaggctttcaatttttccctatgtctaaaggcctgctttaagtagcctaagaccaaggacaggagagtgaaaacgaagagggttttggctctccaaggtgggggtggaattgcagctactgcttagggatattttccagtggtcatctcttcaaactccagtgagtctcacaaacagggtgcaccagccaatccaagtatccagtatctacaatgcaaactgtagatactatccaaattgacagtagatagctcagtaaatagctgagcaaactgcaatgatagctcagtcttgaactctggaaataaatttccaaaagccttccccagtggcamttcaaactcaaaaacgtttacaaaactaatcacattttccaaacctgcttccaccactacccgac

SEQ ID NO: 425608 - DNA, 665 bp, Homo sapiens
ttaagttttcatagcccttgggcatgtgctttgtcagcatttcccaaagttgagtcattctcatcctgccttcataattgtgctctgtcaattacctctactattatttatttcatatatttttaaatagccccacttttgaaacttaaatacatgtcttttaaaaggaagctttcttactactatacatcaaaagccattattacttgttctaagtactcataacaacatgttcayaactattaaaatttagtaatgtgcatccacatactctctaaattcatggagcatctgcacacactttaagaaacaattctgcattactcactcaattttcttgacatccttctgaggcaggacaaaccttgggcccaaagaattgaggtaggagtccaagcaagttgccagccacataaaggcaaaccttggctcggaagtcaggactaccagcccctaggttatggttcatgctctttcctctgctctccagaacctcctatctccaagtgtagttagcagcccagatgcagcagcatcctctagagacttgttaaaaatgcagaagctcaggctccaccccaggcctatgcagactgaatctgcattttaacaaggtccaggtaattcacgtgcacattaagtttgaaaaggcctggtctagatca

SEQ ID NO: 425609 - DNA, 665 bp, Homo sapiens
ttaagttttcatagcccttgggcatgtgctttgtcagcatttcccaaagttgagtcattctcatcctgccttcataattgtgctctgtcaattacctctactattatttatttcatatatttttaaatagccccacttttgaaacttaaatacatgtcttttaaaaggaagctttcttactactatacatcaaaagccattattacttgttctaagtactcataacaacatgttcataactattaaaatttagtaatgtgcatccacatactctctaaattcatggagcatctgcacacactttaagaaacaattctgcattactcactcaattttcttgacatccttctgaggcaggacaaaccttgggcccaaagaattgaggtaggagtccaagcaagttgccagccacataaaggcaaaccttggctcggaagtcaggactaccagcccctaggttatggttcatgctcyttcctctgctctccagaacctcctatctccaagtgtagttagcagcccagatgcagcagcatcctctagagacttgttaaaaatgcagaagctcaggctccaccccaggcctatgcagactgaatctgcattttaacaaggtccaggtaattcacgtgcacattaagtttgaaaaggcctggtctagatca

SEQ ID NO: 425610 - DNA, 665 bp, Homo sapiens
ttaagttttcatagcccttgggcatgtgctttgtcagcatttcccaaagttgagtcattctcatcctgccttcataattgtgctctgtcaattacctctactattatttatttcatatatttttaaatagccccacttttgaaacttaaatacatgtcttttaaaaggaagctttcttactactatacatcaaaagccattattacttgttctaagtactcataacaacatgttcataactattaaaatttagtaatgtgcatccacatactctctaaattcatggagcatctgcacacactttaagaaacaattctgcattactcactcaattttcttgacatccttctgaggcaggacaaaccttgggcccaaagaattgaggtaggagtccaagcaagttgccagccacataaaggcaaaccttggctcggaagtcaggactaccagcccctaggttatggttcatgctctttcctctgctctccagaacctcctmtctccaagtgtagttagcagcccagatgcagcagcatcctctagagacttgttaaaaatgcagaagctcaggctccaccccaggcctatgcagactgaatctgcattttaacaaggtccaggtaattcacgtgcacattaagtttgaaaaggcctggtctagatca

SEQ ID NO: 425611 - DNA, 645 bp, Homo sapiens
cacttcattatccttgtgtcactaaataacgtataaagttaaatcagaagtgtattcatctctgaatttctaatcagttgtttttagtttgcagaaaaaacttcagcatgtgccaggaacacaacctcaccttgatcaggtaaagaaaaaaaatctaaatcyaaaattcctaatcaatgtttttaaaggacctctttaactagataggctatgtttaggactattttattataaactttttctaaaatggtatttttgaactgtattgataatttttggaatcttaaatgcttttgacatagtctaattctatttcttaacacataataggaattcatcaaaccagatttgttttagaatctgaggaaatcatgctttctagcctttccattctgtagattgcttagcatattggttagttctgatagggattactccttaaaagcagcctgggggttctataggcagtctgtttttaagtatgttgaattgtttaaggaaaggtctgatataagcatggcttatttaaataaaaattgacttggagtttcaccttcaggtagcactataaatttgaactccttaagatgtttttcatgctctaaaattctaatccctaaggtaaatatctaagatgctaggaac

SEQ ID NO: 425612 - DNA, 561 bp, Homo sapiens
gatactactacctaactccaaagtgtgtggtgaagacaaacaaytggggtgatgtatactaaagtaacgaaagtgttgaccacacactacgggctggttagtgttagattcccttgtttttccctcagtatcaaaaacagatctaatttaggtttacataaagacaaagtatgaagataaggtgacttacagttggtactactaacaaaatgggctaagatttgcattattgcatgaaaacaacaaaacatatcaataaataacaaaaagcttggaattcagacaacagatcaagtctgggcttgatctcaagctagtgttttgatgttgaaaaaatgttatttggtctttctaaccccatttccttatgtaaaattggggatgatgataaattcactgataataagagttaaatgagattcttgaggactcagaatggttctaacgtgtaagtattagcagtcatactgtagcataagaaaataccgtctgctgaaagaggaacaataaagattatctacatggtcatcatttaaaagctaccagatataggaagaaggg

SEQ ID NO: 425613 - DNA, 561 bp, Homo sapiens
gatactactacctaactccaaagtgtgtggtgaagacaaacaactggggtgatgtatactaaagtaacgaaagtgttgaccacacactacgggctggttagtgttagattcccttgtttttccctcagtatcaaaaacagatctaatttaggtttacataaagacaaagtatgaagataaggtgacttacagttggtactactaacaaaatgggctaagatttgcattattgcatgaaaacaacaaaacatatcaataaataacaaaaagcttggaattcagacracagatcaagtctgggcttgatctcaagctagtgttttgatgttgaaaaaatgttatttggtctttctaaccccatttccttatgtaaaattggggatgatgataaattcactgataataagagttaaatgagattcttgaggactcagaatggttctaacgtgtaagtattagcagtcatactgtagcataagaaaataccgtctgctgaaagaggaacaataaagattatctacatggtcatcatttaaaagctaccagatataggaagaaggg

SEQ ID NO: 425614 - DNA, 561 bp, Homo sapiens
gatactactacctaactccaaagtgtgtggtgaagacaaacaactggggtgatgtatactaaagtaacgaaagtgttgaccacacactacgggctggttagtgttagattcccttgtttttccctcagtatcaaaaacagatctaatttaggtttacataaagacaaagtatgaagataaggtgacttacagttggtactactaacaaaatgggctaagatttgcattattgcatgaaaacaacaaaacatatcaataaataacaaaaagcttggaattcagacaacagatcaagtctgggcttgatctcaagctagtgttttgatgttgaaaaaatgttatttggtctttctaaccccatttccttatgtaaaatwggggatgatgataaattcactgataataagagttaaatgagattcttgaggactcagaatggttctaacgtgtaagtattagcagtcatactgtagcataagaaaataccgtctgctgaaagaggaacaataaagattatctacatggtcatcatttaaaagctaccagatataggaagaaggg

SEQ ID NO: 425615 - DNA, 561 bp, Homo sapiens
gatactactacctaactccaaagtgtgtggtgaagacaaacaactggggtgatgtatactaaagtaacgaaagtgttgaccacacactacgggctggttagtgttagattcccttgtttttccctcagtatcaaaaacagatctaatttaggtttacataaagacaaagtatgaagataaggtgacttacagttggtactactaacaaaatgggctaagatttgcattattgcatgaaaacaacaaaacatatcaataaataacaaaaagcttggaattcagacaacagatcaagtctgggcttgatctcaagctagtgttttgatgttgaaaaaatgttatttggtctttctaaccccatttccttatgtaaaattggggatgatgataaattcactgataataagagttaaatgagattcttgaggastcagaatggttctaacgtgtaagtattagcagtcatactgtagcataagaaaataccgtctgctgaaagaggaacaataaagattatctacatggtcatcatttaaaagctaccagatataggaagaaggg

SEQ ID NO: 425616 - DNA, 543 bp, Homo sapiens
aatttttgaaaatggaaaaaaaaatgtctccagacattgccaatgtcccctggaaagcaaaatcgcccctggttgagaactagtgttctagcggtagtgcaacacattcaattgtaaaatatgtgtaaaaacgtgggcttagggctcagccctgctttttgccattgagggttagaatctcatctctcctaaaatattttttatccactcagattktaggccaggatcaacaggacaattgaacggtttgatctagaaaaagccccggtctatggacccaaaactggtgtgatatgaatacactctgtaaaaactcttacactgttttaagctttacatctgataaacagagcacagtagagactccacttgggataatttttcctgaaacctacttgtttttcatgctgtttctgcagttaaggtgcctggtcttaaaatgtgttgaagcaaaagaatgggaagagccaagggacacatcagggagtttccaaatgacagaactgcaaacctgcagggcagtcctctgctgcggaagaggga

SEQ ID NO: 425617 - DNA, 378 bp, Homo sapiens
aatatatgaaactatggccctcaagcaacaaagggaatcaatcacttggaatcaagcatcaaagggcagtgatcctcaagagatgagaaacaaatgaggctagccccacaattgacctcccwaacaccttagaaaactttccaggccacagcacaggaagaaagaatgcagatggagctcagaggtcttcctgagttgagaagacagaactgtgagtctgggaaggccaatgtggctagaattcatagggcagaatattgaggaggagagggctgtacagagacagagctctggaaatctgaagataatacttaccctccttgactgtttatcagagtagtgatcagagtatgcaggtatgaaaatcgccggagaggc

SEQ ID NO: 425618 - DNA, 543 bp, Homo sapiens
aatttttgaaaatggaaaaaaaaatgtctccagacattgccaatgtcccctggaaagcaaaatcgcccctggttgagaactagtgttctagcggtagtgcaacacattcaattgtaaaatatgtgtaaaaacgtgggcttagggctcagccctgctttttgccattgagggttagaatctcatctctcctaaaatattttttatccactcagattgtaggccaggatcaacaggacaattgaacggtttgatctagaaaaagcccckgtctatggacccaaaactggtgtgatatgaatacactctgtaaaaactcttacactgttttaagctttacatctgataaacagagcacagtagagactccacttgggataatttttcctgaaacctacttgtttttcatgctgtttctgcagttaaggtgcctggtcttaaaatgtgttgaagcaaaagaatgggaagagccaagggacacatcagggagtttccaaatgacagaactgcaaacctgcagggcagtcctctgctgcggaagaggga

SEQ ID NO: 425619 - DNA, 378 bp, Homo sapiens
aatatatgaaactatggccctcaagcaacaaagggaatcaatcacttggaatcaagcatcaaagggcagtgatcctcaagagatgagaaacaaatgaggctagccccacaattgacctcccaaacaccttagaaaactttccaggccacagcacaggaagaaagaatgcagatggagctcagaggtcttcctgagttgagaagacagaactgtgagyctgggaaggccaatgtggctagaattcatagggcagaatattgaggaggagagggctgtacagagacagagctctggaaatctgaagataatacttaccctccttgactgtttatcagagtagtgatcagagtatgcaggtatgaaaatcgccggagaggc

SEQ ID NO: 425620 - DNA, 368 bp, Homo sapiens
gtcatccgccatgtgtagaagctcctgaggcctcaccagaagccaaggagatgcyggcaccaggcttgtacagccttcagaaccatgagctaaggaaacttcttttctttgtaaattacccagcctcaggtatttctttatagcaatgcaagagtgctgtaataccatggccgtgatggcagggatgaaggctatgcacgggctcaacaacatggacattcgctcaccaaggctgacctggctatggccactgcagagtgcctactctaccagcagcagggaccaacactgagtctccttatggtaccattccccaaatgatcagccagctacctggtggtagattggttaatttgggccacttccat

SEQ ID NO: 425621 - DNA, 368 bp, Homo sapiens
gtcatccgccatgtgtagaagctcctgaggcctcaccagaagccaaggagatgccggcaccaggcttgtacagccttcagaaccatgagctaaggaaacttcttttctttgtaaattacccagcctcaggtatttctttatagcaatgcaagagtgctgtaataccatggccgtgatggcagggatgaaggctatgcaygggctcaacaacatggacattcgctcaccaaggctgacctggctatggccactgcagagtgcctactctaccagcagcagggaccaacactgagtctccttatggtaccattccccaaatgatcagccagctacctggtggtagattggttaatttgggccacttccat

SEQ ID NO: 425622 - DNA, 368 bp, Homo sapiens
gtcatccgccatgtgtagaagctcctgaggcctcaccagaagccaaggagatgccggcaccaggcttgtacagccttcagaaccatgagctaaggaaacttcttttctttgtaaattacccagcctcaggtatttctttatagcaatgcaagagtgctgtaataccatggccgtgatggcagggatgaaggctatgcacgggctcaacaacatggacattcrctcaccaaggctgacctggctatggccactgcagagtgcctactctaccagcagcagggaccaacactgagtctccttatggtaccattccccaaatgatcagccagctacctggtggtagattggttaatttgggccacttccat

SEQ ID NO: 425623 - DNA, 368 bp, Homo sapiens
gtcatccgccatgtgtagaagctcctgaggcctcaccagaagccaaggagatgccggcaccaggcttgtacagccttcagaaccatgagctaaggaaacttcttttctttgtaaattacccagcctcaggtatttctttatagcaatgcaagagtgctgtaataccatggccgtgatggcagggatgaaggctatgcacgggctcaacaacatggacattcgctcaccaaggctgacctggctatggccactgcagagtgcctactctaccagcagcagggrccaacactgagtctccttatggtaccattccccaaatgatcagccagctacctggtggtagattggttaatttgggccacttccat

SEQ ID NO: 425624 - DNA, 439 bp, Homo sapiens
actctgtctcaaaaaaaaataaaaataagcataraaatgaagaaatgtctcctttccaaatttatgaacctcatcatttttccgttgacagcattaaaaggttcaaaaagacctttccatactctcccacagaagccctagaaattgtcattttgttaatcattctggatgcctgagaacttgtaatccaatgagtagaaagtttggtaccccatttatggctgtcaacctgccagttctcaggagtttgtataagcctaaatctgaaaggatctcatcccattaggacccttgtctccttttctgttgcctttgcccactggctatggcaacaggggtctttctttctccttggctatctttggatatgggggctccgtcttctgtgccaccttagggaatgccttttgcaggcatggctaagtcattaaaaagccta

SEQ ID NO: 425625 - DNA, 439 bp, Homo sapiens
actctgtctcaaaaaaaaataaaaataagcatagaaatgaagaaatgtctcctttccaaatttatgaacctcatcattyttccgttgacagcattaaaaggttcaaaaagacctttccatactctcccacagaagccctagaaattgtcattttgttaatcattctggatgcctgagaacttgtaatccaatgagtagaaagtttggtaccccatttatggctgtcaacctgccagttctcaggagtttgtataagcctaaatctgaaaggatctcatcccattaggacccttgtctccttttctgttgcctttgcccactggctatggcaacaggggtctttctttctccttggctatctttggatatgggggctccgtcttctgtgccaccttagggaatgccttttgcaggcatggctaagtcattaaaaagccta

SEQ ID NO: 425626 - DNA, 439 bp, Homo sapiens
actctgtctcaaaaaaaaataaaaataagcatagaaatgaagaaatgtctcctttccaaatttatgaacctcatcatttttccrttgacagcattaaaaggttcaaaaagacctttccatactctcccacagaagccctagaaattgtcattttgttaatcattctggatgcctgagaacttgtaatccaatgagtagaaagtttggtaccccatttatggctgtcaacctgccagttctcaggagtttgtataagcctaaatctgaaaggatctcatcccattaggacccttgtctccttttctgttgcctttgcccactggctatggcaacaggggtctttctttctccttggctatctttggatatgggggctccgtcttctgtgccaccttagggaatgccttttgcaggcatggctaagtcattaaaaagccta

SEQ ID NO: 425627 - DNA, 469 bp, Homo sapiens
ttcatccatttttatacagctatgaagaaatacctgagtctgagcaatttataaagaacaaaggggtttaatgggctgacagttccacatggctgcaggggcctcacaatcatggcagaaggggaagcaaagctatccctcttcacatggcagcaacaagaagtgctgagccaaaggggaaaagccccttataaaaccatcagatcatgagaactcactcactgtcatgagaacakcatggcagtaaccaccaccatgattcagtcacctcccattgggtccctcccacgacatgtaggtattacaggaactacaattcaagatgagatctgggtggggacacagccaaaccatatcagtgcccatccacattgggtcatggttatctcagtgtcttccagaaacgccctcatagatatgcccagaaatagtgtttgaccagctgtgtgtgtctctcaatccagtcaag

SEQ ID NO: 425628 - DNA, 469 bp, Homo sapiens
ttcatccatttttatacagctatgaagaaatacctgagtctgagcaatttataaagaacaaaggggtttaatgggctgacagttccacatggctgcaggggcctcacaatcatggcagaaggggaagcaaagctatccctcttcacatggcagcaacaagaagtgctgagccaaaggggaaaagccccttataaaaccatcagatcatgagaactcactcactgtcatgagaacatcatggcrgtaaccaccaccatgattcagtcacctcccattgggtccctcccacgacatgtaggtattacaggaactacaattcaagatgagatctgggtggggacacagccaaaccatatcagtgcccatccacattgggtcatggttatctcagtgtcttccagaaacgccctcatagatatgcccagaaatagtgtttgaccagctgtgtgtgtctctcaatccagtcaag

SEQ ID NO: 425629 - DNA, 469 bp, Homo sapiens
ttcatccatttttatacagctatgaagaaatacctgagtctgagcaatttataaagaacaaaggggtttaatgggctgacagttccacatggctgcaggggcctcacaatcatggcagaaggggaagcaaagctatccctcttcacatggcagcaacaagaagtgctgagccaaaggggaaaagccccttataaaaccatcagatcatgagaactcactcactgtcatgagaacatcatggcagtaaccaccaccatgattcagtcacctcccattgggtccctcccacgacatgtaggtattacaggaactacaattcaagatgagatctgggtggggacacagccaaaccatatcagtgcccatccacattgggtcatggttatctcagtgtcttccagaaacrccctcatagatatgcccagaaatagtgtttgaccagctgtgtgtgtctctcaatccagtcaag

SEQ ID NO: 425630 - DNA, 627 bp, Homo sapiens
aacattttccttgtttattaccatgaatacttttttatggtcaaattattagatcctctacttcatgacrccagtttttttaatactgaatatcttttgttgttcgtatgtattctaattgctttgatttgtcttttacctttgcatttagtgtgatcatctgaagcctttctttttgtcaataattctgttttctccagtgtctgtcctgtttttgatattttaaatgaattaattggttaagtcattgtgttatataggctctaagtttctttagcactacaaacgcattttcatcttattctgcttcttcttgcttttgagcttgtttattataaggttgtattgttttcaagttcttcattatgatgaagttgttgagaattttctttagtttttattgggttatgtatccttccagaatgggttctttgccacttgtgtgccctattcatttcttcattttgtgttctttcttgctttttattccctgtatgtgtgtgtttctttttgtcaggctgtaatacatatgcatacatgtttcttcttgatgtgggagaacttctatgtggtgctgatgggaaatatttttaatactccactctccttacccaagtttgtttttct

SEQ ID NO: 425631 - DNA, 627 bp, Homo sapiens
aacattttccttgtttattaccatgaatacttttttatggtcaaattattagatcctctacttcatgacaccagtttttttaatactgaatatcttttgttgttcgtatgtattctaattgctttgatttgtcttttacctttgcatttastgtgatcatctgaagcctttctttttgtcaataattctgttttctccagtgtctgtcctgtttttgatattttaaatgaattaattggttaagtcattgtgttatataggctctaagtttctttagcactacaaacgcattttcatcttattctgcttcttcttgcttttgagcttgtttattataaggttgtattgttttcaagttcttcattatgatgaagttgttgagaattttctttagtttttattgggttatgtatccttccagaatgggttctttgccacttgtgtgccctattcatttcttcattttgtgttctttcttgctttttattccctgtatgtgtgtgtttctttttgtcaggctgtaatacatatgcatacatgtttcttcttgatgtgggagaacttctatgtggtgctgatgggaaatatttttaatactccactctccttacccaagtttgtttttct

SEQ ID NO: 425632 - DNA, 627 bp, Homo sapiens
aacattttccttgtttattaccatgaatacttttttatggtcaaattattagatcctctacttcatgacaccagtttttttaatactgaatatcttttgttgttcgtatgtattctaattgctttgatttgtcttttacctttgcatttagtgtgatcatctgaagcctttctttttgtcaataattctgttttctccagtgtctgtcctgtttttgatattttaaatgaattaattggttaagtcattgtgttatataggctctaagtttctttagcactacaaacgcattttcatcttattctgcttcttcttgcttttgagcttgtttattataaggttgtattgttttcaagttcttcattatgatgaagttgttgrgaattttctttagtttttattgggttatgtatccttccagaatgggttctttgccacttgtgtgccctattcatttcttcattttgtgttctttcttgctttttattccctgtatgtgtgtgtttctttttgtcaggctgtaatacatatgcatacatgtttcttcttgatgtgggagaacttctatgtggtgctgatgggaaatatttttaatactccactctccttacccaagtttgtttttct

SEQ ID NO: 425633 - DNA, 575 bp, Homo sapiens
tattctgcttcttcttgcttttgagcttgtttattataaggttgtattgttttcaagttcttcattatgatgaagttgttgagaattttctttagtttttattgggttatgtatccttccagaatgggttctttgccacttgtrtgccctattcatttcttcattttgtgttctttcttgctttttattccctgtatgtgtgtgtttctttttgtcaggctgtaatacatatgcatacatgtttcttcttgatgtgggagaacttctatgtggtgctgatgggaaatatttttaatactccactctccttacccaagtttgtttttctcctgagccctagtttgaaagctgtatattgttggagtggagggaaagagaagggaaaagtggtgattcagagagccaaatggggcaatgtggcttttaggctctgctctcttgaagtaccaagtatttcactcttgggtctgcccaactgcttatgaataaaattcctttgccttgtatggggacatcattcgacctcagacctctcatttctctttgttctgagccctagaatgtgacctgacctt

SEQ ID NO: 425634 - DNA, 627 bp, Homo sapiens
aacattttccttgtttattaccatgaatacttttttatggtcaaattattagatcctctacttcatgacaccagtttttttaatactgaatatcttttgttgttcgtatgtattctaattgctttgatttgtcttttacctttgcatttagtgtgatcatctgaagcctttctttttgtcaataattctgttttctccagtgtctgtcctgtttttgatattttaaatgaattaattggttaagtcattgtgttatataggctctaagtttctttagcactacaaacgcattttcatcttattctgcttcttcttgcttttgagcttgtttattataaggttgtattgttttcaagttcttcattatgatgaagttgttgagaattttctttagtttttattgggttatgtatccttccagaatgggttctttgccacttgtgtgccctattcatttcttcattttgtgttctttcttgctttttrttccctgtatgtgtgtgtttctttttgtcaggctgtaatacatatgcatacatgtttcttcttgatgtgggagaacttctatgtggtgctgatgggaaatatttttaatactccactctccttacccaagtttgtttttct

SEQ ID NO: 425635 - DNA, 575 bp, Homo sapiens
tattctgcttcttcttgcttttgagcttgtttattataaggttgtattgttttcaagttcttcattatgatgaagttgttgagaattttctttagtttttattgggttatgtatccttccagaatgggttctttgccacttgtgtgccctattcatttcttcattttgtgttctttcttgctttttattccctgtatgtgtgtgtttctttttgtcaggctgtaatacatatgcatacatgtttcttcttgatrtgggagaacttctatgtggtgctgatgggaaatatttttaatactccactctccttacccaagtttgtttttctcctgagccctagtttgaaagctgtatattgttggagtggagggaaagagaagggaaaagtggtgattcagagagccaaatggggcaatgtggcttttaggctctgctctcttgaagtaccaagtatttcactcttgggtctgcccaactgcttatgaataaaattcctttgccttgtatggggacatcattcgacctcagacctctcatttctctttgttctgagccctagaatgtgacctgacctt

SEQ ID NO: 425636 - DNA, 589 bp, Homo sapiens
aaaagtcttgagctaaataatcaaatgcaatgtgtgtcccttgattagaagaaactaatttgagcaaaccagccacaaaagatatttcagggagaccaagctggaaggatcacttgaggccaggagtttgagaccagcctgggcaaygtagtaagacctccatctctacaaaaacaataaattagctgggcatggtggtgtgcacctatagtcctagctactcaggaagctgaggcaggaagatcacttgagcccaggagtttgaggctgcaatgagctatgattgtttcactgcacttcaggctgtgtgaaagagcaagactttgtctcaaaaaataaaaggacatttcataataattgaggaaatctgaatgtggactgggtaataaatgatataaaaaaactattttttattctgtttgaaaagatgattttgtaaccatacaggaaaatgttcttattttttagaaatctgcactaaataatttaggggtaaaatatcattttctttaatatactttcaaacacaagcaaaaaataatcatgacacaaatatagcaaaatgtttacaatctatgttctatgtttg

SEQ ID NO: 425637 - DNA, 533 bp, Homo sapiens
ctcatcaattttcaatcattcgagaccaattttgcttataattatccagttcttttcgaccacctttctcctgaagccagccttatggctattcacttcactttagcataagccsccaagaaggtgaacaaaatgaggaaaagattggttaaagttggctgtttgaaattctgaaacatgtccaccattcccttcacccatgcccacccctcttagaagtagtactttcagattatttaagagtcgatgcttctatgtggattttaatttgtcatctgtcctttataatagctagtaggtttaatttgactctattttaagcatatattgacctatgctaattatctgttaaaataaattccactcttagagttaataaagtgtgtttgtcatggaagacccattgaagtaagaagctgaggagcccttatggtaaagtgggacaagaaataataagacataataattttcccatgcaaatcaacacccgtagcttcaaaaatatcctgacccacaacaagtattggacaggc

SEQ ID NO: 425638 - DNA, 533 bp, Homo sapiens
ctcatcaattttcaatcattcgagaccaattttgcttataattatccagttcttttcgaccacctttctcctgaagccagccttatggctattcacttcactttagcataagccgccaagaaggtgaacaaaatgaggaaaagattggttaaagttggctgtttgaaattctgaaacatgtccaccattcccttcacccatgcccacccctcttagaagtagtactttcagattatttaagagtcgatgcttctatgtggattttaatttgtcatctgtcctttataatagctagtaggtttaatttgactctattttaagcatatattgacctatgctaattatctgttaaaataaattccactcttagagttaataaagtgtgtttgtcatrgaagacccattgaagtaagaagctgaggagcccttatggtaaagtgggacaagaaataataagacataataattttcccatgcaaatcaacacccgtagcttcaaaaatatcctgacccacaacaagtattggacaggc

SEQ ID NO: 425639 - DNA, 327 bp, Homo sapiens
aatcccaactgaggagccagagagaaatcaaaccccatatatscagcatcattgtctactggagtcaaaaatcacaattccactacccaccccaacaccactggccctgtttctcccaattgctttttattgtgtttttaaaaaatcctctttccccatccctgcaacaccgagaaggaggaattatagtagataaatatgaagcatggagatcctttaaaagtgtttttaataataaatgagaaaatgaaaaggagagggttgggaaggaaggagggaattcaaatgccagggaattgttcagtttcgcttttaaagatgttaaca

SEQ ID NO: 425640 - DNA, 347 bp, Homo sapiens
ggttaaagaaccaaaatattaaaaaccttcagggcctactcttgccaaatatgtcagggatcgtgtgtgtgtgtgtgtgtgtgtgtgtgtgtgtatgtgtgtgtgtgtgtgtgttctgagacaccactactgttaaataggcagagctaagacttaggggactggcagaytattgcaaaaagggcacggggcagagggactatgttgtgagcctgcgaaagaagtttgtgtggggactgtgggcagtgaacgcgttgggaacaatatggaaaactgggagccgccttggaatctacagggccgggtaagagaatgtccgaaaagaaaaatgagcaggtgcgggatgt

SEQ ID NO: 425641 - DNA, 347 bp, Homo sapiens
ggttaaagaaccaaaatattaaaaaccttcagggcctactcttgccaaatatgtcagggatcgtgtgtgtgtgtgtgtgtgtgtgtgtgtgtgtatgtgtgtgtgtgtgtgtgttctgagacaccactactgttaaataggcagagctaagacttaggggactggcagactattgcaaaaagggcacggggcagagggactatgttgtgagcctgcgaaagaagtttgtgtggggactgtgggcagtgaaygcgttgggaacaatatggaaaactgggagccgccttggaatctacagggccgggtaagagaatgtccgaaaagaaaaatgagcaggtgcgggatgt

SEQ ID NO: 425642 - DNA, 597 bp, Homo sapiens
ctctccgcgcggccgctcgctgactccctcggcagggatcgcttctgcctcgctgccaagttttctcccgcccaccttctccgctgccagaccgcccgagctgccctcagtttctccccaagttggactcactttcggggtgtcccacaagcccgatcccagagcctgctagcccgaccccggcgacgcctccacccgcgcctggccgcagcctccacccgcgctcgccgccctccggggcgcaccctccgccagaaaacagccggcgggcggcgagacttcgggcagagtgcgggctcctctccggcgccaggcccgtcccctgtctccctgggagtgcgcagcctacacgcaccagtttctctttagaacaaggactgggagggatttgcgagggggctgaaaccttttgccatcagcgaacagcctcagccaaaaacaaccctggaaaggcgagctaagaatggttatctcctgccagcgctgaaatcggaggccgggcgctgcgtgtgtggggtgtgtgtgtgtgtgtgtgtgtgtgtctgtgtaccctcccaccscgaccatttgttgaagggaatcaccactgtcagactt

SEQ ID NO: 425643 - DNA, 568 bp, Homo sapiens
gtatacatatatcataatatcacattatacctccgtaaatacatacaattttaatttgtcaattaacatttttttaawagaatagtgtggccagtcggggaggtagttttttttttttttttttttttttcctctagtctctactcagtctccaagatcccattccccataaagttcctgtcacccaggtggagtgcagtggcacaatcatggctcactgcaccctttcccttttgggctcaagcgatcctcccgcctacaggtacatgccaccacgcccagctaatttttgtagtttttgtagacatggggtttcaccatgttgcctaggctggtctcgaactcctcagctcaatcaatctgcccactttagcctcccacagtgctgggattgcaggtgtgagccaccaagcccaacccataaagttcctaactttttatctccctgggagtgcacagcctacacacaccagtttctctttagaacatacttaagagtcttggcttagcatccaacagacagaactttaacacttctagggatctgtgcacctgtctatggtgtggg

SEQ ID NO: 425644 - DNA, 568 bp, Homo sapiens
gtatacatatatcataatatcacattatacctccgtaaatacatacaattttaatttgtcaattaacatttttttaatagaatagtgtggccagtcggggaggtagttttttttttttttttttttttttcctctagtctctactcagtctccaagatcccattccccataaagttcctgtcacccaggtggagtgcagtggcacaatcatggctcactgcaccctttcccttttgggctcaagcgatcctcccgcctacaggtacatgccaccacgcccagctaatttttgtagtttttgtagacatggggtttcaccatgttgcctaggctggtctcgaactcctcagctcaatcaatctgcccactttagcctcccacagtgctgggattrcaggtgtgagccaccaagcccaacccataaagttcctaactttttatctccctgggagtgcacagcctacacacaccagtttctctttagaacatacttaagagtcttggcttagcatccaacagacagaactttaacacttctagggatctgtgcacctgtctatggtgtggg

SEQ ID NO: 425645 - DNA, 635 bp, Homo sapiens
ttaacacttctagggatctgtgcacctgtctatggtgtggggtttttaagatctctttctaatgacacttcattttgcaaagcaggacagtttcattcccagaagagcaggtatggtaaatcctttgttccagtaacgaagacaatgatccaaaccctaagcctcagagaagcccagaaaccctccaggcctccatctctctgctcctagcacctgcctctctcttgacatcaacatcattctcccctctcacagcccagctccttccacagacccagggattaggcaccagcacctcagactagattttagagaattaccattcaagaggcaatcctcttcccttggttccaatttcaaggttctcaaagactggaacagggctagtttgaggcaatgtgcccyaccgcatagccagaaagaaccttacagtgaaaaggaaaacaattcttccaaagtaagggggtgctgatccccagaggaaggacagatgggcaaccaaacagtaaccgggccaccacgtgcttcacactcactgatcaaggatttctaaaaccacttttcttttctctgaatttatataggactttgtatcactcataaaggaatgtcttataggctgataacacctttct

SEQ ID NO: 425646 - DNA, 635 bp, Homo sapiens
ttaacacttctagggatctgtgcacctgtctatggtgtggggtttttaagatctctttctaatgacacttcattttgcaaagcaggacagtttcattcccagaagagcaggtatggtaaatcctttgttccagtaacgaagacaatgatccaaaccctaagcctcagagaagcccagaaaccctccaggcctccatctctctgctcctagcacctgcctctctcttgacatcaacatcattctcccctctcacagcccagctccttccacagacccagggattaggcaccagcacctcagactagattttagagaattaccattcaagaggcaatcctcttcccttggttccaatttcaaggttctcaaagactggaacagggctagtttgaggcaatgtgccccaccrcatagccagaaagaaccttacagtgaaaaggaaaacaattcttccaaagtaagggggtgctgatccccagaggaaggacagatgggcaaccaaacagtaaccgggccaccacgtgcttcacactcactgatcaaggatttctaaaaccacttttcttttctctgaatttatataggactttgtatcactcataaaggaatgtcttataggctgataacacctttct

SEQ ID NO: 425647 - DNA, 635 bp, Homo sapiens
ttaacacttctagggatctgtgcacctgtctatggtgtggggtttttaagatctctttctaatgacacttcattttgcaaagcaggacagtttcattcccagaagagcaggtatggtaaatcctttgttccagtaacgaagacaatgatccaaaccctaagcctcagagaagcccagaaaccctccaggcctccatctctctgctcctagcacctgcctctctcttgacatcaacatcattctcccctctcacagcccagctccttccacagacccagggattaggcaccagcacctcagactagattttagagaattaccattcaagaggcaatcctcttcccttggttccaatttcaaggttctcaaagactggaacagggctagtttgaggcaatgtgccccaccgcatagccagaaagaaccttacagtgamaaggaaaacaattcttccaaagtaagggggtgctgatccccagaggaaggacagatgggcaaccaaacagtaaccgggccaccacgtgcttcacactcactgatcaaggatttctaaaaccacttttcttttctctgaatttatataggactttgtatcactcataaaggaatgtcttataggctgataacacctttct

SEQ ID NO: 425648 - DNA, 635 bp, Homo sapiens
ttaacacttctagggatctgtgcacctgtctatggtgtggggtttttaagatctctttctaatgacacttcattttgcaaagcaggacagtttcattcccagaagagcaggtatggtaaatcctttgttccagtaacgaagacaatgatccaaaccctaagcctcagagaagcccagaaaccctccaggcctccatctctctgctcctagcacctgcctctctcttgacatcaacatcattctcccctctcacagcccagctccttccacagacccagggattaggcaccagcacctcagactagattttagagaattaccattcaagaggcaatcctcttcccttggttccaatttcaaggttctcaaagactggaacagggctagtttgaggcaatgtgccccaccgcatagccagaaagaaccttacagtgaaaaggaaaacaaktcttccaaagtaagggggtgctgatccccagaggaaggacagatgggcaaccaaacagtaaccgggccaccacgtgcttcacactcactgatcaaggatttctaaaaccacttttcttttctctgaatttatataggactttgtatcactcataaaggaatgtcttataggctgataacacctttct

SEQ ID NO: 425649 - DNA, 567 bp, Homo sapiens
gggctagtttgaggcaatgtgccccaccgcatagccagaaagaaccttacagtgaaaaggaaaacaattcttccaaagtaagggggtgctgatccccagaggaaggacagatgggcaaccaaacagtaaccgggccaccacgtgcttcacactcactgatcaaggatttctaaaaccacttttcttttctctgaatttatataggactttgtatcactcataaaggaatgtcttataggctgataacacctttctattcatgcttatacttaacatttaggctaggataatttcctaacctcagtgtcstcactataagatgggaattattataatccctacctcataaattgttgggaggattaaaatacttagtaaagtgcctgactaatagaaaggcattcaataaatgttagctattcatggtgtcatcatcattatatttaccattattactaatctcctgtattgcaagaattacagtttatattttcgtagaccatcactgtagctaaagggtctttgggccataggtgatattccataaaggttggttaaattgatctg

SEQ ID NO: 425650 - DNA, 558 bp, Homo sapiens
cactcctttgcactgagctcaaagcttctctgtagcatgggtcacaatgaatggtagccctgatagcctagagtagcctttcagccttctctgagcctctaaagactgaggatccttggcatgaaataggagcaactgatatacccttgcttcccctggggactctcttgctctcaaaaaggcatcagccatcatctccatctagagaatatactagctgactcagcttgaccagcctgtcccaaaatgagaatctgggtaaaataagtattgaaayacttcattccttgtagattcacaaaacacattagcatattaaagactatgaagttctgcaggaaaaaaaacctatttaactttaatccaacattgccaagttttatttgaccatggaagatttttccaaaacacttacaaacagatcaaggacattaatctttcatgaaacactttagatccccagggtcctctccagctacatcattctgtgatttttttatttatgatgcattaaaagattaatctctatcagacttccatttagaaattcaccagaat

SEQ ID NO: 425651 - DNA, 494 bp, Homo sapiens
tgcattttaacatagggtttcctggacacactgtttcaacccaagagttgggctaatagtaggagttccatctgctaaaatacrgctgtcagcttcagagggaaattcatgaacgtcttcatagtttgtttttacgtttcacttggcactgtttctaaaatttcctctgaagccaaaaaataagttatttcccagcacactggtcacttttcatttatcattggattgatttttctaacttgcagtaggagctgaaatcgaccagggggttcttatccaacagacagcagcaaaactctttgtgtatctgcgttcctttcaacaagtgtgacttcctcaatggcatcattcgtgagcgttaacacagagctcagcaataacgtttcttcactaaccctaccaggtatccaacataggatgttacttcctttcactgttttccgactcctggcagatattaatcattgggatttgggaacaaggaaatagaattt

SEQ ID NO: 425652 - DNA, 535 bp, Homo sapiens
aattaactcaagcaaatagaggaacaatatccccaacacattgcattttaacatagggtttcctggacacactgtttcaacccaagagttgggctaatagtaggagttccatctgctaaaatacggctgtcagcttcagagggaaattcatgaacgtcttcrtagtttgtttttacgtttcacttggcactgtttctaaaatttcctctgaagccaaaaaataagttatttcccagcacactggtcacttttcatttatcattggattgatttttctaacttgcagtaggagctgaaatcgaccagggggttcttatccaacagacagcagcaaaactctttgtgtatctgcgttcctttcaacaagtgtgacttcctcaatggcatcattcgtgagcgttaacacagagctcagcaataacgtttcttcactaaccctaccaggtatccaacataggatgttacttcctttcactgttttccgactcctggcagatattaatcattgggatttgggaacaaggaaatagaattt

SEQ ID NO: 425653 - DNA, 494 bp, Homo sapiens
tgcattttaacatagggtttcctggacacactgtttcaacccaagagttgggctaatagtaggagttccatctgctaaaatacggctgtcagcttcagagggaaattcatgaacgtcttcatagtttgtttttacgtttcacttggcactgtttctaaaatttcctctgaagccaaaaaataagttatttcccagcacactggtcacttttcatttatcattggattgatttttctaacttgcagtaggagctgaaatcgaccagggggttcttatccaacagacagcagcaaaactctttgtgtatctgcgttcctttcaacaagtgtgacttcctcaatggcatcattygtgagcgttaacacagagctcagcaataacgtttcttcactaaccctaccaggtatccaacataggatgttacttcctttcactgttttccgactcctggcagatattaatcattgggatttgggaacaaggaaatagaattt

SEQ ID NO: 425654 - DNA, 615 bp, Homo sapiens
gtgggtttgacaggagcctcctaactgctcttctgcttccatttttgccccttcagtctattctcaacagggaagcctgaggcatccttaaccatgtcagatcatgtggctcctcagctcaaagcctcatctcagaggaaagctctggtcccttagaaatggcccaggtggtgacagacagactctaaggtgagcagactgttgctagatatctgggctcggaggactcgccactgctcaaaggcagtgaggattttcgcactagaagctggaggacagggatccttgttaggtaggagcagaaagcttagaaaagtggtckcctgcagttacgtggaaaacacatcatgtaagtgataaattgggtatgcagttgaggagatttccaagtaaaatgttgaggatgctgcctggtttcttcttactgcttataatatagtgtgagagaagagagataaattgagaaagagactggtttttaaactgttaaaattgaatcaggacttgatgattttgaaaattgtcagtctccccacatggcaaaagatgctgaaattaacaaatggcttctgagcatgtggcatagggtgtaactgtacagtcttttgtgattat

SEQ ID NO: 425655 - DNA, 615 bp, Homo sapiens
gtgggtttgacaggagcctcctaactgctcttctgcttccatttttgccccttcagtctattctcaacagggaagcctgaggcatccttaaccatgtcagatcatgtggctcctcagctcaaagcctcatctcagaggaaagctctggtcccttagaaatggcccaggtggtgacagacagactctaaggtgagcagactgttgctagatatctgggctcggaggactcgccactgctcaaaggcagtgaggattttcgcactagaagctggaggacagggatccttgttaggtaggagcagaaagcttagaaaagtggtcgcctgcagttacgtggmaaacacatcatgtaagtgataaattgggtatgcagttgaggagatttccaagtaaaatgttgaggatgctgcctggtttcttcttactgcttataatatagtgtgagagaagagagataaattgagaaagagactggtttttaaactgttaaaattgaatcaggacttgatgattttgaaaattgtcagtctccccacatggcaaaagatgctgaaattaacaaatggcttctgagcatgtggcatagggtgtaactgtacagtcttttgtgattat

SEQ ID NO: 425656 - DNA, 615 bp, Homo sapiens
gtgggtttgacaggagcctcctaactgctcttctgcttccatttttgccccttcagtctattctcaacagggaagcctgaggcatccttaaccatgtcagatcatgtggctcctcagctcaaagcctcatctcagaggaaagctctggtcccttagaaatggcccaggtggtgacagacagactctaaggtgagcagactgttgctagatatctgggctcggaggactcgccactgctcaaaggcagtgaggattttcgcactagaagctggaggacagggatccttgttaggtaggagcagaaagcttagaaaagtggtcgcctgcagttacgtggaaaacacatcatgtaagtgataaattgggtatgcagttgaggagatttccaagtaaaatgttgaggatgctgcctggtttcttcttactgcttataatatagtgtgagagaagagagataaattgagaaagagactggtttttaaactgttaaaattgaatcaggacttgatgattttgaaaattgtcagtctccccacatggmaaaagatgctgaaattaacaaatggcttctgagcatgtggcatagggtgtaactgtacagtcttttgtgattat

SEQ ID NO: 425657 - DNA, 410 bp, Homo sapiens
agagtcccttttcctatctattccatatacatctctggatttaaaagatcatacatgcatatgcattaccttcaaaattaaaatgataaagacaaaaggagaaggtttggatttgaatcatgatactactgtttgcaacttatatgaccgtggggaagtcgcctagcctcctggggtttatttcctcatttataaaaatagggaaartaataatatttgtctacatatcttctagggttgttgggaggattgaatgtgatcatgggttacagcattatgaattatttattcatataacacaattattataaaaatattttgctctgattaaaataaaagaaggacgagatcgtgtgtgtttttgtcccagtagctttactaaccagaaagcgcctcctgatgtggtgatc

SEQ ID NO: 425658 - DNA, 410 bp, Homo sapiens
agagtcccttttcctatctattccatatacatctctggatttaaaagatcatacatgcatatgcattaccttcaaaattaaaatgataaagacaaaaggagaaggtttggatttgaatcatgatactactgtttgcaacttatatgaccgtggggaagtcgcctagcctcctggggtttatttcctcatttataaaaatagggaaaataataatayttgtctacatatcttctagggttgttgggaggattgaatgtgatcatgggttacagcattatgaattatttattcatataacacaattattataaaaatattttgctctgattaaaataaaagaaggacgagatcgtgtgtgtttttgtcccagtagctttactaaccagaaagcgcctcctgatgtggtgatc

SEQ ID NO: 425659 - DNA, 410 bp, Homo sapiens
agagtcccttttcctatctattccatatacatctctggatttaaaagatcatacatgcatatgcattaccttcaaaattaaaatgataaagacaaaaggagaaggtttggatttgaatcatgatactactgtttgcaacttatatgaccgtggggaagtcgcctagcctcctggggtttatttcctcatttataaaaatagggaaaataataatatttgtctacatatcttctagggttgttgggaggattgaatgtgatcatgggttacagcattatgaattatttattcatataacacaattattataaaaatattttgctctgattaaaataaaagaaggacgagatcgtgtgtgtttttktcccagtagctttactaaccagaaagcgcctcctgatgtggtgatc

SEQ ID NO: 425660 - DNA, 507 bp, Homo sapiens
accctgctctccccccacctccagcttctttctgctaaggtccccttgcccctcaggtggctttcttgggcagggcataaaagaaattacgtgggttttcttgctcagatttgttcgcaagtccacgagaaatactcagggagtcttgcaaaaatccggtgttacagcagctaagtcagccagctagccgtgccctacagttgagrtggcatgtcatgattcccctctctttcacctgctgactcctcctcagccttccggactctgcttaggtgcctcttcctccaggttgtccgctcccgtccccaccctcccttacctgctctcctaataccatgggctgatccagcgcagcatttgtcacacatcttacagctgcctgcctccagtctgtatccggactccacgacctgaaggtaagggctgcatctgccttgatcatcattgtatcccttgctcctacaacagcgcctaacacagagtaattcctcagtcaacattttctgg

SEQ ID NO: 425661 - DNA, 507 bp, Homo sapiens
accctgctctccccccacctccagcttctttctgctaaggtccccttgcccctcaggtggctttcttgggcagggcataaaagaaattacgtgggttttcttgctcagatttgttcgcaagtccacgagaaatactcagggagtcttgcaaaaatccggtgttacagcagctaagtcagccagctagccgtgccctacagttgaggtggcatgtcatgattcccctctctttcacctgctgactcctcctcagccttccggactctgcttagstgcctcttcctccaggttgtccgctcccgtccccaccctcccttacctgctctcctaataccatgggctgatccagcgcagcatttgtcacacatcttacagctgcctgcctccagtctgtatccggactccacgacctgaaggtaagggctgcatctgccttgatcatcattgtatcccttgctcctacaacagcgcctaacacagagtaattcctcagtcaacattttctgg

SEQ ID NO: 425662 - DNA, 507 bp, Homo sapiens
accctgctctccccccacctccagcttctttctgctaaggtccccttgcccctcaggtggctttcttgggcagggcataaaagaaattacgtgggttttcttgctcagatttgttcgcaagtccacgagaaatactcagggagtcttgcaaaaatccggtgttacagcagctaagtcagccagctagccgtgccctacagttgaggtggcatgtcatgattcccctctctttcacctgctgactcctcctcagccttccggactctgcttaggtgcctcttcctccaggttgtccgctcccgtccccaccctyccttacctgctctcctaataccatgggctgatccagcgcagcatttgtcacacatcttacagctgcctgcctccagtctgtatccggactccacgacctgaaggtaagggctgcatctgccttgatcatcattgtatcccttgctcctacaacagcgcctaacacagagtaattcctcagtcaacattttctgg

SEQ ID NO: 425663 - DNA, 630 bp, Homo sapiens
ttttatagaaaattcttagagcaagtttcacgcataatgttgctgatgtgtgtctgccttttcaataaacatcactatgctttatcacaagatttaataaagcagcttagttaaaaatgccatctgggtctctggacacattaaacaaagcttaaaataaccaccccagcaactgggaggacccagctgttctcataatctgtcccactccttttacttccccataaaaagagtgaatgaagaccacagactaaaagcatccagaatgaactgacacaaacagggagatagatggagccaagggctcctgtaagtttgctattgctcacataatagatttgctaattccacaacctggggatggtgattcagaaagggaagcagaaagagggaagagagaatcatagaagggctcattcaagttttctaatgtatcacaaacctgtcctccctaatgtctggatcatagcagcccattccattcacctactctgtagtgaackccagtagaaaatacaaagccatcaccacccagttctttctcccttctagagatgagatattagccacccaatcccagattctcagatccattccaggaaagaagccctaggtattgaagcacagctt

SEQ ID NO: 425664 - DNA, 571 bp, Homo sapiens
ttgagctgcttcaagaacgttagggaatcacatatattgttgatggctaattgctatataaatggtaatacataaaattagtccccagtgcttgcagaatatagttcacagttaatagactgatattcagggtcttcgcactccatctttcttttcctgtcttctctttgactctttcctaatgtcaatcttccctaactttacccaggatggttaattcactttcccatggatgcatcctgtcagttcctgtctttactcataatgtattctcactctgccaatccctgagttctttcttgttctgtttttttttttttttttaatttattctatasagcctattctgtctctccccccttcctatgtgaagtcttccctgactcaagtggtctcagttttccctgaactcttgttgacttcatcttccttaactgtcaaccatgccttgtcttccagcttgctttaatatcttctttgtccatagccaaggctgatcagcataggacaatcaggacaatatgaatgatgttcaaatatgtgctaacagtcattttgctgactgttctgg

SEQ ID NO: 425665 - DNA, 571 bp, Homo sapiens
ttgagctgcttcaagaacgttagggaatcacatatattgttgatggctaattgctatataaatggtaatacataaaattagtccccagtgcttgcagaatatagttcacagttaatagactgatattcagggtcttcgcactccatctttcttttcctgtcttctctttgactctttcctaatgtcaatcttccctaactttacccaggatggttaattcactttcccatggatgcatcctgtcagttcctgtctttactcataatgtattctcactctgccaatccctgagttctttcttgttctgtttttttttttttttttaatttattctatagagcctattctgtctctccccccttcctatgtgaagtcttccctgactcaagtggtctcagttttccctgaactcttgttgacttcatcttccttaactgtcaaccatgccttgtcttccagcttgctttaatatcttctttgtccatagccaaggctgatcagcataggacaatcaggacaatatgaatgatgytcaaatatgtgctaacagtcattttgctgactgttctgg

SEQ ID NO: 425666 - DNA, 597 bp, Homo sapiens
ccttggaatctgcttgggttctaatccttggtctgtttctcattgtcttcttagggagcttatttacccttttaaagcctcctctgtaaaaggcataatgcctatcataagtttgctttgagtattacatgagacaatgttggtaaactttgcacagtgctgacacatagtaagtgctctgttagctattattatgtaatttttttcttagcttacatagtaagttcaaggtatagtaaaaaagggaagaaagaaaaagatggctgattttgaaaaggagaaagtgatgaatgaagattgcttttacattttttgacactggtctyctaatcttgtttctcttcataaatcttgtgtaccattgtgattgctaagaagaacacaatctatttagcaaacgtttttggcataaaaggaatgataattattacttgacttttatatccttatagagacctaagctaaatctctgacactgacaatattgactattagccagcttgttaacagtactagaaatgaatttggaagaagcaatttgataaattacacacccttttggcttttaccctccctttatatcagacttgtgactga

SEQ ID NO: 425667 - DNA, 597 bp, Homo sapiens
ccttggaatctgcttgggttctaatccttggtctgtttctcattgtcttcttagggagcttatttacccttttaaagcctcctctgtaaaaggcataatgcctatcataagtttgctttgagtattacatgagacaatgttggtaaactttgcacagtgctgacacatagtaagtgctctgttagctattattatgtaatttttttcttagcttacatagtaagttcaaggtatagtaaaaaagggaagaaagaaaaagatggctgattttgaaaaggagaaagtgatgaatgaagattgcttttacattttttgacactggtctcctaatcttgtttctcttcataaatcttgtgyaccattgtgattgctaagaagaacacaatctatttagcaaacgtttttggcataaaaggaatgataattattacttgacttttatatccttatagagacctaagctaaatctctgacactgacaatattgactattagccagcttgttaacagtactagaaatgaatttggaagaagcaatttgataaattacacacccttttggcttttaccctccctttatatcagacttgtgactga

SEQ ID NO: 425668 - DNA, 592 bp, Homo sapiens
tccttttgcttctcaagctaggaagctgagtcattctagactttttcttctttttctgtctyggtttaaattgctacctagggaacactgaatctaagctatctttggaatctattttctcttcttcatttccactgtcattgtttctttactacttttctttattttacacctattctaactgccacattattgatcatttatttattttttgcctgttctagctgccacattactgatcattctgcttccagcctttccctcccaatccctccaccacattcttccagtagaatccttcttaaatacaaacttgatgtaacatcctgtttctgaactccttcagtgacttccatagatcttcagggtaagatctgccatccagcacagcatgtgaggactgccacatacttgcaagttctccctaccctcatcacttaccactgtacacacacaccagctatgacacactttagtatcttttctgatatggcttattatattgccttcgaacatgttatttcttctgtcccagatgttctccctctgctcatccgtttgcatcctgctcatccttcaattttcaatctca

SEQ ID NO: 425669 - DNA, 592 bp, Homo sapiens
tccttttgcttctcaagctaggaagctgagtcattctagactttttcttctttttctgtcttggtttaaattgctacctagggaacactgaatctaagctatctttggaatctattttctcttcttcatttccactgtcattgtttctttactacttttctttattttacacctattctaactgccacattattgatcatttatttattttttgcctgttctagctgccacattactgatcattctgcttccagcctttccctcccratccctccaccacattcttccagtagaatccttcttaaatacaaacttgatgtaacatcctgtttctgaactccttcagtgacttccatagatcttcagggtaagatctgccatccagcacagcatgtgaggactgccacatacttgcaagttctccctaccctcatcacttaccactgtacacacacaccagctatgacacactttagtatcttttctgatatggcttattatattgccttcgaacatgttatttcttctgtcccagatgttctccctctgctcatccgtttgcatcctgctcatccttcaattttcaatctca

SEQ ID NO: 425670 - DNA, 576 bp, Homo sapiens
ttcaatacatgtgtatctgtaccaaagaataagttctccccaaaatagacctaatcccagttgaaattaagtgcctaaacctaaaaaccagatcstagactgtactaaattgttctttgaaatgaggtctatattttgaggtcttttaggaaggatttttctaacctttatatatgctaaaagggactaataggatttctacatgtcaagtataaaccagacaattttgtatttttacatccttccagtatatgttgggggtgggaagagcagattagaacatatgaacatctacttttcttagtcattaaaaattaaaaattattctagtactctgtaatactttagctcatagtttcttcttctcttaattttttatttaataactataaaaacacttggaaggagcctatatccatttatgaattgaggaatcctttgcagtgtgaattatttcacattctaacttatctattttaaataagatattcagatactttttttatataaattttttttttgtttagtaatgtaaaagactgttttatggaagagaggatacctctgtaaagttgt

SEQ ID NO: 425671 - DNA, 563 bp, Homo sapiens
atgaacatctacttttcttagtcattaaaaattaaaaattattctagtactctgtaatactttagctcatagtttcttcttctcttaattttttatttaataactataaawacacttggaaggagcctatatccatttatgaattgaggaatcctttgcagtgtgaattatttcacattctaacttatctattttaaataagatattcagatactttttttatataaattttttttttgtttagtaatgtaaaagactgttttatggaagagaggatacctctgtaaagttgttttctaaactgtccctcccatctccctatgaaaatctggccaaactatgacccttcctcccatgtgctatgtctctatctatctatctatctatctatctctatctatctatctatctatctatctatctatctatctatctatctaattttgcaaatgattttagagatttcatagatgaccctgaagctattcatggagtccagattcaccatttcaaatatatgtgcaatagtgttttatgtaactactatacctgtataccttatt

SEQ ID NO: 425672 - DNA, 506 bp, Homo sapiens
catcaatttctgactgttgaaatgaccttctagtaacacataaaatttggtgccctcatgccaaggatgcaactcaagaaattgtgatgagtgtttgggtgccaaattctactttactacttctcataggaatgtcctgagtgtggggatgttttctgattgtttgaagttctcagaaaaagacatgacctctgtttacattgatagatcatgaagaggagcacgtctagaatataaaaaagacttttctaacctccrgaatgctagaaagcagcaggttaaagaatcaaggtcttgggatttcccttttaaattgcaacaccgatttcttcctcttagtggattttaataaaatatactaagtaatttcaatgatgaaggccaagtatcatgtctctcttgctcactcttatgtcacaaggtctagcacatactacatagcagatacgtgctaaaagtttgttgatcaatgaaatgaataaccttatggtgcctgctatagctat

SEQ ID NO: 425673 - DNA, 506 bp, Homo sapiens
catcaatttctgactgttgaaatgaccttctagtaacacataaaatttggtgccctcatgccaaggatgcaactcaagaaattgtgatgagtgtttgggtgccaaattctactttactacttctcataggaatgtcctgagtgtggggatgttttctgattgtttgaagttctcagaaaaagacatgacctctgtttacattgatagatcatgaagaggagcacgtctagaatataaaaaagacttttctaacctccggaatgctagaaagcagcaggttaaagaatcaaggtcttgggatttcccttttaaattgcaacaccgatttcttcctcttagtggattttaataaaatatactaagtaatttcaatgatgaaggccaartatcatgtctctcttgctcactcttatgtcacaaggtctagcacatactacatagcagatacgtgctaaaagtttgttgatcaatgaaatgaataaccttatggtgcctgctatagctat

SEQ ID NO: 425674 - DNA, 604 bp, Homo sapiens
tcccttccatgcacagttcacgatagggtttgtgctcctaggagaatctaattccctcattgatatgacaggaggtaatgctgctcacctcctgctgtgtggcccagttcctaagaggccacggactggtatgggtccatggtctgggtgttgaggacccctggtgtacattgtacccattaggtattttctcatcccttatccctgttccaccttcccacatttctcagtctccagtgtctattattccactccctatgtccatgcgtacacattatttagcttccgcttataagtgagaatctgactttctgtttctgagttatttcacttatgataagggcctacagttccatctatgttgccacaaaagacataatttaattcttcttttatggctgagtttgtgtctgtstgtgtgtgtgtgtgtgtgtgtgtgtatactcacatatatacactttacacatacatatgtacacacactgcacatacatatatacacacactgcattttctttatctagtcaactattgatgtatacttaggttgactccatatctttcctattgtgaatagtgctgcaataaacacgagtgcagatac

SEQ ID NO: 425675 - DNA, 523 bp, Homo sapiens
cgatccaagttctagcaacttgggttactagaactctggaactattttaccaaactgattgtttcagataaaataagtgctaatggacttctgaaatttgaacttggttctttatttgaagtcccttagaatgagattgtaaaataaaatcagagccttccttgtttctmcacgttaacgttatagtccataatttttctatttagtgcattagagcagtgattctcaaacttctgtgagtaaagaattacccaaggacttttttaaaaatgcagatttctaaccccacatcaagagattctgtttccataggtctagtgtgtggcctgggaatctgcattttaacagacttctcaagtagttccatggacattttctgaaaacagcatatacatccatcctgcagaatgaaccatatgatctagaaatgtgtatctttaagggaagctcttgactctcttcttgctggtaaaataaagccattattatccaacaattttaaaaagtgctgaggtaagatgtt

SEQ ID NO: 425676 - DNA, 559 bp, Homo sapiens
taggtggctcttgcaagagagacagctgtggtagtgcaatgggatttatgcttgacctttattaaccagaaatactgagctgtctcaggtgatgggtggggctatggaactcccaggagtccctgtcccatgttctgccactgaggtgggtatcaggrgcaaaactggatagggttgggttgggcacgcccatatgtagataccccagtgatgggtacaagtaccagccctgatggggtcagaaggcagttctcaggctactggggcaatgttctagtgtgcagcagaggtgcctctaccatgccaaagagcccacatggagaaagaggggcggcccaggctccacagcctacaaggtgatagtgggacccacttagctcacatgcacttgatcgtggtgtctctcccctaccctttgctggtgtccagaagcttgccctagctcccagtaatctcagccaagcaggctgcattgcttccctctttgctttcagtgcttcccttcacttctctgttggattccagtgttctcccttagacgatctagttgaagtgtgaa

SEQ ID NO: 425677 - DNA, 548 bp, Homo sapiens
tgatgtgagtaagtttcctctaattttgaaaatacaagtatactaatttatgaaagtaaatataactgacaatagtaccattaggctgctagaattccttgctaaaatatttactatattgctgagcatcartttgatttgtttcttattataatttaaaatactgtgtactccatacttgataatgctgtttctctttagcaatattgtaccccatgagcaatactgctacccacttagcaatatcatacccattcattgtgtaatgaataggcccatggtcagaatccaggcaagaattcatggactaagtttgatataggcaaaaattgggaccagtagagcaaggaattattttgccttagccagaaaaattccattttgtttcctgtttaagatagaacatgtagcatgatcatggaatttctcactcactatctggtcagaatggaagattgagggactcaaaggaagaacaaattataggcagttactgacacagatccatcaatccatgtgctaggctgactttgtaaaatggccagtga

SEQ ID NO: 425678 - DNA, 551 bp, Homo sapiens
acaccaaagctgagagttaagtaacttgtccaaattcacaccactaataatgtagaagtagtataatagcaaaggtcttcactttaaattcagtgctttttctattatgtctggttttagtgctgtatttagggggtaacttttaaaaaatttaataaaactttattttgaaagaaggaatgatttgtgcagtgctttcttcgtttcggatgccaagaaagtatggtagcaagtgctaacttctatttgtaaatgtgtctgaaatattgtgtgtctggagttttcataaatgtagcaagctcaaaaagtacatgaaataatgataatcaattctgcccaaaacaaagaatttgtaatcttactctcaaattgtttgtcacttgaattcttgtctgtttgtcattatatttatgttacctttattcaaagtttacattttaggtagggggtakatcaacattcttcatctttgtcaaattcattggcaggcaaatttatggtagtgtttggccagttgcttaggggacaaaaccaaacagcatattgattgt

SEQ ID NO: 425679 - DNA, 563 bp, Homo sapiens
cagtgatatccattttgctaaatgcaatggaaatgctccagtcctcatcatactgaatagacatctctgtagtctttgacaacattggactctccctcctgcttgacacactttgttccctcatccatgtttcattttttaatctcatttttcctactcaacttcttaggaaacttcatttccttccacttggccattgagtattggtgttcctcaaggttttgaaactggctcctttttgttttctcattttctatcctctccttaggtaaaatcatccataccatgtaaatatgctttagccttgacctctttcytgaggaacagaccctcttttcagtccttggatgtcacaatggccttctaaaatgaaattcatgaatgttctttttccagtaccctaaatgtggtccttaatccttggcttttgtctcctccttgttacctttgtgaatgatgttatagtattctggttacccagccaaatatctggatacttccttaatacaccctgcacttttaccccttatagtcagtccaactgttagtaagtgttgtttgta

SEQ ID NO: 425680 - DNA, 596 bp, Homo sapiens
ctattattgctgtaataaattaccatgaatttagaggctttaaacaatactaacttattatattacagttctaaaggacagagggtcaaatatcaaagtaccaaaagggatgcttaccatctggaggctggaggggtaaatccatgtccttgcctttcccagcttttagatgtaacttgcattccttggttcttggttccttccttgcttcatgctggcttctgctactattgttaaatcttctgtgactcgactttcttgcctccctcttgtaaggtctcttgtgattactttggtcccatctgaataatccaggataatctcctcatctcaagatcctgaatttaatcatattggcaaagtcccttttgccatataaagttacatattcataggttctaggggttaggatgtggacatctttgggakgccattattctgcctatcatagttaccttaatatggaagtgtctaaatcgttgaattgttttaactaagatttaaaatgctgattaatgtcaatagacaattgatatcaaatatttaaattcatttttttaaaacaggagatgggaggcatttaaagagtcacccag

SEQ ID NO: 425681 - DNA, 545 bp, Homo sapiens
tataatataaagaatgataaaaataatacttagcttttatgatggaaatagcaagtgaagtatattttatgaatttttttcatctgatgccatcaccttgggctttcaaccatgagaaataattatttataatgtattcaactcttcaaagattataagaagacaatttttgctcatatttgacaaaaatcaaggcctaaaaatgtatactttatttatagctggtgagggagagcatttacaaagatggcaaaaggtagagtcctccatcatagctgactcttgaattcttgtgcctacgtgaatctatcttttctttcatcatactgtcttatttctctgatctctattatagtgccagattgtgagctcytaagggcagggaggacaagggttttgctttaaatgcttgtagtaatttaccctaaagtaacgttcaattactatgcttttgaataatgaaaagaatgagtgagtgaatacaatatatacatatatatgtgtttgtgtgtctttcacttcattatgaacacaaagaaagcatg

SEQ ID NO: 425682 - DNA, 613 bp, Homo sapiens
agatgttttgcaaaagcttccacacctatttcagcatctctggcaagttaataaattcaaacctgaagctgcaaagaactataggatcaggaaatccttcactattaaaagatcttttctctggtaaataatgcttaacacattaaaccaaaaatttcataatgarcattttccttttttcatggcttggagataaatggtgagttgacttttcacagtgtattttagccatatatcagttcctctgacactttcccttcatacatgtattttacctgtattacttgccccataccctctcaatgcatttgacacacttaaacactctcgtcttcagtaaatgacatcatagcctcagtagctcagatcatcttgaatcctgtcttcctgtcacagccccacattcaaaccagcagggcttttcttgtttattttctgtctgctctccttaaatgtaagctctgagggagtggggatattttcagtcctgattataaacaaatcctcaggactagacagagtctagacagagtaggtattaaacgcatatttatcgaatgatttaataaaaactttaataatattttaaatatttttgtataaaatattcatt

SEQ ID NO: 425683 - DNA, 613 bp, Homo sapiens
gtctagacagagtaggtattaaacgcatatttatcgaatgatttaataaaaactttaataatattttaaatatttttgtataaaatattcattgtctttggtgatattttctttcaatrtactatttttaggggcagttctaggttcccagcaaaattgtaaagaaagtacagagacttcttctatacttacactcccttcctccacagatgcatagcatccccaccaatatcaaatccccaccattagctacaactgatgaacattgatacatcattatcaccgagagtccacaatttacattccagtttcatcttgggtttgcgcatgtatccaccattagagtatcatacagaggagtttcactgccttaagaatcgtctgtgctcctcctaatcattccttcctctcctgtaaccccaagcaaccactaatcttttcactgtctccatagttttgccttttccagaatgtcatatagctagaatcatacattatataaccttttcagattggtttatttcacttagtaatattacttctttcagggttcctctacttctttttatggcttgatacttcatttcttttcattgcttagttttgaaagaaa

SEQ ID NO: 425684 - DNA, 604 bp, Homo sapiens
ggttttgtaaggggcttccccctttgctcggctttcattctgtctcttgccaccctgtgaagaggtgccttccaccatgattgtaagtctcttgaggcctacccaacaatgcggaactgagagtttattaaacttctttcctttataaattacccaatctcaggtatttcttcatagcagcttgagaacggactaatacaatgatcaaagcaatccataggttcaatcattcatccatttatttattcaaaaagtatagactgaatgtctactatgtgctgggctcactgataaacatgagaaatccaaacatttaaagatatttatagcccagtgagaattcatatgtaaaaataaacaattataaattattatagtaattacaatagargtcagtacaaagtacaatggaaagatagggaacagagtcctaagtccacctgagagaagcagaaaagagtccacatttcagagagtaaggaggacaaaaggacgtaagacacaccctttcctttaagaaaatttctcagaaattcccacacaatattgttatttatatttcatgagcaagaacttaatagatagaagaaaagcagagaaagat

SEQ ID NO: 425685 - DNA, 607 bp, Homo sapiens
attctaacattattctagctggcaaagaagaaatatttacatactccatatccagaattataatgcaagacaaaaaagggtagagatggcataccattgtgagaaacacgctcacccattcaaacccaaagaatggacttagaggcacgaagaacagtgaaagtgagacttttaatagcggtcttgcaagattgggtgtttggtaggcaggcacacccagggcagtcacaacaggtaatttatctcctagcatgcaagtccctcccccagttcctcattggttgagtactatggggttacaatcttcccggatgtctcctaagtttctttatcccccttataaagttataccccagcctccttccatgctgaaatttcaatttcccaacaacaaaactttcttcccttttatgggctgatccctactctacattctgttcacttattgtgatcttctagctgcatgagccatgtggtttgttacatttgcaggctggctgccagtacttagatttatcatgccttgaaaatggaccatttaaaatgtttyatcacaccatcacacatagtacttttttaatgaatgttcttattatgactagtgcat

SEQ ID NO: 425686 - DNA, 540 bp, Homo sapiens
tgtattaatcaaaacagcatgctattggcataaaaacagacacatagaccaattgaacagaataaggagctcagaaataaattcatgcatctacagccacctgatttttgacaaaggtcccaagaacacatactggggaaaggatagtctcttcaataaatggtgctgggaaaattgggatgtccacatgcagaaatatgaaactagacctctatctttcactgtatacaaaaatcaactcaaaatggattaaagagttaaatgtaagatcccaaactacgaaactactagatgaaaacacagaggaaacacttcatgatattggactaggcaaggatttttctggataagamctcaaaagcatgggcaacaaaagcaaaaatagacaaatggtattatatcaaacaaaaagcttctgcacagctaaggaaacattcaacaaagtgaagagacaacctacagaatgggagaaaatatttcaaactatacctctaaggggttaatatccgatatatgtaaagaacttaatagcaaaaaaac

SEQ ID NO: 425687 - DNA, 299 bp, Homo sapiens
tgaaatatggtgggttaaacacagtacttctgtttttctcactgggatggctggaggtaggcagttgttggattggttcagcagttcaaatattttcagttcttttgaacctttacaacatggttgtttggtgatcaatgcaktatctgctcacccctagcataactagatgctgttctagatgcaacaatagagcaggaaactaggaagggcaaagtgttgcccctttagaaaagaattaagactttcttacaagccccacaaaaccacatccacctacatctcattggtcagaattg

SEQ ID NO: 425688 - DNA, 299 bp, Homo sapiens
tgaaatatggtgggttaaacacagtacttctgtttttctcactgggatggctggaggtaggcagttgttggattggttcagcagttcaaatattttcagttcttttgaacctttacaacatggttgtttggtgatcaatgcagtwtctgctcacccctagcataactagatgctgttctagatgcaacaatagagcaggaaactaggaagggcaaagtgttgcccctttagaaaagaattaagactttcttacaagccccacaaaaccacatccacctacatctcattggtcagaattg

SEQ ID NO: 425689 - DNA, 584 bp, Homo sapiens
ctgctactattttaaatccagtgattataaactttggggtgggggcagtgagcatgccttattaatctttgtattcatgatgattgacatatactaaataaccgagaagtaagaggagtaaataattgactatggcaaaccaggaattagataagtgttttgagtagtacaaacaacttgatacgaaaatgaaaaagcatagacattttataattagttcagagaatcaakaaatgatttatagttttcacaaatgaacttgaggacaatgtaaccgtgatggtacttgggcattctcagttgcgggactatgaggagcaagaaaggacgaagcttgttgagagatttgaagtctaggttacatataagtatgttaaaattaaataatgacaaagatagatctagaccatattgtggaagtcttggaaaccatgatgagtttttatttaatccagtaagcaacatggagccattaaaatcttttaagcagaaaatcttagattaatattaaactgcacttcagaaaatgtattttgacagcaatatgtaagatagatagaagtaaaaagaggtcatgtgggaca

SEQ ID NO: 425690 - DNA, 347 bp, Homo sapiens
ggacccaatcgcatgtgcttcaacatgagaggaagctaccagtgcatcgatacaccctgtccacccaactaccaacgggatcctgtttcagggtatgtcttgccttctcatcccagacatgcttttgaaaatccktcctcccactccttgaccaacataaactttagtctcttgtcatgtgtaactcacaggaagtcactaactccaggaagatgtggggttacagtaagtattctcttcaatgaatgggcaagaaatgagctcatcctgcagcagccactgccacccaagctcactcttggctgccagtgttgcctggagcagtcttcccagaatataacatgtaa

SEQ ID NO: 425691 - DNA, 549 bp, Homo sapiens
ggatgtcagcacattgaggaacatyttgtactttattactgaagaggaagatgatttaaaaattacacatgagcttgtatcctgtgatttttgttttgccaaacaagactcttgcaggagctcatagagcgtggtgtaatttgtagatgctggggaaagtctctgggtcatgaaggatgttattcctttaataacattccttattacaatacatatatcacacaaagaatgggtagagttattgacttgccttgtatttaggatgagtctaacagcaaagtagttatgaaaatatttaataggaccctgagaaggagtcgcaggaggaaaatgctggaagtcaatggatggtgatgatgatatatagtcgctgatagggaatgaggacttaccatatgttaaaaatatcagtggaatatcacagttgagtccagagcccagatgagtttctgtgttcctttctacttcttgcctgcctcttgttttgctgtctacccttcccccctccacttctccatttgtatcacaactcattttgttccctcctgc

SEQ ID NO: 425692 - DNA, 572 bp, Homo sapiens
ctagctgctgtaacaaatgagtccccaaatctcagtggcttataataaaacttatttctagcttatgaacacactattgcaattcctggtagatgaagtaaccaaccatcctgggttgcccagaatggaggggkatcctggaatacaagattttcagtgttaagactggagaagttctgggtaaaccaggacaacttggtcatcctactggtcaaacaacattttttgaaactgggacccaggtacttggctttttcccatcttatgacttcaaccactttatcacttgacttccaaggctcccctgagggctgtattcattcccatccagctagaaacagaaaagaacatggaagatatcatggaagcttttctggccagtgctggaagtggcatatatcacttcttcccttattcaattggctagagtcagacacatggaaacgcttagctacgagagtgactaggaatggcagtcttcttttcagaaagaccttatttaatgatcagtgagtagtctttggtatatcaacatatatagattgtgttgaatatacagaaatagatggcaa

SEQ ID NO: 425693 - DNA, 637 bp, Homo sapiens
tagtgtctaaaactgataaatcagggaatagaagtgtaggcatgtttatttgagataattactataaaacttagaaaaagttaaaagtagtttgaaggggagatgaaccaagggatgaggaaagtggggctggaaacaattgttcttataacccattcaatgctgttttataaaaagtgactaagtgtattgttaaaaataaatgtttatatacatggacataaagatrgaaacaatagacactgaggattccaaaacaagaggggtggagcatgggctgaaaaacttcctattgggtactatgtttactatcttggtgatgggatcaatagaggcccaaagctcagcatcatgaatatatccttataacaatgtaccccttaaatctaaaatttaaataaaaaaacaggtgtttatttttagaagggtagtgcatcctttggatttccataaacatataccaatagatagaaaatattgttgaggttccacaaaattccacaatatttgcaaggaagcaaaaacaataaagataaacaagatcatgtgtgaatgctacatagagtaagactgggtggcttagtatcagggcatatatgaaattgtacacattacaccaacagtaagtacagagtga

SEQ ID NO: 425694 - DNA, 546 bp, Homo sapiens
aatagaagtgtaggcatgtttatttgagataattactataaaacttagaaaaagttaaaagtagtttgaaggggagatgaaccaagggatgaggaaagtggggctggaaacaattgttcttataacccattcaatgctgttttataaaaagtgactaagtgtattgttaaaaataaatgtttatatacatggacataaagatggaaacaatagacactgaggattccaaaacaagagrggtggagcatgggctgaaaaacttcctattgggtactatgtttactatcttggtgatgggatcaatagaggcccaaagctcagcatcatgaatatatccttataacaatgtaccccttaaatctaaaatttaaataaaaaaacaggtgtttatttttagaagggtagtgcatcctttggatttccataaacatataccaatagatagaaaatattgttgaggttccacaaaattccacaatatttgcaaggaagcaaaaacaataaagataaacaagatcatgtgtgaatgctacatagagtaagact

SEQ ID NO: 425695 - DNA, 603 bp, Homo sapiens
aagtagtttgaaggggagatgaaccaagggatgaggaaagtggggctggaaacaattgttcttataacccattcaatgctgttttataaaaagtgactaagtgtattgttaaaaataaatgtttatatacatggacataaagatggaaacaatagacactgaggattccaaaacaagaggggtggagcatgggctgaaaaacttcctattgggtactatgtttactatcttggtgatgggatcaatagaggcccaaagctcagcatcatgaatatatccttataacaatgtaccccttaaatctaaaatttaaatwaaaaaacaggtgtttatttttagaagggtagtgcatcctttggatttccataaacatataccaatagatagaaaatattgttgaggttccacaaaattccacaatatttgcaaggaagcaaaaacaataaagataaacaagatcatgtgtgaatgctacatagagtaagactgggtggcttagtatcagggcatatatgaaattgtacacattacaccaacagtaagtacagagtgaaatttatggattttcagctaaagcattttttttttctggattgagaacta

SEQ ID NO: 425696 - DNA, 603 bp, Homo sapiens
aagtagtttgaaggggagatgaaccaagggatgaggaaagtggggctggaaacaattgttcttataacccattcaatgctgttttataaaaagtgactaagtgtattgttaaaaataaatgtttatatacatggacataaagatggaaacaatagacactgaggattccaaaacaagaggggtggagcatgggctgaaaaacttcctattgggtactatgtttactatcttggtgatgggatcaatagaggcccaaagctcagcatcatgaatatatccttataacaatgtaccccttaaatctaaaatttaaataaaaaaacaggtgtttatttttagaagggtagtgcatcctttggatttccataaacatataccaatagatagaaaatattgttgaggttccacaaaattccacaatatttgcaaggaagcaaaaacaataaagataaacaagatcatgtgtgaatgctacatagagtaagactgggtggcttagtatcagggcrtatatgaaattgtacacattacaccaacagtaagtacagagtgaaatttatggattttcagctaaagcattttttttttctggattgagaacta

SEQ ID NO: 425697 - DNA, 537 bp, Homo sapiens
ttatttttaattaacctctaaagcagcagcattgaggaaaactgtggacagagtgattaaaaggctgagttgattttgaagaataattatcttagttttacttaacctttaaagaagaagcatcaaggaagaatgtagacaaggtaccgagctcgaattcgttgatgccaaagcaactgctgaatctcatcatttcaaacaactggacaatttctccagttggctgaaaatacatcaaattaatggtgtcagaaaaagaaaaacatgattacttgcttttacttttcaattgattatgagcatataaaagtttttagaaattatctggcacagtacctattatgttcttggatctgtgcctgacaattttacctaattatttttttactccttcataaaaatcctcacagcaggtatcctattcactattttacacgagcagaaaccgaggagcagagagatgagcttgtctgtccaaggrgcaacagcttaatgtcagagtcagaatttagatgctggtttgtcctaaacccaagg

SEQ ID NO: 425698 - DNA, 549 bp, Homo sapiens
tccttcataaaaatcctcacagcaggtatcctattcactattttacacgagcagaaaccgaggagcagagagatgagcttgtctgtccaaggagcaacagcttaatgtcagagtcagaatttagatgctggtttgtcctaaacccaagrcattttcattctctgtgtcaagtttctaagattttgtcacacattgtttgaaaagctataaaaagagaatgttgaaatgccgattagagaggttttaatcgttctttattcctctatgggggaagagtcctgttggtcatgtataaattttctttagctgtatggaaacaaccaggtagcaattatttaataaggataattatgtccctctttagagaagtacatccaccttgttttccatcccctcattgccccatgtagcttaatgtttgttttgtaaggctatagtgaggtaatacattctgaatgttgaggcatattttggttttctttggaggagacattaatttctggcccttcttaatgttcctcttttgttctttgtacagtgaagcaccaa

SEQ ID NO: 425699 - DNA, 565 bp, Homo sapiens
catttagttctgtctgatcttttgttttttttcttctgccgggtttgggtttggattgtccttatttctccarttctgtaaggtgtgaccttagattttctatttgtgctctttcaaacttttcgatgtaggcatttaatgctatgaactttccccttcagtgaaatagatagcataaataaaaaacaatcacaacttctggaaattcaaggacccaattacagaaatgcaaaatgcactggaaagtctcaacaatagaatcgaagaatcgaacaagcagaagaaagaacttcagagcttgaagacaaggctttcaaattaacccaatctattcaagacaaaaaattttaaaaaatgaacaaagcctctaagaaatttgggactgttaaatgtccaaacataagaataattggtgatcctgagaagagaaatctctcccagcagggctactgggctctggggtggcactagggagtatttgcgaagagtgctctgatgtgatctgtcttcagatctttcagctgtggataccaacacctactctggtggaggtagcagaggagtg

SEQ ID NO: 425700 - DNA, 565 bp, Homo sapiens
catttagttctgtctgatcttttgttttttttcttctgccgggtttgggtttggattgtccttatttctccagttctgtaaggtgtgaccttagattttctatttgtgctctttcaaacttttcgatgtaggcatttaatgctatgaactttccccttcagtgaaatagatagcataaataaaaaacaatcacaacttctggaaattcaaggacccaattacagaaatgcaaaatgcactggaaagtctcaacaatagaatcgaagaatcgaacaagcagaagaaagaacttcagagcttgaagacaaggctttcaaattaacccaatctattcaagacaaaaaattttaaaaaatgaacaaagcctctaagaaatttgggactgttaaaygtccaaacataagaataattggtgatcctgagaagagaaatctctcccagcagggctactgggctctggggtggcactagggagtatttgcgaagagtgctctgatgtgatctgtcttcagatctttcagctgtggataccaacacctactctggtggaggtagcagaggagtg

SEQ ID NO: 425701 - DNA, 565 bp, Homo sapiens
catttagttctgtctgatcttttgttttttttcttctgccgggtttgggtttggattgtccttatttctccagttctgtaaggtgtgaccttagattttctatttgtgctctttcaaacttttcgatgtaggcatttaatgctatgaactttccccttcagtgaaatagatagcataaataaaaaacaatcacaacttctggaaattcaaggacccaattacagaaatgcaaaatgcactggaaagtctcaacaatagaatcgaagaatcgaacaagcagaagaaagaacttcagagcttgaagacaaggctttcaaattaacccaatctattcaagacaaaaaattttaaaaaatgaacaaagcctctaagaaatttgggactgttaaatgtccaaacataagaataattggtgwtcctgagaagagaaatctctcccagcagggctactgggctctggggtggcactagggagtatttgcgaagagtgctctgatgtgatctgtcttcagatctttcagctgtggataccaacacctactctggtggaggtagcagaggagtg

SEQ ID NO: 425702 - DNA, 588 bp, Homo sapiens
cagccttggcttatcaaaagcagaggtcctgtctcatttataccctccagctcctggaatattttaagactcaataaatgtatgttaaattgartcacacaaatacaggaatgcatactcagtttctagtcaaaaccgaagctaaactatcttcctttggaagttgcctatttatagacttgcatgttttgttttaggtgctgagaagagactttttttttaatactttttggatgaatgtcattgttgaccacttctcattttaggggctctgttttcatctcagattattctgtcttgtagcccatggtaactggagtccttggagtggctggggaacatgcagccggacgtgtaacggagggcagatgcggcggtaccgcacatgtgataaccctcctccctccaatgggggaagagcttgtgggggaccagactcccagatccagaggtgcaacactgacatgtgtcctggtgagcctcttgatttctggcagttgaataagtaaagcatttcatttagtgctcattgtagcaggcctattgcttcagaccttaaaatgaaagttgtataggcaggggcacccc

SEQ ID NO: 425703 - DNA, 512 bp, Homo sapiens
aataactctccattcttctttccttttataacctaaatgtgttagatgatctagtttctccctactatgtcagcttaggtaagctggaactacatttcctgtctctgaaagtttcagagcataggccacatgagacatgtagcaygagatttgaaaagtataagtgaagctgcagccacattgcttttacacttggaaagtcactgcaggggtaccaggtactgttgcaagtcatggaccccatcattatctgctagctcctctcggtggatcaggacaatggtggccccacagccattctacttcccactggatccttcatcttctacaatccctgagctagatgtgtgtctacacctgtaacaaagaaccccagcttttcctgcatgagacctacatcattgaagttggaaaattaaagatggtgaaagattgctatggacagaattgtctcccccagatgtatacgtagaagacctaaccctcaatgtgactgcatttggagataaggc

SEQ ID NO: 425704 - DNA, 546 bp, Homo sapiens
tgcttaatttctacaaacttaaagctaccttatagaattgttgataggattaaaatggttaacacatactagatgtttaccatcatgcatgacatgctcaataaactctcattgtcatcaccaccaccaacatattctttatttttagtttggggactggacactgattgtattctttggcttatgaaatattaataacactatgatgtgcacagattagaaggatcttagatttatgggkgatgatggttgttatgtgaaagtagaatgttttaaaagcttatttatttcactattaaattcagatgtcatatgacctttttgatgtttgagaaaagatttgtagcatctctgaatactggccctcttttctcccatgtaatgttgatgaaattgcatccttatccaggaatgtttttttttcccccaataggtgggccccagcgagccagaggaagtgttattggaaatattaatgatgttgaatttggaattgctttccttaatgccacaataactgatagccctaactctgatactagaata

SEQ ID NO: 425705 - DNA, 603 bp, Homo sapiens
gctctttcacatatcaacagattctcagctcccagcactccactagcttcacaaattttataaagcatgcccaacagagcatcttaagttatcaggaatcaatataaatctccctcagcagacaggtctaagccaatgaaactgctgacaagaaagcatttgcatctcttgattagaagctagtccaaaaccaattgactcaaagtgcagccaagctggtttacaaacaattgcttttgcttacaaggaaagctaaatgagcaacatcttcctgctggaaagaggcttgttctcatattaaactaatattttagacatgagcttacatcacttcaagctacattaaattcaggggggaaatagaactttatttcccccctgaattattcaaagccttctctagtttttagtatacataaataatctctyctttaataaaaatgcttcctctgaagaatgcctcaggtctttgtctactccaaaggcaactctttgaatatttgataattaatggacttttaacattttcgtgttaaaagggataattacattttctgaaataactgtctatactcagtgaacactttgtacattcagtttact

SEQ ID NO: 425706 - DNA, 569 bp, Homo sapiens
agcactgagaaggtgaatgatttgctcaaacacatctggtctcatcaaaaccagatgcagaagtctcataaagaccccttttatggatactaggaagaaaccaaaatttcccccagaaggaagaaaggaaaggaggggtagaaggagagaggaacaaatttagagtctcatttttcccaagagwttctcaactgcatgagatttccaaaaccaatgataatttagcacccttcccctaattcttcacatcttcccctcccttcctgcctgagcaaaatgaagacacgatgcagaattcagcaaagttcacatgagtgctcagctatcgtccttaactcaagtgcatcaagtagcagaaactgacaagaaggactccctttgtccccagggagcgaggagaagggaaagtggaatctgttgtcaagcccactgaacatagagctggaaacaggtaaagaaacaaagtgggtgagaagccacataagcagagagtggagagacagagaatccagagcaaagcaagagagcgcccaaacagctgcgagtgcctgtgctaatctgcacctgca

SEQ ID NO: 425707 - DNA, 600 bp, Homo sapiens
ggtgggatgaggcaaacgaaaacagggttggcagtaaaacttctcaaagcataccttctaatgtctctcttaacttttttaacaatgtaaacaaatgtattacctattcaaaaacaattaattaaaaagaaaaactagggggaaacattcttgggaaaagaactgccaagtttaatgcatggactctattgtaatcaatttattttcgatattcacaaaatcaatacatttaccttttaaacaatgaatgtattcaaaagccctcaartatcaggaaagtgacttccttttcaaaattcatcatctaattattccttttcaaaacgcatcatgtagttggcctaagcataagaaagttccttctgatgatttgctttaaatttaaacatgtcatcccaaaagcaagagagtacctccctaattctcttctgggtgttatgtttacttcttttaagggagcactggttcttgataacttgaatcattttaaagtccccctccccaaaaaaggttgctccaaattttaaaacattatcgtaatatcatttcaatgtgtacattaaatgttagcatttaacatttaatgctaacgttaagata

SEQ ID NO: 425708 - DNA, 523 bp, Homo sapiens
ctgaaggaaaccacttggaatctggtagttatyctaaaatgttcactggaactctttgcaatgtctgactgcagaggttacagatgtctctgaggagtgtagaaggggacttgcctctcttctgaatgatccacggggctgctttccacaaccctatgcagagacagtcattttgggaaggtcatattgagtgaaatggagcggtagatcccaggaaagagcctcactggctggttgtactccaccaatcttagctgtcagagcctaacagcctttgatagcaccactggcaagacctgggcagatagtgtagagtccactgacccgtcgtcacaaggccagagccatgaatgcagcctgttaggtcactggggcccacagatgtgctgctgtcttacaacaaaaggatgttatcatgaggaattacactctacaggacatacatacctgcagtacatctaaatctgtattttaaaacaaactataatcacaaccatcacatcacagtaatttccaatgaatt

SEQ ID NO: 425709 - DNA, 619 bp, Homo sapiens
ccatttcaaatgtatgagaggccagtcctctcttcccagagacttcaattatgtaagtcataaaacttttcaaaccctcttgctttgtgtgtggaataactgatacatgatttttctgtcactttgccggccagagacctccatggccaatgatgtctctgcccagggcctcacttggccctgggcctgttgcagaaggtgccccatccactcgtctggyggggccatgcctggcttgtgcaccagcctggatcccatgctcagcctacaactgggccaggtgtgcccctggcccagctcgtacccgcattcagaggttccgaagttcttgtcccacatccaagatgaataaggttactctgacaatcgaagggtgaggtgggtgaagaagaattttattgagtgaaagaatagctctcagcagagaggggatgcgagagtggtccctacccaaagtcaagtggtcacccacccagcgtggctgggtctgggacttgtatgggcttagaatgggtgagtacatgctgattggtttgttagtatgcaaaaaaaaggctaaaacaaaggcaccatgtaaaggtgggcatgacagtgtaaaaaaacaattagggaagagtag

SEQ ID NO: 425710 - DNA, 601 bp, Homo sapiens
ggaccaattatttcttaggttaataatgctgactgttttctgcagtcaagtgtcccggaagaaccggagagtcacttatcagagaagccatttgttattgtacctgtgactgctgtgatgccaagggctgcatcttcccccacccagggtgtggaccctgccaccctcctcaccttccaaatacagctttatttgtgcagatctaagatgctgagaagtattcaaaatggctttgatctacgcaaaatatttctttctcctcaatagttgttctgcgtgcagagttttaacacccccagactcawtgccatctatatcttgtgaaatttgaaagttctcattaatactaaagccataaatcatatgtttgttttcacccttggctattagcactttaaatcagtgttaccatgaattgtccagcatggctgtttgcatgcagcacatgaattgcatcggttactttatttacaaggcaagctttggcatggcagaaaacatgaaaaatgggacaagaacatctcaatttgtgtcctgttttggccacatggaagctttctgaccttgggtaagtgctgtcaccattttgaaactcagtttc

SEQ ID NO: 425711 - DNA, 619 bp, Homo sapiens
ccatttcaaatgtatgagaggccagtcctctcttcccagagacttcaattatgtaagtcataaaacttttcaaaccctcttgctttgtgtgtggaataactgatacatgatttttctgtcactttgccggccagagacctccatggccaatgatgtctctgcccagggcctcacttggccctgggcctgttgcagaaggtgccccatccactcgtctggtggggccatgcctggcttgtgcaccagcctggatcccatgctcagcctacaactgggccaggtgtgcccctggcccagctcgtacccgcattcagaggttccgaagttcttgtcccacatccaagatgaataaggttactctgacaatcgaagggtgaggtgggtgaagaagaattttattgagtgaaagaatagctctcagcagagaggggatgcgagrgtggtccctacccaaagtcaagtggtcacccacccagcgtggctgggtctgggacttgtatgggcttagaatgggtgagtacatgctgattggtttgttagtatgcaaaaaaaaggctaaaacaaaggcaccatgtaaaggtgggcatgacagtgtaaaaaaacaattagggaagagtag

SEQ ID NO: 425712 - DNA, 576 bp, Homo sapiens
aattgaactgactttaaagaataaaatataaatacaaactaaaagcagatttataagtatctagaggcagcttttgtgtggyacagcatttaaggaaagcctttatcttgttgtcagcatattgccacattagccagagccagccagatgggaatgtggtggcccacttaggtcctctttaattgctcactataaatagcttaatgatgccgccataaaaggtctctgatgtaagtgaggggctcagtgtgacccatatatgtgatggttttctaggtgtctgtgtctgggaaaatggatggccgtgtctgagatggttttcactgctgaaatgaaagcttcatttgtaagccaatcctttcttactccccctcccttcagatgccattgtctccctcattcctttctgctgtcatctatggggaggttgaggttgacactttatcactctcacatgccagatagaattccagcacccacttgacctggcaccagggagaagtgcctgcctgagccagtcctgatctaagaggggccactgcaggccttcatggcatgcccctttctgcttggacc

SEQ ID NO: 425713 - DNA, 576 bp, Homo sapiens
aattgaactgactttaaagaataaaatataaatacaaactaaaagcagatttataagtatctagaggcagcttttgtgtggtacagcatttaaggaaagcctttatcttgttgtcagcatattgccacattagccagagccagccagatgggaatgtggtggcccacttaggtcctctttaattgctcactataaatagcttaatgatgccgccataaaaggtctctgatgtaagtgaggggctcagtgtgacccatatatgtgatggttttctaggtgtctgtgtctgggaaaatggatggccgtgtctgagatggttttcactgctgaaatgaaagcttcatttgtaagccaatcctttcttactccccctcccttcagatgccattgtctccctcattcctttctgctgtcatctatggggaggttgaggttgacactttatcactctcacatgccagwtagaattccagcacccacttgacctggcaccagggagaagtgcctgcctgagccagtcctgatctaagaggggccactgcaggccttcatggcatgcccctttctgcttggacc

SEQ ID NO: 425714 - DNA, 562 bp, Homo sapiens
tctagccagaagaccaggaaaggagcagttcagtaagacaggaaacttctctgatcacctctcgactccagctgaacaccacggaaaaagtgtgccgccacttccacctgtgccggtgaatgtcacatggagagcctaggctccccatcttctgagaytgtaatgacccactgcagtggtgtcagagaaggcccagtggagaggcaggacttcatcaccccactagcaatgaggtcgcataccccttccatggttcagtggaagccatatggggagcctggacttctagccctgtgttagtctgtttgcatggctataaactgggtaatttataaagaaagaggtttgtatggctcatggtctgcaggctgtacacaaagtattagtgtcagcatctgcttttggtgagggcctcaggaagcttccactcatggcagaagatgaaggggagctggtgagtcacatggtgagagagggagcaggagggagaaagaggaggtgccaggcaattttaaacaaccagattccaagtgaactcatagagtgagaacccactcattat

SEQ ID NO: 425715 - DNA, 562 bp, Homo sapiens
tctagccagaagaccaggaaaggagcagttcagtaagacaggaaacttctctgatcacctctcgactccagctgaacaccacggaaaaagtgtgccgccacttccacctgtgccggtgaatgtcacatggagagcctaggctccccatcttctgagattgtaatgacccactgcagtggtgtcagagaaggcccagtggagaggcaggacttcatcaccccastagcaatgaggtcgcataccccttccatggttcagtggaagccatatggggagcctggacttctagccctgtgttagtctgtttgcatggctataaactgggtaatttataaagaaagaggtttgtatggctcatggtctgcaggctgtacacaaagtattagtgtcagcatctgcttttggtgagggcctcaggaagcttccactcatggcagaagatgaaggggagctggtgagtcacatggtgagagagggagcaggagggagaaagaggaggtgccaggcaattttaaacaaccagattccaagtgaactcatagagtgagaacccactcattat

SEQ ID NO: 425716 - DNA, 562 bp, Homo sapiens
tctagccagaagaccaggaaaggagcagttcagtaagacaggaaacttctctgatcacctctcgactccagctgaacaccacggaaaaagtgtgccgccacttccacctgtgccggtgaatgtcacatggagagcctaggctccccatcttctgagattgtaatgacccactgcagtggtgtcagagaaggcccagtggagaggcaggacttcatcaccccactagcaatgaggtcgcataccccttccatggttcagtggaagccatatggggagcctggacttctagccctgtgttagtctgtttgcatggctataaactgggtaatttataaagaaagaggtttgtatggctcatggtctgcaggctgtacacaaagtattagtgtcagyatctgcttttggtgagggcctcaggaagcttccactcatggcagaagatgaaggggagctggtgagtcacatggtgagagagggagcaggagggagaaagaggaggtgccaggcaattttaaacaaccagattccaagtgaactcatagagtgagaacccactcattat

SEQ ID NO: 425717 - DNA, 562 bp, Homo sapiens
tctagccagaagaccaggaaaggagcagttcagtaagacaggaaacttctctgatcacctctcgactccagctgaacaccacggaaaaagtgtgccgccacttccacctgtgccggtgaatgtcacatggagagcctaggctccccatcttctgagattgtaatgacccactgcagtggtgtcagagaaggcccagtggagaggcaggacttcatcaccccactagcaatgaggtcgcataccccttccatggttcagtggaagccatatggggagcctggacttctagccctgtgttagtctgtttgcatggctataaactgggtaatttataaagaaagaggtttgtatggctcatggtctgcaggctgtacacaaagtattagtgtcagcrtctgcttttggtgagggcctcaggaagcttccactcatggcagaagatgaaggggagctggtgagtcacatggtgagagagggagcaggagggagaaagaggaggtgccaggcaattttaaacaaccagattccaagtgaactcatagagtgagaacccactcattat

SEQ ID NO: 425718 - DNA, 526 bp, Homo sapiens
ttggggcctgggtaaatagacagagggcattgagaaagcaatcctgcctgttgtactttcaacctaacaatatatttttgtgactaaatgctttgtgcatgcagccattgagtgaaagggtgtgtgtgtgtgtgtgtttagttgaaatatggatgttttatttcattctgcttcaatgtaaaagcagctctctgaattgcctcggggtgcttttcaaattccctgtgatagcaaccagttggaattatatgcgctcattttctaaattctgcaaagaaaattgttgaattctctgtgacatttaccataactctgtaaatttaygctgctttcttttccccttctcccacctctacccccttttcaaaagcatacttctcctcttggctccatctcctcgagtgttaaatgctttttgaaatcattcatttttattatcagccatcttgttctgttttatttgccacagaattattccacagtctaggctgattcttggctgtaaaaagagaatactattatttga

SEQ ID NO: 425719 - DNA, 517 bp, Homo sapiens
gagaagtgggtaacaccaactggtaaggttttatgaattgtttaaaagacttacatatccagttatcctatttgatcttcattaaaaagctgtgagacgggcaagacaggtaagatcacccattttccagctgaggaagcagacactcataaatggtggtgattgtgtccaacgcaggggcttcattcagaacttgtgccaaaggaaagtatgtcagtcccacagtcaacttggtgaaataagtgtcaagcacagcaggaagccagagctgctgtcarttgccctcctccccctcagccatggatatatttaaacccagcaataataaaacaaactggcagctggcacttttgtagtgccaactctggagcccctcagaagaaaactttttttctagacagactttttctcttttttattattcatttgctatttattttaaagttatatttctaagtgaaacattttaaagttagaaaatgggatgaactgagccaaactgcaaacaagaaacatg

SEQ ID NO: 425720 - DNA, 574 bp, Homo sapiens
tgtctgtcatgtaagcatgcagcaagaaggtgccatgagcaagagagcaagccttcaccagacaccaaatctgccagcagcttgattgtggacttatcagcctccagaactgtgagcaataaagtttcttttgtttatagactatacagttcatggtactttgttatagcagcccaaaagtactaagacaactacctcttgggagacttctaggtgtgctcattacaaccttcttgacctggacctcatctgtgttgctgatttatgtgtcagtaatgggaacaacaacaaagactgtcaaaggcaggaaaatagcatatattcaaggactttaataggaaaaaagggcaggatttaacttsataatgccataattgtcttaacaccaaactgaaagaagtggcatcactagagctgtggcaaaggatcaacagctggggaggtgcgagagactgaaggaagattcaaagtgctccaggaagtttcttaccagcattatctcctgaccatgtgagggttttctgtgctttcttcatcaggcctttttcagttatgagtgaatcccaaatcaaac

SEQ ID NO: 425721 - DNA, 394 bp, Homo sapiens
tgactttctttcaacaacctaagaaattgaggttaagcatttttgggttattagaataatccaaagacctgagtgtctgcatttgcacttctgtttgggtcgtgttgtatcattgaaagtgactgcatataacccagacattcacaaatatctagtgacatcttttccaccggattagaataaaacgaccaccagagagagttaacccaatgtcatagaagggaaatggaaagtgaaggattgtggaatgaacatgacaaagtgctaccaacrgaaggaaattagcaaaaggtaaggtacaagtcatatataaatgctgcaaatgtcaggctttgttgctggacagatctgcttataaatagacactgtttgaaaagatatgtcaaatactgag

SEQ ID NO: 425722 - DNA, 559 bp, Homo sapiens
ttaattaaatttctctgatagaaatgatcaaaaaattaaaaagcataaaacccaaatctcatttataagtgactccagtgatttatcggttagttatggaagtatgctgactatataacatagcaccttacctgaagaaaacagctcttttggatttgtttttactgattttcatcatgtcaaagagtgtgataagttttgggaaatttaataaaggtatgttagtgagaacaatgtgttcctgtcagccatagtcccttaataaggatcttgaaacaaaatttctttaatatctgagttacaaggaaatgtgtatttcttctaactgtgttgactttataatgtggacatttcccctcttaaaaatgattgtttttttcccttcctttggctcctaggaagctcagaaccaactttgtagaccacttacagcaagtgtatagtatcttaagatgtgcattcctgttkgctcatcttccatatggctttattttatatttctctcattgtgcccattttccatgtgtaatctcttctctcactgactcagatggtccct

SEQ ID NO: 425723 - DNA, 603 bp, Homo sapiens
tttctcccagactctccaccctgtcactttcgtctccatattttcagacaagtcttgccttggatgtccttcttaagaaatggcagtggagcctggagtcattgccttgatgagggcaggaataaggaggcaagctctggggaaaacaagaaactggttgactgagggactatcatactgataatgacatctgatgcttatgctgttaaatgtattcatttatgacaagacagttgagcactttgaaatgaaatctttaaaagtacctcatgcactgtgggagaaaatacccaggttcctgaaggaggaaatcgacactcaactctctaggaaacagaatgtaaagcattaactcaagctcttgcagattaagatggcagtttgctagagcagrcgacctgggaaaatcaatacagcaacaattacctctacagtatgaaagcactggccaacctaagtacctttgagattccatttcatactacagaggagtggctccacttcctaatggatgagcattttagctcctactgtgtagatctcccaaacactagtatcctttcaagagtgcctacaaggcctttcttgatattccactagacg

SEQ ID NO: 425724 - DNA, 618 bp, Homo sapiens
gtaattggaaggggctcctgcaagacgtaggagcaaactagctttgaagccagttgactaaatccaccttatgccataatcaaacacccaaaggcatcgaagaagataaaagcaaaaaaaaaaaaaaaaaaaaaatccaaagaatagcaacttcaaagactgaaggaaaatcagcccacacagatgagaaagaaccagtgcaagaactctggcaattcgaaaagccacggtgtcttcttacctttaaacagcagcactagtttccctgtaatgattcttaaccaggctgagaaggctgaaatgacaggaatagaattcagaatatggacaggaacgaagattgtcaagatttgggaaaaagctgaaaccaatcccaggactctaaagaatacaataaatcaatataggaaataaaagatgaaatggccattttaagaaagaaccaaagtgaactgataaagctgaaaaattcacwtcaagaatttcataatataaccagaagtattaacagcagaatcaacgcaaactatcgtaaggacaaaaaaccaaacaccgcatgttctcactcatagttgggaattgaacaatgagaacacatggacacaggaaggggaacat

SEQ ID NO: 425725 - DNA, 555 bp, Homo sapiens
atccagtcaaactaagtttcataagaaaagaagaaataaaatcctttccaggcaagcaaatgcaaagggaatttgttaccactagataagaggtccttaagggagtgctacatatggaaacaccattgctggccaccacaaaaacacactaaagaacatagaccattgacaatataaaacaaccacacaatcaattctgcataataataatcaactaacaccacaaatacaggatcaaacctgtacataacaatattaattttgaaggtaaatgggctaaaagcctcaattaaaatacacagaatggcaagctagataaaggactaaaacctkactgtatgctgtctacaagagacccatttcagatgtaatgaaatccacaggctcaaagtaaagagaggaagaaaaatctaccaagcaaagaaaacacaggaaaaagcagagattgctattctaatttcaggcaaaacagactttaagccaacagtgatcaaaaacagaaaaagaaggtcattacataatggcagaggattcagttcaatgagaagacctaac

SEQ ID NO: 425726 - DNA, 498 bp, Homo sapiens
gatgattgaaaaactacccataggctactgtgtttatcacctgggtgatgaaataatctgtayaccaaaccacacacaatttacctatataacaaagctgctcatgtacccctaaacctaagataaaattagaaaattaaaattaaaggcaaaaagctagagtactatattaatagcataggaaattggttttctgaagaaggaatattaccacgaataaagatgcatatttcataatgaaagccagtaaattcagtaagaagacatcaaaatcccaaatgagtttatgcacctaataatagagctttaaaatgtgaagcaaaaattggtattactgaaatagtgttttaaatccaaatttccatctagaaattttagcattcttctgtaagtaactgatagaacaaattttttaaaaaataataaaaatgtaaaggactgcaataacgctatcaatcaactggacctaattgacatttatccatcagtataccaaac

SEQ ID NO: 425727 - DNA, 578 bp, Homo sapiens
ttaacaataccaggttactttttgtgaggaagaagcaggtttgcaagatattcgtatcattactaaagaataacaacagacaaaaatgtgcctggttcacatgtgctaaagtcagtacagagttccctgcttccttgtgtccaagacgacggctgcactttctctgcctgtgcctcgcttacagcacttaatgcctttccatgcttactgccattggttatttctgtatatgcttcctccygactcctctccaccctgctttgttcccaggacttggcttctctagagggcagggtccttgtcattcagcatctgcagatccctttctgtaccagaactttcatgtaacagacactcaacagaactttgccaagttcatagataaatcaccatttacaatttggagatgggcaaacactgggatcaaagccctatttgtgagttcttgcccctctccagctgctgggccagcactacttcccctaagaactcccaagcccctctctggcccacagaaacctgtgtggggccctcgaccataatgctggtggctgagtactcatcactgtccacaggag

SEQ ID NO: 425728 - DNA, 578 bp, Homo sapiens
ttaacaataccaggttactttttgtgaggaagaagcaggtttgcaagatattcgtatcattactaaagaataacaacagacaaaaatgtgcctggttcacatgtgctaaagtcagtacagagttccctgcttccttgtgtccaagacgacggctgcactttctctgcctgtgcctcgcttacagcacttaatgcctttccatgcttactgccattggttatttctgtatatgcttcctcccgactcctctccaccctrctttgttcccaggacttggcttctctagagggcagggtccttgtcattcagcatctgcagatccctttctgtaccagaactttcatgtaacagacactcaacagaactttgccaagttcatagataaatcaccatttacaatttggagatgggcaaacactgggatcaaagccctatttgtgagttcttgcccctctccagctgctgggccagcactacttcccctaagaactcccaagcccctctctggcccacagaaacctgtgtggggccctcgaccataatgctggtggctgagtactcatcactgtccacaggag

SEQ ID NO: 425729 - DNA, 578 bp, Homo sapiens
ttaacaataccaggttactttttgtgaggaagaagcaggtttgcaagatattcgtatcattactaaagaataacaacagacaaaaatgtgcctggttcacatgtgctaaagtcagtacagagttccctgcttccttgtgtccaagacgacggctgcactttctctgcctgtgcctcgcttacagcacttaatgcctttccatgcttactgccattggttatttctgtatatgcttcctcccgactcctctccaccctgctttgttcccaggacttggcttctctagagggcagggwccttgtcattcagcatctgcagatccctttctgtaccagaactttcatgtaacagacactcaacagaactttgccaagttcatagataaatcaccatttacaatttggagatgggcaaacactgggatcaaagccctatttgtgagttcttgcccctctccagctgctgggccagcactacttcccctaagaactcccaagcccctctctggcccacagaaacctgtgtggggccctcgaccataatgctggtggctgagtactcatcactgtccacaggag

SEQ ID NO: 425730 - DNA, 679 bp, Homo sapiens
tgctgggccagcactacttcccctaagaactcccaagcccctctctggcccacagaaacctgtgtggggccctcgaccataatgctggtggctgagtactcatcactgtccacaggagctctgctgccaaaactaggtccactcactcaccctacgtacattaagcattgacctgatggcagaagtggccggggttgtaggaacaaagacatgctaagacaagaatcctactgcagaaaggggtctgtgagcccatgctgatctccatggcctcattggctgcaccatggcaggcacgaggtgttggtgaagtccctctagagagcagccctgaagtcctcctttactctgcagaacctgctcatcaagcactcgacaactgcactcctctgaattccyatgcattttatttattcccttcccatgatcctcatcactttctaccttgtacaactatttgctataggcttgtctcttcttctgtactaggcttccagctccttcagacgaggatcccagcccagtttacctccatatccttcataacacccagcaaagggcctcacccatggcaggttctcagtttgtatttgctgaaagaaacatgcttgtttagtaggcatcagaaattaaaacccatcacattctagcaaactatttttctggcaagctaaactaa

SEQ ID NO: 425731 - DNA, 613 bp, Homo sapiens
tatacaaaccatcaatttattacatttacatggataagaattgttttctgaaatctttttcagttaatgcatgtacatgcatgcatgcatgcacaatacatgtgcgtgcccatatatcctttcygagttgcagacagaaaatgtcaaagccacattgtagaattatttgtcattgtttcgggctggcaggaaccaaaccaacttcctacttttgggtaattctgtgtggtcagtcctggtggaggcaagaaacctacactccataaaagtagcaaaatgagggagctcctcaccctttctttcccctgggaaagtgagccagtgttggctaaataggtgctcttacttgagcctttgaatctgaaacacatgacatgaagactatgatgatggtgagactagatgagagacagcacctgtgagcagcagctgcaacaaagagtggcagaagagccatccacggaggctgtgccagggccgcaggagcactctgcctagtttgttcccactgcccatgcccagcactcccttgctcttgtctatcacccgggtatcatccatggccttccttttctgcacaaagtgacctgagaagacttctcttgctcacaac

SEQ ID NO: 425732 - DNA, 597 bp, Homo sapiens
ttgcacaaagctaaactgctgatatttctgctcactcccaccacctctgtccaaagctgctctacccatatctgcctgcgtttcagttgatgtcaagctcatccttccatttgctcagggcaaayagcctggagtcacccctgactcctcctttctctcgcattccacgtgcaacctgtcatctagttctgtcaggtatctttttaaaaatagatccagcatctgactacttctcccaacctccatagccaccaccatcaaagccaccatctttcctcagtgagatccctggaacaatgtcccagatcccatcctgtggtttatgatgaaccctatagccagaaggatctttttaaaactggaaattagatcatatcactcctctcttcaagaccctccagtggctcttcagctcactgagaataaaagccaaagttcttatgagaagcatcccagcaaaaagggcaagaagagcagttttccaggaactgaatgctgctcagtgtggcctgaataatgactgtgagagggaatgagagataagcatgtgcatatgggcaagggctggcaccctccctacattaaatagcctgatcc

SEQ ID NO: 425733 - DNA, 589 bp, Homo sapiens
gatccctggaacaatgtcccagatcccatcctgtggtttatgatgaaccctatagccagaaggatctttttaaaactggaaattagatcatatcactcctctcttcaagaccctccagtggctcttcagctcactgagaataaaagccaaagttcttatgagaagcatcccagcaaaaagggcaagaagagcagttttccaggaactgaatgctgctcagtgtggcctgaataatgactgtgagagggaatgagagataagcatgtgcatatgggcaagggctggcaccctccctacattaaatagcctgatcctaccctaaggactgtagaacgctgctgacaagtgttcagcggaactggggaacaaccatmtctgcactttgggaacagagctctggctgcagcctgaggacaggttagagtgggctgcgtagaaggaaggagaaggactgggaggctatcagaggtatgcagtaaagagaagacaatggcagcagacggaaaggagagtaaaaatatttgtggctatttaggagggagaagtggcaaaacttggtgatggctcagatgtgaggtcaagggtgaca

SEQ ID NO: 425734 - DNA, 298 bp, Homo sapiens
ctacttcagtgcatcacaaacatggaaacaaactcagcaatttgtaggatttatctcagttcactcaaaagttggtcaatgagccagattagaaggcagaattccggccaggtgtggtgggtcatgcctgtaatcacagtgctttgggaagctgaggtgggaggattgcttgagcccaggaatttgagaccagcctgggcaacagggtgagaccttgtcgctrtaaaaaataaaaaaataagaggcagaattccttggaatggaaacaggtagtgtgaaggactgccaaaaatggatg

SEQ ID NO: 425735 - DNA, 298 bp, Homo sapiens
ctacttcagtgcatcacaaacatggaaacaaactcagcaatttgtaggatttatctcagttcactcaaaagttggtcaatgagccagattagaaggcagaattccggccaggtgtggtgggtcatgcctgtaatcacagtgctttgggaagctgaggtgggaggattgcttgagcccaggaatttgagaccagcctgggcaacagggtgagaccttgtcgctataaaaaataaaaaaataagaggcakaattccttggaatggaaacaggtagtgtgaaggactgccaaaaatggatg

SEQ ID NO: 425736 - DNA, 488 bp, Homo sapiens
ctatgcaacagttagcagggaaaaaaaggattttgagtagccggtggaggctatgcaagagttagcaggaaaaaaaaaggattttgagtagctgatggagggtatgcaacagttagcaggagaaaaaggattttttgagcctccactgactgactgaaaattgtattgtggctgccagttgctgaggtcttcaggagataatgcacacctccccttttttttgaataagttctaaactagttgaaaaatgaaagaaaaaggtaaatattgaagctaaagtctcacctttattactaacgggagtctaaggtggaggatgcagcttagcatgagaatcaaasgggcttactctctgactggcagccgggcccatttactcactctgccccagcagcactggcctgcagcagacagacccctcctccagaaaagcagagaagagctcccgcactctcaggctggctcactcccaagaggaagaaaggcca

SEQ ID NO: 425737 - DNA, 629 bp, Homo sapiens
aatatttacatacatgcaatgaaaatgtccggaaagtcctacaccaaggtttatgaactgaggcrctattggcattttgggctggataactctttgttatggtaggatgtttagcagtatttattcctggctttggccccctacatgccagcagcaccctcctcctgagtggtgacgatcaaaaattttctagacattgccacatatcccctgggggacaaaaattctcccagttgagaatcatttctctattcaaatatgtttatggtggttaaatctgggtgacagtattataggtaatttttctttcttcccctatttatttctagttattctacaatgaataggtatacatatatcttaatatatgtcttctataataaaaataaaagctattgttaaaatacccataaccatagcactatttattttaaaaattataggtacatgcttttgagcaaaatctttgaaaaatatctgtagataggtttatggaagacacaatgtggggaattaaaaaggaaaagttcttctaagataatttagcaaaaattaatctgcaagatgtgggggtggtaatgtgtgggccagaaataacttgattaatgacccaggggtacccatccatg

SEQ ID NO: 425738 - DNA, 528 bp, Homo sapiens
gctaggtaccaagttctgttatagataatgaagatatggctgtggaaaaagaaccagaaacctgcctttacattctagtggaagaggaggaagataaacaataaacaaggtcaacaagtaactacagcatgtcaggtgatttaagtgctgggaaggaaactgagtggtatagatcattgcagagggtaggttgcaattttaaatggaatagtgaagttagcctcactrataaggcagtcttccagcaaagatctgacagaggtgaggaagtgaatctatggaaacctgggggtacagccttccagcaaataacaggtgcaaaggcccagaagcctagggcatttgtatttgagggcaagcaaggggtctgtgtgctggagaagagtgaggaaggtgagaattagggagtgaggcctgggagattatgaggaaaggaaacagatcatacagcgccttggaggccattataaagactttggtttttacccttatgagatgggaagctattggcggttttagagcaggaaa

SEQ ID NO: 425739 - DNA, 545 bp, Homo sapiens
tggaggtagaatttgtactgcaggatgatggattgaggtgaagggcgagggagaaaaaagagtccaggatgtcactcagatttctggctgttgtaaagaaagagttagaggctccagtctctccagagggcatcacctcattacagctgacattttaaatgaagacttgggaatcactgacaaaaggtcagagaagtacgaaatccatttagtagcgactttctctgctggcgaagaaaacacctcctcttaaatgactggtatatggaggaggttttgtaagttccttgagggcagggcacccaacatttatccttacgtccccagtgctccaatacagtagatgcttagtaacaacgtctttattggatttatagaaaccaatttagataatcttgaccttttctagtyatctccctttaaggtgtaagataaaactgtggaaatttatagaatagtctttagtccttgagcagataacggttggctctagacatatttctctttcaaaaagaatttttcttaggagaattgaaaattctacg

SEQ ID NO: 425740 - DNA, 545 bp, Homo sapiens
tggaggtagaatttgtactgcaggatgatggattgaggtgaagggcgagggagaaaaaagagtccaggatgtcactcagatttctggctgttgtaaagaaagagttagaggctccagtctctccagagggcatcacctcattacagctgacattttaaatgaagacttgggaatcactgacaaaaggtcagagaagtacgaaatccatttagtagcgactttctctgctggcgaagaaaacacctcctcttaaatgactggtatatggaggaggttttgtaagttccttgagggcagggcacccaacatttatccttacgtccccagtgctccaatacagtagatgcttagtaacaacgtctttattggatttatagaaaccaatttagataatcttgaccttttctagtcatctccctttaaggtgtaagataaaactgtggaaatttatasaatagtctttagtccttgagcagataacggttggctctagacatatttctctttcaaaaagaatttttcttaggagaattgaaaattctacg

SEQ ID NO: 425741 - DNA, 603 bp, Homo sapiens
acattttatattgtgattcagctcacaaaatataaaactatctaacatattaaaacaaaaattgtacaagaaaatatttaaactttaccacatgccttgcattcagttatttttcatwccagtccattccacaccattccattcctttccattaaaaataatatccctcaacattcatttcatgagtcatcaaagagtcctgaattgtggcttgaagactattgccattgcctatgtggcccctccctcctcaaacttcctcactctgccaaaggcaaggcagcttcccatgacagatgctgatgcaggagaaaaggctctttacaagattttcaacaaaataaatgaatgatgaccagaatcactcagcaaatattccagtaatgacactcacgcatggcaaacagccatatggggccctcagtggtctctgatttacaagctttatctcactaattatcataacaaccctagggggtaggtactcttattttcatcccattttacagatgagacagctgaggctcagggagattaagggatccactcaaattcacatgactagtaaacagcattcctgggatttgaaccactcttccctga

SEQ ID NO: 425742 - DNA, 579 bp, Homo sapiens
ttccagtaatgacactcacgcatggcaaacagccatatggggccctcagtggtctctgatttacaagctttatctcactaattatcataacaaccctagggggtaggtactcttattttcatcccattttacagatgagacagctgaggctcagggagattaagggatccactcaaattcacatgactagtaaacagcattcctgggatttgaaccactcttccctgacgccaaaacttctgtttttagtgctacattctattwttttgcattaattgttttggtggatagaatttaaacttttggaaaattttcaccttggaaacaaacttcactcaaaagtataaaagtataatctgtaaccttcccagctaggttcatagcctggctatgaactggggactgtctgactccagagctgagcttggagccctctggcagtgaaatacattgtcttatattcctgtccctctttcacatgcacaggcatgtaagaactccaacatcgcaagcttctttttaaaaacatatttttaaaagttgcacaatctgagtgatctgctcacacgaagcagtgat

SEQ ID NO: 425743 - DNA, 579 bp, Homo sapiens
ttccagtaatgacactcacgcatggcaaacagccatatggggccctcagtggtctctgatttacaagctttatctcactaattatcataacaaccctagggggtaggtactcttattttcatcccattttacagatgagacagctgaggctcagggagattaagggatccactcaaattcacatgactagtaaacagcattcctgggatttgaaccactcttccctgacgccaaaacttctgtttttagtgctacattctatttttttgcattaattgttttggtggatagaatttaaacttttggaaaattttcaccttggaaacaaacttcactcaaaagtataaaagtataatctgtaaccttcccagctaggttcatagcctggctatgaactggggactgtctgactccagagctgagmttggagccctctggcagtgaaatacattgtcttatattcctgtccctctttcacatgcacaggcatgtaagaactccaacatcgcaagcttctttttaaaaacatatttttaaaagttgcacaatctgagtgatctgctcacacgaagcagtgat

SEQ ID NO: 425744 - DNA, 581 bp, Homo sapiens
cactgtgagtcgctgctgaagtctttcactggttttagttatctgaatttttttttcaaagacaaaactgactttattcttttttgaaaatatggtaaatttttttaattcaaacaatcaaacaattcagaaagtataatcaaaagagaaacaaatcatcctaaaacccattaccctggaacatttggtgtgtatgattctggatatctcattgtgcttctgtataaacagaaggacgatatgatagcagaatagatggacaaaaattagattataccatacatatggttttaataaaagtagtcarttcaatgtgccttgaactttgatagaaaaaagaaattgaagtgagattaaagaaactacagaagtgcaaatgtttgtcaccacaagacatatttgttcctaaaagagcttttaaattaagaaaatggtttgtgaaaaatattgagaggttaattattaaaataataaaatattgtcattttagatgacatttaatggcttctggctatgaaaatcagtacacttatagttcccccccccttttccaccttatattattgtttaaattcaaatta

SEQ ID NO: 425745 - DNA, 592 bp, Homo sapiens
tttgctcagccacctaataatgttttattattagaaacttcttttctctgtctaaataaccttgccttgcctgagccccccaatgcctctgtctccatgaagaaactgttttctaatttaatcttacaaaacatcmagaaaacttaacctgaaatatctaaaacttttctctttttcaaacacatttaataccacggagagtttatctttacacaattcacaagagtctgagtcttgtgtttgtaagctagccaaaaggaaaagaagaaacttacatgaaatactgcacagtgtaagtaactttaactccttgaagaccctctggtggagtccattgtaggacattcttcatgttgatggataagaaggtgatgtttgcaggtttaggcaaaccaccagagacacagggaactgaaaaaggagcagaaaggaattgaggtcttagtagcagaaaaggaaaacatgattcctgtagcagctagtctccagagatggcccccaatacggccttccagtatgcatgccctatgtaacatctctgaaatggaaaagagaatgtggcagaggtggctctgggactaagccaggactt

SEQ ID NO: 425746 - DNA, 592 bp, Homo sapiens
tttgctcagccacctaataatgttttattattagaaacttcttttctctgtctaaataaccttgccttgcctgagccccccaatgcctctgtctccatgaagaaactgttttctaatttaatcttacaaaacatccagaaaacttaacctgaaatatctaaaacttttctctttttcaaacacatttaataccacggagagtttatctttacacaattcacaagagtctgagtcttgtgtttgtaagctagccaaaaggaaaagaagaaacttacatgaaatactgcacagtgtaagtaactttaactccttgaagaccctctggtggagtccattgtaggacattcttcatgttgatggataagaaggtgatgtttgcaggtttaggcaaaccaccagagacacagggaactgaaaaaggagcagaaaggaattgaggtcttagtrgcagaaaaggaaaacatgattcctgtagcagctagtctccagagatggcccccaatacggccttccagtatgcatgccctatgtaacatctctgaaatggaaaagagaatgtggcagaggtggctctgggactaagccaggactt

SEQ ID NO: 425747 - DNA, 592 bp, Homo sapiens
tttgctcagccacctaataatgttttattattagaaacttcttttctctgtctaaataaccttgccttgcctgagccccccaatgcctctgtctccatgaagaaactgttttctaatttaatcttacaaaacatccagaaaacttaacctgaaatatctaaaacttttctctttttcaaacacatttaataccacggagagtttatctttacacaattcacaagagtctgagtcttgtgtttgtaagctagccaaaaggaaaagaagaaacttacatgaaatactgcacagtgtaagtaactttaactccttgaagaccctctggtggagtccattgtaggacattcttcatgttgatggataagaaggtgatgtttgcaggtttaggcaaaccaccagagacacagggaactgaaaaaggagcagaaaggaattgaggtcttagtagcagaaaaggaaaacatgattcctgtagcagctagtctccagagatggcccccaatacggccttccagtatgcatkccctatgtaacatctctgaaatggaaaagagaatgtggcagaggtggctctgggactaagccaggactt

SEQ ID NO: 425748 - DNA, 592 bp, Homo sapiens
tttgctcagccacctaataatgttttattattagaaacttcttttctctgtctaaataaccttgccttgcctgagccccccaatgcctctgtctccatgaagaaactgttttctaatttaatcttacaaaacatccagaaaacttaacctgaaatatctaaaacttttctctttttcaaacacatttaataccacggagagtttatctttacacaattcacaagagtctgagtcttgtgtttgtaagctagccaaaaggaaaagaagaaacttacatgaaatactgcacagtgtaagtaactttaactccttgaagaccctctggtggagtccattgtaggacattcttcatgttgatggataagaaggtgatgtttgcaggtttaggcaaaccaccagagacacagggaactgaaaaaggagcagaaaggaattgaggtcttagtagcagaaaaggaaaacatgattcctgtagcagctagtctccagagatggcccccaatacggccttccagtatgcatgccctrtgtaacatctctgaaatggaaaagagaatgtggcagaggtggctctgggactaagccaggactt

SEQ ID NO: 425749 - DNA, 595 bp, Homo sapiens
tgtgttataattgtcatgactcctacttttaaccttgctcatttaaaaaattttgttttatttttttaaaaaatgttacagagaagcacaatcaattgaccactgccgtgtgcgtgtgtgtgtgtgtgtgtgtgtgtgtgtgtgtgtgttaggggtaggggaatctcaaaaggacatagcctgcccaacatcagtctttgatttcttcttgtaattctttggaaccattgggtagcaagtggtgttggtattttctggagattacatagagtgaatatttatcaatgatttaatactgctttgtggtactactaggttctcaattttaatcagatttttgaagacaaaayagaacatgaggaggcagcacattgagtataacacttctcagctcttccaaaatgtggaacccatttaacataaaaattgccaaggatctttccagagctaaaatgctgtggcctacatttttagatggccttaacatatgaagagtggttagcatcttatacaaaataaaatagactgtgcattataatatcactggtggaagacattgtcaaaacatggctttatagaaatgaaaaggaaattg

SEQ ID NO: 425750 - DNA, 610 bp, Homo sapiens
gctgtgaaagtaaaattaacagatgaagatctagcaaggaatactcatgcttttatctattttgatgatgcaaaggagtgataaaaaatagaattagcccaggtgtgtgggctcacacctgtaatcccagcacttaagaaagccaaggcaggcagatcacttgaggtcaggagtttgagaccagcctggccaacakggtgaaacactgtctctactaaaaatacaaaaattagccagatacagtggcaggcacctgtaatcccagctacttgggaggctgaggcagaagaattgcttgaacccaggaggtggaggttgcagtgagccaagatcgcaccactgcattccagcctgggtggcagagtgagactctatctaaaaacaaaacaaaacaaaacaaaacaagagttagcacttttatttaaaggaaaagaaatagtacatttaaaaaagaaatacgatttgataactagtattctctttagtttaaaaaaaattgcgaagtttttaggcactgtgtttgtttcaagtttgaaaagcatgatgaaagattcctgaataaacatttcaatggagagaaatcaattttctaacctgctagtactgataa

SEQ ID NO: 425751 - DNA, 610 bp, Homo sapiens
gctgtgaaagtaaaattaacagatgaagatctagcaaggaatactcatgcttttatctattttgatgatgcaaaggagtgataaaaaatagaattagcccaggtgtgtgggctcacacctgtaatcccagcacttaagaaagccaaggcaggcagatcacttgaggtcaggagtttgagaccagcctggccaacatggtgaaacactgtctctactaaaaatacaaaaattagccagatacrgtggcaggcacctgtaatcccagctacttgggaggctgaggcagaagaattgcttgaacccaggaggtggaggttgcagtgagccaagatcgcaccactgcattccagcctgggtggcagagtgagactctatctaaaaacaaaacaaaacaaaacaaaacaagagttagcacttttatttaaaggaaaagaaatagtacatttaaaaaagaaatacgatttgataactagtattctctttagtttaaaaaaaattgcgaagtttttaggcactgtgtttgtttcaagtttgaaaagcatgatgaaagattcctgaataaacatttcaatggagagaaatcaattttctaacctgctagtactgataa

SEQ ID NO: 425752 - DNA, 582 bp, Homo sapiens
ggaactatccatttaatgaacttcgaggtaatgattgatttcctgtagcttgtaagccacatagagatttgtgtcccctctcagtgtttatttcccttttattatattataacttggcaccataaatggaatgtgtgtgttcctcctccccatcaaaacattcacaggttaaatcctaacacccaatgtatggtgtttggaggtggggcctttgggargtgattaggtcataagggcagagccctcatgagtgggattagtgcccttataaaagaggccccagagaggtcccttgccccttccaacatgtgaggacatagtgagaagatgaccatctatgaaccaggaagtgggccctctccatccaccaaatctgccttgatcttggacttcccagccttagaagtgtcagaaataaacttctgttttttataattcactcaatctatcacattctgttctagcagctggaatgaactaatgcatttggtctttgggaaattcttctagcccagcttcatttatgctctagcaccaaaggaaaaagttctctgtttgctcgcaggtccttccagtaggaag

SEQ ID NO: 425753 - DNA, 582 bp, Homo sapiens
ggaactatccatttaatgaacttcgaggtaatgattgatttcctgtagcttgtaagccacatagagatttgtgtcccctctcagtgtttatttcccttttattatattataacttggcaccataaatggaatgtgtgtgttcctcctccccatcaaaacattcacaggttaaatcctaacacccaatgtatggtgtttggaggtggggcctttgggaagtgattaggtcataagggcagagccctcatgagtgggattagtgcccttataaaagaggccccagagaggtcccttgccccttccaacatgtgaggacatagtgagaagatgaccatctatgaaccaggaagtgggccctctccatycaccaaatctgccttgatcttggacttcccagccttagaagtgtcagaaataaacttctgttttttataattcactcaatctatcacattctgttctagcagctggaatgaactaatgcatttggtctttgggaaattcttctagcccagcttcatttatgctctagcaccaaaggaaaaagttctctgtttgctcgcaggtccttccagtaggaag

SEQ ID NO: 425754 - DNA, 582 bp, Homo sapiens
ggaactatccatttaatgaacttcgaggtaatgattgatttcctgtagcttgtaagccacatagagatttgtgtcccctctcagtgtttatttcccttttattatattataacttggcaccataaatggaatgtgtgtgttcctcctccccatcaaaacattcacaggttaaatcctaacacccaatgtatggtgtttggaggtggggcctttgggaagtgattaggtcataagggcagagccctcatgagtgggattagtgcccttataaaagaggccccagagaggtcccttgccccttccaacatgtgaggacatagtgagaagatgaccatctatgaaccaggaagtgggccctctccatccaccaaatctgccttgatcttggacttcccagccttagaagtgtcagaaataaacttctgttttttataattcactcaatctatcacattctgttytagcagctggaatgaactaatgcatttggtctttgggaaattcttctagcccagcttcatttatgctctagcaccaaaggaaaaagttctctgtttgctcgcaggtccttccagtaggaag

SEQ ID NO: 425755 - DNA, 533 bp, Homo sapiens
ttgatcttggacttcccagccttagaagtgtcagaaataaacttctgttttttataattcactcaatctatcacattctgttctagcagctggaatgaactaatgcatttggtctttgggaaattcttctagcccagcttcatttatgctctagcaccaaaggaaaaagttctctgtttgctcgcaggtccttccagtaggaagataatggattaataagatagatctaaatgggtaaatttatcattagtggagttttataaaatgcagctgctacatttgttctaagagttaccttgaatacaggtctgtaagtatagcaaaatggtttgtgaccatttcctaatggcctcaaagtgawtactagggttgccatctaagtatgttacagttttaattatatgtctgacagtaaaagttgtttctttttagttgtactcaaggaaaagcctacgcatacgtgagtgcctgatgaacaccagttaaaagggtaaggttctcagggtgaactcataaacagccagggtaatcag

SEQ ID NO: 425756 - DNA, 587 bp, Homo sapiens
atatgaataactgccattattatcagtaataaacattgccacgaattacttatctgtgggaagcaggcaaatggcaggccaatggcagtggacatcaaaagacttaaaacagcccatttcctccaagcacatccaattcgctcacctatgctggatacccttcctgcataagttacctttcagcctataacagccacaataaattaacaagcagtgctgttgctggggccctggatgatacaatgtacagctgggtgtagctgggtaactgcactgctagctcaaagatcaacttaaaccactggtgcacacttcagaaataaygtcacgtgctgcaaaacaacgttcagtcaatgatgctggtcccataagatgatgtatatataagatgtgtatctatttttagatacacaaatactattgtgttacaaatgcctacagtattcagtacagtagcatgcagtacaggttggtagcctaggggtaaattggctatgccatatatcctaggtgtgtagtggtaggctatttcatttaggtttggggaagtacattctatgatgtttgcacaaggatgaaatcaccta

SEQ ID NO: 425757 - DNA, 269 bp, Homo sapiens
tgcccttctgcatagaacctaatctgtcaatggctctttcctgttcagaattttagacttagtaaaaagtttgcaaactaagagcttttataaacagaatatgaccattaatatacttgtttstgaattccaagggaaaatgtatgacagttttcataatttcaaatgccttgaccaatgtcacaaagctaatactgattatggaacccatgagtatgacactaaaattcaggggctttggaattccattgttgttttgcttaattaaa

SEQ ID NO: 425758 - DNA, 596 bp, Homo sapiens
tgttaaaactattttacctctgttccatctttttatttctgagattttgtttcataaaattgttctaaacttcatttttaaatgaagacatctggtgatggcatgtacactcattgcaggaatgaaatgaaaatagacaagaaccaaaaagatatttccccaatagcaattaaccatatgaattgcttcattattttattaagttactaaaattgatacatacttcctatttaactgtaattttgcaatggcaagagctgtaaataaaggtcatatatttatatatgtgtatattattagtagatttctgcaaacaataattgcaataaaaataaatttttaaatgaatcatttcacagctctccataagcctgctaaatcctatatcaygcactctataattcttaatgagatatttatttctagtcttttgtagccccaaccaggtagtaaaaatgaaatgatgtcacctggattgccatatcattttgtccatatgacctattatcatcttttaaaaacttggattattatatttttatcttagaatctgctcactattttgatctatttcctcttatggttttgggtattaa

SEQ ID NO: 425759 - DNA, 565 bp, Homo sapiens
caactatatatattaaataaggtgtgtttagacagaaatataaataaaagaagggcatggattgaccagttaatgaaaatgttgtgaccagtcactctcaggaatctaaacttgtatttcccctagaagcaatggttcagtatttactcattcagtgtttttgagactttacagaataaaactactgaatataacaagaattaactgtctgtgaaatgacttataataattttgttgggggacagtgtttctctttttttgagacaggctggagtgcagtggcatggycatagctcactgcagccttgaccttctggactcaagcaatcctcccatctcagcctcctgagtagctgagactatagacacgaaccaccacaccctactaattttaaaattttttttgtagagacagggttttgctatgtgcccaggctgatctcaaacttccggacttaagcagttctcccaccttggcctcccaaagtgctaggattacaggcatgaaccaccacacccggccttataattccttaaacacacaaagtgccaatgtgtacttgtg

SEQ ID NO: 425760 - DNA, 568 bp, Homo sapiens
ggaaactaataagaaggtaatatttttgttattttccccaaattattctgtagctcatgactcattcattacatttggtacaaggggtcttacactgatgagtgagttgtatcccaaatttgtttgggagttagcttacattttccaatagattactaataaaaatatggtgactatattcttaagacagtcattcattcacttatttattcattaaaaatatacacacatgcataacattcctaaagttaatgagtcaagaaacatcttcacaaggacttatttactcgtatgatagcccaagttatagcagtagcctgatttctggaatagagttatttagtgcaggacagaggaaattaaaaaaagttacttcctctttctgggacatagaaccaatcagaccttctttttttaagtagataaagtttgtattcaacatcctccccttagtctatgtggcacacggtttcctcatgtgcctttaccttatccctgcccctgccccactccacagargaccccgcactctagactcatctcattactatcattgcccacatcacct

SEQ ID NO: 425761 - DNA, 588 bp, Homo sapiens
ttgatgcttgagttttttattttattattttttaaaattttgataaagtacaaactacaaaatttaccatcttaaccatttttaagtgtacagttcagtggcactaattttattcacagtgttgtaccactgtcatccccatccatctacaaagcactttcatcttgcaaaatcaaaattctacatcctttaaacaatgactccccatttccctaatccctcagcctctggaaaccatcattctacttttttgtctctatgaatctgactacctctaggtaccttctataagtggaataacaccatgtttgtctttttttgtgtgactggcttatttcacttagcacaatgtcctcaagtttcatgcatgttgttgcctgtgttagaatttctttttgtggctggataatatttcattgtaggtatacgctacatcttgtttatccattcatmtgtcaatggacatgtaggttgtttccaccttttggctatgtgaagaatgctgctatgaacatgggtgtacacatatctgcttgagtcattactttcaattcttttgggcatataccaagaaatgtaattgctgga

SEQ ID NO: 425762 - DNA, 438 bp, Homo sapiens
tgctcaaaattattgatcatcaatgaaatgcaaataaaaactacaatgagatgtcatctcgccacagtgaaaataacttttaataatgaatgctggtgagcatgtggagaaaagggaaccctcctacactgttggtgggaatgtcaatgagtacaatcactatggaggacagtatggaggttcctcaaaaaactaaaagtagacctacmatatgatccagcaatcttactcctaggtatatctcaccaagaaaggaagtcagtatataaaagagatatctgcactattatgtttattgcagtactattaacaatagccaagatttggaagcaacctaaatgtccatcaacagatgaatgaataaagaaaatgtggcacatatacacaatgcagtactattcagccatataaaagaatgagattctgtcatttgcaaca

SEQ ID NO: 425763 - DNA, 608 bp, Homo sapiens
ttaaaaaagagcccttatccttcaaagatacagatggaaatatttacagattgaaatatttacagataagattatgtgatgtctgagatttgccttaaggaatccagtattggcagaggggagcgtgcaaggttagagatgaaatgtgtttggccattatttgataattgttgaagctaggtaataaatgaaaagttcattgtattagtctccctatttttgctcatgtttggcattttctattaaaaaaggggaatactgagagataagattttctttcactctagttaaaccatggaataaactgamcttttaaaaaattattaaatgggaagcttaactaatattttggaattttcaaagtacaatgaagagggcaggtgtatccctagaaactacagcataggtcttcttggaggtgtcacatgttcttgatgacttctagttcatttttgctaaaatgtgttccctctaggacactgagaggagtgcttgtgatttcagatctgaggtcagctcttgcaactgtttcccagagggctgcaccaacagagtgtgcagagttgaggggttctgctgtgcgttgtctgttaactcaagagtgtgaa

SEQ ID NO: 425764 - DNA, 419 bp, Homo sapiens
tttgaaagacttcatctggaaaatgctctaatccttgtactttggaggatatttagtcttaggtaacttgaaaaatattttccagggttataaatttytgtagattgtctgcttactcgagttttttttttttttaatttgtatccttctcaaaagctataaaatttttttttctggattttcaaacttattaacaaggagtttaaattacctcactattggtaatcatttttactttctcattcttaattgttcttttattttacaattttatcatagtgatatcaaaggatgtgatttaaactatttgctgtaggatgttcctttctttttcttttcttttctttttcttttcttttcttttttttctttttttttagacagagtctcctctgtttctcaggctggagtgcagtggc

SEQ ID NO: 425765 - DNA, 419 bp, Homo sapiens
tttgaaagacttcatctggaaaatgctctaatccttgtactttggaggatatttagtcttaggtaacttgaaaaatattttccagggttataaatttttgtagattgtctgcttactcgagttttttttttttttaatttgtatccttctcaaaagctataaaatttttttttctggattttcaaacttattaacaaggagtttaaattacctcactattggtaatcatttttactttctcattcttaattgttcttttattttacaattttatcatagtgatatcaaaggatgtgatttaaactatttgctgtaggatgttcctttctttttcttttcttttcttyttcttttcttttcttttttttctttttttttagacagagtctcctctgtttctcaggctggagtgcagtggc

SEQ ID NO: 425766 - DNA, 419 bp, Homo sapiens
tttgaaagacttcatctggaaaatgctctaatccttgtactttggaggatatttagtcttaggtaacttgaaaaatattttccagggttataaatttttgtagattgtctgcttactcgagttttttttttttttaatttgtatccttctcaaaagctataaaatttttttttctggattttcaaacttattaacaaggagtttaaattacctcactattggtaatcatttttactttctcattcttaattgttcttttattttacaattttatcatagtgatatcaaaggatgtgatttaaactatttgctgtaggatgttcctttctttttcttttcttttctttttcttttcttttcttttttttytttttttttagacagagtctcctctgtttctcaggctggagtgcagtggc

SEQ ID NO: 425767 - DNA, 596 bp, Homo sapiens
agccccacatgctctctgaccaagcctggctgaattgtctttcttaaattttttaaattaaaaaaagtttttaaatgcttgaaaaaaaattggaaaaaaaaacacccagaaaaattaacatccatatactgctctcctagatttaaagctagcagcatcttcacacacacacacacacactcactcactcacacatttcctttcataagccatctgaaagtagtatgcaggcatcatgacacatcactcccatataatgttcttattcaacaatcacaattgaatagggayatttcacatctaaggaacattaattcaaaaatacccaacacatagtcaataaataaatttactaaattgttttcagaatgtcattagagtcaaggttaatgcattacatttgcctgctatgtttctttcatagcctttagtctagagcagctttcccttctccctctgttctttctcatggaaccttttaagtgtccaagccaggtaccttgcaaagcactccatggattccagtcactgtttcctggtaagattgcatttctgagccagcttttctatctatggtgctgtgggtcatggggttg

SEQ ID NO: 425768 - DNA, 596 bp, Homo sapiens
agccccacatgctctctgaccaagcctggctgaattgtctttcttaaattttttaaattaaaaaaagtttttaaatgcttgaaaaaaaattggaaaaaaaaacacccagaaaaattaacatccatatactgctctcctagatttaaagctagcagcatcttcacacacacacacacacactcactcactcacacatttcctttcataagccatctgaaagtagtatgcaggcatcatgacacatcactcccatataatgttcttattcaacaatcacaattgaatagggatatttcacatctaaggaacattaattcaaaaatacccaacacatagtcaataaataaatttactaaattgttttcagaatgtcattagagtcaaggttaatgcattacatttgcctgctatgtttctttcatagcctttagtctagagcagctttcccttctccctctgttctttctcatggaaccttttaagtgtccaagccaggtaccttgcaaagcactccatggattccagtcactgtttcctggtwagattgcatttctgagccagcttttctatctatggtgctgtgggtcatggggttg

SEQ ID NO: 425769 - DNA, 607 bp, Homo sapiens
caatttcttcatttgcaacatggggataatattagtaaccacctcataagattatcattaagatgaaatgagttactatttgttaagcagttagaatttgcctggcatgtagtgagctctaaataaccatttgttaaaatagcagaaataaataagtaaaataatgttgcagatcaccttgctgaggcattgtccaagaattctgggataaaattctaggaatgtttaatgtagagtcactatcaagcacaagaaaaatgcctggtgtctrttaagtaccagaagagatataggtaagtagatactgcccatataaaagaaggctctggcattgggtacatggtgcaacatgctaaaatgatgcaaagatgaagcaaagagctcactggaatccataacttccagcaggtggacgaaaaccagaaaaatgcccactttgtagaagacttggccactcctctcatttcccagcacagaaattgacaactcggtttactggaggaatttggtcaattgctgggaaggatttatttgtatttatttatttagtcaattttatagaaataatgtcataaagacatggatgcctatggcaagggtcacatcc

SEQ ID NO: 425770 - DNA, 557 bp, Homo sapiens
taacaaacccaaaatccaagtgtcttacagaaactgtctttttctttgtaggtgcttcttgcttgaaacaagaggatcttgtggcttgataaaatgtttggaatacccaaggagggcctccttttgaaggcttatgcagtgcagcctctctcaagatctcagtttactcagagaagaaaggtgaactgcatttgttccaagtaaaatatacatctgtattattcaccatcacacccctattccattacaaacaaatactgaccttgttcttctgatgtgaagccagagggagtgtgaaatatagcaaggagaacagtctgatgcagaaatatgaaagttccaagcaacagaaacgcggtatttaaaaggagtagagaagggccccaacttggtctttctaattccttctctgcagctgaccctggggaaagtaactcaatrgttatcagtcgctttggggaaactgcctacattagttcagattgccagttggattttttcactctaggatctatgtgttggtagtctctctgttttttcttttggccttaagaact

SEQ ID NO: 425771 - DNA, 603 bp, Homo sapiens
gatgtgggaagcagtgtcctgaggctgtataaggtagtaggggccctgggcctggcccacaaaaccattcttctctcctaggcctctgggtttatgatacgaggggctgctgggaaggtttctcaaatgcttttgagacattttctccatggtcttggctattagtgcttggctcycttttagttatgcatatttctctagcaagttgttgccccacaacctgccttaattcctctcttgaaaaaagtgtttcctttctctgttgcatggacaggctgcaaattttccaaacttttatgctctgcttcccttttaaatataaaaatctcaactttaagtcatttcttggctcccacatctgaacataggctgttagaaggagccaggccacatcttgaatgctttgctgcttagaaatttcttctgctagatgccctgcatcatcactctgaagttaaaacttccactgatccctaggacataaacagagtgcaggcaagctctttgctaaggcataacacaaatgacctttgttccagttcccaacaagttcctcatctccatgtgagacctcaatagcctggacttcactgtccatatcac

SEQ ID NO: 425772 - DNA, 402 bp, Homo sapiens
taatgatatataaatgaacaacccttttggatttataactcagaagcttttagtagaatggctgaggtgtgcaagggaagactttccatggtgtaattcgtgaggataattagatgaactcctgtggaatgaagtgtggggtgatgcacaagagccctggctttgccacacagtagcagtgtractgcaagcacactgctccatgtcttcaaccctgaaaaatggagattttaaaacccactacaggaatttctatctgtgaattctaaataagaaagtgaatgggaaagctctctgaaaactatgaagcaccatggaaacatacagaatgttaatagaatctttattcttaatagaatcacttacctaagagatcactatgtaggagggtgaaaattgttt

SEQ ID NO: 425773 - DNA, 632 bp, Homo sapiens
tttaacctaacatttgggactttgaactaaacttttgcacatgttttaagagcccattatctcttaagttggactcttcctaaatctctgccgccaaacctactttattgaaatcctttgaaacccaagtctttccacattttggctctctctgaagtttctttctttctttctctttctttctttctttccttttcttaaccctatattatagtgtctggtaataacaacatatatagacaccacactatgtgtctggtaataatatagagaccacactatgtgcactatgtacaattataatccttatttttatacaggatagaactgaggcaagaaagagtaaataacttgctcaaggtcacatagaaggtaattgaacagagaatctaccccaaagctgtgagcttaattactctcaagctccrgggtcaaagagatctggtgtccattcttatcacgtctccctttttgcggggatggtgcctgttaatttattcagcttcttcgacgcggtttccctttcaataagattgagataaagcatttttcgaaagatctagattgagataaagcattctttgaaagatctagcagtaaatgagagctgcgtgagggatccgattcagtcc

SEQ ID NO: 425774 - DNA, 608 bp, Homo sapiens
ggctacattgccttgaaatctgttgtatcatttacccagagtacagaagtgtagtgctcagtgtctttttgaatttatatgattgtaaggataaaaatattcttagcttaattaatagcaaagggaccagctataaaagtattcttaaaggccatcaagttagaggtaactttctgaaatatggtggtagcttaatcatcttccaaggagtaasaaatatactttcaaacaaatccaggaatagtactatataatcatgtgctgcataatgaaattttggttaataatggacggcatatatgaggtggtcccataagattactatactctactttttaatcattattttagagtgtactccttctacttataataaaagttaactgtaaacagccttgggcaggtccttcaggaggtattccagaagaaggtattgttatcataggagaaaacagctctttgcatattattgcccctgaagaccttccagtgggacaagatgggaggtggagacagtgatactgatgatcccaacctcgtgttggcctacgttgatgtgtgtgtgtgtgtcttagtttttagcaaaaagtttaaagagtaaaaacaaa

SEQ ID NO: 425775 - DNA, 608 bp, Homo sapiens
ggctacattgccttgaaatctgttgtatcatttacccagagtacagaagtgtagtgctcagtgtctttttgaatttatatgattgtaaggataaaaatattcttagcttaattaatagcaaagggaccagctataaaagtattcttaaaggccatcaagttagaggtaactttctgaaatatggtggtagcttaatcatcttccaaggagtaacaaatatactttcaaacaaatccaggaatagtactatataatcatgtgctgcataatgaaattttggttaataatggacggcatatatgaggtggtcccataagattactatactctactttttaatcattattttagagtgtactccttctacttataataaaagttaactgtaaacagccttgggcaggtccttcaggaggtattccagaagaaggtattgttatcataggagaaaacagctcyttgcatattattgcccctgaagaccttccagtgggacaagatgggaggtggagacagtgatactgatgatcccaacctcgtgttggcctacgttgatgtgtgtgtgtgtgtcttagtttttagcaaaaagtttaaagagtaaaaacaaa

SEQ ID NO: 425776 - DNA, 556 bp, Homo sapiens
gttctaattacctgataattttggtaatgaacagttaaacctattgtagtttttaaaaggcaaacctgtgtaagtcatggtccaacacagagctcattaaacastttattatgtcattgaaagcttcagcagccttctatcttcctgggattgttttcacaagtccctccatttgtttgttaatccatcgatacatccatttttccatccatccatccatccaacaaacttttatttagtgcctgacatgtctgtcacacttctgcccccaaacctgatgaccttttttttctgaaacacatcccacccaggtatcagcttacttgataaaactaaccacttacgatagtttgcctctgctgtagtctgccaaaagggaatggcctcaagttgccggggcctttagggttaatgatgagaatggatctaaattgtgatgaaaggtgagaacacgctttagaaatttaaaggtgcatccaaatgtaatagatttttattaagcagtggggtttttgatcgtgtttccctcatgccgcacttctgttgctctgttctt

SEQ ID NO: 425777 - DNA, 556 bp, Homo sapiens
gttctaattacctgataattttggtaatgaacagttaaacctattgtagtttttaaaaggcaaacctgtgtaagtcatggtccaacacagagctcattaaacagtttattatgtcattgaaagcttcagcagccttctatcttcctgggattgttttcacaagtccctccatttgtttgttaatccatcgatacatccatttttccatccatccatccatccaacaaacttttatttagtgcctgacatgtctgtcacacttctgcccccaaacctgatgaccttttttttctgaaacacatcccacccaggtatcagcttacttgataaaactaaccacttaygatagtttgcctctgctgtagtctgccaaaagggaatggcctcaagttgccggggcctttagggttaatgatgagaatggatctaaattgtgatgaaaggtgagaacacgctttagaaatttaaaggtgcatccaaatgtaatagatttttattaagcagtggggtttttgatcgtgtttccctcatgccgcacttctgttgctctgttctt

SEQ ID NO: 425778 - DNA, 605 bp, Homo sapiens
tgtcatgttatcaaaggtagtggacacaatgcttgaacaaggacaggacagtgaagcaatgttttcatgtggtttctccctgttacattgttctgtcggtgagacaagtgctcatttacaggagttcatgtgggtagggaatgaaagagaacaggaattaattgaggaactttatgggaaactcttcccaacaatgaaaagtggtattgggttgattaacgcagggaagactatagggtaaccaaagagatgtagaaagcaaacccgatggtggaagtataccaaaaggccatttggtacttacctgagcttacatggaatttattaatgtattattagcacccacctaaagcacgtactttttaaaactctacattaaattatcatattgatggtttcccaaatcctacattctttaggaatttagaaaaatgtataaaagtcaagtgaatctgctttgtgtatacattgtttatgtgatgatttttaccaattccaaagtaaatcagttctggtttgcttgcttggttagtgacctgtttaagccttgtataacatctayaatatacagaatttttcattaaacactcaaacctaatcatttt

SEQ ID NO: 425779 - DNA, 562 bp, Homo sapiens
taaatgttctttcttttatagagatggggtctcattctgttgcccaggctagagtgcagtggcacgatcacaggtaactgcatcctcaaactcccagtttaagcaatcctcccacctcagcctcccaagtcrctgggactataggcacacaccaccacatccagctattttcttttcagttttgtatagaagacagggtcttgctgtgttgcccaggctggtcttgaactcctgggctcaagtgattttcccactttggcctcccaaaatgttgggattacaggcatgagtccctgtgcctggcccagtgtaagttttctatgatgagtacagtttgggttgcaaattcataatcacacagacatcagattcagagggagccttaaccacctcaagataagaggaaatactttggaaatacttcagaaccttttctccttagattgagttaactatctattagagaagtgttgtctcttctgagaaaaagcagagggtgaagtctaggataatcaccacatcataatccattcagtcttttccttatgccaactgcttacct

SEQ ID NO: 425780 - DNA, 562 bp, Homo sapiens
taaatgttctttcttttatagagatggggtctcattctgttgcccaggctagagtgcagtggcacgatcacaggtaactgcatcctcaaactcccagtttaagcaatcctcccacctcagcctcccaagtcactgggactataggcacacaccaccacatccagctattttcttttcarttttgtatagaagacagggtcttgctgtgttgcccaggctggtcttgaactcctgggctcaagtgattttcccactttggcctcccaaaatgttgggattacaggcatgagtccctgtgcctggcccagtgtaagttttctatgatgagtacagtttgggttgcaaattcataatcacacagacatcagattcagagggagccttaaccacctcaagataagaggaaatactttggaaatacttcagaaccttttctccttagattgagttaactatctattagagaagtgttgtctcttctgagaaaaagcagagggtgaagtctaggataatcaccacatcataatccattcagtcttttccttatgccaactgcttacct

SEQ ID NO: 425781 - DNA, 589 bp, Homo sapiens
ctttagggaaagtttcactaacttttcaaaacatgagtatgtgataattataattaaggactatcacaaatgaagtgtaaatttataaatgtaaccatctaataaagcttcggttaaaattaatattggggcaagtttatttttgaattttttaaagatagaaagaaacaacaacaaacccttgagtttccagaagaactgcctgtattcattcatttaacatactaaaagcagcttgtgactgccataaagtatgtcattgccgccttcagtactaaaaaagtggtccagtatatgaggcaactgctctaaatcatgcttgtttggacaggctgtttyttagttccacctcatctgcactttagccccactctgtgctgtgtagacccaagcgatttgcacaaacaccacatgatcccaaaggtactttcccagggagaaggaaaaaaaacataaaagttaaactaacccttgtaagttctagttaccacttaatctttctatggtttgactacctttctttttttttttttttttttagttttttaaacacttcaagtcataactcctcagtatttaatatttagat

SEQ ID NO: 425782 - DNA, 568 bp, Homo sapiens
gaaaataagactttaatctgtacaccaggcaattctctaaacctgtcactaaattttttgaatccacctatccaaaaggtcagcaaaagtaaaggcttcattgcacaagttgataccagtactgtgccctttgccaagaatgcttgggaaaataaaggattccattgtttcaacagattgacctggcaacttagtccagaaatgttttctttagactmatttagcagaagagatgaataaagtcaaacaactgttttacggtagaagcacttcaaagtagtgcttgagagctctgaagtttgaatgatctagctttgaatcttgactccaccagctgtgagctcttagtaagtccatttaacttcttatgactcaatttttccatttgtaagttgggcatgagggcactcaaacatggcatactgctggctgtctcttaatactcattcttctcatctttcaaagcaacagaatcttagttcttagcaggacacacaggtgagtggaaaaaaatctcttttacaactaggtgtggccatctgagttttgggatatatgtggcaatggc

SEQ ID NO: 425783 - DNA, 587 bp, Homo sapiens
gtagatgacttgagcacacatagtatattttctgctcccattgggctgtttgaagaatagcattggctgggcacagtggtgtgaacctgcagtcccagctactctggaggctgaggtgggagaatcgcttgagcccagcaattagaaatcagcctgggagacacagtgaatctctgtctttttttttttttaaggccgggtacagtggttcatgcctataatcctaatactttgggaggccaaggtggacagatcgcctgagcccaggtgttcaaggccagcctgggcaacatggtgaaacctcatctctacaaaaaatataacaaaacaaattagccagccatgaaaaactagccaggcatggcggcatgcatggtggtgtgcgcctgtcatcccagctactcaggaggctgaagtgggaggattacctgagcacgggggaggtcaaggctgcagtgagccaagattgcaccactgtactccagcctgggsgacagagtgagaccctgtctcaaaaaaaagcaaggtttaatatcaactttggtggcaccctccacagagtatttatactatagaatatgttttat

SEQ ID NO: 425784 - DNA, 609 bp, Homo sapiens
taataagagtttcttttagatccccaaacaaagtagatttcattttactcttcgtgtttatttgtacacaaaagcattgatagtcccttgttattctgtttttaagagttgtttataaagtttttttacagatataaagaaatggagtagtccagagtttaatgaactttcagatttcaaccattcatttccttcaccacattgtaattctccgcccccaaccccgtatttcatgtagaggagtttccttttctgcctrtgagctggtatgccctaattctacttacaattgtggggagtaaagactaccagacactgtgcctcagacagttgtccggagggctttaccacaaatcatcttagttttctaaacattctttgatgtaatttgagatatgaagaaaagatgcaagaaaaatataaagaattcctgcctattttcactcagattccctgaattttaacatcttgccaacatgtttcatcatcctctctctacctatgtatatacattatttctttctctatactgtttgcaaggaagttgcagacattatatctttaacactttagtgtcctaaaaccccagggtccaaaaacaggaatata

SEQ ID NO: 425785 - DNA, 609 bp, Homo sapiens
taataagagtttcttttagatccccaaacaaagtagatttcattttactcttcgtgtttatttgtacacaaaagcattgatagtcccttgttattctgtttttaagagttgtttataaagtttttttacagatataaagaaatggagtagtccagagtttaatgaactttcagatttcaaccattcatttccttcaccacattgtaattctccgcccccaaccccgtatttcatgtagaggagtttccttttctgcctgtgagctggtatgccctaattctacttacaatkgtggggagtaaagactaccagacactgtgcctcagacagttgtccggagggctttaccacaaatcatcttagttttctaaacattctttgatgtaatttgagatatgaagaaaagatgcaagaaaaatataaagaattcctgcctattttcactcagattccctgaattttaacatcttgccaacatgtttcatcatcctctctctacctatgtatatacattatttctttctctatactgtttgcaaggaagttgcagacattatatctttaacactttagtgtcctaaaaccccagggtccaaaaacaggaatata

SEQ ID NO: 425786 - DNA, 599 bp, Homo sapiens
ttgttcctccccttctcccaacccctcctcatctcctaggcctcattttccacacagctctcctaggcccccctcagctgaccttggaaattcttcctggggacctcggtcaaagggagagttgccagaagcttggaggtctaccacccccasaaagaatgaaaatagggtgttgtgtggaaagagaggaggaggaggaaagtaattaaagttaattatggaaataacaagttagaaagataccctaagaggagaaaaatccagcccccattgcttggtgggtgaggaagtcattctggtttggaagtccaagtcccctagagaggtttgggggtgactagggagggtcagagagcagccttgaggtttttattttaagccacagtggtatcaccaattgtttgaaggattgcagaccagggtagaataatatttacaaagccagctgggtaaaccccatgttggcagcctcattcctctgaaaccgaggccacttctagaattcccttttctcaagtacaaggaaagaggaaagtttttatttcagtcataagtggattaaaaatacattaaacacaaattgctagagcatattaatc

SEQ ID NO: 425787 - DNA, 599 bp, Homo sapiens
ttgttcctccccttctcccaacccctcctcatctcctaggcctcattttccacacagctctcctaggcccccctcagctgaccttggaaattcttcctggggacctcggtcaaagggagagttgccagaagcttggaggtctaccacccccacaaagaatgaaaatagggtgttgtgtggaaagagaggaggargaggaaagtaattaaagttaattatggaaataacaagttagaaagataccctaagaggagaaaaatccagcccccattgcttggtgggtgaggaagtcattctggtttggaagtccaagtcccctagagaggtttgggggtgactagggagggtcagagagcagccttgaggtttttattttaagccacagtggtatcaccaattgtttgaaggattgcagaccagggtagaataatatttacaaagccagctgggtaaaccccatgttggcagcctcattcctctgaaaccgaggccacttctagaattcccttttctcaagtacaaggaaagaggaaagtttttatttcagtcataagtggattaaaaatacattaaacacaaattgctagagcatattaatc

SEQ ID NO: 425788 - DNA, 608 bp, Homo sapiens
aatatgattacacagttgttttggagtcgtgtctggagatgttctgtttttctttaaataacaataacgaagaatattatattcttatatatataatttcatcaaatacttgtttcaaatgtctgtaagaaactaccacagagcagttttataaaaagagccctggagagaaattttaaatttcaattaatttaaamctggattctgtctctggatcatccagctgccaacttgaaaccttagtcaagtcataatactttcagctaaaggaagacaataaagctacttcataaggttgttatgaaggctaaataatatgtcattaataataataatattaataataaaaatagagtgaattatatgtattggggacttatcatatgctagacactccaaattttgtatttaattctcacacaaccaaatgaggtaggccttattattaccctttttgaatgatgagaaaactggagtttagagaaattaagtgtattgctcaaggtcacacacagtaaagtagtatagcaagaattcaaatccaggtctctcataccaaaatacaattgtaattgcatttcttcccaaatacatgtaaagtgcctaac

SEQ ID NO: 425789 - DNA, 546 bp, Homo sapiens
tgtggtgacaccagaactttttagcagaaaaggaattctttgaaatgtgaagccaattctctccctgccaagatacttaaaaagcaacagcaatgagctaggacatctgtctatcattgggaatttgggaggcaaatattttcacagaacctaagtgttcaaacaaacacgagtagcaaatatggtctcaactccagctgagccattaaaacttggacaaaagaagcaagggaaaatggaaatagagggtggataggaaatccagggctccaggattcttgtaygaattacatgaaaaatgaagtttgagtcattcaaaaatacatgaagtcctgcaccatgatcccgtaattgttggtttcaaggaaagaatatgaattcataagtctccctttggaacataggttcatggtgaggaattggcagagctggcctatacttacaggattgggcaacctgagccaggaagagtgctgcttttcccctgaagggcaggggtgggctcagaattgtcagggggcatgagctggacctgcaggttctaaa

SEQ ID NO: 425790 - DNA, 546 bp, Homo sapiens
tgtggtgacaccagaactttttagcagaaaaggaattctttgaaatgtgaagccaattctctccctgccaagatacttaaaaagcaacagcaatgagctaggacatctgtctatcattgggaatttgggaggcaaatattttcacagaacctaagtgttcaaacaaacacgagtagcaaatatggtctcaactccagctgagccattaaaacttggacaaaagaagcaagggaaaatggaaatagagggtggataggaaatccagggctccaggattcttgtatgaattacatgaaaaatgaagtttgagtcattcaaaaatacatgaagtcctgcaccatgatcccrtaattgttggtttcaaggaaagaatatgaattcataagtctccctttggaacataggttcatggtgaggaattggcagagctggcctatacttacaggattgggcaacctgagccaggaagagtgctgcttttcccctgaagggcaggggtgggctcagaattgtcagggggcatgagctggacctgcaggttctaaa

SEQ ID NO: 425791 - DNA, 608 bp, Homo sapiens
aatatgattacacagttgttttggagtcgtgtctggagatgttctgtttttctttaaataacaataacgaagaatattatattcttatatatataatttcatcaaatacttgtttcaaatgtctgtaagaaactaccacagagcagttttataaaaagagccctggagagaaattttaaatttcaattaatttaaacctggattctgtctctggatcatccagctgccaacttgaaaccttagtcaagtcataatactttcagctaaaggaagacaataaagctacttcataaggttgttatgaaggctaaataatatgtcattaataataataatattaataataaaaatagagtgaattatatgtattggggacttaycatatgctagacactccaaattttgtatttaattctcacacaaccaaatgaggtaggccttattattaccctttttgaatgatgagaaaactggagtttagagaaattaagtgtattgctcaaggtcacacacagtaaagtagtatagcaagaattcaaatccaggtctctcataccaaaatacaattgtaattgcatttcttcccaaatacatgtaaagtgcctaac

SEQ ID NO: 425792 - DNA, 613 bp, Homo sapiens
agataaatgagtaagattcaacatagtttctccattagagatgaactttaaatataaaaatacagatatgttgaaagcaaatgacaggaaaagatttattatgcaaactgtaagcctaagagggctggattggctatattaatatcagatgtaatagatgccacaagacaaaaagtaaaaacagacatactgtaataatgaataaatttgcataaagacacaataattatacatgtatatgggcctaataaaacaggtttaggatacgtgacatgaaagagtaacataattaaagggagaaagagacaactccacaatgatagttggagattttttgtgcctattctgcttatgtaatatagttggagattttaacatttaataacagcaattggcagaacaagtagataaaagatctgaataatgccttcactctcctttacctaattgacatttatagaacactacacccaacaattgcrgaataaacattatcttcaagtaacatgtaatgtttaccaagataaacgaaatgctgggccatgaaacaagtctcagcgcattttaaagattaaaataatgcagacaatgtttttggaccacagtggaatta

SEQ ID NO: 425793 - DNA, 630 bp, Homo sapiens
tcaattcattcactatggactcaaatgtcttctcttgcctttttgtcaatttttctggccctgttttacctacagatttaggagttagtgcttaaaagctgagaggcgaccagcttggccaacgtggtgaaacccgtctctactaaaatacaaaaaaattagctggacgctgtggtgtgtggctgtagtcccagctacttgggaggctgagcctgggaaatcacgggaggcggaggtttcagtgagccaaaaacgtgccactgcactccagcctgggcgacagagtgagactctgtctcagaaaaaaaaaaaaaaaaaaggtgygaggcataaagtctggttaatagacttgcctaggatcaatcctgggccacatagcatctacttctgagttaccgtttaaagaaacatgctatcaattttattaataaggagctaccatttgttgagtgcttcttatctgttaaagacacttcctatgtattctttaacacttaaggtaacccttcaagtgatatgttttatcgccgttttatagatgaagcatttgaagttaagagaaggtaggaatctgctcaaggccacagagctaataattgccgggctggggttttcttgctcgattacctg

SEQ ID NO: 425794 - DNA, 567 bp, Homo sapiens
gtctgatttattcttagctcacatgaattaacttgcctttttaaaaaagaaagtggagatgtgtgatagtaaagttatttttgtagagccataattttgtggcctcaaattctttaaatttgcaagaaaattttataagccattaggtttttgtttttgggattacgagaatcagtgtgggcttccttattgaggtgctgtaaattcacatttctttattaaacagaaaaatatttatttattgccctcattcagttttagagcaartaagctgaaaactaactagtggtaattctgccccactcccacccacctctacagcaatattaacctcttccactcattatctcagtggtataatttgacatttttccaggtactttatgcttgggaaatctagtattatatttttgaaatctccatagcattcctgaaaacagaaaaaaacccatgtttaggtttatggtgtcattttattaaagaatatctgttttacttttaaaattctgtcaaggattttattttttatgtgtattatatcccagattctgttcccaaaataaaaat

SEQ ID NO: 425795 - DNA, 545 bp, Homo sapiens
aaccaggtaattttttgggtattgtgcatgactaaggatctttgtcattttaactatatttttattactagacttaaatagcttgtagaaacttcttaagtaattgaaaggccaattgcaaagtaagaaaatgatttataatgtacagacaaaagatttaaaatccttgcagtatatagaacttttgagaattagaaaaaacaagcatcgttatcgaaaatgggcaaaggacaggaatatggaaattcatgaagatataaatatagaaattaaagaactgaaatttgaaagcaacatttagtagatgaaagtttggcaatgttattattttatttatttatttattttttgaggtgggggctagagttcagtggcatgctcatagctcattgcaaccttgaactctaaggctcaagagatcctcctacctcaccctccagagcagctgggactataggcctttgacaccacttccaactgattttgtgttttttrtagagatgggatcttgctatgattcccaggctggtcttgaactcctggcc

SEQ ID NO: 425796 - DNA, 581 bp, Homo sapiens
ttgatgaattcactgaacaattctactaaacatttagaaacaaaataatacaaattctaccaactaatttccagaaaatagaagtgaaggcaacatttaaccatcttattctatgcagcctgtattaccctggcaccaacaaagataaataaaaactataaactaatacatctcatgaatataaatgcaaaattcttaacaaaaatcarccagctctttatattaattgtttctgcatccatggattcaaccaacaatggatcaagaatattgaaaaaataattccttctatactaaacatgtacagaatttgtctggtcattatttcccatacaatacagtataacactaatatatagagcatttacattatattaggtattataagtaatctagagatgctttaaagtatacaggaggatatgcatagattaaacgcaagttctataccattttatatcggagactcgagtatccacagatttcagtatccaaggtatcactatactagcaaatagaattcagtgatatataaaagggattctgtatcatgaccaagtgaaatttatttcagaaattcc

SEQ ID NO: 425797 - DNA, 407 bp, Homo sapiens
cagctcaggtcatggcttcagagggcgcaagccccaagccatggcagcttctatgtggtattgagcctgctggtgcgcagaagtcaagaattgaggtttgggaatctccacctagatttcagataatgtatggaattgcctggatgtctaggctgcagtctgctgcaagggtggagccctcatggagaacctctgctagggcagtgcagaagggaaatgtggagttggagcccccacacagtgtcccatctgagacaatgcctagtggagctatgagaagagggccaccattctccaggccccagaatagtagatccttckacagcttgcaccatgcacctggaaaagctacagacacaaaacaccaacctgtgaaagcagctaggaggtggctacatcctgcaaag

SEQ ID NO: 425798 - DNA, 540 bp, Homo sapiens
tgcatccctaagactaaattgtatattcagtggaaggctgatcaaggactcaaaagaatgcaatcttttgtttcttatctacttctaacctgcaagcccccacttcaagttgtccctccttactggaccaaaacaatgtacatcttatacctgttatttgatgtcacatgcatccctaaaatgtataaaagcaagtggtacccaattatcttggacacatgtcttcagggcctcctgaggctgtgtcatgggtgcgtccttaactttggcaagataaactttgtaaattgacagaggcctgtctcagatayttggggttcacacaatcaatcatcaaccctaggttgtttctctatgatcatgacatatactttgaaaatcagaaacttttgctttaaacaattttcacagacaaaagttcagtttcttataactcttttatttcatataggataaaaaatgtctgaaaaaacaatggaaaaattaccctggcaccctgtcatccagattcctgccaaagatctttcccaacttcctgtc

SEQ ID NO: 425799 - DNA, 528 bp, Homo sapiens
gaagttcaaggtacattgaagtaggaatatttcaacagaatatcaagttatgaaattgttctagttaacatttactcagaaaagcatcygtataaagggaaaagtgtatctattaataaaatctcaagctgacaaacaaatgtacaactaatcaattgacaaattctcttggacctacaattataatgacaactttttaatgtgtcccattatttttaatatgctttattgtaatacattatcatacttctttgctcctaatgtttgtgtttacttattttgcagatgtatgttaataaatacaaaataaaatagaaagggttcttattccagaaatggtatagtagcttgtattagattaactatcctacagataacaatttaaaagcttgagaaaatacagaaacaaaaaagaaaacacaacagaaaccaatcacctttctaaagaaactggagactggccaaaaggagattgagatagacatggaaaggacttggcccatgtaagaaattaactactttgagcaa

SEQ ID NO: 425800 - DNA, 528 bp, Homo sapiens
gaagttcaaggtacattgaagtaggaatatttcaacagaatatcaagttatgaaattgttctagttaacatttactcagaaaagcatccgtataaagggaaargtgtatctattaataaaatctcaagctgacaaacaaatgtacaactaatcaattgacaaattctcttggacctacaattataatgacaactttttaatgtgtcccattatttttaatatgctttattgtaatacattatcatacttctttgctcctaatgtttgtgtttacttattttgcagatgtatgttaataaatacaaaataaaatagaaagggttcttattccagaaatggtatagtagcttgtattagattaactatcctacagataacaatttaaaagcttgagaaaatacagaaacaaaaaagaaaacacaacagaaaccaatcacctttctaaagaaactggagactggccaaaaggagattgagatagacatggaaaggacttggcccatgtaagaaattaactactttgagcaa

SEQ ID NO: 425801 - DNA, 583 bp, Homo sapiens
gggaagtagattgggttatgggggcagatttccctcttgctgttctcattatattgagtgagttctcactagatatggttgtccccctttcactatcttccttcttcttccaccatgtaagatgtgcctgcttccccttccaccatgactaaatatttcctgaggcctccccagtcatgcttcctgtaaagcctgaagaaccgtgagccagctaaacctcttttctttgtaagttacccagtttcagatgtttctttatagyagtaccagaacagactaatacaaatccccagtaaatgtacttaccaaaaaatatcctaggactaatagatgagaaatctctaaagcctagggcctagtgaggagtttttaaacttgacagtgaacacagggtccataaaagttgataatttggaatttatcaaaattttaaatatttgatgtgaaattcccacttgagagaatgaaaaggcaaactacaaaagaaaataaattacttacaaaccacctatttgacaaagaactcatatataaaatatataaataactctcaaaactcaactgttaaaaatatcaattagaa

SEQ ID NO: 425802 - DNA, 583 bp, Homo sapiens
gggaagtagattgggttatgggggcagatttccctcttgctgttctcattatattgagtgagttctcactagatatggttgtccccctttcactatcttccttcttcttccaccatgtaagatgtgcctgcttccccttccaccatgactaaatatttcctgaggcctccccagtcatgcttcctgtaaagcctgaagaaccgtgagccagctaaacctcttttctttgtaagttacccagtttcagatgtttctttatagcagtaccagaacagactaatacaaatccccagtaaatgtacttaccaaaaaatatcctaggactaatagatgagaaatctctaaagcctagggcctagtgaggagtttttaaacttgacagtgaacacagggtccataaaagttgataatttggaatttatcaaaattttaaatatttgatrtgaaattcccacttgagagaatgaaaaggcaaactacaaaagaaaataaattacttacaaaccacctatttgacaaagaactcatatataaaatatataaataactctcaaaactcaactgttaaaaatatcaattagaa

SEQ ID NO: 425803 - DNA, 577 bp, Homo sapiens
ttttgcttgcctcctgattatctgtactgtgggtttaagtatgctacttcctctcagcatccaataatcatggcctctcaatttatttgtggtcacccaaggttcagagcaagaagtcttgctctatacaaatgtatccataaaatatcagagcttgttgggcatgaacatcaaacttttgttccaataatatggctctgtttggaaaaaactgcaaatcagaaagaatgatttgcagaaagaaagaaaaactatggtgtaatttaaactctgggcggcctctgaatgaaatgctactttctttagaaatrtaatagctgccttagacattaagcaatattttaaaatcaaaataggatttatgtacctaggtatgccctcaaagccctttcctttcctcacctccaacactctgggctaagctacttttaaaatgttgatcaccattctggcttgatcttgctagacagtttagttaaaaagatgtatcaaggatcctagtgtctactagggaagaaatatttgtaaaccctgtaattctatattataagttctctaagagaagtccatatggggc

SEQ ID NO: 425804 - DNA, 524 bp, Homo sapiens
caagtgggcaaagaagtaagaggagccagcttcggataattcttgtaaaatgttacttatcccttcttagtaggatggttgttagatgcaggaaatctattttcacatatatgcacacaggcacacacacatacaatacacacacccaaagatttgttacattttatttaataaaatagcctccttcttaagtgatctctttattttaaagacagaaaagacaatctcctcatgacgatttctgtcctttttgttcaaacgcttctctcaaatgagcacacttgcttaytaaaaagtatgaagtgggctttgtaattctaaatttctttagtgactgtcctccaaatattcaaatacctgtgcaattagcatcataatacatattcacatatgggtctggaaatgttaacaccacactcttacctgtctgttcaaaaggtctcaggaagtgaagaacaaaagaaagtgatgggctgctaaccaataatgataattatcaatgctcaagctgcaatctgaggtaa

SEQ ID NO: 425805 - DNA, 527 bp, Homo sapiens
agaccccacgaaagggttctttgacttcctgcaagaaagaatttggggtgagtccataaagtgaaagcaactttattaagaaagtaaagaaacaaaagaataactactccataggcagagcagcagcrtctgtggctcaactgattatacttatagttacttcttgattatatgctaaacaaagggtagattatttctgggaaaggggtgagcatttcccagaactgagtgtttcttccctttttagaccatatagggtaacttcctgacattgctatggcatttgtaaattggcatggtgctggtgggagggtcttttagcatgctaacgcattataattagtgtataatgagtgctgaggatgaccagaggtcactttcatcactatcttggttttggtgggatttggctggcttctttgccacatgctgttttatcaagaaggtcttcttgacctgtatcttatgctgacctcctctctcatcctgtgactaaaaatgcctaacatcctgggaatgcagcccag

SEQ ID NO: 425806 - DNA, 527 bp, Homo sapiens
agaccccacgaaagggttctttgacttcctgcaagaaagaatttggggtgagtccataaagtgaaagcaactttattaagaaagtaaagaaacaaaagaataactactccataggcagagcagcagcatctgtggctcaactgattatacttatagttacttcttgattatatgctaaacaaagggtagattatttctgggaaaggggtgagcatttcccagaactgagtgtttcttccctttttagaccatatagggtaacttcctgacattgctatggcatttgtaaattggcatggtgctggtgggagggtcttttagcatgctaacgcattataattagtgtataatgagtgctgaggatgaccagaggtcactttcatcactatcttggttttggtgggatttggctggcttctttgccacatgctgttttatcaagaaggtcttcwtgacctgtatcttatgctgacctcctctctcatcctgtgactaaaaatgcctaacatcctgggaatgcagcccag

SEQ ID NO: 425807 - DNA, 672 bp, Homo sapiens
ctgtagctgcctttcttaggagggggaaaacgcacaggctgtttatttcatcactaaaaggtaccttgagtcacaggagaatattctatgacttcctttgtgactgaaagctttctttatgatttttaaataaaagtttttaaggcagtaggtggcttcgagaagcaatatatgattaagtgttaattttatagtgatcttttgcatatacgaactagatcactttccctcaagaaattcccataagtgtaagcatatttattcagatcattcatcttaatcttccaccaaagaaaaataatgttgcatgtgagagtattttaaagtgactgatgagtakattgaaagaacgataaattgttagtcctaatgaaaatatattgatgtgctaagtaaaaatctgtctgtagtagccctactttattcagaaaagggagaatgaaagggcataaaaaacaagaaccccaaatctccataccctgaccaaggcacatgcctcctatgaaaagccccactagacagtgattccaatggacagagccagagcaaagtgacatgggtttggcaagcatactgccatcctattctcagcatgcacctgtaaattccagtatattttgtcaatataacttatcccacaaatgaaagaaaatgtgaatttcttttctttca

SEQ ID NO: 425808 - DNA, 672 bp, Homo sapiens
ctgtagctgcctttcttaggagggggaaaacgcacaggctgtttatttcatcactaaaaggtaccttgagtcacaggagaatattctatgacttcctttgtgactgaaagctttctttatgatttttaaataaaagtttttaaggcagtaggtggcttcgagaagcaatatatgattaagtgttaattttatagtgatcttttgcatatacgaactagatcactttccctcaagaaattcccataagtgtaagcatatttattcagatcattcatcttaatcttccaccaaagaaaaataatgttgcatgtgagagtattttaaagtgactgatgagtatattgaaagaacgataaattgttagtcctaatgaaaatataytgatgtgctaagtaaaaatctgtctgtagtagccctactttattcagaaaagggagaatgaaagggcataaaaaacaagaaccccaaatctccataccctgaccaaggcacatgcctcctatgaaaagccccactagacagtgattccaatggacagagccagagcaaagtgacatgggtttggcaagcatactgccatcctattctcagcatgcacctgtaaattccagtatattttgtcaatataacttatcccacaaatgaaagaaaatgtgaatttcttttctttca

SEQ ID NO: 425809 - DNA, 646 bp, Homo sapiens
aataaccctttgttgttaaaatgccattaagatttattttgggatttatcataacagtacaatctagcctgtatgtattaacacaggggatagaagacatttttagcaactccttctaagatttcagtggggaaaggtaatctcattctagcatgtgaaataattgttgatgctatccattttggatcttttctttgcttgtttcttaatgactaaatgatttattctctctgaagaaatgagggctctgttgaagacagtgctgtgagtttcaggatagtgagaattaaagcaacaaaaggcaatctctgtaatagagaaggagggattcactcaagttcaagagaagatactcttcagaacttagaaattctgcatctcatttgtcaatgtgaccatgattatctatatgtagccttagagagatggagtccatatacatgtcaagcttggtttttggcatgtaactctctgaaactaatagcaaatgtgaatactgrgacttgtcactaattatattgtggttgatactgatttttattgtacccaggtttccttactgtgaggaacatgaaagttctcctgcttagcctgaataatgggaattttgttgtgttcttgacgggaaaccctggagccacccaga

SEQ ID NO: 425810 - DNA, 600 bp, Homo sapiens
tgcagtcaaacctgtcaagaatttttcttgctcttttgactgatcccttctagaggtctgtttcctctgatccaagatagaatgcttttttcattagagtaattcagaccatcctctgaggtcttcccttgaccacttttgtagattccatatttcatgggtcttatatctttctctttcttccagtggtcacagracataccttccaaaagattactgagaaggagctcgtgggagggacattttaaaaaatcatatttgattgatagtttggttgcatatagaatatttgaatgaacatcatgattcttcaaaattgaaatgacattacgtctattggattctactctcatagggttattcttgagaattctaatggcattagaattttaatcttctgtatgtgaactcatttattttcttatgagaatatttttaatgctcgaaaaatttacagtgttatatttgagtatctcatcattgaaccttttaaaaatacagagacttaactttctatatttttgttcctttcttcctctcctttttctttgttgcatgtttttggagttcctttcacatggatttggtatctcctaaatt

SEQ ID NO: 425811 - DNA, 581 bp, Homo sapiens
ccttttttcctcttttaatggtgacacatttgtggtgaattacagggcagctttataaactaggctccaggccagtctcaggccctgcgtccatgtgaacgttccttctcccggttggcctcccggactggtggtaaatcaaggcagctgtcacagtacactaagttagtgtgcgtcattggggagagcaggaagcgttgggggtataattctgtccatcaaactaatatgttatatcagtagctttgtaatcttctgccataacttatgggaagtgacacctaagaattcactttgaaggcaatgtgtttcttagactttaagtcaaaacagacccgattcacagcaacagttcctctgtttacatgagtggatttctagtgycggggaaccaggtccctatcaatgtggcagtatttaacacgctccaccaccggctggactctgtttacagccctcacggcaggatttgtaaacttttcaaacagggtttcttctcttcttgttacccttgccttaacctccagtagcgggatagataaacatgctccttgaatgttatcatgacaaagcaaacctct

SEQ ID NO: 425812 - DNA, 581 bp, Homo sapiens
aagtatcaatatacttctacagatatgtatactaagccaatatagaaccataattgacaagtgctctattgaaattagttatttttatatcttgatgaagcaaataataataatgttattaaagtgagaacttggagatgcaaaaaaggttttgcatcatctaacaggacagttrcaccattgctagggtttctatttcttaattttatattgtgaaagatgatctctgagtttgcaaattacaggatgatgtcacttttgtcaggcccagacaaaatagggcttacatgtctgagacatgtttacatgtctgagataagaactgttttcaaggactttcaaaaaacaccacaggaaactcgttcctgcccttcgcacatctctgtttttataaagtttatcactagacattctttaaaactggagtaattcagataagatgttctcaaaagaacacttgcttagtaatggcatctccaccaactaactgacaactcagactctgaacctccggaactaatgaactctgtttctgagctgcttatgtaaatctcttttggctaataaaagttccccttaca

SEQ ID NO: 425813 - DNA, 533 bp, Homo sapiens
atctctgagtttgcaaattacaggatgatgtcacttttgtcaggcccagacaaaatagggcttacatgtctgagacatgtttacatgtctgagataagaactgttttcaaggactttcaaaaaacaccacaggaaactcgttcctgcccttcgcacatctctgyttttataaagtttatcactagacattctttaaaactggagtaattcagataagatgttctcaaaagaacacttgcttagtaatggcatctccaccaactaactgacaactcagactctgaacctccggaactaatgaactctgtttctgagctgcttatgtaaatctcttttggctaataaaagttccccttacacttcccagaccaaatgggctggtggcctgccattctataccttctggattagaatccttatttttattcttgaataaatccattgtatttagagaaaattttctctactacctgatgatatgaaatccaatcatatattaacaaagactgctattagaaaacttttcatgaaca

SEQ ID NO: 425814 - DNA, 533 bp, Homo sapiens
atctctgagtttgcaaattacaggatgatgtcacttttgtcaggcccagacaaaatagggcttacatgtctgagacatgtttacatgtctgagataagaactgttttcaaggactttcaaaaaacaccacaggaaactcgttcctgcccttcgcacatctctgtttttataaagtttatcactagacattctttaaaactggagtaattcagataagatgttctcaaaagaacacttgcttagtaatggcatctccaccaactaactgacaactcagactctgaacctccggaactaatgaactctgtttctgagctgcttatgtaaatctcttttggctaataaaagttccccttacacttcccagaccaaatgggctggtggcctgccattctatacmttctggattagaatccttatttttattcttgaataaatccattgtatttagagaaaattttctctactacctgatgatatgaaatccaatcatatattaacaaagactgctattagaaaacttttcatgaaca

SEQ ID NO: 425815 - DNA, 567 bp, Homo sapiens
ctctgaacctccggaactaatgaactctgtttctgagctgcttatgtaaatctcttttggctaataaaagttccccttacacttcccagaccaaatgggctggtggcctgccattctataccttctggattagaatccttatttttattcttgaataaatccattgtatttagagaaaattttctctactacctgatgatatgaaatccaatcatatattaacaaagactgctattagaaaacttttcatgaacatttcacttaggaaatctattttgttttctaagatactgaagatactgtaatcttggcagggtatattycataattattggaaattttttttgtcatctgtgaaattgtaccttaaagactatagaaaaagaaaagttgtacattaactgtaaagtaagtggactctacttatggataaaaaagaacagcaacatctgataactgtgtgatacaggtagagtgtagatagatctttgtgattagaagagtagacatttttaaaagatgatctctgagttttcaaattacaatatactgaaaacaaatttcaag

SEQ ID NO: 425816 - DNA, 629 bp, Homo sapiens
agaaacccagcagtgggaatattgacaaatagcttgagactgaggatggtatagcataagagcaaaaatgattcttggctacacggacttaggggaactctctgttttgtatgctttacatccaagaaccccaataatttttcaagactaaaatctgagaaatatcctctctatctctagcaaggggagagggagagtaatcattgtgaaatacacccagaagtttcttcatatcaaagttttcacttcagcaagaaaaggcatttgtagaacctaatcccagttgggcaaaggatattcctcccaacttaaacccctctagactttctgtcttaccaaaggagtccaaaactaagacaaaagaaagtaggattccaaaagaatcatttgggaatactgaagcaagagaaggtaataaggagcagaggagacaaaacatcttaagtcatagccttaagaaacaggstcttcaagtgggtgaaagggacagaaaaagaggaaaacaagactatctaagagatcagactcatatatgccatagaaattgaaatcattagagagttctatggattgactgtgatttgtccccactaaaactttgttgatatcttatccccagtgtggtagtg

SEQ ID NO: 425817 - DNA, 629 bp, Homo sapiens
agaaacccagcagtgggaatattgacaaatagcttgagactgaggatggtatagcataagagcaaaaatgattcttggctacacggacttaggggaactctctgttttgtatgctttacatccaagaaccccaataatttttcaagactaaaatctgagaaatatcctctctatctctagcaaggggagagggagagtaatcattgtgaaatacacccagaagtttcttcatatcaaagttttcacttcagcaagaaaaggcatttgtagaacctaatcccagttgggcaaaggatattcctcccaacttaaacccctctagactttctgtcttaccaaaggagtccaaaactaagacaaaagaaagtaggattccaaaagaatcatttgggaatactgaagcaagagaaggtaataaggagcagaggagacaaaacatcttaagtcatagccttaagaaacaggctcttcaagtgggkgaaagggacagaaaaagaggaaaacaagactatctaagagatcagactcatatatgccatagaaattgaaatcattagagagttctatggattgactgtgatttgtccccactaaaactttgttgatatcttatccccagtgtggtagtg

SEQ ID NO: 425818 - DNA, 616 bp, Homo sapiens
agtggtaataacctagcgtcctggctctgaggtcagttaaaacatatgtaaatcttagctctggcacttactaatcatgtctccctaaacctcaatttctttgatcctgtaaaatgggggaaattataactgcttcatgatgtaattttaaggattaaatgagaaaaaacatataaagcaagtagcataattcctggcaaatrtaagtgttcattaaacaaccacctttataacaaagtatctcaagtcatactagactcctaactggtctttcttcaagtcctgctccctcaaaaatttaatcttccaaaaagcagctaaaatgatttttttttttttgagacagaattttgctctgtcgcccaggcgctcagctcactgcaacctccgcctcctgggttcaagtgattctcgtgcctcagccactggagtagctgggattacaggcgtgcaccaccacgcccctctaatttttatatttttagtagagacggggtttcaccatgttggccaggttggtctcaaactcctgacctcagatgatccggcttcttcggctggctccctaaagtgctgggattacaggcatgagacaatgcgcccagccagaatgatc

SEQ ID NO: 425819 - DNA, 616 bp, Homo sapiens
agtggtaataacctagcgtcctggctctgaggtcagttaaaacatatgtaaatcttagctctggcacttactaatcatgtctccctaaacctcaatttctttgatcctgtaaaatgggggaaattataactgcttcatgatgtaattttaaggattaaatgagaaaaaacatataaagcaagtagcataattcctggcaaatgtaagtgttcattaaacaaccacctttataacaaagtatctcaagtcatactagactcctaactggtctttcttcaagtcctgctccctcaaaaatttaatcttccaaaaagcagctaaaatgatttttttttttttgagacagaattttgctctgtcgcccaggcgctcagctcactgcaacctccgcctcctgggttcaagtgattctcrtgcctcagccactggagtagctgggattacaggcgtgcaccaccacgcccctctaatttttatatttttagtagagacggggtttcaccatgttggccaggttggtctcaaactcctgacctcagatgatccggcttcttcggctggctccctaaagtgctgggattacaggcatgagacaatgcgcccagccagaatgatc

SEQ ID NO: 425820 - DNA, 616 bp, Homo sapiens
agtggtaataacctagcgtcctggctctgaggtcagttaaaacatatgtaaatcttagctctggcacttactaatcatgtctccctaaacctcaatttctttgatcctgtaaaatgggggaaattataactgcttcatgatgtaattttaaggattaaatgagaaaaaacatataaagcaagtagcataattcctggcaaatgtaagtgttcattaaacaaccacctttataacaaagtatctcaagtcatactagactcctaactggtctttcttcaagtcctgctccctcaaaaatttaatcttccaaaaagcagctaaaatgatttttttttttttgagacagaattttgctctgtcgcccaggcgctcagctcactgcaacctccgcctcctgggttcaagtgattctcgtgcctcagccactggagtagctgggattacaggcgtgcaccaccacgcccctctaatttttatatttttagtagagacggggtttcaccatgttggccaggttggtctcaaactcctgacctcagatgatccgscttcttcggctggctccctaaagtgctgggattacaggcatgagacaatgcgcccagccagaatgatc

SEQ ID NO: 425821 - DNA, 581 bp, Homo sapiens
ggccttgtttgctggaaatgcacataaagtattaagcggtgatgggacgtcacgtcagcaacttacaccccagtgactctggaaaaactaaggttcttgtactataattgcaacttttatgtaaattttagattgtctcagaataaaaataatttaaaagtttgataatgaaaataaagtaaaagattatcagttctcagtgaacaacaamaaaaaagttctgggtagagctcctgtaatctctagggattacacctgtaatcccaggtactcagaaagctaaagcagggggatctctttagcccaagagttcaagaccagcctgggcaacacagtgagactctgttttatctaaacaaacaaacaaacaaacaaacaaacaaaacaaaacaaaacaaaaacttctgggtaatatgtgtcttagcagaactcctttaagactgttccaacaccctgaacccactctgcttttaggtaaatcctataacgtgaaaggcagaaaagtgtagaaatactgccacctaccggttatggaacaaatatatttaagttaatagaaaaaaagaattctgagatttact

SEQ ID NO: 425822 - DNA, 581 bp, Homo sapiens
ggccttgtttgctggaaatgcacataaagtattaagcggtgatgggacgtcacgtcagcaacttacaccccagtgactctggaaaaactaaggttcttgtactataattgcaacttttatgtaaattttagattgtctcagaataaaaataatttaaaagtttgataatgaaaataaagtaaaagattatcagttctcagtgaacaacaacaaaaaagttctgggtagagctcctgtaatctctagggattacacctgtaatcccaggtactcagaaagctaaagcagggggatctctttagcccaagagttcaagaccagcctgggcaacacagtgagactctgttttatctaaacaaacaaacaaacaaacaaacaaacaaaacaaaacaaaacaaaaacttctgggtaatatgtgtcttagcagaactcctttaagactgttccaacaccctgaacycactctgcttttaggtaaatcctataacgtgaaaggcagaaaagtgtagaaatactgccacctaccggttatggaacaaatatatttaagttaatagaaaaaaagaattctgagatttact

SEQ ID NO: 425823 - DNA, 591 bp, Homo sapiens
gcatgttctcactcatagatgggaattgaacaatgagaacacttggacacaggaaggggaacatcacacaccggggcctgtcgaggggtggggagaagggggagggatagcattaggagatatacctaatgtaaatgacgagttaataggtgcagcacaccaacatggcacatgtatacatgtaacaaacctgcatgttgtacacatgtaccctagaacttaaagtataatttaaaaataaataartaaaaaataaaatgccagagttggcaccttaagatcctctttcacagcaaaggagcaggactaaaaccaggcatcttgaccaatatcccacaggtgctctggtaaaatctccaagaccaggacccaggtcttccagtacctaattcaatgttctttccatgcccacacaaaggcaagcagcagaaggaggagcaagcataaggccttcccagtcaccacagccatgctgtcaaacctctctgtggatatgctgtgttaacttctgagccttggggatacccatatttacaatatgataaatacattaagtcacattgtttaatatttggatatgggcccagacgc

SEQ ID NO: 425824 - DNA, 507 bp, Homo sapiens
aggcccctcagctgcaggtctgttggagtttgctgtaggtatactccagaccctgttttcctgggtatcaccagtggaggctgcagaatagcaaatatttctgtctgaatcctcctctggaagcttcatcccagaggggcacccacctgtgtgagttgtctgttggcgcttactggraggtgtcccccagtcaggttacacgggggtcacggacccccttgaggaggcaggctgttcattatcagagctcaaacgctgtgctgggagaactcctgctctcttcataggtggcaggcagggatgtttaaatctgcagaagctgtctgctgcctttcattcagatataccctgcccccagaggtgggatctagagaaacagtaggccttgctgagctgtggttggctccacccagtttgagcttccctgacactttgttcacactgtaagcatagctttgcaagccttggtggacgcccctctgcccaccaagctccagtgtgccaagt

SEQ ID NO: 425825 - DNA, 572 bp, Homo sapiens
cccgaaaggccacacgggcctggtgcggcaccggtctctcgtgagccgctctaccttcccgcctgcggggaacacttccgccgcttcgaggccattttatctcygtcctccgtccccaaggcccgggttgagaggggtgctctggcggccggagagaccggccactcacggaggccggaggatgccctccccgggctgagcggcggcgctcgttttttcctcgcctcggggtcgcccccttcacctcccttgggcctctcctgaggacctggcggcactaacgagttcagcaaggaaaaaaagaaacattcgttccctacatttcatgtcacgcagtaggatgttactacgttctcttgtagacttccatttttaaatgagtataagcattctgaggaaagaaactgaattattgcagatttttgtgaaatccaagtcttaccttggatccctgtgagacagttactagatttttttttcaccgtttttcataagtctgtgtacacgtaatggaaaagcccgagttcttgttttgataagaaagtcacttggttgtttgatcccaaaggatt

SEQ ID NO: 425826 - DNA, 572 bp, Homo sapiens
cccgaaaggccacacgggcctggtgcggcaccggtctctcgtgagccgctctaccttcccgcctgcggggaacacttccgccgcttcgaggccattttatctctgtcctccgtccccaaggcccgggttgagaggggtgctctggcggccggagagaccggccactcasggaggccggaggatgccctccccgggctgagcggcggcgctcgttttttcctcgcctcggggtcgcccccttcacctcccttgggcctctcctgaggacctggcggcactaacgagttcagcaaggaaaaaaagaaacattcgttccctacatttcatgtcacgcagtaggatgttactacgttctcttgtagacttccatttttaaatgagtataagcattctgaggaaagaaactgaattattgcagatttttgtgaaatccaagtcttaccttggatccctgtgagacagttactagatttttttttcaccgtttttcataagtctgtgtacacgtaatggaaaagcccgagttcttgttttgataagaaagtcacttggttgtttgatcccaaaggatt

SEQ ID NO: 425827 - DNA, 584 bp, Homo sapiens
tctcctttggcttttgcactttttgttttcaatttttgagaggtcttgtgatacgagttgcaaagattttctccagaccgatctgattcactggaaatatactacgaccatctggartgtactttaatcttatcctaataaatcaccttactacaagacactcctttggggatgaacaggtttgataaagccggctaaggacagaccaatcaaaagaattacgtgctcttctagtaagtgtttagagactgtttcacgttctccaggtaacaccgccattactcggcggtccagatggcagtcttacttcagggagtctactccacttgcaggacctctttgattgagttcactaaacctcacagggccgccttccccgtgttccagttagcaaggggccctcaacgccgcggacacagcgcaacctccgacgccagagaacaatagctcctcgatgcgtctccagagatgtcaaggaggaacgaacccagcggccaggagactgcgcctcacgactgatgagagggaaggcatcggtttctaagttctcaaaacttacaggtgagcttctgctaagagtaaac

SEQ ID NO: 425828 - DNA, 584 bp, Homo sapiens
tctcctttggcttttgcactttttgttttcaatttttgagaggtcttgtgatacgagttgcaaagattttctccagaccgatctgattcactggaaatatactacgaccatctggagtgtactttaatcttatcctaataaatcaccttactacaagacactcctttggggatgaacaggttygataaagccggctaaggacagaccaatcaaaagaattacgtgctcttctagtaagtgtttagagactgtttcacgttctccaggtaacaccgccattactcggcggtccagatggcagtcttacttcagggagtctactccacttgcaggacctctttgattgagttcactaaacctcacagggccgccttccccgtgttccagttagcaaggggccctcaacgccgcggacacagcgcaacctccgacgccagagaacaatagctcctcgatgcgtctccagagatgtcaaggaggaacgaacccagcggccaggagactgcgcctcacgactgatgagagggaaggcatcggtttctaagttctcaaaacttacaggtgagcttctgctaagagtaaac

SEQ ID NO: 425829 - DNA, 584 bp, Homo sapiens
tctcctttggcttttgcactttttgttttcaatttttgagaggtcttgtgatacgagttgcaaagattttctccagaccgatctgattcactggaaatatactacgaccatctggagtgtactttaatcttatcctaataaatcaccttactacaagacactcctttggggatgaacaggtttgataaagccggctaaggacagaccaatcaaaagaattacgtgctcttctagtaagtgtttagagactgtttcacgttctccaggtaacaccgccattactcggcggtccagatggcagtcttrcttcagggagtctactccacttgcaggacctctttgattgagttcactaaacctcacagggccgccttccccgtgttccagttagcaaggggccctcaacgccgcggacacagcgcaacctccgacgccagagaacaatagctcctcgatgcgtctccagagatgtcaaggaggaacgaacccagcggccaggagactgcgcctcacgactgatgagagggaaggcatcggtttctaagttctcaaaacttacaggtgagcttctgctaagagtaaac

SEQ ID NO: 425830 - DNA, 629 bp, Homo sapiens
ttttgctatacagggaacaatataattttgagaacgagactaaaataagaaaaaagtaggcacagtgattgctgggtttaatgtgtttaaacaacaggcggctaggttatgaggaacagatgaataggagatcataattagttattgttatatagaatattaaagtttttgtgtgttcaactattttgtctgatggcaagatccagtatatacctattgtcatacataattgaatatgaagaataatatggttgaagccaagtcagtggatgtggttttttttaatacccaagatgagtatctgtgtacttgtttacctggaacaacctggtgtatacttgatgtcctgacataattatcagtaacacttttgtgtacycttgaagtttactaatttgaatacaaatgatatgatcatctcctcactttgggtcagtagcaaatcaccataacaatttggaaatagccaggaattcttaagaaaatagaacaaaggagagaagtggaaaattgtaagttgatattttgaacaggagctgaatgaaaacttttgcatgaaggagacagagtaacagggtggaagccatccaaacttacctcctattttttcttagcagagctctttttgg

SEQ ID NO: 425831 - DNA, 559 bp, Homo sapiens
gtggcataatcttaggtctcccgggcatgtatgtaaggttataatgcctcaagtacatttcagtctctcttcttctgtaaagactgagtttattaagttagtgggagataaatatagttcttcaaaataaatattttagaagaatcacacaatatagtctgtatgaaaaatccttaaagaaaaattataactttgtgcctgctttaaaaaataaaaacattgccctgattatattaaaagcttctatcctgtaattatattatgttttaaatacacattaccatctgattcatcctggattctcaattatttttcttctgagtccccaaatagaatctattttatctcaatagaagtacagatgtgtttccatttctcaaaaaggtttttctcttcattttaatgaggcttggaaaaaaataaattcaggtggtcaatcagctctattaattcataaatttcagaatcttgaaaaatacctgtagggggtgttctgtaccacagaaattccyattcaatatcaagacacattctctcagctgctggaagagtggattat

SEQ ID NO: 425832 - DNA, 593 bp, Homo sapiens
cttgcatgtaactgccacaactggaatctgagtaagtcacctggaggcccaaaaataaccctcctggacctgctgacaccagtgtcagtgtgcactgccctggggcccaagaaaaaacactctcagcccaatgctgctaccactaagcctgaagtctggcctacctggcatcccatttcccagcaagacatcaccacagcctccgytaataattgctccctaaaacaccaaggaaatcacaagcatgaatgatactatttatagctaaagaagtcatacagagactacactactgcacacacatcccaaaaggcccaaatgccctacccaaccaacaccatagacacgaattcaggataaagttgtcccctataaatacaaattcatataactggaagaagcaactgttacaccagaagcacaaacatcaatgtaaagacacaagaaccatgataaagcaagaaaaaaaaagaccacttctttacttgatagtaaagaacctcaatgagataaaaaaaatctgaaaaacaaaacaaagaaatcagaaaaactattcagaatataaatgagaaatttatcaaagtgatagctgt

SEQ ID NO: 425833 - DNA, 582 bp, Homo sapiens
gttggtctcttcctaacattcaatccccaaaatccagtcttattattttttgtttgaagatcacattacttacaattttattagctagatagctaataaagtattycttcattccaatgggttccatataattttgactgccagctctgttacatataaaccgtgtatagcttctctgaatgcctgtaagatgtagttttgcttttacatggaaatgctagaaagttttttaccttagttctccactgagaacacatttctcccattagaaacatactattatagcattactcaacccccatcttcaggatctcatctcccctccagccctcagagcagctcaggttctgttcctgttgagcaccatgtcatgcggtgttgtgaacaatcaaagttagacaatgcttgcactttaatcctggcgtcctcccttactttttttgtcagcctgtgtaaattatgtaatttctgtaactcagtactctcatctctaaaacagaataattatagtacctacctcatagctttgttttaagaagcatgttaaattaatggtctaaataactcagaactgtattgtca

SEQ ID NO: 425834 - DNA, 582 bp, Homo sapiens
gttggtctcttcctaacattcaatccccaaaatccagtcttattattttttgtttgaagatcacattacttacaattttattagctagatagctaataaagtattccttcattccaatgggttccatataattttgactgccagctctgttacatataaaccgtgtatagcttctctgaatgcctgtaagatgtagttttgcttttacatggaaatgctagaaagttttttaccttagttctccactgagaacacatttctcccattagaaacatactattatagcattactcaacccccatcttcaggatctcatctcccctccagccctcagagcagctcaggttctgttcctgytgagcaccatgtcatgcggtgttgtgaacaatcaaagttagacaatgcttgcactttaatcctggcgtcctcccttactttttttgtcagcctgtgtaaattatgtaatttctgtaactcagtactctcatctctaaaacagaataattatagtacctacctcatagctttgttttaagaagcatgttaaattaatggtctaaataactcagaactgtattgtca

SEQ ID NO: 425835 - DNA, 638 bp, Homo sapiens
taatatttcacctcaattgtctttaaatacttttaaataaaattatgttgaaattgtttataacatttcccaaatgatatgaattattttctgtgtttaaagcattcacatttggagaaataataatttttaaaaatattctaatcaaatacattaaataatttttgttaaatgttattaaagttattagtaagaaaataatatttttaagagacaaatgatgtatagaagtaaattcattgagccttatttcgattaagtaaattgttattaaatggaatctacagagttcactgagaatgaaaaaatattttaaaggcttacagagctcatgtccccagacctgggaattttatctaaagctgaragttaccagacttttttgcaactaagaggtaaggtattctcaaaaaataatagcactctccaggaaatatgtttacacattttattttctattaacataaaactttcagatcactgtacaatcatcggttacttccttcacaaggactagtttctgcacggaactctcttcggtcataggatttctgagagtcttaagttttgaaatttacagtagaccttaaagataaagcatgactttttcaatatagagaggaaatgttactgtttgg

SEQ ID NO: 425836 - DNA, 482 bp, Homo sapiens
taccaaaatctataaacaacatgttatttgtggcaaataggagccagtggcagattcttggaggaaattacatttcctatgcacattgtgaacgatggaagctacaggccttggaaggggcagtcctaaacaaagataatttagtgaatggtgacaccaatttcaaacaataaatggtaggttcagaaaacacagtgcccaattttaggcagtttgaattaattaatgactacagtcacagacatatttatataaatggcttggcttaactgtggaaagattgagtaatttgactraaagattgtactgtattctgtggatgataaaactatgctaaatatgtttaaaattgggcttttggtaatattaatttttcaccagtatgtgagatgatacttgagaagtttatttaaaatatttaaaatacagaaggacatccctatgcagatgtgattcattagcaaacttaaaatagtttaaat

SEQ ID NO: 425837 - DNA, 441 bp, Homo sapiens
aatctcagagaaaactctcgttgtcttaaaattgatgagttttgcttttggcagttaaaaaaatgcagaaagcagaagaatgaggactcatttttgtctagtttcatgtgtagccacaggaacaaagagcaaaacaaagtatacaatcatttgtacatagcaaacaaacattasagcattgttgcaattttgcgtaggaaggaagaacaacatttttgatgcaaattggaaaaaattttaactttagcattattgtggtagggaaacatactgtacaaaatagttttcatttaattcttagatgttttaaaactacatttctaccactacatatgcatattttagtgactgtttttctccaatacagataaaatctgttaatctgctttgtattatgttaagtaatgattagatagttttcatatattgatgagaaaaaag

SEQ ID NO: 425838 - DNA, 441 bp, Homo sapiens
aatctcagagaaaactctcgttgtcttaaaattgatgagttttgcttttggcagttaaaaaaatgcagaaagcagaagaatgaggactcatttttgtctagtttcatgtgtagccacaggaacaaagagcaaaacaaagtatacaatcatttgtacatagcaaacaaacattacagcattgttgcaattttgcgtaggaaggaagaacaacatttttgatgcaaattggaaaaaattttaactttagcattattgtggtagggaaacatactgtacaaaatagttttcatttaattcttagatgttttaaaactacatttctaccactacatatgcakattttagtgactgtttttctccaatacagataaaatctgttaatctgctttgtattatgttaagtaatgattagatagttttcatatattgatgagaaaaaag

SEQ ID NO: 425839 - DNA, 524 bp, Homo sapiens
tgacactgaagctcagagcagttaaaccattttcctcagatcacataactttaaagagggaaaccagatatgggaagcagatttctttctaaatgaaaaaatcatgagctcttgctttcacttagcacatagtctcatcatctgttttcttcacaccagctcactcatgtaacattcattcatttaccaaatacagataaatragtggatttattcttgcattcatcagatactaattcaaaatcgcttctgtgtctgctacactgtgctcaagacttcccagtgcctttgtctcctctccctcaaatctctccacccaatgtcttgacaaatactgtagattcttcctgcataacctctccagaatcttttccttctgttatccatgctacagtgtttatggaggatgttttcttcacctatgaagtgtgatgggggctgaagctgcagaaagactcatgctgttcacctcaggagctgacacagtaaatgtggataaacctcaatcctttaatatctttatg

SEQ ID NO: 425840 - DNA, 524 bp, Homo sapiens
tgacactgaagctcagagcagttaaaccattttcctcagatcacataactttaaagagggaaaccagatatgggaagcagatttctttctaaatgaaaaaatcatgagctcttgctttcacttagcacatagtctcatcatctgttttcttcacaccagctcactcatgtaacattcattcatttaccaaatacagataaataagtggatttattcttgcwttcatcagatactaattcaaaatcgcttctgtgtctgctacactgtgctcaagacttcccagtgcctttgtctcctctccctcaaatctctccacccaatgtcttgacaaatactgtagattcttcctgcataacctctccagaatcttttccttctgttatccatgctacagtgtttatggaggatgttttcttcacctatgaagtgtgatgggggctgaagctgcagaaagactcatgctgttcacctcaggagctgacacagtaaatgtggataaacctcaatcctttaatatctttatg

SEQ ID NO: 425841 - DNA, 524 bp, Homo sapiens
tgacactgaagctcagagcagttaaaccattttcctcagatcacataactttaaagagggaaaccagatatgggaagcagatttctttctaaatgaaaaaatcatgagctcttgctttcacttagcacatagtctcatcatctgttttcttcacaccagctcactcatgtaacattcattcatttaccaaatacagataaataagtggatttattcttgcattcatcagatactaattcaaaatcgcttctgtgtctgctacactgtgctcaagacttsccagtgcctttgtctcctctccctcaaatctctccacccaatgtcttgacaaatactgtagattcttcctgcataacctctccagaatcttttccttctgttatccatgctacagtgtttatggaggatgttttcttcacctatgaagtgtgatgggggctgaagctgcagaaagactcatgctgttcacctcaggagctgacacagtaaatgtggataaacctcaatcctttaatatctttatg

SEQ ID NO: 425842 - DNA, 314 bp, Homo sapiens
gttgcagtcattaacactcctctctcagtaattggaagatttagtagaacacaaatcaacagacatactggagaattgaaccatgccatccagtaatggacctatcaatttcataatgcaaaataaaaattcaggtagaaagcaaagacaaaaattaaaagaaaagcaagatcatgttataatsagaaaattaagagtagtccagcatatagaagggtgctattattgaaagagtttgaaatagtgacttagttattttgaaacatttttgaaggcgttatttagctggaaatgacagaaagactgaaaatggt

SEQ ID NO: 425843 - DNA, 480 bp, Homo sapiens
cagaaaggctcacagcttgccatcttatcttagtttaagaattcyttttgaacttaccctgtgaaagaaaacacacagaagaaagctttccctctgcatgtcactgatttctgaacaggaaaatacaagaaaagtattatcataactgtagacactgggtataaactggggggtctagattgtcagcttttcaagaagcttatattctaggggagagatagaaaataaaacaataatttaatatgttttccaatttattaaaaattttatttaaaagatggagagagagacaggacattgattcagctggagaggtcaaagaagggctctctgagacagtgacatttgagttgtggcctcagtgttgaaaatgagtccactgttctgggtctggagcaaaagtggtggagttcagaggcggacagctggggtctgggcctctgtgggcagccagaagacgagccaatagagtaccccact

SEQ ID NO: 425844 - DNA, 480 bp, Homo sapiens
cagaaaggctcacagcttgccatcttatcttagtttaagaattccttttgaacttaccctgtgaaagaaaacacacagaagaaagctttccctctgcatgtcactgatttctgaacaggaaaatacaagaaaagtattatcataactgtagacactgggtataaactgggggrtctagattgtcagcttttcaagaagcttatattctaggggagagatagaaaataaaacaataatttaatatgttttccaatttattaaaaattttatttaaaagatggagagagagacaggacattgattcagctggagaggtcaaagaagggctctctgagacagtgacatttgagttgtggcctcagtgttgaaaatgagtccactgttctgggtctggagcaaaagtggtggagttcagaggcggacagctggggtctgggcctctgtgggcagccagaagacgagccaatagagtaccccact

SEQ ID NO: 425845 - DNA, 615 bp, Homo sapiens
ttttcaattgttaaaaaaattgaattcaaaaactgtatatataaaatgttacatttttctctaaattaagagtctcaaactccagtgaaattaattttaaaattcttaatatcaaataygtatattagcagtttttttaagattaaacatagtctatttatttatgaagctgtttggacattttactatttttcaggtgaactatctggattctgcttacctagacaatgtccattggacttttgacaggaattattacactctttatctttcatggtgaaatagttcttattacattagactactggtttaaattttaaaaatattgtaaatgtatgaaacaacaacatatatggagagttctataaattatatacaatgacaaagcttgggagataattattgacaatgttactgatgctatacattagttgaattgctaattaaaaataaatgtcatggtcagtgaggtttcccacttaaaccatgcattgtgtctcctttgggtacaaccatttgattttttaaacgatttttttttctaatccatgcatccattttcgttaatttgatttcttccttttatccttcattacataaagttagttttaccct

SEQ ID NO: 425846 - DNA, 615 bp, Homo sapiens
ttttcaattgttaaaaaaattgaattcaaaaactgtatatataaaatgttacatttttctctaaattaagagtctcaaactccagtgaaattaattttaaaattcttaatatcaaatacgtatattagcagtttttttaagattaaacatagtctatttatttatgaagctgtttggacattttactatttttcaggtgaactatctggattctgcttacctagacaatgtccattggacttttgacaggaattattacactctttatctttcatrgtgaaatagttcttattacattagactactggtttaaattttaaaaatattgtaaatgtatgaaacaacaacatatatggagagttctataaattatatacaatgacaaagcttgggagataattattgacaatgttactgatgctatacattagttgaattgctaattaaaaataaatgtcatggtcagtgaggtttcccacttaaaccatgcattgtgtctcctttgggtacaaccatttgattttttaaacgatttttttttctaatccatgcatccattttcgttaatttgatttcttccttttatccttcattacataaagttagttttaccct

SEQ ID NO: 425847 - DNA, 615 bp, Homo sapiens
ttttcaattgttaaaaaaattgaattcaaaaactgtatatataaaatgttacatttttctctaaattaagagtctcaaactccagtgaaattaattttaaaattcttaatatcaaatacgtatattagcagtttttttaagattaaacatagtctatttatttatgaagctgtttggacattttactatttttcaggtgaactatctggattctgcttacctagacaatgtccattggacttttgacaggaattattacactctttatctttcatggtgaaatagttcttattacattagactactggtttaaattttaaaaatattgtaaatgtatgaaamaacaacatatatggagagttctataaattatatacaatgacaaagcttgggagataattattgacaatgttactgatgctatacattagttgaattgctaattaaaaataaatgtcatggtcagtgaggtttcccacttaaaccatgcattgtgtctcctttgggtacaaccatttgattttttaaacgatttttttttctaatccatgcatccattttcgttaatttgatttcttccttttatccttcattacataaagttagttttaccct

SEQ ID NO: 425848 - DNA, 648 bp, Homo sapiens
ttgtcgtgggatcttgagaagaaataagaaaatgaaatattatagaaaatattatattatttaattgtcctgttctaaaacactttctaagcctgcctgtttttttgccaaattaaatyaatatttggatgtagacagcttttcagagtggcagtatcatagtcaaggaagatgacctgaggcacagttattgctaattggacatagaaaccaccttcactcatatataaaaattattatgtgctacactagatatttcaggagaattgataaaagaaagactgttgtattcatatgcttgtcttcctggctagaggatctgttttaattaatcagctcatggagtttggaaaatatttatagtatacatagctgagtgttcatgtaaattttgaatacattcatacatcttttttttaaaaaaagattgaacttcaaaaccattttcttacatactcagtagaagttgttatgagccaacattttttgtgagctatactattttaaacatctaaagtaaattatttgacatataaaaagacttcttcatttaaaaatatatcttttaaaaataattttacaagtgatggcatctcattttagaagaagaggcatcaatgacagcagttacagtaactcgatgctgaa

SEQ ID NO: 425849 - DNA, 648 bp, Homo sapiens
ttgtcgtgggatcttgagaagaaataagaaaatgaaatattatagaaaatattatattatttaattgtcctgttctaaaacactttctaagcctgcctgtttttttgccaaattaaattaatatttggatgtagacagcttttcagagtggcagtatcatagtcaakgaagatgacctgaggcacagttattgctaattggacatagaaaccaccttcactcatatataaaaattattatgtgctacactagatatttcaggagaattgataaaagaaagactgttgtattcatatgcttgtcttcctggctagaggatctgttttaattaatcagctcatggagtttggaaaatatttatagtatacatagctgagtgttcatgtaaattttgaatacattcatacatcttttttttaaaaaaagattgaacttcaaaaccattttcttacatactcagtagaagttgttatgagccaacattttttgtgagctatactattttaaacatctaaagtaaattatttgacatataaaaagacttcttcatttaaaaatatatcttttaaaaataattttacaagtgatggcatctcattttagaagaagaggcatcaatgacagcagttacagtaactcgatgctgaa

SEQ ID NO: 425850 - DNA, 648 bp, Homo sapiens
ttgtcgtgggatcttgagaagaaataagaaaatgaaatattatagaaaatattatattatttaattgtcctgttctaaaacactttctaagcctgcctgtttttttgccaaattaaattaatatttggatgtagacagcttttcagagtggcagtatcatagtcaaggaagatgacctgaggcacarttattgctaattggacatagaaaccaccttcactcatatataaaaattattatgtgctacactagatatttcaggagaattgataaaagaaagactgttgtattcatatgcttgtcttcctggctagaggatctgttttaattaatcagctcatggagtttggaaaatatttatagtatacatagctgagtgttcatgtaaattttgaatacattcatacatcttttttttaaaaaaagattgaacttcaaaaccattttcttacatactcagtagaagttgttatgagccaacattttttgtgagctatactattttaaacatctaaagtaaattatttgacatataaaaagacttcttcatttaaaaatatatcttttaaaaataattttacaagtgatggcatctcattttagaagaagaggcatcaatgacagcagttacagtaactcgatgctgaa

SEQ ID NO: 425851 - DNA, 648 bp, Homo sapiens
ttgtcgtgggatcttgagaagaaataagaaaatgaaatattatagaaaatattatattatttaattgtcctgttctaaaacactttctaagcctgcctgtttttttgccaaattaaattaatatttggatgtagacagcttttcagagtggcagtatcatagtcaaggaagatgacctgaggcacagttattgctaattggacatagaaaccaccttcactcatatataaaaattattatgtgctayactagatatttcaggagaattgataaaagaaagactgttgtattcatatgcttgtcttcctggctagaggatctgttttaattaatcagctcatggagtttggaaaatatttatagtatacatagctgagtgttcatgtaaattttgaatacattcatacatcttttttttaaaaaaagattgaacttcaaaaccattttcttacatactcagtagaagttgttatgagccaacattttttgtgagctatactattttaaacatctaaagtaaattatttgacatataaaaagacttcttcatttaaaaatatatcttttaaaaataattttacaagtgatggcatctcattttagaagaagaggcatcaatgacagcagttacagtaactcgatgctgaa

SEQ ID NO: 425852 - DNA, 553 bp, Homo sapiens
aattttttaaacatgcaattgttttgcttgtttgcttcacctggcagctctctctaaaacctgagtcactattccttttgaactctgctaaaaacattatcatcttctccaggagctgaggtgaaagatgatgttttattctactgctttagtaggaaggaattattgtctaattcgagtgcaaaatatcttgtaccattgrtcatctttctggcaatagacatcacagtctgcttcctaaccatttcatctcaggcattgtgctgattaccccttcaggactctggagtccaccgttttgctgtaatttctttaaccacctgccaactcactaagggcatttgcttagtgtttaatgttcacctcccaaatcagtctttttaattgaataggctatttttttcacatttcatattcaagcttaacttcccttttgtaatataggcagatgttaagatcacgtcagcactgctgtgcaaaggtttatggcatatattattttatatctttgttccactgtctgtcctaaaataaaaatcaattggttttttgt

SEQ ID NO: 425853 - DNA, 553 bp, Homo sapiens
aattttttaaacatgcaattgttttgcttgtttgcttcacctggcagctctctctaaaacctgagtcactattccttttgaactctgctaaaaacattatcatcttctccaggagctgaggtgaaagatgatgttttattctactgctttagtaggaaggaattattgtctaattcgagtgcaaaatatcttgtaccattgatcatctttctggcaatagacatcacagtctgcttcctaaccatttcatctyaggcattgtgctgattaccccttcaggactctggagtccaccgttttgctgtaatttctttaaccacctgccaactcactaagggcatttgcttagtgtttaatgttcacctcccaaatcagtctttttaattgaataggctatttttttcacatttcatattcaagcttaacttcccttttgtaatataggcagatgttaagatcacgtcagcactgctgtgcaaaggtttatggcatatattattttatatctttgttccactgtctgtcctaaaataaaaatcaattggttttttgt

SEQ ID NO: 425854 - DNA, 553 bp, Homo sapiens
aattttttaaacatgcaattgttttgcttgtttgcttcacctggcagctctctctaaaacctgagtcactattccttttgaactctgctaaaaacattatcatcttctccaggagctgaggtgaaagatgatgttttattctactgctttagtaggaaggaattattgtctaattcgagtgcaaaatatcttgtaccattgatcatctttctggcaatagacatcacagtctgcttcctaaccatttcatctcaggcaytgtgctgattaccccttcaggactctggagtccaccgttttgctgtaatttctttaaccacctgccaactcactaagggcatttgcttagtgtttaatgttcacctcccaaatcagtctttttaattgaataggctatttttttcacatttcatattcaagcttaacttcccttttgtaatataggcagatgttaagatcacgtcagcactgctgtgcaaaggtttatggcatatattattttatatctttgttccactgtctgtcctaaaataaaaatcaattggttttttgt

SEQ ID NO: 425855 - DNA, 553 bp, Homo sapiens
aattttttaaacatgcaattgttttgcttgtttgcttcacctggcagctctctctaaaacctgagtcactattccttttgaactctgctaaaaacattatcatcttctccaggagctgaggtgaaagatgatgttttattctactgctttagtaggaaggaattattgtctaattcgagtgcaaaatatcttgtaccattgatcatctttctggcaatagacatcacagtctgcttcctaaccatttcatctcaggcattgtgctgattaccccttcaggactctggagtccaccgttttgctgtaatttctttaaccacctgccaactcactaagggcatttgcttagtgtttaatgttcrcctcccaaatcagtctttttaattgaataggctatttttttcacatttcatattcaagcttaacttcccttttgtaatataggcagatgttaagatcacgtcagcactgctgtgcaaaggtttatggcatatattattttatatctttgttccactgtctgtcctaaaataaaaatcaattggttttttgt

SEQ ID NO: 425856 - DNA, 489 bp, Homo sapiens
gatctcctagatgatgcagagagaaatagtgattctaggtcagtttattgtactctttaacttaatgagattagttctatcattttatttctgaagcratgttaagttttagttgatgcagtttgtcaagtaaaaaaatatatatattgtttctagtaatccaaacattttataccaagatctgtatagaactttatcaaaggatattttctatgatagttgaattgattgtatttttccttttaattggttaaagtggttaagttcattatttcctactctatctatgaaaatctcaagagtaatttagggattctactaattttgagaggggaggatagggtgatgaaattttgctatgttttttatgaagtatactttaatgtgcttaaagaaattgggtaaaatacttaaatttacttttaattattttttaatattctataatattttacttttaacttaccacacttctccaaaatgtatcat

SEQ ID NO: 425857 - DNA, 489 bp, Homo sapiens
gatctcctagatgatgcagagagaaatagtgattctaggtcagtttattgtactctttaacttaatgagattagttctatcattttatttctgaagcgatgttaagttttagttgatgcagtttgtcaagtaaaaaaatatatatattgtttctagtaatccaaacattttataccaagatctgtatagaactttatcaaaggatattttctatgatagttgaattgattgtatttttccttttaattggttaaagtggttaagttcattatttcctactctatctatgaaratctcaagagtaatttagggattctactaattttgagaggggaggatagggtgatgaaattttgctatgttttttatgaagtatactttaatgtgcttaaagaaattgggtaaaatacttaaatttacttttaattattttttaatattctataatattttacttttaacttaccacacttctccaaaatgtatcat

SEQ ID NO: 425858 - DNA, 489 bp, Homo sapiens
gatctcctagatgatgcagagagaaatagtgattctaggtcagtttattgtactctttaacttaatgagattagttctatcattttatttctgaagcgatgttaagttttagttgatgcagtttgtcaagtaaaaaaatatatatattgtttctagtaatccaaacattttataccaagatctgtatagaactttatcaaaggatattttctatgatagttgaattgattgtatttttccttttaattggttaaagtggttaagttcattatttcctactctatctatgaaaatctcaagrgtaatttagggattctactaattttgagaggggaggatagggtgatgaaattttgctatgttttttatgaagtatactttaatgtgcttaaagaaattgggtaaaatacttaaatttacttttaattattttttaatattctataatattttacttttaacttaccacacttctccaaaatgtatcat

SEQ ID NO: 425859 - DNA, 457 bp, Homo sapiens
agcaatgtattttcccacagttctggagttgagaaatctgacgtcaaggtgtcagcgggtttggtttttgctgaggcctctccttggcttgcagatggctgccttcttgctgtgtgttcacrtgattgtctcttagtgtgtgcatttgtctggtgtctctgtctgtctttttaaaaggacaccagatatattggattagaactcatcttattgacctaatttttacttaattgcttctttaaatatcttgtctccaaatgggttgcattctgtggtactcagatttagggattcaacatatgaattggggggaacacaaatcagccaatatcacatgaattctttttctagcaaagaaagcatccattctattaggagtcttcctttacttaatagaaaaccagcagaacagtactatgtttatacaaatataaattaatttacttattcctgtatg

SEQ ID NO: 425860 - DNA, 457 bp, Homo sapiens
agcaatgtattttcccacagttctggagttgagaaatctgacgtcaaggtgtcagcgggtttggtttttgctgaggcctctccttggcttgcagatggctgccttcttgctgtgtgttcacgtgattgtctcttagtgtgtgcatttgtctggtgtctctgtctgtctttttaaaaggacaccagatatattggattagaactcatcttattgacctaatttttacttaattgcttctttaaatatcttgtctccaaatgggttgcattctgtggtactcagatttagggattcaayatatgaattggggggaacacaaatcagccaatatcacatgaattctttttctagcaaagaaagcatccattctattaggagtcttcctttacttaatagaaaaccagcagaacagtactatgtttatacaaatataaattaatttacttattcctgtatg

SEQ ID NO: 425861 - DNA, 554 bp, Homo sapiens
gaaaacctcatcgtctcagcccaaaatctccttaagttgataagcaacttcagcaaagtcccaggatacaaaatcaatatgcaaawatcacaagcattcctatacaccaataacagacaaacagagagccaaatcatgagtgaactcccattcacaattgctacgaagagagtaaaatacctaggaatccaacttacaagggttgtgaaggatctcttcaaggaagtcactttctgtattgtacttcgcttaatacttaagcatccaggaaagttttgttagatattgcagtcaggtctaggctaagtattttaaattttttatttttattttatttggttataagcggtgttctgatcagtgacagaagtgacttggttccacctttaacagaacgttggtgtagagcaaatcagcacaatcttctcctctatgaacatgtgtgttgactcatgcatactcaagaaaccctgtgaagcagccttgaaaagagatttttctggccaaggtaataagcaaatacttgtatagatgttatgactgtgcaattggtt

SEQ ID NO: 425862 - DNA, 554 bp, Homo sapiens
gaaaacctcatcgtctcagcccaaaatctccttaagttgataagcaacttcagcaaagtcccaggatacaaaatcaatatgcaaaaatcacaagcattcctatacaccaataacagacaaacagagagccaaatcatgagtgaactcccattcacaattgctacgaagagagtaaaatacctaggaatccaacttacaagggwtgtgaaggatctcttcaaggaagtcactttctgtattgtacttcgcttaatacttaagcatccaggaaagttttgttagatattgcagtcaggtctaggctaagtattttaaattttttatttttattttatttggttataagcggtgttctgatcagtgacagaagtgacttggttccacctttaacagaacgttggtgtagagcaaatcagcacaatcttctcctctatgaacatgtgtgttgactcatgcatactcaagaaaccctgtgaagcagccttgaaaagagatttttctggccaaggtaataagcaaatacttgtatagatgttatgactgtgcaattggtt

SEQ ID NO: 425863 - DNA, 590 bp, Homo sapiens
cacaattgctacgaagagagtaaaatacctaggaatccaacttacaagggttgtgaaggatctcttcaaggaagtcactttctgtattgtacttcgcttaatacttaagcmtccaggaaagttttgttagatattgcagtcaggtctaggctaagtattttaaattttttatttttattttatttggttataagcggtgttctgatcagtgacagaagtgacttggttccacctttaacagaacgttggtgtagagcaaatcagcacaatcttctcctctatgaacatgtgtgttgactcatgcatactcaagaaaccctgtgaagcagccttgaaaagagatttttctggccaaggtaataagcaaatacttgtatagatgttatgactgtgcaattggtttgcaagaagacctcagaaatgacttgcagaagagaattttgaaaaaaaaaatttaactggctgtaacacaatagaaagccagtcattaattgtaataactctctagtgttgatactctaaggtatgagcatacctcagtattaggaccagttcatattatactaaaaaataaatattgtcttaaatga

SEQ ID NO: 425864 - DNA, 590 bp, Homo sapiens
cacaattgctacgaagagagtaaaatacctaggaatccaacttacaagggttgtgaaggatctcttcaaggaagtcactttctgtattgtacttcgcttaatacttaagcatccaggaaagttttgttagatattgcagtcaggtctaggctaagtattttaaattttttatttttattttatttggttataagcggtgytctgatcagtgacagaagtgacttggttccacctttaacagaacgttggtgtagagcaaatcagcacaatcttctcctctatgaacatgtgtgttgactcatgcatactcaagaaaccctgtgaagcagccttgaaaagagatttttctggccaaggtaataagcaaatacttgtatagatgttatgactgtgcaattggtttgcaagaagacctcagaaatgacttgcagaagagaattttgaaaaaaaaaatttaactggctgtaacacaatagaaagccagtcattaattgtaataactctctagtgttgatactctaaggtatgagcatacctcagtattaggaccagttcatattatactaaaaaataaatattgtcttaaatga

SEQ ID NO: 425865 - DNA, 590 bp, Homo sapiens
cacaattgctacgaagagagtaaaatacctaggaatccaacttacaagggttgtgaaggatctcttcaaggaagtcactttctgtattgtacttcgcttaatacttaagcatccaggaaagttttgttagatattgcagtcaggtctaggctaagtattttaaattttttatttttattttatttggttataagcggtgttctgatcagtgacagaagtgacttggttccacctttaacagaacgttggtgtagagcaaatcagcacaatcttctcctctatgaacatgtgtgttgactcatgcatactcaagaaaccctgtgaagcagccttgaaaagagatttttctggccaaggtaataagcaaatacttgtatagatgttatgactgtgcaawtggtttgcaagaagacctcagaaatgacttgcagaagagaattttgaaaaaaaaaatttaactggctgtaacacaatagaaagccagtcattaattgtaataactctctagtgttgatactctaaggtatgagcatacctcagtattaggaccagttcatattatactaaaaaataaatattgtcttaaatga

SEQ ID NO: 425866 - DNA, 565 bp, Homo sapiens
tatctttttcaaaatgcagctaaacccacaagctacagagatatcatgacctataaagttcagagctgtgwtgattctttctaacaattacccacagctattatgatttcctcccatcactaaaactgtcattgctaagataattgctccagtttgagaaggtagaagatttaacaagtaactaatatgtaaaggatagagagaagaaggggagaggttgatatgatccctgtcctttcacactgttaatatgccaggtgataaaatgtctcattcactctgaaacattatcactatacaggcactccttacagtgtttgttctcatatatgtcctcgtatttttttttccttttaaagtggctctgagaaatggctaatgcacaatctaattatgtgataataaatgttaatgacagtattatcagatgataactaggcttcattaatgtgtctcattatgattctcagtcccttgtggaagattgtgaagaaaggaccttagatattccagattatatttgaatgtagtagttacagagcccatatccagggagaaaggaaga

SEQ ID NO: 425867 - DNA, 565 bp, Homo sapiens
tatctttttcaaaatgcagctaaacccacaagctacagagatatcatgacctataaagttcagagctgtgttgattctttctaacaattacccacagctattatgatttcctcccatcactaaaactgtcattgctaagataattgctccagtttgagaaggtagaagatttaacaagtaactaatatgtaaaggatagagagaagaaggggagaggttgatatgatccctgtcctttcacactgttaatatgccaggtgataaaatgtctcattcactcygaaacattatcactatacaggcactccttacagtgtttgttctcatatatgtcctcgtatttttttttccttttaaagtggctctgagaaatggctaatgcacaatctaattatgtgataataaatgttaatgacagtattatcagatgataactaggcttcattaatgtgtctcattatgattctcagtcccttgtggaagattgtgaagaaaggaccttagatattccagattatatttgaatgtagtagttacagagcccatatccagggagaaaggaaga

SEQ ID NO: 425868 - DNA, 565 bp, Homo sapiens
tatctttttcaaaatgcagctaaacccacaagctacagagatatcatgacctataaagttcagagctgtgttgattctttctaacaattacccacagctattatgatttcctcccatcactaaaactgtcattgctaagataattgctccagtttgagaaggtagaagatttaacaagtaactaatatgtaaaggatagagagaagaaggggagaggttgatatgatccctgtcctttcacactgttaatatgccaggtgataaaatgtctcattcactctgaaacattatcactatacaggcactccttacagtgtttgttctcatatatgtcctcrtatttttttttccttttaaagtggctctgagaaatggctaatgcacaatctaattatgtgataataaatgttaatgacagtattatcagatgataactaggcttcattaatgtgtctcattatgattctcagtcccttgtggaagattgtgaagaaaggaccttagatattccagattatatttgaatgtagtagttacagagcccatatccagggagaaaggaaga

SEQ ID NO: 425869 - DNA, 361 bp, Homo sapiens
agacccaataggcccactataacctttatatatcattatatatawttatattgatcaattttacagcttccagtttaaataaaggttcaatcagtctcagtagatgcattttctatatattataggtatctgtatataattacatatatgtgtatatatattatattgaatattgacagattataatcacttacatttatggggtatagagttatgctttaaaatatgcatccaatttggaatgactaaatcaagttcatacccatcgcctctaataattaccatttatttctcctgtctcacagaaacattgtactctttcaacaatatctcttcattcctctcactcctaaatctctgg

SEQ ID NO: 425870 - DNA, 361 bp, Homo sapiens
agacccaataggcccactataacctttatatatcattatatatatttatattgatcaattttacagcttccagtttaaataaaggttcaatcagtctcagtagatgcattttctatatattataggtatctgtatataattacatatatgtgtatatatattatattgaatattgacagattataatcacttacatttatrgggtatagagttatgctttaaaatatgcatccaatttggaatgactaaatcaagttcatacccatcgcctctaataattaccatttatttctcctgtctcacagaaacattgtactctttcaacaatatctcttcattcctctcactcctaaatctctgg

SEQ ID NO: 425871 - DNA, 361 bp, Homo sapiens
agacccaataggcccactataacctttatatatcattatatatatttatattgatcaattttacagcttccagtttaaataaaggttcaatcagtctcagtagatgcattttctatatattataggtatctgtatataattacatatatgtgtatatatattatattgaatattgacagattataatcacttacatttatggggtatagagttatgctttaawatatgcatccaatttggaatgactaaatcaagttcatacccatcgcctctaataattaccatttatttctcctgtctcacagaaacattgtactctttcaacaatatctcttcattcctctcactcctaaatctctgg

SEQ ID NO: 425872 - DNA, 361 bp, Homo sapiens
agacccaataggcccactataacctttatatatcattatatatatttatattgatcaattttacagcttccagtttaaataaaggttcaatcagtctcagtagatgcattttctatatattataggtatctgtatataattacatatatgtgtatatatattatattgaatattgacagattataatcacttacatttatggggtatagagttatgctttaaaatatgcatccaatttggaatgactaaatcaagttcatacccatcgcctctaataattaccatttatttctcctgtctcacagaaacattgyactctttcaacaatatctcttcattcctctcactcctaaatctctgg

SEQ ID NO: 425873 - DNA, 557 bp, Homo sapiens
ggttatttgggttgtaaggattgaaaacatacctagatcatataaatttgtgaaggttttgccatcacaagcgttatagggaataatgaacatcaactatcctacagctaaacctaatgaagaccaaattgcctccaaggtcaaaacaatatttctttgtgctcaaaagtggttcayataattgatgctgcattgatgctgtctatagagattctagttttctccacattttctctatttttcaatttcctttcttttcactggggtctattgttctttaacagaagtaatggccttttgtaaatatataattttcacgttgtaagcattctttccaagctagctgcccatcatcacgttttggctagtcccagtctctgctcatagaacgcttgtccacactctaaattctctccgttctccatagcccccactcatctaattcctatagtcttttaactcaaagccttcaacttatgtacagctttctctgcctcacgtttcaagcttaatgcatcatcttaattcatctttcgacatctatttctactacatgc

SEQ ID NO: 425874 - DNA, 557 bp, Homo sapiens
ggttatttgggttgtaaggattgaaaacatacctagatcatataaatttgtgaaggttttgccatcacaagcgttatagggaataatgaacatcaactatcctacagctaaacctaatgaagaccaaattgcctccaaggtcaaaacaatatttctttgtgctcaaaagtggttcacataattgatgctgcattgatgctgtctatagagattctagttttctccacattttctctatttttcaatttcctttcttttcactggggtctattgttctttaacagaagtaatggccttttgtaaatatataattttcacgttgtaagcattctttccaagctagctgcccatcatcacgttttggctagtcccagtctctgctcatagaacgcttgtccacactctaaattctctccgttctccatagcccccactcatctaattcctatagtcttttaactcaaagccttcaacttatgtacagctttctctgcctcaygtttcaagcttaatgcatcatcttaattcatctttcgacatctatttctactacatgc

SEQ ID NO: 425875 - DNA, 651 bp, Homo sapiens
ttgcaaatttgtgaaaaccagctattgcagaaggaaatatgtatggtctaagtagttcagtgattctcaggatgtgagcctaggattgtcattatcaagagtacctgggactctatgagaactgtagaatcttctgtcacaccccagggattcctgcatcagaaactacaaggagctggggccaaacaatctgtgcttcaacaaaccctctgcgtgattccaatgcacattcaagtttgagaccccttagtctagtttctctggacttttctcttcattcaattctatgccatctttctgtccaagccttggtgtccctttgtggacaccctttataagaatagtcatttcctgagtcaggaactagatgaccatctatattcttgattgaccagcaaatttaaacatctcctcgatatcttgatattgtatgtcccacyctcccaaagtagatttataaatactaaatttctcacactttcttctccctagtaagtgggcaatgtggcccaggttatgccaactagatgcatttgaatgagaactgcatgtggaaagggcagcctgaagcaatgaccacttgggaaagcacagtggtggggatatccaggacttagggagctgtgacagagcttctgtagcctttttaat

SEQ ID NO: 425876 - DNA, 374 bp, Homo sapiens
gaggaaaaagtccccagggcatttcagagatcttcacggcagcacctcccatcacagtcctaaaggcctagaagggaaaaattgtttcttgggttgggcccaggtcctcggtcctctgtgcagccttgggacgtgaagaccygtgtcccagcagctccagctccagccatggctcaggccactgcttcagagggtgcaagccccaagccttggcagcttccacatactgctgggcctgcaggtgtgcagaagacaagaattgaggtttaggaacctccacctagatttcagataatatagggaagtgcctggatatccagggagaagtgtgctgcaggaatggagctgtcatggaaacctctatgagggcagtg

SEQ ID NO: 425877 - DNA, 479 bp, Homo sapiens
taggcagcacgttagtattccattctgaattgatgagaaattgaatccatggggtgctttgcagacagcatgtagccgaagaaaacaatagttttctttccttggtttccctttgccaataaggattatttccttgctgaaacaatgttgctaatgatgttgttctgtgtagcctatgtattttggagtagaaaaataatgtaagaccccctggggtgaaattttcctgcactgaggtcaataaataaataartaaacctgacaaacatacattagtgtacaaacactaatgctttactgaaactgaaaagagtctctccaaagactttaaagatgctgatatttaacagataacaaaactatttgttaaaatttcagaagaggcagtaagagtgatctattttctgattaattaaccctatctaaaatataaaatccagattgaaacaacaaatccagggttaccatattcaaaatga

SEQ ID NO: 425878 - DNA, 479 bp, Homo sapiens
taggcagcacgttagtattccattctgaattgatgagaaattgaatccatggggtgctttgcagacagcatgtagccgaagaaaacaatagttttctttccttggtttccctttgccaataaggattatttccttgctgaaacaatgttgctaatgatgttgttctgtgtagcctatgtattttggagtagaaaaataatgtaagaccccctggggtgaaattttcctgcactgaggtcaataaataaataaataaacctgacaaacatacattagtgtacaaacactaatgctttactgaaactgaaaagagtctctccaaagactttaaagrtgctgatatttaacagataacaaaactatttgttaaaatttcagaagaggcagtaagagtgatctattttctgattaattaaccctatctaaaatataaaatccagattgaaacaacaaatccagggttaccatattcaaaatga

SEQ ID NO: 425879 - DNA, 479 bp, Homo sapiens
taggcagcacgttagtattccattctgaattgatgagaaattgaatccatggggtgctttgcagacagcatgtagccgaagaaaacaatagttttctttccttggtttccctttgccaataaggattatttccttgctgaaacaatgttgctaatgatgttgttctgtgtagcctatgtattttggagtagaaaaataatgtaagaccccctggggtgaaattttcctgcactgaggtcaataaataaataaataaacctgacaaacatacattagtgtacaaacactaatgctttactgaaactgaaaagagtctctccaaagactttaaagatgctgatatttaacagataacaaaactatttgttaaaatttcagaagaggcagtaagagtgakctattttctgattaattaaccctatctaaaatataaaatccagattgaaacaacaaatccagggttaccatattcaaaatga

SEQ ID NO: 425880 - DNA, 479 bp, Homo sapiens
taggcagcacgttagtattccattctgaattgatgagaaattgaatccatggggtgctttgcagacagcatgtagccgaagaaaacaatagttttctttccttggtttccctttgccaataaggattatttccttgctgaaacaatgttgctaatgatgttgttctgtgtagcctatgtattttggagtagaaaaataatgtaagaccccctggggtgaaattttcctgcactgaggtcaataaataaataaataaacctgacaaacatacattagtgtacaaacactaatgctttactgaaactgaaaagagtctctccaaagactttaaagatgctgatatttaacagataacaaaactatttgttaaaatttcagaagaggcagtaagagtgatctattttctgattaattaaccctatctaaaatataaaatccagaytgaaacaacaaatccagggttaccatattcaaaatga

SEQ ID NO: 425881 - DNA, 621 bp, Homo sapiens
ttatcaaaagtctttttttatatctgttgaaataatcatatggttttactgtctaattctgtttatgtggtgaatcatatttatagatttgtatgggttgaaacaactttgcatcacaggaataaaaccttcttgatcatggtgaattaattttttgatgtgctgctggatacagtatgctagtattttgttgagtatttttatggctatgttcatcagggatactggcaggaagttttgtttttgattttttttttcactgtgtctctgccagattgtggtatcaggttgatgctggtttcataaaattagttaggaaggagtctccctcaattttttggaatagtttcagtaggattgatrtcagttcttttttatacatatgagagaatttgactgtaaatccatctggtccagggctttttttggttggtaggttttttgttactgatacaatttcagaacttgatattggtctattcaggattttattttttttcctagttcaattctgaggtattatctgtttccagaaatatatatatattgtctccagattttgtaatttttgtgcatagagttgttcatagttgtctgagatgttttgtatttctgaaaaat

SEQ ID NO: 425882 - DNA, 621 bp, Homo sapiens
ttatcaaaagtctttttttatatctgttgaaataatcatatggttttactgtctaattctgtttatgtggtgaatcatatttatagatttgtatgggttgaaacaactttgcatcacaggaataaaaccttcttgatcatggtgaattaattttttgatgtgctgctggatacagtatgctagtattttgttgagtatttttatggctatgttcatcagggatactggcaggaagttttgtttttgattttttttttcactgtgtctctgccagattgtggtatcaggttgatgctggtttcataaaattagttaggaaggagtctccctcaattttttggaatagtttcagtaggattgatgtcagttcttttttatacatatgagagaatttractgtaaatccatctggtccagggctttttttggttggtaggttttttgttactgatacaatttcagaacttgatattggtctattcaggattttattttttttcctagttcaattctgaggtattatctgtttccagaaatatatatatattgtctccagattttgtaatttttgtgcatagagttgttcatagttgtctgagatgttttgtatttctgaaaaat

SEQ ID NO: 425883 - DNA, 621 bp, Homo sapiens
ttatcaaaagtctttttttatatctgttgaaataatcatatggttttactgtctaattctgtttatgtggtgaatcatatttatagatttgtatgggttgaaacaactttgcatcacaggaataaaaccttcttgatcatggtgaattaattttttgatgtgctgctggatacagtatgctagtattttgttgagtatttttatggctatgttcatcagggatactggcaggaagttttgtttttgattttttttttcactgtgtctctgccagattgtggtatcaggttgatgctggtttcataaaattagttaggaaggagtctccctcaattttttggaatagtttcagtaggattgatgtcagttcttttttatacatatgagagaatttgactgtaaatccatctggtmcagggctttttttggttggtaggttttttgttactgatacaatttcagaacttgatattggtctattcaggattttattttttttcctagttcaattctgaggtattatctgtttccagaaatatatatatattgtctccagattttgtaatttttgtgcatagagttgttcatagttgtctgagatgttttgtatttctgaaaaat

SEQ ID NO: 425884 - DNA, 621 bp, Homo sapiens
ttatcaaaagtctttttttatatctgttgaaataatcatatggttttactgtctaattctgtttatgtggtgaatcatatttatagatttgtatgggttgaaacaactttgcatcacaggaataaaaccttcttgatcatggtgaattaattttttgatgtgctgctggatacagtatgctagtattttgttgagtatttttatggctatgttcatcagggatactggcaggaagttttgtttttgattttttttttcactgtgtctctgccagattgtggtatcaggttgatgctggtttcataaaattagttaggaaggagtctccctcaattttttggaatagtttcagtaggattgatgtcagttcttttttatacatatgagagaatttgactgtaaatccatctggtccagggctttttttggttggtaggttttttgttactgatacaatttcagaacttgatattggtctattcaggattttattttttttcctagttcaattctgaggtattatctgtttccagaaatatatatatattgtctccagattttgtaatttttgtgcatagagttgttcatagtwgtctgagatgttttgtatttctgaaaaat

SEQ ID NO: 425885 - DNA, 606 bp, Homo sapiens
gcatgtgtgtgctttctctggagatactcttcctccttaagaagaaatgttatacttattcctcagaggcttattctaagggaatgatgaaagcaaatgggaacatttatgtgtggtttgagttgttaattttgttaaatatttgcatccctgcctatgggttccagaagaaaacagaatgagcatgtttaaataaatgaataaattagaatacatgaatttagatgacttaatcttattaaaaattygggatataggataaattgtaagcagaacatggatgatttaatttttgttgtctacaacgggagaatatttcactccctgatcttgctgtcttagaagggtattaaatgcagtgtagagcttttgggaagcagcgttgaacctggatattccactcacttgccaatattttatgaccgagcagatgtgtacacaaatcacacctgttctagtcccagaagctctgcttcagtcaatcactttaaaataacatctgtctctaagatacaaaatgtactaaagaatcttgaaggctggacaatgaaggtgtcagcagctccccgaccaagggcacagctgaaacatatggtcacattttcc

SEQ ID NO: 425886 - DNA, 541 bp, Homo sapiens
tatttattttgtttctttttcttgcctaatcacactggctaaaacttccaatactatgttgaatggaaacaacaggaacaagcatccttgtcttgttcctgatcttagaggaaaagctttcagtctttcacccttgaataggatattaatgatgaaattttcatatctggcctttgttatattgaggtagtttcatttattcttatttcaatgagtgattttatcatgaaagtttgtcgatcttgccaaatggggttttttttgcatcaattgagataatcatgtgwttttgtcctttattccgttaatgagttgtattacatttattgattatcatatattgagccatagtgtattctagaaataaaaacatcctttggttatggtacattatccttttaatatgctattgaattcagtttgctagtattttgttaaggatcattgcattaatattcatcagggatattggtctttagttttctttttttatggtgtctttaccagtctttggaatcaggttaataatattggcctcata

SEQ ID NO: 425887 - DNA, 508 bp, Homo sapiens
taaaacttccaatactatgttgaatggaaacaacaggaacaagcatccttgtcttgttcctgatcttagaggaaaagctttcagtctttcacccttgaataggatattaatgatgaaattttcatatctggcctttgttatattgaggtagtttcatttattcttatttcaatgagtgattttatcatgaaagtttgtcgatcttgccaaatggggttttttttgcatcaattgagataatcatgtgattttgtcctttattccgttaatgagttgtattacatttattgattatcatatattgagccatagtgtattctagaaataaaaacatcctttggttatggkacattatccttttaatatgctattgaattcagtttgctagtattttgttaaggatcattgcattaatattcatcagggatattggtctttagttttctttttttatggtgtctttaccagtctttggaatcaggttaataatattggcctcataaaatga

SEQ ID NO: 425888 - DNA, 514 bp, Homo sapiens
gagccctgacaagggaaggccaattgtaagagacacagcctactgcttctgggccagttgcatcctttcttgatttttggctctagtctctgtcattctctgttgagttagcaaaggggaaaataccagaggacaaacagtcctttgggtggaagatagagaaatggataatgtgtttctgacrtgaattcctttttctcttttcttctgactactgctcaaggcttttaacgagctgaagttaaaaaaaaaaaaggtagtggatttcataaggactgacatttggcacagtgtaggtcctggtccgatgcccagataggtatctgtggtactgaaagagttggttgaggagtgtaggggaaggaagcaaagggttggttgaggagtgtaggggaaggaagcaaagagagaccagtgaaataaaaataaaacaaattattaaatatgaaatattataccaggttacatttatagcaagcctcctgaaaatctgctatgtttggaaagtaaactt

SEQ ID NO: 425889 - DNA, 514 bp, Homo sapiens
gagccctgacaagggaaggccaattgtaagagacacagcctactgcttctgggccagttgcatcctttcttgatttttggctctagtctctgtcattctctgttgagttagcaaaggggaaaataccagaggacaaacagtcctttgggtggaagatagagaaatggataatgtgtttctgacatgaattcctttttctcttttcttctgactactgctcaaggcttttaacgagctgaagttaaaaaaaaaaaaggtagtggatttcataaggactgacatttggcacagtgtaggtcctggtccgatgcccagataggtatctgtggtactgaaagagttggttgaggagtgtaggggaaggaagcaaagggttggttgaggagtgtaggggaaggaagcaaagagagaccagtgaaataaaaataaaacaaattattaaatatgraatattataccaggttacatttatagcaagcctcctgaaaatctgctatgtttggaaagtaaactt

SEQ ID NO: 425890 - DNA, 560 bp, Homo sapiens
gcccagctttttcggtggggggctcataaataaaactgtgtgtgttctagtttactctgttacctcatctagttcctttaggtgattagaaaatgccgtattagcaaatataaaaaggtttacttttgtgtttttacatgtgaaatcaatggccagttctataatgttaacatatcagacccttaattatatattaactcccattttgatagtttgtatagaaaaatcagagttgacttgaattatttgaacttgcatacgctttttcaagatacgtaacgtgttgtaaattagaagagtgttggtgttttcggaacacatgcatatgcttgctgtctcagggcagccttgttgggcatttggtgtcagacataccttattytgagggccttggcatcaaggcagattgctcagagagggggtctctctgcatatatgtctaagggagacatttagggaagtctcatgccatcctatctttctttctttctttttttttttttttttttttttttgagacagggtcttgctccattgcccaggctggagtgcagtgactc

SEQ ID NO: 425891 - DNA, 555 bp, Homo sapiens
ttagtttagttaatagagctcacaacatgccacttggctggggccagacatcttatgatccaagttaagtctagggcctctgtgttgcacaactccagggggctctattcatattatactctgtgtaaatggcgcccctggatttatgcagtgtacacactacaccatrtaatggggcaaagtcttgttcagtcaccacccatcaagtttacaccaagcaaatttgccaaatgaccaacttatcaggtttatcaattttacttacatatttattagccctatcaggaatattttcatagttctatcagctttagattttaagtttaagaccatctaaaagtaaatcagaatttagctaaaatgatcttctatattaagaagaaaatatggactaaaggattcccataggagatgctgaaattttgaaaagttgaacatcttgtgaaagcccatagtgaatttaacattcttattaaattcactattagcaaattttgtaaattcatgtaaatctgatatgtcagattattctataagttagctttcagaaaactg

SEQ ID NO: 425892 - DNA, 555 bp, Homo sapiens
ttagtttagttaatagagctcacaacatgccacttggctggggccagacatcttatgatccaagttaagtctagggcctctgtgttgcacaactccagggggctctattcatattatactctgtgtaaatggcgcccctggatttatgcagtgtacacactacaccatgtaatggggcaaagtcttgttcagtcaccacccatcaagtttacaccaagcaaatttgccaaatgaccaacttatcaggtttatcaattttacttacatatttattagccctatcaggaatattttcatagttctatcagctttagattttaagtttaagaccatctaaaagtaaatcagaatttagctaaaatgatcttctatattaagaagaaaatatggactaaaggattcccataggagatgctgaaattttgaaaagttgaacatcttgtgaaagcccatmgtgaatttaacattcttattaaattcactattagcaaattttgtaaattcatgtaaatctgatatgtcagattattctataagttagctttcagaaaactg

SEQ ID NO: 425893 - DNA, 555 bp, Homo sapiens
ttagtttagttaatagagctcacaacatgccacttggctggggccagacatcttatgatccaagttaagtctagggcctctgtgttgcacaactccagggggctctattcatattatactctgtgtaaatggcgcccctggatttatgcagtgtacacactacaccatgtaatggggcaaagtcttgttcagtcaccacccatcaagtttacaccaagcaaatttgccaaatgaccaacttatcaggtttatcaattttacttacatatttattagccctatcaggaatattttcatagttctatcagctttagattttaagtttaagaccatctaaaagtaaatcagaatttagctaaaatgatcttctatattaagaagaaaatatggactaaaggattcccataggagatgctgaaattttgaaaagttgaacatcttgtgaaagcccatagtgaatttaacattcttattaaattcactattagcaaattttgtaaattcatgtaaatytgatatgtcagattattctataagttagctttcagaaaactg

SEQ ID NO: 425894 - DNA, 525 bp, Homo sapiens
tttaaaacttcaagctttagacatttgaacattctcccccgcccctgccgctgcccccaggctcaagcaatcctcctgcctcagcctcccaaagtggacatttgaacattttaaagcttcaataagtgagtttgctgattcagtttgggtacaacattaattgggcgttttaaaccttacatggtccaaagtcgaggtctttgaggaaaagataaccaaggcagctttgtggacayaatggttgaagctctgggaatcttcagacagtctccattaaaatgtaaattcccaggagaaaaggtctgattattccagtttcttcctagatcaattcttagtccctgattgctgaacaaaaatcaggatattaatccaagtcagggtaggttgaattatcaacaatgagaacagttaagagttgggatcatttttttggaggcggtgggggcgggtggacagggttgttggtcaaaatactgctgttcagacaaaagaatctacccaggtgccccaaatggaaagcaa

SEQ ID NO: 425895 - DNA, 469 bp, Homo sapiens
aaaatgagttcaccaaagatgtatgaatttgtttctgggctctccatcttgttcaattggtctgtgtatctgttttcattctagtattacactgttttggttactatagctctgtggtataatctgaagtcaggtaatgtgattcttccagttttctttttttttgctcaggatagctttggctaatctaggtcttttgtgttccatataaattttaggattcttttttctatttctgtgaaaaatgtaattggtatttttataggkattgcattgaatcagtagattgctttggctagtacagacattttaacaatattgattcttccagttcatgaacatggaatatctattattttgtgtcctcttcaatttcttttatcaatgtttcatagttttcattgagagatctttcacttctttggttaaattaattcctaggtaattaattttatatgcacttattgta

SEQ ID NO: 425896 - DNA, 562 bp, Homo sapiens
accgaacgcagggtaggggaggcgagcaggcgaggaggagggaaggggacgggaggggcggagctctcgcggccgcggggctttgtgtagagtcaaggccgggatasaaattttgcctcgcgggggacgggtcgagggggtaggaggccgacgcggggcaccccaaacctgcgttgccacgaatggtgggcgggagaagggagagaatgggccgcccccttcgccgccgccaccaccaaggcggggtaggccggcgccgtccccagcggcggccaccttcgaggctgcggactgcacggccgaagggggagaggcaggagacaagacgggcgggccccctgattcccgcccgcaggaaccgcgggggctgcgccaggaagagggtctcgttctaactgtgccgggccgggaacgggttaagatgcggccaaatgtcggtccctcctccttcccacccctcagccccggcgcccactcgcgacggcagccgcggaacccagcgcccggccccgcgcgcccaccccgacaccggcccggccgctcaccgtcgtagtagtagcag

SEQ ID NO: 425897 - DNA, 439 bp, Homo sapiens
ttgtagtgtacatatatatacaatattctttcataaaaacatatatttttggctacctcatactagatcaatatgatgaggcagattactacctaagaagtcaccaacttcttattcccacagctgctaaatacactttacaagtagaaaatytgtaaagtctcagcccattcatggagtagaacatagagttctattctatgtttggaacacagagttccaaaagtttccactgtctcaggaagcatatacacagtgtggaatttagatggccttggggcagagggtgggaaaagtcaactgtgagttgagcatagatcctaggaccagtgtgtacaagtggcatccaaagataactgaaaataaaggaggttagaaggtcaactgctgggccgggtgcagtggctcacgcctgtaatctcagcactttgggaggcca

SEQ ID NO: 425898 - DNA, 523 bp, Homo sapiens
gatctacagcttttgagatcttaagatatctacaactttatgtcctgagaaaactctctgttggaagctagccaccatgctggaagaagcccaagctatgaagagaggccacatggaagaaagctaatgctaaaaccctccagttcaacaatccatgctgatttcccgtccaacagccagcaccaactaacaggcatgtgagggagccatcttggatattccagctgatttaactctccagatgaccctgtgatgwccctagtggacatcacacagaacagaacttctcaactaagcccagtcacccatggaattgtgagagaaaataaataattgttattgttttaagccactatgttttgggtagtttgtgactatcaatagataaccaaaacacatagtaatccgtcatgtgggtatatgttgttttatttaacccaacctctactgatggacattcaggttgtttctcctcttttgctattataaacaatgttgtaattaataatgatgtaaatatgtc

SEQ ID NO: 425899 - DNA, 540 bp, Homo sapiens
taccccacacgccaaacccttatttaccaccctgcacacacagatctccattagaagtctggaatgttgatggttgggtaggtattttaacctarcttaacctctatcacaataattaattttaattgcttttcaccttggttacgtgatcccccaactccatggaaatgatataaccttgtaaaaaataaaaaataataataaaaatcttgacatgagcttcttaaagaaacagacgtgagatttgactttagcattcagtaaccaaaggtataagatacccaaaacaaaggaaatgtggtgctttcactgcttgtttttagtgctgccacttctctcccaaggaatgtcgctgccttaaactctgttctgtggcagatacttcctgcccctatacatcaccttcagatgtactatatgatcaagatctttaccatctggccactcctctagctctagtgttccaaatggcttacatttttaatggttctttgtgatctccctgatatagaaatacaggtatgcaaggacatgtgcact

SEQ ID NO: 425900 - DNA, 540 bp, Homo sapiens
taccccacacgccaaacccttatttaccaccctgcacacacagatctccattagaagtctggaatgttgatggttgggtaggtattttaacctagcttaacctctatcacaataattaattttaattgcttttcaccttggttacgtgatcccccaactccatggaaatgatataamcttgtaaaaaataaaaaataataataaaaatcttgacatgagcttcttaaagaaacagacgtgagatttgactttagcattcagtaaccaaaggtataagatacccaaaacaaaggaaatgtggtgctttcactgcttgtttttagtgctgccacttctctcccaaggaatgtcgctgccttaaactctgttctgtggcagatacttcctgcccctatacatcaccttcagatgtactatatgatcaagatctttaccatctggccactcctctagctctagtgttccaaatggcttacatttttaatggttctttgtgatctccctgatatagaaatacaggtatgcaaggacatgtgcact

SEQ ID NO: 425901 - DNA, 494 bp, Homo sapiens
cacactgcatcttagaaggaagcaagcagcacactgcttcccactgtgacccacagcaggtcatttaggccatgctccccatctgacatttgtacctggagtagttgttgtgtcttcatgtgacaggcagggccaaaccaggccactatctttgctgagagcttcttcttggcagactacagtataaacacttggggaaaaggcagttgtaaaagaggagaggaaaggaggggaaggtgtgtggagcagtcacagttctgagttggaatcctccagggaggatcacccttaaatcatagtgcatcagcctacaagtgtgagacctaacagagccaaggtggggggtacatggaaaaaacagggatggaaggaggtagagacagtgcccagcatgatgcaggagggctggggtccttgaaggcagccagccagcttsctttgctcacctgtttttctgcatggacctttggattattttaacaccagatagtaca

SEQ ID NO: 425902 - DNA, 406 bp, Homo sapiens
tctgtgggcagctcaggaaccaatcccccatggatactgtattagtccattttggcattgctatraagaaatacctgagactgagtaatttgtaaggaaaacagatttattttggctcgtggttctacaggctgtacaggaagcatggcactggcatctgctcctggtgaggcctcaggaagcttacagttatggcaaaaggcagagccagggccaggcttggggggcgtggattggtgtatcatgtggcaagagaggaagcaagacagagggagcaagagagagaaggggaaggtcccagactcttaaacaaccagatctcacatgaactgagaaacaactcactcatcaccaagaggatggtgctaaaccattcatgagggatctgcccccatgatccaatacc

SEQ ID NO: 425903 - DNA, 493 bp, Homo sapiens
tccacatcagtgatctcaacttgtcaggagaagagactgagagattcttagacactatagaactgcaattccatatgccgacctaatattgccaacaggctgaataaataccttattatttttcaaatttcagatatgctgatataattaatgaattgctaacccattagggagtgttgttgaacccatagtagttctttgcctygtctctgtttttgtttgtttgtttttttaatcaacggaaatacttttacaacttccaggctattaggcattcttttataattttgtcaaagctttgcctcctcaaatataaagttatattcagaatatttccagcttgtaaatttcaggtggttagtgccttgatgagaaatattttctttctttagttatttggtttattaggtgactgtatgaggcaattttgataaaaaaaattatactcttttgtgaaaacctttgttctcactggagatttcctcattactca

SEQ ID NO: 425904 - DNA, 608 bp, Homo sapiens
acaatgatttttttccactgtatcaaaaggataacttgagattaacttgagcctgcaatctaaattcagtatatctctgttcatataatgatgtgtacatttatgcaaaggatgataaaatgtattaagaggctatatcaggcatggccctttctaatatctttctaaataatactttgtttcctccatttgttttccatgttcacttatgggttttctaaaagtttaaggaaaatgcatattatgaaaaaactatgcatggatttcaaatttttttgtaccaagataaacttataccaacttgttataacacgtctgaacaacatctagttagaggcactaagaaggataagacatcagtttgaaaagggcccctgtcagaacaatatgrattctgctaaaattgaagcaagagcaagcaccaaatttatggtgaagtttgagtggaagaatgatgaaatcattgatagtttacaaaaagtttatggagacaatgcttcaaagaaataagcagtttacaaagaaataatttaagaagggatgatatgatattgaagatgaagcccacagcagcagactatccacaccaatttgcaaggaaaaaattt

SEQ ID NO: 425905 - DNA, 550 bp, Homo sapiens
tgatattgaagatgaagcccacagcagcagactatccacaccaatttgcaaggaaaaaatttgcattgtctgtaccttaatcaaagagcacctacaattaacagcacaaacaatagttgacactacagacatctcagttggttcagcttaaacaattctgacagaaaaattatggttgaacaaactttccagtcagtggctaccaaaacagttgtgcccagatcagctgcagacaagaacaaagctttcaatggaaattttcaacaagtgggatcaagatcctgaagtatttcttcaaggaattgtaacaggagatgaaacatggctttaccagtacaatcctgaaggcaaagcacaatcaaagtaacggctactgagaggaagaagtggtccagtcacagcaaaagtagatcagtcaagagcagaggtaatggcaacagattttttggatgcttaagaaatttcacctgtrggtgttatggagcaccaaagaacaataacttctgtttattatgagagtattttgagacaaccaaagctttagcaataa

SEQ ID NO: 425906 - DNA, 569 bp, Homo sapiens
tatttggcaaaatttcaaaaagacctctggaaatgagaaaatgatgctataatattacctattaaaacaaatgaaagacaatctcttccttctttcttttttctttttttttctaaagagaaagagccagaacaactgaggttgaatwccagttctcatatagctgcatggccttgccatctgtgaatatcaacttcctcatgtctgaaatgagatgagatgctttgaccgtccaatacgacaatgtatgtgaaagtcctctataaacaactgaagcactacaaaaatgtttattgctgttaactgaaggtgctttgctaaaagaaattcttacgttttcccatcttcttccaggacagagaaattactctaaatagtaagagaataatttcatctttaaaaaagaatcaactttctgatagtaaaacttgttagatattgtaggcagggggcaataaaggtactttacccttttaattcatatttttaaatatttttttagagacggggtcttgctatgttgaccaggctgatcttgaactcccggcctcaagaaattctcctgcctc

SEQ ID NO: 425907 - DNA, 569 bp, Homo sapiens
tatttggcaaaatttcaaaaagacctctggaaatgagaaaatgatgctataatattacctattaaaacaaatgaaagacaatctcttccttctttcttttttctttttttttctaaagagaaagagccagaacaactgaggttgaataccagttctcatatagctgcatggccttgccatctgtgaatatcaacttcctcatgtctraaatgagatgagatgctttgaccgtccaatacgacaatgtatgtgaaagtcctctataaacaactgaagcactacaaaaatgtttattgctgttaactgaaggtgctttgctaaaagaaattcttacgttttcccatcttcttccaggacagagaaattactctaaatagtaagagaataatttcatctttaaaaaagaatcaactttctgatagtaaaacttgttagatattgtaggcagggggcaataaaggtactttacccttttaattcatatttttaaatatttttttagagacggggtcttgctatgttgaccaggctgatcttgaactcccggcctcaagaaattctcctgcctc

SEQ ID NO: 425908 - DNA, 529 bp, Homo sapiens
cacccagtgttacggagtgtcattctccagagagaatgatgagggactgtctgtttattacaaggagggatcatttatcatcgagtgctcagtagcaccaaggatagcactggcacctggaagacagtcaataaatttctcttgaactgaatgaactgaataaaattcataggattatggcattggccacccctatggaaagctagatgtgtcccttaaacaaagtttggttgatatttcagaaggaccttgatcagtcttcgtggttaagagcagaaactctgggtggaatctgcctatggacatactaagcatgtgacctgggttaagttatctcactttcagttttctcattgataaaatgggaattgttatagtgcttaccttattccattgttgtaaggattaaatgagataatccatgcaaagctcttagaagaatgtgtatctsatagcaagtgcacaataaatattagctacaactattgctcctggataaagacttagcgaactaatttcaaatgtgaat

SEQ ID NO: 425909 - DNA, 601 bp, Homo sapiens
agagatagaatgtagattggtggttacttagagcttagggtagagatggtgacaacactgttaatatgtcaaaaaaacttagaattgtcaaactcaaatgaatgaagtgtaacacatgtgaattttatctcaataaagctgtttaaggaaaccaactgtgattactaaaatgaatattcaggaaaattttactcccatattccttaacttgtgggaacttaataatggatttgtttgttctcttaatttttctaataaatacaagttgattcaaaccttcagtctctcaaatatgagttcataaatttaaaaaatgtgtaacttacatttaacrattttaaattctcaattctgtttggtcttccattcacttattttacaaatatttattgagtgcttattatgccccacacactggtagacattggagttaccataatgaaacagataagcctgctctctgcctttcatagaatacaaatccagtaaggcataaatctaagttagcataaatctgcaatcaaaagtataatttcaaatgggggaaaaggttaaaagaagtctgggaatgaagttagaagtctattgtagtaagccaggc

SEQ ID NO: 425910 - DNA, 601 bp, Homo sapiens
agagatagaatgtagattggtggttacttagagcttagggtagagatggtgacaacactgttaatatgtcaaaaaaacttagaattgtcaaactcaaatgaatgaagtgtaacacatgtgaattttatctcaataaagctgtttaaggaaaccaactgtgattactaaaatgaatattcaggaaaattttactcccatattccttaacttgtgggaacttaataatggatttgtttgttctcttaatttttctaataaatacaagttgattcaaaccttcagtctctcaaatatgagttcataaatttaaaaaatgtgtaacttacatttaacgrttttaaattctcaattctgtttggtcttccattcacttattttacaaatatttattgagtgcttattatgccccacacactggtagacattggagttaccataatgaaacagataagcctgctctctgcctttcatagaatacaaatccagtaaggcataaatctaagttagcataaatctgcaatcaaaagtataatttcaaatgggggaaaaggttaaaagaagtctgggaatgaagttagaagtctattgtagtaagccaggc

SEQ ID NO: 425911 - DNA, 530 bp, Homo sapiens
ctagtactttgtgggaaacaaaactactttatcaacttttgatgttgcagaagtggagatactctatacaaaaatattctttgggtacatacgacattcggtctctttaatgaatatgtaaagagccacaataaatagaaaaatggtgaaaaactgatgaattaacaattaaggagtgcaaacacgaatatcatttaaacatgtctcataataaatacaaaktaagagtagcaggtacgcttttcacttatcagattgttaaaaaatactataataatctattggaaatagtgtggagaaaatgatacttccatccattgttgagggaaatataaattagcatgatgtctatagagggtgcaatggactgaatgtttgtgtaccctcaaaatttatatgttaaaatcctactcccaatgtggtaattttcggaggtgaagcctttgggaagcaatttgcttatgagcgtggagcattcatgaatgggatcactgctcttatgaaaaaatgtgagaggccaggcatggtgg

SEQ ID NO: 425912 - DNA, 439 bp, Homo sapiens
ctagtttgtgtgcatagaggtgtttatattactctctgatattatctgtatttctatggggtcagcggtaatatcccctttgttgtctctaattgtgtttatttgaatcgtctctcttttctgctttattaatctagctagtggtctatcttattaattttttcaaaaaaaaaarcagtgcctggattcattgatctttagaatggatttttgtgtctcactatccttcagatcagctcctatttctgctattttttgtcttctgctagctttggggttgattttctcttgtgtctctagttcttttagttgtaatgttaggttgttaatttgaggtatttataactttttgatgtggtgttacatgctataaattttcctcttaatgctaccttagctgtttcacagaaattctggtatgttatatctttgttctcat

SEQ ID NO: 425913 - DNA, 566 bp, Homo sapiens
attaatttaaaatgtattgaatatttttcagctctatgggcatattcttatcttttgttattgattcagaggttaattactctggggtcagagaatatattttgtattattttcatcatttgaaatgtgttgagaattgtttcatgatatagcaaataaagagcttttataaaagttatttttgctcttgaaaagcaaaatgcaaaatactgcatgtgtattttgcagatattgagtgaagcattcaatgtrtgtcaattagctccagttgattgatattgtttttcaagtcttctagattcttatggatattttgctgtttattcttagatatattaaaccttaatactatgtggatttttccatttctcctttttatttctattttgttgcttgtattttaaaggttgtattaaccacatgcagatttaaaatttttgtgttttctttattatacttttgtcattgtaaaatttacttcgttatctcgaataatacttttttcttaaacagctactttgatattaagatattaatattgcaatatcaactttctttgttttagg

SEQ ID NO: 425914 - DNA, 566 bp, Homo sapiens
attaatttaaaatgtattgaatatttttcagctctatgggcatattcttatcttttgttattgattcagaggttaattactctggggtcagagaatatattttgtattattttcatcatttgaaatgtgttgagaattgtttcatgatatagcaaataaagagcttttataaaagttatttttgctcttgaaaagcaaaatgcaaaatactgcatgtgtattttgcagatattgagtgaagcattcaatgtgtgtcaattagctccagttgattgatattgtttttcaagtcttctagattcttatggatattttgctrtttattcttagatatattaaaccttaatactatgtggatttttccatttctcctttttatttctattttgttgcttgtattttaaaggttgtattaaccacatgcagatttaaaatttttgtgttttctttattatacttttgtcattgtaaaatttacttcgttatctcgaataatacttttttcttaaacagctactttgatattaagatattaatattgcaatatcaactttctttgttttagg

SEQ ID NO: 425915 - DNA, 519 bp, Homo sapiens
ttattgtacttattttctatttgttgctatttgtcttacagaatttgtgtttctttttgtcttttcaataattttttttaatttgtagttttattctgaaattcttcaccttgtcagttaattctctgaatgtctcaatcataattatattaaagtcaaatataagcttttttccacctttttatttggtgttttctatttgttccagttttttaactttctttttcttcttgcattttaaatttcatttttctttttgcttgattctatctgttttcctttgctaaactgaaagatctgccctccatttctaatttttcaatcagttattactgaaattgtacaatgcataaagtcttaaagttaatttctttatcttcattgtgaaaaagcaattctcttccaactcacatgccagtatttttcagcattttctgttattctttttaatcccaaaaatgacttattattattattattatwatattatataagcagtactagtctacatttacctgc

SEQ ID NO: 425916 - DNA, 530 bp, Homo sapiens
ctagtactttgtgggaaacaaaactactttatcaacttttgatgttgcagaagtggagatactctatacaaaaatattctttgggtacatacgacattcggtctctttaatgaatatgtaaagagccacaataaatagaaaaatggtgaaaaactgatgaattaacaattaaggagtgcaaacacgaatatcatttaaacatgtctcataataaatacaaagtaagagtagcaggtacgcttttcacttatcagattgttaaaaaatactataataatctattggaaatagtgtggagaaaatgatacttccatccattgttgagggaaatataaattagcatgatgtctatagagggtgcaatggactgaatgtttgtgtaccctcaaaatttatatgttamaatcctactcccaatgtggtaattttcggaggtgaagcctttgggaagcaatttgcttatgagcgtggagcattcatgaatgggatcactgctcttatgaaaaaatgtgagaggccaggcatggtgg

SEQ ID NO: 425917 - DNA, 504 bp, Homo sapiens
gtaaactaatacagttactatggaaaacagtatggagatttctcaaaaaaaaaaaaaagctaaaaacagaacaaccatatgatccagcaatcccactactgggtatttacctatagaaaaaaacatcagtatatcaaagggctacctgctccttcatgtttattacttattcacaataacaaagatatgtttttactgttgaaatgatttagttccttgtctattctggatattagtcctttgatagataaatagcttgcaaatattttctgccattcaacaggttgtctcttcactgtgttaatggttccctttgttgtgcagagctttttcgtttaatatagtccaatttggttctgttgcccgtgctttcgaggtcttagccataamatcttagcctaaaccaaagtcctgaagtgcttccctagtgttttcttctagttgttttataatttcaggtcttatgttcaactccatcttgagttaatttttctgtatgttgag

SEQ ID NO: 425918 - DNA, 310 bp, Homo sapiens
ttgggagcatatatgtttagaattgttatatcctcttgctgaattgatccttttatcattatatagccacwttctttctttctttttttttttttttttttgctgtttgttactttaagagtctgttttatttgatctaagtatagctattctgtttacatggaatatatttttccatccctttatgttcagtctatatgtgtcaccacatgtaagataagtttcttataagcaggatgtagttggatcatgtttttttaatccaatcagccagtctatatatcttaggtggacagtttaatccatttgc

SEQ ID NO: 425919 - DNA, 623 bp, Homo sapiens
attctctcctggcctataaagtttctgctgagaaatcactgttagtctgatggagtttcctttatagctgacttgatacttttgtcttgctgtttttagaattttcttgttttcttttacttttgatagtttaactataatgtgccatgaagaaaatctttttgagttgtatttgttgatctttgagcctcctatatctggatgtctaaatctcttgctagacttggaaaattttcatctattattgtgttaaatagattttctaagactttcacttttccttcaccttttgggacaccaaaattttgagtatttggtcactttatagtgtcccatatgtcattaaggctttgctcattctttttttatttttattttttattttttttgtctgggctatttcaaaagatccgtctgcaagttctgattcttttttcttcttgagctagtctrttattgaagctctcaagcatatattttattttattttgtgaattcttcactgccaagatttctgtttagttcttttcttataatatcgctttggtttagggcactcataaatttgtggtggccccaatgctgggggcagcagggttgctaccagtggttggcacatcagc

SEQ ID NO: 425920 - DNA, 583 bp, Homo sapiens
ttctccctatcaaaaagaagaaactccaattttcagcaaatatattcatgtggactggtatcttgtagtaattgttaatcacaacaggaggtgttatatcatgctcagagtgaccaaggcaagagacttagaaagagtctagtatttgtaattctagctttgtatccaagagagtgcccagctgtggataaggtatgtatcaaaattgcaagggcaagggatccattctgataaatcaatgatgattccaacagtgatattatgtcaggggagtttggtaaggaaaatagaagcaactctacatattccaagtttgaatggttttgactaaggaaattaagcttatcaatcattggaaagcacaaaggaattaaggtcaaggagtaccaaagtacactctggtacttaaccttgaagcaaaagattctcaatagctcacctagaagccattgcaaaccttaggaatctctaggaaatttgcaccagctaaccrgctcgtctacatgagtaaaatgggtggctttaaaggatttgttagatatctgctgtgttcccacacacttgcatgtagaatatttgacct

SEQ ID NO: 425921 - DNA, 654 bp, Homo sapiens
gatggataaacaaaatgtggtatattcataaagtggaatattattcagccctaaaaaggaatgaagtactgatgcatgctmcaaagtgaaaaacgatgtgtgttttaaagtagatacagagacctgaggctcacaataagtatatcatagttattcataatctctctcattcagcaaacattagttaggcacctgctgtggtaataataataaattatttattgtctctactatgctacagacactttgcatttgctacttctaatcctcagaacaactctataaagcatatattatttctattttatagattaagaaactgaggctcaaataatttaatgtattttatatagcacaattaacaagaagccgaggccagatttgaactgcaatctgaatgactccagatataacattctttctaccctacctagcagcctttctttgtagcaagcattatgtgagataagtcacaaagatgaacactcccttgaagcacatattagctgatgggtaaggtagaccatggaaacctctgttaggttgaatggtgtaagtgctgtggagaaaagcccaaaaaagagcatatacgagaatctgaggttgggggcagagctggtggagattagttaacaaaaaaaaatcttaggcaag

SEQ ID NO: 425922 - DNA, 404 bp, Homo sapiens
ctggtgtcggcccacccctgctgattggccccacaagaagggggtgagttggggtcatcaccccatgtggaagaatgtgggacacctcaagccatcatcctgccaaagtttcttccctctgtgttcatttagggcaatatttttgaaagcttattaacttaaacttagtagtagttctgccctatccactaattagcagcacgagtttgaactaatcacctacttctttgggcttcaragtccttatcactgaaataattaggccccttccactagtctaagatgtctgtgtctgatcttccagcatgcaagttgactcagccatgtaactgccatacattcaagtgagaattgccgctccctgtatcaactctgagtaagaaaattattttggagtaaaactt

SEQ ID NO: 425923 - DNA, 577 bp, Homo sapiens
attaacttaaacttagtagtagttctgccctatccactaattagcagcacgagtttgaactaatcacctacttctttgggcttcagagtccttatcactgaaataattaggccccttccactagtctaagatgtctgtstctgatcttccagcatgcaagttgactcagccatgtaactgccatacattcaagtgagaattgccgctccctgtatcaactctgagtaagaaaattattttggagtaaaacttgggcaaaacaaggtctttagttgccaaaaattattctgcaagagttcaaaacactaacttttagtatttacctcagtcaagccaattttccttcggggaacactattgttcgagttgaaaaaaaatgaaacctaaattgtggttatgtatctggcatttataatgtaagtatgaaagcaatagatttgcctgtgtttttctaaatcacataacttgcaaaaagcatgttcacatatgcaatttattttcacattcaaaaaattaaactcgaattctaactgcgaagacttgtcccttagaattatgaggggaaagaaatacctaa

SEQ ID NO: 425924 - DNA, 520 bp, Homo sapiens
aggcatttctagtaattttgccacccaaaaataatgtcaaccttttctgtaactgcagttgcaacagatcaaccagttgctgtgcacaattggcaaaagcatggggtttgaattttaggactcgtttacaacctgcatcaaggaagggatagctgagctataaacaaagaaggaaatgtgagttataaaagacgtaaccacagagatgtttcataggtcactttcacagttgactcaatattgctcagtgtggaattaaactcctcaatgccaacttggcagcaagtgcactttttaatctctatatacaattatagtgttgacaagtcaaggggtcgagggggagacatgccacacagatttgtcttcaagaagagacttgttgcccagctgtggagagcatagtcagctgacagctggaaacggtcasctccctcagggtagaccgcagctgcaaaaagcctgctagtccaaaacttgggacatctctaacaaggaatatttgcttcagatgtcctcc

SEQ ID NO: 425925 - DNA, 481 bp, Homo sapiens
ggcactgctgtttctgaaatttttttataattcagtatgaactgacataagcgttttctattacattttcccatattctgtgccatacttctacgttgttctgggctcaaggaaattcattttacatgtgctcatatatagaccacaaatttggcagaaacaatactggtgatggaacagcaacactgttgcataagtgacttcttatcctaccatgcacataattattttctaaccagccagtaacttcastggcttcttcaggaaaatgcagctttaattcattaaaagctcctggaatgtcatcagctggaagggttgccaatgctggcaaatgactcatttttaaactgaagttttccttattgtcatatcatgtggccaatccattcatctgaattttctgttaaatgcattgggctgaatgaaaaagcaaaatttattggttaacaacttgaaatgttcttttagaagccttgat

SEQ ID NO: 425926 - DNA, 561 bp, Homo sapiens
cctttccagagcaagtccagtccaatccaatcacattgttccgttgggaatatctttgctaatggcagcagtgggtggagagaggtccttgccgttattttgtcaatgtgtcttgatcctgtcttttccaattaatgataagttccttgatgacaggacccatctctttttcctccttcacttcccacagtggccatagaataaatatagacagtatagcctattagggaaaagtgatttacacagaaatgaagcmttcttactttttatttccagttgcccaaagacttagcaaagttgatcctgctacctaatgaggcatctctcattcccacagtctctgcctagctccccgcatattagaaaaatgtgacaatttacaactttgttggggagctaggaacattcgttcctggagcaggttaaactgttagcagggtggaaactatttcttcaaactagatgtaatctgcaattctagtaaagcacttagcaacaattccagttgatcctcacttgtgagtttatatgcgtaatacccacaagggccgtacccatgtt

SEQ ID NO: 425927 - DNA, 561 bp, Homo sapiens
cctttccagagcaagtccagtccaatccaatcacattgttccgttgggaatatctttgctaatggcagcagtgggtggagagaggtccttgccgttattttgtcaatgtgtcttgatcctgtcttttccaattaatgataagttccttgatgacaggacccatctctttttcctccttcacttcccacagtggccatagaataaatatagacagtatagcctattagggaaaagtgatttacacagaaatgaagcattcttactttttatttccagttgcccaaagacttagcaaagttgatcctgctacctaatgaggcatctctcattcccacagtctctgcctagctccccgcatattagaaaaatgtgacaatttacaactttgwtggggagctaggaacattcgttcctggagcaggttaaactgttagcagggtggaaactatttcttcaaactagatgtaatctgcaattctagtaaagcacttagcaacaattccagttgatcctcacttgtgagtttatatgcgtaatacccacaagggccgtacccatgtt

SEQ ID NO: 425928 - DNA, 594 bp, Homo sapiens
ttctgttgtttatgagttaatctgaactgttcacgaatgaaaatgccgttagtcctctgagtctggtttttctttctcaccccttcactttggaagacagcctgctttccaatgaaattcacatcctagataagaccgttgctgcacaggcaagatagcagacatcaaggctyacgggcaatggaagttatgaccaaatcaaaaccactgctctgtgtcctgtccaacagagataggacatttatattcatatttggctaagtttctcaatcagtgattgatgaactaaagctcatcttcatagtaaggtgatgtaattttcctctttggatgatatttgcattgtaaatctgttagaaggcaggaatggcacagtctcactgtgtaataatatctcaaagcagagctatagtcagagggaattttttttaatagaatctgagaaatagtgcatttcatataaaattttgaaacagattgggtgggagaatgccagataactagttattgcaggagtggggggtgatgaactgtggaaacggatttaggctctttcaaatccccaaggttccctatgccaacgtgtggctataa

SEQ ID NO: 425929 - DNA, 576 bp, Homo sapiens
ttgtaaggatgtatttgaagaagaatatctatacttggtaagtagaatggaccttggtagaggtgcatattctttgtcagaagtaggtatgaaatctatattttggtgaaattagtagtctatggactgattctgcattcctaaactaaaccaaaagatgctcttgtttcaatggcacttatcctgaattaaaactcagattactctgtatttaaaatatttatcaaatattaactaaatataaaattatgatgagaatgtgcaaagatttcagcagaccctaatttctgtttcactgcatgaattcatctttttgttgaaatgttgtgaaggttctgaattgcctctaccttctgcagcatagttagctgtgttcctggggacagaaakgataccaggcttatccatctcttgcaaagctaacaaatatcaaagccaatgaggtccactaaggtttgagtggtggagcgactgagataatcagttggtgtttggtataagaaaacaagtctagtctaaccttttgaatgatacactggctagaataaatagctagatttctgggagttggaagca

SEQ ID NO: 425930 - DNA, 528 bp, Homo sapiens
gcctcctcttcctagggccttcagcaatatggacttatattgttaaaaatarttgttctttgtgtgctggtttgtgactaagttaaagaaaaattaaataatagcactctctttactggctgccagatgaattacctcactttcctatctccaaaggaccttcctaggaggaatcagataaaagagttatttctagaatatctgttcatcaagacacaggtatgtgttgtcctgaggaccaagggaagcttctgtgatgactctactttacaaggtatttttagaaactgagtcagcaaaacagaaagtaactgaagaagtgaggtgtattaatcttttcttacactgttactaaaaactatctgaaaccaggtaatttatgaagaaaagaggtttcattgactcacagttccataggctatacaggaagcatggctggggaagcctcaggaaacttacagtcatggcaggaggtgaaggggaagacagcatgttttcacatggcagcaggagagagagtgtgtgaag

SEQ ID NO: 425931 - DNA, 518 bp, Homo sapiens
taatagcaacttcccacaagacatcttgttatatgagaaaaataaatctctatttgttaaggccactgaaaagtaggctcactctgtcacccaggctggagtgcagtggtacagtcttggctcactctgcctcctgggttcaagcgattcttttgcctcagcctctcaagtagctgggactacaggtgcccaccaccacgcctagctaattttttgtatttttagtagagacagggtttcaccgtattagccaggatggtctcagtytcctgacctcgtgattggcccacctcagcctcccaaagtgctgggattacaggcgtgaacgcgtgacctacctcacccggccccaaaagcatttctaactgatatactgcccctggatatgtattacttgtctccttgattggccatagcctgatccacttgtcatccacaggctttgtataagacgagtggctttggccaattaattgctgatcagccctgcaattaattgccttacttctaacagtgtt

SEQ ID NO: 425932 - DNA, 518 bp, Homo sapiens
taatagcaacttcccacaagacatcttgttatatgagaaaaataaatctctatttgttaaggccactgaaaagtaggctcactctgtcacccaggctggagtgcagtggtacagtcttggctcactctgcctcctgggttcaagcgattcttttgcctcagcctctcaagtagctgggactacaggtgcccaccaccacgcctagctaattttttgtatttttagtagagacagggtttcaccgtattagccaggatggtctcagtttcctgacctcgtgattggcccacctcagcctcccaaagtgctgggattacaggcgtgamcgcgtgacctacctcacccggccccaaaagcatttctaactgatatactgcccctggatatgtattacttgtctccttgattggccatagcctgatccacttgtcatccacaggctttgtataagacgagtggctttggccaattaattgctgatcagccctgcaattaattgccttacttctaacagtgtt

SEQ ID NO: 425933 - DNA, 591 bp, Homo sapiens
tatgtaaaacaagtactgatcataaaatctaaatcttattcaggccattcagctgtctgcttagatgataatgatgagtaaatgtttgtctcatgttcaagaaagatgcttgatttgatacattagttacaatgggatagtaatttttattattttattttttsttttagcaggataaataattgcttgctaatctttgttttctctgtttgatgtcttttttaaaaattattttcgatagattccacttatattcttatttattttattttttttgttttgttttgtttttgagatggagtttagctggtcgcccaggctggagtgcagtggcatgatctcagctcactgcaatctccacctcccgggttcaagtgattctcctacctcagcctcccaagtagctggaattacagtagcctgctatcatgcctgactaattttttgtatttttagtagaaatgggatttcaccatgttggccagtctggtctcgaactcctgacctcaggtgttccacccacctcagcctcccaaagtgttaggattacaggtgtgagccaccgcgcctggcctccacttatattaatta

SEQ ID NO: 425934 - DNA, 628 bp, Homo sapiens
atcaagtttttgataaatgaaaatattaaaggagtcgttaatgtaagtgtgagaaagataatactgtttccccaacacacacacatgctcacaaacacacgcatgcatacctgtgcatatccacacacatgcaagctcactagatacaaatgaatatttactgaatgcccgttatgttgtaggttgatgctgaagtggtgaacttgactgacagtctttgtgctcacactgtttacagtctagtgtgacaataaataaataattaaatataatctttataggaaaagaaaaaaatagaattgagagacaatgacatttgctatttatagcrtcccattcagagaaaatagaacctgaaacatggaagaatttttgtttacttaccttaaagagagtacaatcatgcacttcctaatgatgtttcagtcaaagatggaccacacatcttatggtggtccataagattataatgctttatttttactgtaccttttccatatttgtatctacttagatacaaaaataattaacatcgtgtaaacgtttaaggcaaatgcaattgcctatggtattcaatacagtaacatgctatacaggtttgtagtttaggataagtaggctatgcccc

SEQ ID NO: 425935 - DNA, 547 bp, Homo sapiens
agttataaggctcagtagatcctcttgtgtcaagcagcttgaactttgttttctgtcacttgcagtcaaaatgacccagtaagtttctgggagggctaagttgtccsctgtaagagaatgagaggaattttttcttctcttaaaagagagtgggcatagaaaggaggggaaaaggaagagagggaggctggagcccgaattgtggcagaaaaggaatgaaagatttgctttttaagaacaaggacaaggatgatgaatattgtattcatgttttttacattttatgcaaactacttttacctttcccaaactccagcaaagttgactacatataaaaatgcctgtgtgagtgtgtgtgtgtgtgggtgtgggtgtgggtatgtgagagagagagagagagtgagagagagagagagacaagagaagagagaggatgggggagaagaagaaggatgaggaggagaggaaggcaggctggctggctggccaggatctacattgtattgaggtgatacagaataaggaacacaagaggcaatgaaaagat

SEQ ID NO: 425936 - DNA, 592 bp, Homo sapiens
aacatcattatctattaagaatcagttgtatttcctcttcygtgaacactctattcatattctttgaccaatttttaaaaacattggacattttcttatgagttacagatattagacatttacaaaattacggctgggtgcggtggctcacgcctgtaatcccagcactttgggaggccaaggtgggcggatcacgaggtcaggagttcgagatcagcctgaccaacatggtgaaatcccgtctctgctaaaaatacaaaaattagccaggcgtggtggtgctctcctgtaatcccagctactcaggaggctgaggcaggagaatcgcttgaacctgggaggcagaggttgcagtgagacaagatcatgccactgcactccagcgtaagtgagagcgagactctgtctcaaaaaaaaaaaagaaaaaaaattactctgtgatatgaactgtatttttagcccaaattgtcaattgtttttcaattttgtttatggtgatttttaaatcatttgaactttactgtaaagatacagaatgataatatgatactttatggaaagttccaaattagcataaaaatctcagctggtg

SEQ ID NO: 425937 - DNA, 592 bp, Homo sapiens
aacatcattatctattaagaatcagttgtatttcctcttccgtgaacactctattcatattctttgaccaatttttaaaaacattggacattttcttatgagttacagatattagacatttacaaaattacggctgggtgcggtggctcacgcctgtaatcccagcactttgggaggccaaggtgggcggaycacgaggtcaggagttcgagatcagcctgaccaacatggtgaaatcccgtctctgctaaaaatacaaaaattagccaggcgtggtggtgctctcctgtaatcccagctactcaggaggctgaggcaggagaatcgcttgaacctgggaggcagaggttgcagtgagacaagatcatgccactgcactccagcgtaagtgagagcgagactctgtctcaaaaaaaaaaaagaaaaaaaattactctgtgatatgaactgtatttttagcccaaattgtcaattgtttttcaattttgtttatggtgatttttaaatcatttgaactttactgtaaagatacagaatgataatatgatactttatggaaagttccaaattagcataaaaatctcagctggtg

SEQ ID NO: 425938 - DNA, 592 bp, Homo sapiens
aacatcattatctattaagaatcagttgtatttcctcttccgtgaacactctattcatattctttgaccaatttttaaaaacattggacattttcttatgagttacagatattagacatttacaaaattacggctgggtgcggtggctcacgcctgtaatcccagcactttgggaggccaaggtgggcggatcacgaggtcaggagttcgagatcagcctgaccawcatggtgaaatcccgtctctgctaaaaatacaaaaattagccaggcgtggtggtgctctcctgtaatcccagctactcaggaggctgaggcaggagaatcgcttgaacctgggaggcagaggttgcagtgagacaagatcatgccactgcactccagcgtaagtgagagcgagactctgtctcaaaaaaaaaaaagaaaaaaaattactctgtgatatgaactgtatttttagcccaaattgtcaattgtttttcaattttgtttatggtgatttttaaatcatttgaactttactgtaaagatacagaatgataatatgatactttatggaaagttccaaattagcataaaaatctcagctggtg

SEQ ID NO: 425939 - DNA, 592 bp, Homo sapiens
aacatcattatctattaagaatcagttgtatttcctcttccgtgaacactctattcatattctttgaccaatttttaaaaacattggacattttcttatgagttacagatattagacatttacaaaattacggctgggtgcggtggctcacgcctgtaatcccagcactttgggaggccaaggtgggcggatcacgaggtcaggagttcgagatcagcctgaccaacatggtgaaatcccgtctctgctaaaaatacaaaaattagccaggcgtggtggtgctctcctgtaatcccagctactcaggaggctgaggcaggagaatcgcttgaacctgggaggcagaggttgcagtgagacaagatcatgccactgcactccagcgtragtgagagcgagactctgtctcaaaaaaaaaaaagaaaaaaaattactctgtgatatgaactgtatttttagcccaaattgtcaattgtttttcaattttgtttatggtgatttttaaatcatttgaactttactgtaaagatacagaatgataatatgatactttatggaaagttccaaattagcataaaaatctcagctggtg

SEQ ID NO: 425940 - DNA, 526 bp, Homo sapiens
ttatcatatctcccatttattcttccaagagccattcatctttcctaaaaatcacttagtctcccttaagtggctgacatctctcctccccatctcctattaaaagagtatacacactctctaatctyggcacatttgggggtattcacatgtttcctgtgaggcccccacacacctaataataaaaattaataattgtggccaggtgcagtggctcacgcctataatcccagcactttagagggcagacgcagacagatagcttgagctcacaagtttgagaccagcctgggcaacatggcgaaaccccatctctacaagaaaatacaaaaatgagccaggcatggtggcatgttcctgtagtcccatctacttgggaggctgaggtgggaggatggtttgtggaggtttcagtgagtcgagattatgccactgggaggcggagattgcagtgagtcgagattgcgccactgtactccagcctgggtgatagaaccagaccttgtctcaaaaaaaaaaaaaaaaa

SEQ ID NO: 425941 - DNA, 526 bp, Homo sapiens
ttatcatatctcccatttattcttccaagagccattcatctttcctaaaaatcacttagtctcccttaagtggctgacatctctcctccccatctcctattaaaagagtatacacactctctaatctcggcacatttgggggtattcacatgtttcctgtgaggcccccacacacctaataataaaaattaataattgtggccaggtgcagtggctcacgcctataatcccagcactttagagggcagacgcagacagatagcttgagctcacaagttygagaccagcctgggcaacatggcgaaaccccatctctacaagaaaatacaaaaatgagccaggcatggtggcatgttcctgtagtcccatctacttgggaggctgaggtgggaggatggtttgtggaggtttcagtgagtcgagattatgccactgggaggcggagattgcagtgagtcgagattgcgccactgtactccagcctgggtgatagaaccagaccttgtctcaaaaaaaaaaaaaaaaa

SEQ ID NO: 425942 - DNA, 526 bp, Homo sapiens
ttatcatatctcccatttattcttccaagagccattcatctttcctaaaaatcacttagtctcccttaagtggctgacatctctcctccccatctcctattaaaagagtatacacactctctaatctcggcacatttgggggtattcacatgtttcctgtgaggcccccacacacctaataataaaaattaataattgtggccaggtgcagtggctcacgcctataatcccagcactttagagggcagacgcagacagatagcttgagctcacaagtttgagaccagcctgggcaacatggcgaaaccccatcyctacaagaaaatacaaaaatgagccaggcatggtggcatgttcctgtagtcccatctacttgggaggctgaggtgggaggatggtttgtggaggtttcagtgagtcgagattatgccactgggaggcggagattgcagtgagtcgagattgcgccactgtactccagcctgggtgatagaaccagaccttgtctcaaaaaaaaaaaaaaaaa

SEQ ID NO: 425943 - DNA, 637 bp, Homo sapiens
gtaacccagcattgaatattaaccattactaaaggttatgtgtatatattgactttaatacattgaatttgagcttggaacggttttattattttctggtatgaggaagacaagcacttgttaaaattaatagtgcctttggctgagaaatctggttcataatttgtgtattgcaggttcctaggcactggctttgacatactctgaaacttcaaatggagaaygtaaaaggagtttcgtaaaccagctgaccctaaattcttagagatttacttgttggtgccagggtagcaggaagggctaccagttctcttttcagccttatatgaagatgtttcagcattaaaaagtacagatgctctgcctcagcagatttgtcaaattactgatgaagcccagatatgtacaggtgttttaagaaaactttattcatccagtttaaagaactacctataaatatcaagactcagtgataattgtgattagccaattaagtaaaaacatttgaaatggtctgcctgtagtgcagcagagtgaaaagttaaagataccagtttcccaaattgattaaaacataaccctgagagctaacagaccttttcataaattgaaaccaagaatagtgataggtaaaaat

SEQ ID NO: 425944 - DNA, 481 bp, Homo sapiens
cggtataccgatgattatattagactatattttggtgataacactaatttctgaaatttcgtttcrtctatagcagaaaaatatggctcaggagactaaccagaccccggggcccatgctgtgtagcacaggatgtggcttttatggaaatcctaggacaaatggaatgtgttcagtttgctacaaagaacatcttcagaggcagcaaaatagtggcagaatgagcccaatgggtaagttatttccaaggaaaaacacatttgaaagaactggtggacagaaatacagaaccaagaattggggctgagaatgctgaaagcacatggagagaacacctgataagagcttgaaattcaagcaacagcccaagtgcttgacatgactgatcaggaatgaatgactatctacaagcatcttatagcttttcagttttcttttttggggttattttgtttcacacttgtgttcattggattgactt

SEQ ID NO: 425945 - DNA, 514 bp, Homo sapiens
tttccttcctttgctccttccttcatttcctccttcattcctttcttcctaattattttatttttatttatttactagagacagygtcttgctccgttgcccaggttgaagtgcagtggcactatcaaggttcatcacagccttcacctcctgggctcgagtagctgagatcacaggtgcgcaccaccacacctggctaatttttttttttttttttgtagagacagagtctacctatgtcacccaggatgatctcaaactcctaaactcaagcaatcctcctacctcaacctcccaaagcactgggattacaggcctgagccatgtgttcaacccccctttcttcctaatttacattctagttaaggggaagtatatgaatcctgagcacaagctatgtggctaaccagtcaatattcaactaccaaggcttaaaacttttatctctggctggttggagattcacccaaactctataaaataaagtgccatggaagaatatctcatggaaaaa

SEQ ID NO: 425946 - DNA, 514 bp, Homo sapiens
tttccttcctttgctccttccttcatttcctccttcattcctttcttcctaattattttatttttatttatttactagagacagtgtcttgctccgttgcccaggttgaagtgcagtggcactatcaaggttcatcacagccttcacctcctgggctcgagtagctgagatcacaggtgcgcaccaccacacctggctaatttttttttttttttttgtagagacagagtctacctatgtcacccaggatgatctcaaactcctaaactcaagcaatcctcctacctcaacctcccaaagcactgggattacaggcctgagccatgtgttcaacccccctttcttyctaatttacattctagttaaggggaagtatatgaatcctgagcacaagctatgtggctaaccagtcaatattcaactaccaaggcttaaaacttttatctctggctggttggagattcacccaaactctataaaataaagtgccatggaagaatatctcatggaaaaa

SEQ ID NO: 425947 - DNA, 629 bp, Homo sapiens
tttgatttttttcatctttaaaaaattctactcataccagcatttctcctagtcatcatcttgcatcagtttggcattgtcactccaagacagacattaaaacatctgatttcccacccacgtttgttgaaaatgatgatggacctgattaattaacaaaaaatggaatctaagctgagggaaggaggaggaaaggacacaatataagtggtcagggtgttttcataaccttcactgacatatttattacacttagaaatggtatggttcagtagaaaacacaggtctgaggggactcaggagacctaggatttgggattttgctatcacttattatctcttttggctacaatctcatctcactatctgttgaagggaactggattagatgacctctaacagtggttagtctatggattatgtaatgcagatagattaaaatttaggtgttaaaggggkgtgtgtgtgtgtgtgtgtgcatgtgtgtgtgtatgtatttgtctatgaaaaagaaagagaagaataatgagaatataaaaagatgaagagaaacagtaacaaagaaaaaatactcaatatcatttgtatcctgaacttgagactccagttcttatgtaattaatatttct

SEQ ID NO: 425948 - DNA, 603 bp, Homo sapiens
aaatcatcacattatactccttaaaaatatacaattttttttgtcagtttacctcagtaaagctggagaaaaaagaccacccaaaggaaactcctgttgatccaagctgcagcttgagaaagcaccytgtccctgccatagcagcatgtgccagacgaacagtctcggagcagagttttggggtgtagcatcttttcctccaggagcccttttcctccatagcactgccatctctgagtgcttagtgcctagcactgccctggaactcagaacactcaaaagaaggaacagggaatatacctagactttaaccttgttgatactatagtacctgtcctgagtagtacattgtagaggccagcctgactaactggaagtcaaaggagaaataccaagaagaggaatggcctagaaagcctgttatatgagaaaccgttgaagtctaatttagcatggaatggcccaatttgagaaaaaagaatattaaatgggacatgacagttgttttcaagtacttcaggatggccatatggaggacaatcagacttattttggataactccaagtgtgtgtgcagcagagagaaataggaccaataagtaa

SEQ ID NO: 425949 - DNA, 603 bp, Homo sapiens
aaatcatcacattatactccttaaaaatatacaattttttttgtcagtttacctcagtaaagctggagaaaaaagaccacccaaaggaaactcctgttgatccaagctgcagcttgagaaagcaccctgtccctgccatagcagcatgtgccagacgaacagtctcggagcagagttttggggtgtagcatcttttcctccaggagcccttttcctccatagcactgccatctctgagtgcttagtgcctagcactgccctggaactcagaacactcaaaagaaggaacagggaatatacctagactttaaccttgttratactatagtacctgtcctgagtagtacattgtagaggccagcctgactaactggaagtcaaaggagaaataccaagaagaggaatggcctagaaagcctgttatatgagaaaccgttgaagtctaatttagcatggaatggcccaatttgagaaaaaagaatattaaatgggacatgacagttgttttcaagtacttcaggatggccatatggaggacaatcagacttattttggataactccaagtgtgtgtgcagcagagagaaataggaccaataagtaa

SEQ ID NO: 425950 - DNA, 573 bp, Homo sapiens
tgagaaaaaagaatattaaatgggacatgacagttgttttcaagtacttcaggatggccatatggaggacaatcagacttattttggataaytccaagtgtgtgtgcagcagagagaaataggaccaataagtaaaagttatagggagataataatcagcttaatgtagaagaatttttcattgaagattgagtggttcgaaatggaccatgctggattaagaggtagtgagcatcccaccactggagatgttcgaatatacaataaaaccttcttgacagagaatttctacattgactagtataatggagcagataatctctgaagttcccacgaaatctaatattttatgatcatcatatcaaggaggagaggagaaaatggaaagtgatgttctataccattgatactaattgaacttctactgtgtactatgatactgtagtttttaggccgggtgctatgcaaagttttggagctgccaagatgggtatgataagatgtcctgactcactgactcatccattcatgtaatagatgtaattgtatatgaaaagcagatagcaaagtaga

SEQ ID NO: 425951 - DNA, 573 bp, Homo sapiens
tgagaaaaaagaatattaaatgggacatgacagttgttttcaagtacttcaggatggccatatggaggacaatcagacttattttggataactccaagtgtgtgtgcagcagagagaaataggaccaataagtaaaagttatagggagataataatcagcttaatgtagaagaatttttcattgaagattgagtggttcgaaatggaccatgctggattaagaggtagtgagcatcccaccactggagatgttcgaatatacaataaaaccttcttgacagagaatttctacattgactagtataatggagcagataatctctgaagttcccacgaaatctaatattttatgatcatcmtatcaaggaggagaggagaaaatggaaagtgatgttctataccattgatactaattgaacttctactgtgtactatgatactgtagtttttaggccgggtgctatgcaaagttttggagctgccaagatgggtatgataagatgtcctgactcactgactcatccattcatgtaatagatgtaattgtatatgaaaagcagatagcaaagtaga

SEQ ID NO: 425952 - DNA, 575 bp, Homo sapiens
ataccaatcaaacatatgtttggtcttttcacatagtcccatatttcttggaggctttgttcattccttttcattcttttttctctaatcttgtcttcatgctttatttcattaagttgatctcaatctctgatatcctttcttccgcttgatcgatttggctactgatacttgtgtatgcttcacaaagttctcgtgctgtgtttttcagctccatcaggtcatttatgttcttctctaaactggttattctagttagcaattcctctaaccttttttcaaggttcttagcttccttgcattggattagaacatgcttctttagctgtggagtttgttattacccaccttctgaagcctacttctgtcaattcatcaaacttattctcagtccagttttgttctcttgctggcgaggagttgtgatcctttggaggagaagaggcattctggtttttygaattgtcagcgctggcttttcctcatcttcatggatttatctagctttggtcatttatgctggtgacttttggatggggtttttgtgtgaacatcctttttgttgatgttgatgc

SEQ ID NO: 425953 - DNA, 546 bp, Homo sapiens
gttagttttagttgggtgaaaacttagaggatacattgaataaaccctggataagacataaacctgtacccctattgtcataaagaatcaatgagaatacagagggaaaaaaagtctttcaaggaggcactcaagttctttattgtataaatygttcaaataaatgtcaggttggtttgtccttatttttgttgtataggactttttaatgtgagtacttgaaacactggtttccctcattttaagtatattagagaatcttcacatttatacaaaagaaaccttatgataaggtcataaaggacccaagggaataataaatgaaatataaagtcaaagttgtcttattaataataaaaaaaaacaagaaatagcctatgccaacgagagagaaagtacactggtaagcacaaaacaaagagaggagaaaaacattatgtcaaatgattcaggcaccaggaaagaaaacattttaataagagatgaaagagctgggaggaaaaattatgcctttagctgcttggatatgagtgtggggttagaggg

SEQ ID NO: 425954 - DNA, 546 bp, Homo sapiens
gttagttttagttgggtgaaaacttagaggatacattgaataaaccctggataagacataaacctgtacccctattgtcataaagaatcaatgagaatacagagggaaaaaaagtctttcaaggaggcactcaagttctttattgtataaatcgttcaaataaatgtcaggttggtttgtccttatttttgttgtataggactttttaatgtgagtacttgaaacactggtttccctcattttaagtatattagagaatcttcacatttatacaaaagaaaccttatgataaggtcataaaggacccaagggaataataaatgaaatataaagtcaaagttgtyttattaataataaaaaaaaacaagaaatagcctatgccaacgagagagaaagtacactggtaagcacaaaacaaagagaggagaaaaacattatgtcaaatgattcaggcaccaggaaagaaaacattttaataagagatgaaagagctgggaggaaaaattatgcctttagctgcttggatatgagtgtggggttagaggg

SEQ ID NO: 425955 - DNA, 370 bp, Homo sapiens
ctgcttgctacctaatcaacattagtatggctgctgaaaatactcaatttgcaagttacatgatccaaatgtgcaaaataataacrataataactttctttactcttctgtaactcaacttctgttttatgcaccaattctgcctattggcagaaacttgatcacgtcccctgaggtaaaaacactggtcacttcaaatttaaacatgatcatttccatattccgctcccccatcttcctcacccttaggtggcatctacattctaggggtctgcatggcatgatggcctgggacacatgggacctctgcttgttggcagccatccatgctaccctcattcattcatggacacctgtccccaccagcact

SEQ ID NO: 425956 - DNA, 516 bp, Homo sapiens
gtaaacaaactgatccaaaattccaattaggaaactaatacatggttgtaaaccctagagaaaattcctcctggaagctagttattgctagagtaaatagcagagatctttgagcagtaaaattccatgcactaaagtccaacaagcctctctcagattcttatctctctgattcttcccacagttataacaaatttgcttatctggtttaaagcccaaagcagtatgttctcaggtgcatgagaggctaccaaaaattatcacactattcatgataggacctcataggtgacatatcatttataccaccactgcccccagaataccaatgtgtacttgctggggtcatttgatggcccatgccctttagtagcccctagggtaatcactgtattatcaggaactgtacaataattgatgttcataatgaagcttgatcattcaaatgatgtgaaaacatctataaactacwtgagttaaatatatatatctatgtataaaatcaagtatcttgcc

SEQ ID NO: 425957 - DNA, 589 bp, Homo sapiens
atttattataaagaatacctctgaatagtagtataaagaggcaaagtagtatgaagtgaaagcgatgaagagaaaatccatggaggcttttttaaccaaatttaggaaagcctctgctcctcttcatgcctcagtttcctcatctataaaagaaatgggttagatatgatagcctctattggcccttccaggtctgacatgccaaaaattctctattgctcctcacattaccctaatctgggagctcaaggagtacctctggcttaattaaccatgcagataattgtgtgctctagctrggctcagtggtgcacctgacttgggaggctgagatgggaggatcgcttgaggctgagagttgaatagtgcagtgagctatgatcacacctgtgaatagccactgcactccaacctgagcaacatagtgagatctcatctctaaataataataataatagtaaatctttttcaaaaattaataaaattgtgaattctgacgtaagtccaatgccttttgatttacttttggggtcctggatttccactcagttcctctcaatccaatcataaaatcttatagtccacagaa

SEQ ID NO: 425958 - DNA, 589 bp, Homo sapiens
atttattataaagaatacctctgaatagtagtataaagaggcaaagtagtatgaagtgaaagcgatgaagagaaaatccatggaggcttttttaaccaaatttaggaaagcctctgctcctcttcatgcctcagtttcctcatctataaaagaaatgggttagatatgatagcctctattggcccttccaggtctgacatgccaaaaattctctattgctcctcacattaccctaatctgggagctcaaggagtacctctggcttaattaaccatgcagataattgtgtgctctagctaggctcagtggtgcacctgacttgggaggctgagatgggaggatcgcttgaggctgagagttgaatagtgcagtgagctatgatcacacctgtgaatagccactgcactccaacctgagcaacatagtgagatctcatctctaaataataataataatagtaaatctttttmaaaaattaataaaattgtgaattctgacgtaagtccaatgccttttgatttacttttggggtcctggatttccactcagttcctctcaatccaatcataaaatcttatagtccacagaa

SEQ ID NO: 425959 - DNA, 646 bp, Homo sapiens
tctttttctcatctataaaattggtatactaaaacttcgctcctgaagtttatgtgagttctaaaggagacaatgaatgtatgtaatcagcactttacacataactataatagtctctttggggatggaaaatggagtgatcagattgacaagggaatggaatgaaggcattgctatctggtgagagggatgggagacattggtacaacttgaatgttagaagaggaataccatcacaggggcaaagggcccaaagacagcctttatctttctcaatatttgtgtagggacttcttctccttagaactaaaaaaacaggaagtaaaatttatagacccctagagccagcaaaaccaataggtcaggtttactatcaaaaggatatttctttaacagatctttgactctttcttagtggctctctctctctatgtgtgtctctgtctcttctctctaattaaatgcctaccctgtgctcttacacatttggtgactttcaacagttattcagaattttaaaatcttccatggtttttagaccagtkccatttaaaaaaaaaaattaaggttgatatttcactttggtcttaaaccagagccaagtaggcttttctccaaagaatgctggcacctgtgattctactac

SEQ ID NO: 425960 - DNA, 495 bp, Homo sapiens
tttggtcttaaaccagagccaagtaggcttttctccaaagaatgctggcacctgtgattctactacatgaatgccaggaagtatgctgaccaacgagttctcatttcagataagcagttaatttgtggtgaccttgagcagccactttacttacctgggtcataatttccttacctgggtataatttccttggctataaaacaagaggggttgcattaagtcccctctctgaactcagaatcaccacctggcccttctttgtggccctccagtctcatgagtcttttcagtctatgtgtataataatgtctctctgtatcattaccttattgtataaacatctccctgtgcatgtttctgccatacctaggtgacccagcagagattactaaactcatttcctctttgtcttcggtgtacagttaaacttccctygtgtggccacaaaaccattcacccttctcctgtcttcctgcatctgctggtggaaccaaa

SEQ ID NO: 425961 - DNA, 495 bp, Homo sapiens
tttggtcttaaaccagagccaagtaggcttttctccaaagaatgctggcacctgtgattctactacatgaatgccaggaagtatgctgaccaacgagttctcatttcagataagcagttaatttgtggtgaccttgagcagccactttacttacctgggtcataatttccttacctgggtataatttccttggctataaaacaagaggggttgcattaagtcccctctctgaactcagaatcaccacctggcccttctttgtggccctccagtctcatgagtcttttcagtctatgtgtataataatgtctctctgtatcattaccttattgtataaacatctccctgtgcatgtttctgccatacctaggtgacccagcagagattactaaactcatttcctctttgtcttcggtgtacagttaaacttccctcgtgtggccacaaaaccattyacccttctcctgtcttcctgcatctgctggtggaaccaaa

SEQ ID NO: 425962 - DNA, 461 bp, Homo sapiens
agtcaaaactataaaactcttacaaggaaacataggggtaaatctttgtgcccttgagttaggcaaagccttcttagaaatgayactaaaagcgtaagcaacaaaagaaaatagataaatttgacttcatcaaagtttaaaagttttataatacaagtaatactattaagacaaatgatcgcacagagaataggagaaaatatttggaaatcatataacacatgtgacaagagacatgtatccagaatatatagagaactcctacaattgaataataaaggataattaatccaatatttaaatgggcaaagaatcagagtagacatttctctaaggaaggcatatgaataaccaataagctcaagagaagatgcttacaatgatcattcattaaggaaatgctaactaaaaccacaagataccacttcacaaagccactatagagtggctaataacaagaa

SEQ ID NO: 425963 - DNA, 461 bp, Homo sapiens
agtcaaaactataaaactcttacaaggaaacataggggtaaatctttgtgcccttgagttaggcaaagccttcttagaaatgacactaaaagcgtaagcaacaaaagaaaatagataaatttgacttcatcaaagtttaaaagttttataatacaagtaatactattaagacaaatgatcgcacagagaatrggagaaaatatttggaaatcatataacacatgtgacaagagacatgtatccagaatatatagagaactcctacaattgaataataaaggataattaatccaatatttaaatgggcaaagaatcagagtagacatttctctaaggaaggcatatgaataaccaataagctcaagagaagatgcttacaatgatcattcattaaggaaatgctaactaaaaccacaagataccacttcacaaagccactatagagtggctaataacaagaa

SEQ ID NO: 425964 - DNA, 585 bp, Homo sapiens
taaacatcaggacaaaatcccaataacttatattggcattcaagtcccttcacaacttggcctaaacttatatcctccccctgatctccaccasttcccacaagtcctctatattctagccacatgtttctctcataactcttctttgaaatgtctttccacaacagctttgcatatgctgctctgcttccccatctagaccatgagcatctcaaaggcagaaacaacatttaattcatctttgcatcccaacagcctaaccctgagtctggcatttagtggacacttaatgaatgtttgctgaatcgaattgaatgtgcatggaaactctgggaaaaatcctccagaatccttcagatggtgaatgtgcagtgaagaggtggaatgaggcaattccctcaaattacaaattcacctattttgttaagaaaacattaagatggatatcttttatttttctgtgtgaaaataaagaaaaaagaatgctgaaatgcagtgagtaccctaaaggtttattttatattagatggagggttgaaaagaaaaaaatgtaagtaaagtaggtggcataatagggatttttgc

SEQ ID NO: 425965 - DNA, 631 bp, Homo sapiens
aggtggaatgaggcaattccctcaaattacaaattcacctattttgttaagaaaacattaagatggatatcttttatttttctgtgtgaaaataaagaaaaaagaatgctgaaatgcagtgagtaccctaaagktttattttatattagatggagggttgaaaagaaaaaaatgtaagtaaagtaggtggcataatagggatttttgcaatttaaccttaaaaaagtgaaaatggctgcattgaacacctgtgggccttccatcgaactgcattcaacagaggaaaataagaggaaggggagatgttaggcaagagggaggaatggaagtcagcatcttcccaggtttctgccatgtatcctgcagagctaagaatatggtggttgagactagagtgcgagattaagaagaccctcagcataaatggagtctccccttgttcaaacatgttactgaccttcccttaaacgaaccaaccaaagaacacagcactgagattcacatacacaataagttcagaactgatgttcagaagtataagttaagcattcctaattcgaaaatttgaaatccaaaatgctccaaaatctgaaactttctgagtgctgacatgacactcaaaggaaatgca

SEQ ID NO: 425966 - DNA, 645 bp, Homo sapiens
caggccacctggaactgagcccaccgctgccagtggaacactgcaygagtggttatgcctcgccaagtgtgtgggatctgtgtggggcttaccatcacctgctactcccctctccctgtgctaactcttctgtgcagcagaggcagcaatactaccctctggaatatcaacccagtggcctgagaactgctcctgtcttctgatacccacaagggctgctgcttaccctgcatgagactcacagtacaaacctacctgactcagcccccacctggctttgccccacaacctgccctggtaacttaatacaaaagatagaatcttttgggagctatatggcttctttcattgcctgagaaaccagagtatcctccacttcccaggcaaaataaggcaagcaaaaatcccactgctaccactgcagctgatgctcttttgcaagcaccacctcctagctggagaccaaccaatgcagtccattacagcatctcctgagagaataacactgcacccaggaaggagaaaacagctgcatgatctgagctatcaccactgcctgcaccactctggctaaccaggaggtcctgagtctgtctatatgactacttcattactactttaactggcattcgagaaagccaatac

SEQ ID NO: 425967 - DNA, 645 bp, Homo sapiens
caggccacctggaactgagcccaccgctgccagtggaacactgcacgagtggttatgcctcgccaagtgtgtgggatctgtgtggggcttaccatcacctgctactcccctctccctgtgctaactcttctgtgcagcagaggcagcaatactaccctctggaatatcaacccagtggcctgagaactgctcctgtcttctgatacccacaagggctgctgcttaccctgcatgagactcacagtacaaacctacctgactcagcccccacctggctttgccccacaacctgccctggtaacttaatacaaaagatagaatcttttgggagctatatggcttctttcattgcctgagaaaccagagtatcctccacttcccaggcaaaataaggcaagcaaaaatcccactgctaccactgcagctgatgctcttttgcaagcaccacctcctagctggagaccmaccaatgcagtccattacagcatctcctgagagaataacactgcacccaggaaggagaaaacagctgcatgatctgagctatcaccactgcctgcaccactctggctaaccaggaggtcctgagtctgtctatatgactacttcattactactttaactggcattcgagaaagccaatac

SEQ ID NO: 425968 - DNA, 497 bp, Homo sapiens
tgtcaaaagtcatcaaattagacatttaaattagtgaattttgttgtatgtaaattatctcccgataaagcttctaaaaataacataatttgattacagataattttgctgtattwctactttatagtttttctatggttttaaaaactaaaaaatttttacaatttattttctactttctaacttaatctcaaataataaacattccccatattactaaaatctctgtaatcatttaattcctgcataatattccaattatacatatgccacccttaattaatcattccttactggtaggaatttagattgttttctattttcctctaaactaatactctgataatactttgtatacatattcttgtatattttgggggcttttttcttatgttttcttttgtgtgtgtgtatgtgtgtgtgtgtgtgtgtgtgtgtgtgagacggagtcttgcactgtcgcctaggctggagtgcagtggcatgatctcggctca

SEQ ID NO: 425969 - DNA, 497 bp, Homo sapiens
tgtcaaaagtcatcaaattagacatttaaattagtgaattttgttgtatgtaaattatctcccgataaagcttctaaaaataacataatttgattacagataattttgctgtatttctactttatagtttttctatggttttaaaaactaaaaaatttttacaatttattttctactttctaacttaatctcaaataataaacattccccatattactaaaatctctgtaatcatttaattcctgcataatattccaattatacatatgccacccttaattaatcattccttactggtaggaatttagattgttttctattttcctctaaactaatactctgataatactttgtatacatattcttgtatattttgggggcttttttcttatrttttcttttgtgtgtgtgtatgtgtgtgtgtgtgtgtgtgtgtgtgtgagacggagtcttgcactgtcgcctaggctggagtgcagtggcatgatctcggctca

SEQ ID NO: 425970 - DNA, 583 bp, Homo sapiens
acaggatggactcaaagggacaagrtgacaagactgaaagcacactttcaggaaccactgcaggataaatatacacacacacacaaacacacacacacacacatgcatcgtattaaaactaatgaaaaccagagattagagaaaatattaaaagccagagaataaaaatataatccattttaagaagcaataataaaactgagagctaacttctcaacaaaagcaatggatgccatattgaaaacattgaaagaaaataactgctgatccataattctatgccagtaaatacatcatcccaaaatgaaaatgaaatgaagacattttggtttttctcctcctccaacctccaggttaccctaaattatactaaatgtacacaagttaatatttcaattaaaactgaaaattatcacactggatgaataaaataaacatgattctatgttctttataagagctacaacttaaataaagacacaaaatgattgaaagtaaaagcatgaaaaataatatgttttgtaaacactaaccaaaagaaagcacctgaaactgtaacaatatcagataaagtagacttgaa

SEQ ID NO: 425971 - DNA, 588 bp, Homo sapiens
gcaagtcttataaaagagaagtgctgttcatttgctcattttattatattgtttttcaaacatcatatcaaattgcccctggtgttgaaaggaggccttgcctggaatgctggtggcccaggaggcaaccctggaaggagcctgccctgacactcctgatcccrgcccctccctcagcacccactgctggggcagttgccaacagcactgtaaatcctgggggctctcaaaagaagagagacaggaagatttttgacatgattctgaaaaaactatgatccggtttgatagattttaatttcagtttaacatggaccccagttttagatgatcttattacatgtgctcttttcaaaacataaaagttaaaaatgaacctttaaaaaatcccaccatcattttcacaaatagcttgcagcaatttggttattgttttccacctccaaagggcacaaagcaattactcagagggataattacagggatagaaggcattgaggagctgagccttccacctccaaattccgtctctgctggaaactaagcaattggctcataattgccaaactcaactaatgggcatgagaa

SEQ ID NO: 425972 - DNA, 505 bp, Homo sapiens
ccaagtaggataaaaaaataagttcacacctagacaatgtagtaaaatggtagaacagaagagatataatgaaaatattaaagacatctggagaagcagcatattatctaagaagaaataatgtatagtctggtctcaataaattcaatggtaacaatagaaatcaaaagataatgaaacaatatattcagtgctgagataaagtaactctcaatttgctgttgagagaattccatgtccagttaaactaccatttaagaatgataatgaattaaatgttttcagatccatattgtatgagtttaccattaacagacrcttactagtgaacttctaagtatctgccttagtaagaaagaatctcaatctgtaaagaaggaagtgtgagcaaagagactgaaaaaaaataagtaattccaagcaaactgccgaattttataatataatcacaatagctattaactttagaagtacaaaaacaagttcaaactaaagtatgtaaggt

SEQ ID NO: 425973 - DNA, 563 bp, Homo sapiens
ttgccgattttgctgagggttctaatcatgaagggatgctggattttgccaagtgctttttctgtctattgagatgatyatgtgatttttgtttttattttatttatttatttatttatttacttgcatatgttaaaccatccctgcatccctggtatgaaacccacttgatcatgatatattatctttttgatatgatgttggatttggttagctagtattttgttaaggatttttgcatctatattcatcaggaatattggtctgtagttttctttttattttttgttatgtcctttcctggttttggtaacagggtaatattggcttcatagaatgatttagggaggattctctctttctccatcttgtggaatacagtcaataggattggtaccaattctttgagtgtccgatagaattcagctgtgaatctgtctggtcttggactttttttttgttggtaattttttattactatttcaacctcacttgttgctattagtttgttcagggtttttaattctacctgattgaagctaggatggctgtctctttccagg

SEQ ID NO: 425974 - DNA, 507 bp, Homo sapiens
tattaattaacttctccaatagagaaacctagaagacacaatgttagccatgtggtaaaaatgaacatcaccagaaatcgtatgctacttgaaataatatactaaaaagagcacagcatcatttctgtgatatccctgcaaaagatacaaaacctgaatctattcaggagcaaatgtctgtcaaacacgaattgaaggatgttctacagagtaactcttatggactcttcaaacatttcaacgtcattaaaagagaaagaaactgaagaacttatctgatcgaaagagactaaagtgatatggcaagtaaatataatgcatgatcctggacctttgaaaggacattattgggacaataagcaaaatctgattaggatcagtagattagatggtaacatggtatcartgtgaattttctgatttttatggttgtactatggttatataggagaatgttcttgtttttagaaaatgcacactgaagcattaaggtgtaatggggcttaa

SEQ ID NO: 425975 - DNA, 605 bp, Homo sapiens
agggatttatttcattttgtagcccagccaaaagctcaggcagactatgactaaaatggtggtttgagggactggctgtatggatctttgtttttattttctatcctgttaaaaaatgcgcaatctttactctgccacagaagaaacattgcatggtttttctggctgttttcaagtgttttgaaaattctattccatttaccctttctgggactctgggagacatactagggggtcagggaggggcatggtggggactcacccctccactgacgctatttttatggacatagggtcyttttgagaaaattgagttgctttaaaagactttaagttttggattcaactgtgtttgtatccaggacacaagcaaaatttgatttgcttaatagattctgtgggttgtgctgtgttgggacaagatatgcccacattttcccagctaccatttgggaagctttaatacccacatggtgctttaggctgggtggtctctgcctctaaagcccctggatagcaccacctctgccctggaggagcaatgattcagtaagcaatgctgtccaacagaaatataatgtgagttacacatgcaatataaaaac

SEQ ID NO: 425976 - DNA, 544 bp, Homo sapiens
cagtatttttctaatccctctcttaattcagtccccttccttcacaaccctcgtaataataaaaattcaagtcataatccagagaggcagcaatgggataatttttggtgtgtttttcagaggttccatctggggctcattctttaccttgaagtcctttaatatttaccaattaacctgataaaaaatctccttacatcaagtagtctaccacctatcagaataagagragtattatatagcaaatagggtaaggatgagagatcttattgttctctttttgagatggggttttgctatgttgtccaagttggtctcttgggctcaagtaatcctcctgcctcagcctcctgaatatccgggactacaggtgtgcaccgctgcccccagcttaagagatcttgcttttaagtgtttaaaatagtatataaatcaagccaagctataataggagtcaaaggtgacaatagaaggctattataaccatggtcacagtcttagaaaaggaaacgtagatgttaataaagttatttttccttttcca

SEQ ID NO: 425977 - DNA, 488 bp, Homo sapiens
aatgtacatgttgcaaatagagccaatcgtaacttttccctaggactgtttaactcaggattagagaaatagcaygcatttaatgttcttttctaaaatggcgctatgtgactttagagctatgagcagccacagtttccatcctgtgaaagaagccagtctgtaggaataaatgaaactgcacataggaaagagcagacatgaaagaacgcgattaagctgtcacagatggcagcagtttcttctcccagctgcttctcccccctccccccaggtaagtaagctttctcatcactcttcttttaggccaaagctagttcacagttggttttaaccaaaacagtactgaataacatatcttttaatctaaagaccaaaaaatgaaatgataaagccagaactaccacagacagttgtatactttgtgcactgcacaagagccaaagtgagcagaagatgataaaaatccagccatgcaacttggtgag

SEQ ID NO: 425978 - DNA, 604 bp, Homo sapiens
cttcactccttattacatcttgggtgttcttctgtctcccaaagtgtggattttaactgactcagggataccttgagagcttctttaatgaatttttcttaaacaacagcccttcccatttggaagcaggtgtgaagagctggatccgggaagccagctgggatgctgcaggcatcgtccctggcataggtgcagcagatggaagtactccatgcctcctgcatgtggctaagtggacagcagagtagaagcactggacacatgaagagccttatttataaaatgttmctctgagcagcaggaaataaaaattggaattaagatagtaaatgttgcctatctgcctgtgtacaaatagactatttctagggcaaaatggccctcagctaagtacataaacataaagtaaaagctatccaaaaacttagaatggtgtttacttattagatggttacatctcctgcgtcctgattctacttgcaattaaccaagtttgatcacgtcaatttattatcccttatatttctatgtaaatgctgtgaattacaaggttaatcaagttattttgttctctagctccctatcccctcatcaccaacactac

SEQ ID NO: 425979 - DNA, 458 bp, Homo sapiens
ctattagtggctgccggcagtccttggatcatggccacatcattccagtccctggtttcatcatcacatcaccttctcctctaatgtcaaatctccctctgcttctcttttataaggacaactatgattacaccaggcccacccagataattcaggatatctactcatatcaatatcctaaacctaattacaactacaaagtcccttttctacataagataatagttacaggctgggtgcagtggctgaggcctgyaatcccagcactttgggaggctgaggtgggcggatcacaaggtcagtagatcgagaccatcctggctaacacggtaaaaccccgtctctaccaaaaatacaaaaaaaattagccgggtgtggtggcaggcacctgtagtcccagctacttgggaggctgaggcaggaaaatggtgcaacagagcgagattccatctaaaaat

SEQ ID NO: 425980 - DNA, 581 bp, Homo sapiens
agacttctcaatctaaatctttagccagaactttgtcacatggctcttcaagacaaactaagaaaagtagctcttaagccaggcacaaaatttaggagtctgttaatacagaagcatgaatacaggaaagacaattgaccatatctactccaacaattaaggtagttatcactgtgcctggcatataataagtactcaagaatatgacatattattattaatacaaacaaggctccaggaaaaaatgggattgcctaccatatttcagtattgtgacagagagttgtatgtatgttgttttattcaattaccaccatgaccctataaagtaattcagtttggtatgccaataatgttttggagtaaaaaacattaatgcttaaagagwagtgaaaaatcttgtctatgttcccccactaggcaatgactgagctgctattcaaattcaagtccatttgactccagaagtccatttttctgctcatacttccactctgtgtcacttttttttttttttttttttttgccaaggagaatgacaccatggatactatactgtttcctgaagtgatctttcttgg

SEQ ID NO: 425981 - DNA, 540 bp, Homo sapiens
catttttctgctcatacttccactctgtgtcacttttttttttttttttttttttgccaaggagaatgacaccatggatactatactgtttcctgaagtgatctttcttggacttgattcaagtccttggacttgaatttcttggacttgattggtcttctagagacaggccattctaagctgtgaggtgtgagtacgagctgtcagtaaggtacttaggagtaatgtgagattgaaaacacaggcagcagatccaaaggaacattcctaacagacatatgactcatttggagcctgctccacagcacatgcagcccccgcacactcagtaccttagaactgaacaatgcactcccacacctcattcctgagatacgcaatcttcttactgccaayggatcaataggagcaaatatactgcacaaatgagtcacatggtgtacttgtcagcatgtctgtgcaacagaactctgagtgcttctgggtttttggaagaccattacgaggtaggatttctcacttccttcctagattggaggc

SEQ ID NO: 425982 - DNA, 531 bp, Homo sapiens
tctgtacaatgaatagaataactgtgaaggtattatttccccaactgtaaaatgatgatagcagtatttaatttctccctcagagtagtgttttgaggattcactgaagtaatatatacagagtgcatttggcagtgcctggcttagagtaaaagctcaataaatattagctaataagttgcatggtagacagaaaataatacatacctccattcaaaacctaattctagcacttacttgcctaacccaacctctagcatcttctctgagcttcaatttcctcaactgtcaaatayttattccatgtggtttctataaaaatgtaccatgcaatctatgtgaaatttccttagctctatgcctcgtaactaatatttcataggtagctagtaatgttgtcattatcatcaatactgccatcaacctttgtactttttctctaacaaaacattattacattcagcatctttactttccttgatacaatcctatgtagtatgtagacatataggacaggttttacctccattt

SEQ ID NO: 425983 - DNA, 605 bp, Homo sapiens
ttatccattagtctcctacagacagactagtctcctctggtctctgaccagagtttaagaatgaacctttccagtggtcagaaaagtgtatgtttttaaaaaatggttttggaaccaactctttacaatttcttttttctatttgactcataccttgacctggaaatctcaaactcccaagttaatgatgcctgttggctttcctcatttggaattaataataaccagaggatacttctagcctcgtagagttacaagaagtgaagatatatgtatgacacatggttaggtgcttgtggttcaagtgctaccagaaactggtcaggtgaccatgagcaaaccactttcactctctgggatacaagggtctcattcataagaaaaggttattgactatagtagattctgtcagctgaaatatctagagaaatatacaaakgtaataaacagaaggctcttagggcaaaatgagaatcaaggctctgagaattagaagacagtcagtaactcacttcaactgagcagcaactttagtgattaacttcatcaatagatggaagttccaacttcactcattcctttatttggtaaatgcttagtgggaa

SEQ ID NO: 425984 - DNA, 450 bp, Homo sapiens
aaacaagatttccaaccaaggaaaaatatggaaaagaaagggacaggcacctcaagctgtgtgtcccaagccttggtgaaggccaacagaacagggagtggctcacctcccattgagatgttatgaaactaggaggaccctcaggaatactatagtctaggaggaggttcagagaagttaagtggcttgctcaggattggtgacttgcccaactaattacccctactaattagttgaatggggtccagtgttcattccatttcaccacactccctccatattgtcagttaatatcaatgctaaaacatcacaaataaatayaaggagggaattgagacaataataaccagaggcacgctgttgtggacgaggaggaatgtattagtcagagttctccagctcttcagaaaaacaaaaccaacaggatggatgtgtgctatatatgtaaat

SEQ ID NO: 425985 - DNA, 571 bp, Homo sapiens
agatgttctctattactatatttttgaatgaactttctacttcagtctctatctctgtctgcctcctctttaaggcaagtaactattagatttgtccctttgaggttattttctagatcctgtaagcatgctttattcttttttcttttgaatcctctatgtattttcaaatagcctgtcttcaagcttactaatcctttcttctgcttgatcaattctgctactgagagattctgatgcatttttcgstttgccagttgaatttttcagatccagaatttctgctcaattctttctaattatttcaatctctctgttaaagttgtctgataggattctgaattctttatctgtgttatcttggatttcattgagttttctcaaaaaacagctattttgaactctctgtctgaaagatcacatatttctgtcactctgggattgatcactggtgccttatttagttatggtgaggttatgttttcctgaatgatcttgatggctgtggatgttaatcaatccataatccacaatcttcaatgtctgggcatcgaagagtcagatatttatt

SEQ ID NO: 425986 - DNA, 611 bp, Homo sapiens
tatattcttcttgagtgaaggataaaggggaaaagtgcaattagagaacaaaaaattacatcatccagaggaaagraagcatctttagcatcctctaggatgagaatggcccttagccaagacctgaatgttcttacacatgattactctaaattcaggctggagctaagggggttgttatttagatatctatcactcatcaatgccaattacctgaggacaccatttgaaagggtgaggttagcagttggaggaaaggaagtcacacttctgcataatcaaagaaaggactcacttctttatgtaagagatagcctcatacattgagaattatgggaaaaataaaatatttctgcttatcagatgactgtactgactctgaaattgatgtttgtctttggaattgtgagtagatgtgtttgattttgatcgttaggaggagctggacaatagggagaattatgaagtttatctctaacttccgtttgtacaccaatttcaaaagcatttcaggaaatgttctgggatatttcatgtgccttacagtgtcagaggacagggttgaatcttgctggagctctccccagcccctactcagtctccatgaattc

SEQ ID NO: 425987 - DNA, 578 bp, Homo sapiens
agggtggtgttggggaggaaccaaggggatggcaaaagagcaagtgatttctgctttgcatttagtagcagttacttctagacccaaacaacttatttgcaactttcagaagcatggaaggatgggattgtcattgacttagtgtttctgtgcctcgcattcctttctgtaaaattggggcaatccagtgcctaactcaggctagatgggagaattacatgagataatgcatgcactgtgcctagcacagggtaagtgaccaataaatattaggcttttgttattattacactcccggctgccttgcagcttgggtcattctgggtccccatcyatgcccactcttctgccctcagggacttgtggccttcttagattatatctaaaatctttcctgggctaacattctattacccaagcctattcctctctgtttataggtgaagagagaaactgatgcccagagaggtgaagtgacttgttcaaagtcacagttagcaagtttaattctgttgctgctcttacgtattagttacctattgctgcataacaaattaccctaagatatggcatcttaa

SEQ ID NO: 425988 - DNA, 581 bp, Homo sapiens
cctattacattccaggcactgtgctatgtgttttgcatatacattgttcatttagctttcaagcaaccctgtgaggtagctgttaatagtttcctcattacagtgatgatgaaactgatgttctgataggctgagaaacttgttcaaggttgcatagctagtaagttgtggcaaatctaggctgttctgactgcaaagatcatgtttatttatgttgacwccacaatcttaaaatggaacaacagcctattggattactgaactgtagtgaaatgcaatataacttctctttttcatgttttcagcagtttgcataaataaattgttgaacaactattttaagattctaaagctgtggtttttgaattctagttcggataagaatgacatgaggagtgtgttccaatgcagacctctaagccttgtctcagagagtcttggggcatctaatgcagaacccaggaagctccatctctagtgagcattgcattctgatgtcattcgtccatgaaacacattttgacagatacaaatctagaggcatgtaattcagcccagaccactaaataaaagcttcattc

SEQ ID NO: 425989 - DNA, 584 bp, Homo sapiens
ggttgagaaacaactacggtatttacttagcacctattatgctcatctcctttccttccctcaaagcttcatttagtccaattaatgagataagatttggattgattaccagactgcttaagcttaatcaaccaacaaagactgaagagagtcatgaaagaagtgagagcaagaggaggaagggcatcccagtccttgttgttcaattacagcaattaactgtcaggtgcagaaaggaaaggcaagaacaagagcaaagaggaggtaattacacagggttgagcttggggatgcctttgcagaggtgcagacacgtttctgaggcaactctccagatctcatctacgaaaacaacaaatatatattatatatatttcctctctaaacctactccttttgccaycaaattaacttctaaggcctatcttgttatatctgccatatatatatatatatatgtatatatttatgtgtatatatatatgtgtgtatatatatacatatatatgtgtatatcccattatatattccataactgtagatttggcccattttctccattctcaccccgttatgaggctcaa

SEQ ID NO: 425990 - DNA, 449 bp, Homo sapiens
ttttaaaagcaagcctagtaatcagtactttgyttcctgttcttaagcaatctcagaagacaaaccaagtaggggtcatttctattccattgggttaaaagaaacctcagaatggaacacattgtaaggtaatgtttacaggttaaatttattgaaactaagtaactgagatagaaagttgtcaattgaaaaatatctctgtattactgtgtaggtcaaaaaagaccagagtaaacatcaaattaaataagcagcttgatttctgagcaaagtcccttcccttcttgctttctgagcaatgggatgaatccccctttgtgcatccctttctgagactgggcagggcagtctcgtgaattcctccgcatctggctgcctttaggagagagctcctagatagatgcttaccttacttattgctgtgagtaggagtttttttgtttgcttgt

SEQ ID NO: 425991 - DNA, 600 bp, Homo sapiens
actgctaatgccactgactaaactatagttgcagcctgaagtctcacagccgtcctcagggtaaatatcacctcaaacaatttttgtcaactttattaagatataattgacaaataaaaattttatgtatttaaggtgatatattcatgcattataaaatgatcactgcaatcaagctaattagcagatccatcatttcacagctaccatgtttttctttcatgagaactcttaagatctaccctcttaacaaatatcgagtgtacagtacrgtatcgtttactatagccaaagctgtacattagacctccagaacttactcatcttgtataaccaaaactttgtgctctttgaccaacatctcccatttgcccttccttcaacccctggcaaccaccattctgtctgcttctatgagtttgactgttttattttattttatttacttatgttttgtttttttgagacagagtcccgctctgtcacccaaactggagcgcagtggtgcaatctcagctcattgcaacctccaccttctgggttcaagtgattctcctgcctcagcctccctagtagctgagattacaggcgtgcaccacc

SEQ ID NO: 425992 - DNA, 505 bp, Homo sapiens
caaactacctaacccagaactacctaacccagaaacagaataactcctgtcacatccacatcccccaacttgcatgggaagttctgaaaggaaacttatgtcaggagatgtggcttcatttcctttgatcagacttatcatcctggggctaaggacagaacagtccatagcattttcgtttaaaatcgtgtaaactcatttttgcaaaataaccacctgtgatatgttaaagccaaatttagtcattatgttgcagaatatggcgtggaaatcagggagggaggccaaaaaagtctccctcaactctgatgtaatatatargcatactggagttaattttcctgttgcttgaatcacccagcaactgcctcagtgctcagcctcatcaacttgtgctgtgagtgagagtgagaagttgggagaaatcttcaaagaaatgggccccaagaagctaaagtcctgtctcatgttcctggcaatgattatttcacctgcaggctagtga

SEQ ID NO: 425993 - DNA, 523 bp, Homo sapiens
atgcatgcgggcttaaaacctagataggctgggcgtggtggctcacacctgtaatcccaacactttgggaggctgaggcaggcagatcatgaggttaggagttcgagaccagcctgaccaacatggcaaaacaccgtctcttctgaaaatacaaaaattacccagcgtggtggcacacgcctgtaatcccagctactcaggaggctgaggcagaagaattgcttgaacccgggaggcagaggttgcagtgagcggagatagcaccactgcactccagcttgggtgacagagygagactccatctcaaaaaaaaaaaaaagaaaaacctagatgatgggttgataggtgcagcaaaccaccatggcacacgtatacctttataacaaggctgcatgttctgcacatgtatcccagaacttaaagtaaaattaaaaaaagaaaatagattataatggaaattgtattatttgaagatattttcctctacattttctgacttatgtgttagcactgctttccaaat

SEQ ID NO: 425994 - DNA, 523 bp, Homo sapiens
atgcatgcgggcttaaaacctagataggctgggcgtggtggctcacacctgtaatcccaacactttgggaggctgaggcaggcagatcatgaggttaggagttcgagaccagcctgaccaacatggcaaaacaccgtctcttctgaaaatacaaaaattacccagcgtggtggcacacgcctgtaatcccagctactcaggaggctgaggcagaagaattgcttgaacccgggaggcagaggttgcagtgagcggagatagcaccactgcactccagcttgggtgacagagcgagactccatctcaaaaaaaaaaaaaagaaaaacctagatgatgggttgataggtgcagcaaaccaccatggcacacgtatacctttataacaagsctgcatgttctgcacatgtatcccagaacttaaagtaaaattaaaaaaagaaaatagattataatggaaattgtattatttgaagatattttcctctacattttctgacttatgtgttagcactgctttccaaat

SEQ ID NO: 425995 - DNA, 593 bp, Homo sapiens
aaagctctgtgttggctgtcctttgatgcctggatatgatggtgagaggtgggctcattgatttttctcaggataacggtgtgacataatggtgcggcagaggttatggcagctcctaatcaccaaagacaaggtgagtacacttaccttagtggataagaggttgaaaatatcagcatattttgtcctgaaggaatctttgctgggggctatttatttgatcacaatatccctagggttgaaatasattgatagcctacttaaatgttcttgatccaaataacagaaaaatatttctaagtttggattccaaatagaagaattactttacatacagcctcttaagaagggaagatgaaattctttcgaggaaggacactggagaattaacacaagattatactgtagatcttctttccaagacattttctagagtcatgtgtagagaggaaaaaggatatatttggactttatacggactgttggacactagctccaagttgatgtaagtgccgaaggattcaaaatgctgttttgtttcatcaatcaacaggaggtctatagtggacagataatgaatggagttttgtccc

SEQ ID NO: 425996 - DNA, 564 bp, Homo sapiens
gtctctgtgtcatatccaccttagtaatcccagcattgagctctggcactctgaatgtgttagttatgctgtgaaagtaagactggatgaatactgrgcacatgcagggaaattctgagtttaatgtaacgagagagagagagggcatgcacagtatttcagattaatctaccaagctatgtgaatgtgaattagaagaggatagaggcagagtgatttctgttgcaatgatttaactgaaatcccttttaattccataattcttgattgaaggtggggactgtgtgttaatcatctgtgagctccagtgctgagcccagcttggagtggggtatctgaaatgaagtgaatgtctttaacatacatgcagataaatgatatagataataggtagattggttgattgattgatttcagaaagttatatttttgcatttgaaaacctaacttcctaatagcttaggggatccatttataaggtccttcaggcacttttcactatctattattctcccaaattaagatagcttttgtatgtgggcaggtggaatatttttccccagg

SEQ ID NO: 425997 - DNA, 401 bp, Homo sapiens
agcccagccttcaaatgcatggtttcaaggtataaaaataccccaatttagaagagttttgtgctagtctttgctaagaaagcttaaacataatgttatagcttgacttttaggttttctagtatctccaacaaatgatcattgtgggtttgcacagtatcaatgatattaatttgtcacagacccactttctttgcttataatgcatttgctgtgcatagcagtaatttccagttaagcattcttgaccttcaaatacataccaagctcttaaatcggggtattcatgacccagaacatgctcacagctatagaaaatcaggatattkgtggaactaggagtttctccacgtctgtccagagatcaccaacttgattgagagcttctgtgttcaagtgac

SEQ ID NO: 425998 - DNA, 429 bp, Homo sapiens
tttgtgtagtgcttggtcctctaagcctctctgtttgccaacctatttcatccatcgcgcttcatggagaaagtgcttcaggccttcagggtcttcagtgacctataaaatattcgctctcaaatagaaaaagaaaacagttaaataaaaaaaaaaaagcaaaggtttacaaatactaaattatggcaagcagtcaaatgtaaatcaaatcaattcaaaaattatatatgtgtcagtatattttatwtggcatgtaatgtaaattcactttattgcacctttgatatagtgtgtggcaggcctctaaaagtaagagtgtctaaggtctacaaataaaacataaagtatccctctatatcttgttacctccacatgaatttttttaaacatattaccttacttttgttactcttatgatgtaacattaaa

SEQ ID NO: 425999 - DNA, 419 bp, Homo sapiens
agttagcctgacactctgaataccttcagctcttctgtggcagctggtaaaaattctccttagtacctagttcaaaggtaagatctcccataatatcatcatatctggaagttctctttcccttctctgtagcaccttgtcttaaacattctcatagtatctctcacatctctccttgtaataacaatatcattacttacctagtcccactcaccccctaaaagtattcaaatatgtgtatawatacatgtgtgtgcatgagtgtgtacacacactgagttaaattttaagtcaaatttatatatatacacacacacatatattacatattacatatacatgttgccagcttaaaatgggttaccagtgctcaaaactttttacatatatataaataaatatatatataactttatttt

SEQ ID NO: 426000 - DNA, 612 bp, Homo sapiens
gcaagtatattccaatatctaatagaattagggtttccctcataactcttcttttgtagacttttttctatataccatataatggttatttttctgaattaatataattatttctaacaattcaaaatttttaaaagtcttgctcaagagtgcaattttagcttaatttgttatctgacatctttattgtgagttttcttgtccaggaacaagttatgtctttcaatttagtccaagtcctcttctatatattcctcaaaagactgtgtcagatttttcctcatataatttctccgcatttgatatcttccaccttcttaaattctcttgctgttttttaacagcttttcagttaattcctttatgtcttccagtcatacattgataatatatgtaactaatgataggtttgccataccacttcyaattatttttgttatttatttgtacccaattatattggctggtatgtgactactgactttggtgggaatgttcttaaaacttagcactgatgctggctatatacaaacatactctcatacacacacacacacacacacacacacaccactatgaagattttatacaaatcagaattaagtgcaaatt

SEQ ID NO: 426001 - DNA, 612 bp, Homo sapiens
gcaagtatattccaatatctaatagaattagggtttccctcataactcttcttttgtagacttttttctatataccatataatggttatttttctgaattaatataattatttctaacaattcaaaatttttaaaagtcttgctcaagagtgcaattttagcttaatttgttatctgacatctttattgtgagttttcttgtccaggaacaagttatgtctttcaatttagtccaagtcctcttctatatattcctcaaaagactgtgtcagatttttcctcatataatttctccgcatttgatatcttccaccttcttaaattctcttgctgttttttaacagcttttcagttaattcctttatgtcttccagtcatacattgataatatatgtaactaatgataggtttgccataccacttctaattwtttttgttatttatttgtacccaattatattggctggtatgtgactactgactttggtgggaatgttcttaaaacttagcactgatgctggctatatacaaacatactctcatacacacacacacacacacacacacacaccactatgaagattttatacaaatcagaattaagtgcaaatt

SEQ ID NO: 426002 - DNA, 612 bp, Homo sapiens
gcaagtatattccaatatctaatagaattagggtttccctcataactcttcttttgtagacttttttctatataccatataatggttatttttctgaattaatataattatttctaacaattcaaaatttttaaaagtcttgctcaagagtgcaattttagcttaatttgttatctgacatctttattgtgagttttcttgtccaggaacaagttatgtctttcaatttagtccaagtcctcttctatatattcctcaaaagactgtgtcagatttttcctcatataatttctccgcatttgatatcttccaccttcttaaattctcttgctgttttttaacagcttttcagttaattcctttatgtcttccagtcatacattgataatatatgtaactaatgataggtttgccataccacttctaattatttttgttatttatttgtacccaattatattggctggtatgtgrctactgactttggtgggaatgttcttaaaacttagcactgatgctggctatatacaaacatactctcatacacacacacacacacacacacacacaccactatgaagattttatacaaatcagaattaagtgcaaatt

SEQ ID NO: 426003 - DNA, 605 bp, Homo sapiens
tcttgttgccaagtgcaaaataatagtcttatctttgtgggtgtggttctggctttcctaacttgtctgtcactgatcactaataaacatcctttgtcccatctaaactgagttataggatgtgtcccaatttaccttaaggtttcccacctccactccattgcttatgctagttctctgcctgccaatggacaatctaattcacttttcctttgaaactcgtctcacatactaattcattaaaaatatcaagttctggctttgttctttttgcttaagattgctttgactatttgggctcttttttggttccacagraattttagaatagtttttttctaattctgtgaaaaatgtcattggtagtctgacaagaatagcattgaatctctcaattgctttgggcagtatggccatttttacgatgttgattctttcaatctatgagtatgaaatgtttttccatttatttatgttgtctctgatttctttcagcagtgtcttgtaattctccttttagagatctttaacctctttgggtaggtgcattcctgggtatttcattttctttgtggctattgtgagtgggattgtgttgtttattt

SEQ ID NO: 426004 - DNA, 605 bp, Homo sapiens
tcttgttgccaagtgcaaaataatagtcttatctttgtgggtgtggttctggctttcctaacttgtctgtcactgatcactaataaacatcctttgtcccatctaaactgagttataggatgtgtcccaatttaccttaaggtttcccacctccactccattgcttatgctagttctctgcctgccaatggacaatctaattcacttttcctttgaaactcgtctcacatactaattcattaaaaatatcaagttctggctttgttctttttgcttaagattgctttgactatttgggctcttttttggttccacagaaattttagaatagtttttttctaattctgtgaaaaatgtcattggtagtctgacaagaatagcattgaatctctcaattgctttgggcagtatggccatttttacgatgttgattctttcaatctatgagtatgaaatgtttytccatttatttatgttgtctctgatttctttcagcagtgtcttgtaattctccttttagagatctttaacctctttgggtaggtgcattcctgggtatttcattttctttgtggctattgtgagtgggattgtgttgtttattt

SEQ ID NO: 426005 - DNA, 605 bp, Homo sapiens
tcttgttgccaagtgcaaaataatagtcttatctttgtgggtgtggttctggctttcctaacttgtctgtcactgatcactaataaacatcctttgtcccatctaaactgagttataggatgtgtcccaatttaccttaaggtttcccacctccactccattgcttatgctagttctctgcctgccaatggacaatctaattcacttttcctttgaaactcgtctcacatactaattcattaaaaatatcaagttctggctttgttctttttgcttaagattgctttgactatttgggctcttttttggttccacagaaattttagaatagtttttttctaattctgtgaaaaatgtcattggtagtctgacaagaatagcattgaatctctcaattgctttgggcagtatggccatttttacgatgttgattctttcaatctatgagtatgaaatgtttttccatttatttatgttgtckctgatttctttcagcagtgtcttgtaattctccttttagagatctttaacctctttgggtaggtgcattcctgggtatttcattttctttgtggctattgtgagtgggattgtgttgtttattt

SEQ ID NO: 426006 - DNA, 605 bp, Homo sapiens
tcttgttgccaagtgcaaaataatagtcttatctttgtgggtgtggttctggctttcctaacttgtctgtcactgatcactaataaacatcctttgtcccatctaaactgagttataggatgtgtcccaatttaccttaaggtttcccacctccactccattgcttatgctagttctctgcctgccaatggacaatctaattcacttttcctttgaaactcgtctcacatactaattcattaaaaatatcaagttctggctttgttctttttgcttaagattgctttgactatttgggctcttttttggttccacagaaattttagaatagtttttttctaattctgtgaaaaatgtcattggtagtctgacaagaatagcattgaatctctcaattgctttgggcagtatggccatttttacgatgttgattctttcaatctatgagtatgaaatgtttttccatttatttatgttgtctctgatttctttcagcagtgtyttgtaattctccttttagagatctttaacctctttgggtaggtgcattcctgggtatttcattttctttgtggctattgtgagtgggattgtgttgtttattt

SEQ ID NO: 426007 - DNA, 440 bp, Homo sapiens
tcaccaggggatgaagtggcaccaagaagatttctcttgatgctgagctatgcaggcctgagatatgaggttacacaggtaaaatgcttcctactgttttctatgaggcgatcctcagtttttgtgctccacgggcttggtacarcttctttattagactctggacctctcccagagttatttttggcctacgaatagtggttaagttactgtttttgtagaaagacaagggctgagattgcctactccactatcttgctgatgttacatctacctaactctatttagtatttccatagtctctatatgtttagacagtatctattgactcttagatatgagcaatgcagatttagtgtattttttcttcttttcctcctattatctagcctacttacagcaatatcatattatttttcttactgcttatccttatatat

SEQ ID NO: 426008 - DNA, 608 bp, Homo sapiens
ttttctagaaaataaagattcaccttttatgcaaaagtatgacttgtgtctgtgaccaccgacagctttactgtcttctcctttgttaattaataaaaacaataacaaccataagttaataccaactatgtgtcaggcaccataggaagcacctttatgtatgttatttctgatatttataaacttcttatgaggcaagcattttgctacctcattttgcaaatgaaggaacaaaagcttagaaacaaaaagtagtatgtccaaggtcagtcagcagagttaagattagaatctagacttatgtgagtctgaattttgtgttcttctcatgaggttacagagcctttcaatactatagaagaatatttctactatgtcattgctattttacagaatacggataacctcaaatacgtaatacataatttcatgggtaacttaaaaaaatctggtgattataaaacagcactgtccagtagagttttctgtgctgatggaaatctgtatctatgatgtccatatggcagctgctagttacaagtgaatgaaagcttgctagctrcaagcatatgaagcatgactagcattactgaaaaactgaattttaa

SEQ ID NO: 426009 - DNA, 545 bp, Homo sapiens
cccaatttgttttacaaggcttgcataacattgatacctgacaaagctatcagagaaaggacagttataggccactttctctcatgaatttagatgcagaagtttgaggtcagggatgtattaaaaagtccagtcttatgggttccatctcacatctgttgaatcataatctctgagcatggagtccagtgagatgagttatcataattcttagtaattctgatgcwttttgaagacaagcatctgtaaatgtttgtttttcaacctttctaggtaactgacatagggcaactaatgaatagactgttcatatgcaccacagacatttctttttaaaatacacaattgaaaaaacgcaatttgagacatagtatttgtttccaaatttggggaagatatagtggaaattcttgggacatatgcccaggccataaacctgttcccctcttaacttcttggggaacatcctatgcccatctgctggggtggtccctaagggccatatttttctacaggctaaagaacagtatgtgctgctagtagcc

SEQ ID NO: 426010 - DNA, 545 bp, Homo sapiens
cccaatttgttttacaaggcttgcataacattgatacctgacaaagctatcagagaaaggacagttataggccactttctctcatgaatttagatgcagaagtttgaggtcagggatgtattaaaaagtccagtcttatgggttccatctcacatctgttgaatcataatctctgagcatggagtccagtgagatgagttatcataattcttagtaattctgatgctttttgaagacaagcatctgtaaatgtttgtttttcaacctttctaggtaactgacatagggcaactaatgaatagactgttcatatgcaccacagacatttctttttaaaatacacaattgaaaaaacgcaatttgagacatagtatttgtttccaaatttggggaagatatagtggaaattcttgggacatatgcccaggccataaacctgttcccctcttaacttcttggggaacatccyatgcccatctgctggggtggtccctaagggccatatttttctacaggctaaagaacagtatgtgctgctagtagcc

SEQ ID NO: 426011 - DNA, 582 bp, Homo sapiens
ttagaattatctccctgtctgaaatttatctttctaggaacagatagcacctcattttttttctgagaaagatttagggattatttctgccatatattgttttaactcatattatcaaccattgctattttatcatatgttatcttgtattattccacaactatataggtttgtatgtgcatatgtagcatatgtatagacgcataattgcctccaagagcataatccttttgagacagacattgtwcttttggtgagaattgaattaagtgaataaatgcaaactcctgcaaccacatcttcccccaacttttcacaaagctagccataaggaaaaaaatgcaaagcaagacagcagaaacaaccaaaactacgtcttctacaggactctcaagtactgagagaataactgagttcagtatttgtctcctattgccttagaggaggacatggcaaattttcacgggccatgtttcctgcagctttcatgggaatgtttatagagaaaggaagtgcgttaaagaaagcaaaaatagggagtggaaggtgatagtctgcatctgtgttgtcactttcaggcta

SEQ ID NO: 426012 - DNA, 475 bp, Homo sapiens
gattatttctgccatatattgttttaactcatattatcaaccattgctattttatcatatgttatcttgtattattccacaactatataggtttgtatgtgcatatgtagcatatgtatagacgcataattgcctccaagagcataatccttttgagacagacattgtacttttggtgagaattgaattaagtgaataaatgcaaactcctgcaaccacatcttcccccaacttttcacaaagctagccataaggaaaaaaatgcaaagcaagacagcagaaacaaccaaaactacgtcttctacaggactctcaagtactgagagaataactgagttcagtatttgtctcctattgccttagaggaggacatggcaaattttcacgggccatgtttcctgcagctttyatgggaatgtttatagagaaaggaagtgcgttaaagaaagcaaaaatagggagtggaaggtgatag

SEQ ID NO: 426013 - DNA, 580 bp, Homo sapiens
ttttaccttccttgcgacagttagaacatgctcctttagtttggagaagtgtgttattaccgaccttctgaagcctacttctgtcaactcatcaaaatcattccccatccagctttgttccactgctggcgaggagctatgatcctttggaggagaagaggcactcggtttttagaattttcagcttttctgctctggtttctccccatatttgtggttttatctacttttggtctttgatgttggtgatctacacatggggttttgttgcagatgtcctttttgttgatgttgatactattcctttctgtttgttagtttttcttctaacagtcaggtccctcagctgcaggtctgttggagtttgctggtagtccactccagaccttgtttgcctgggtatcaccagcggaggctgcagaacagcaaatattgctgcctgatccttcctctggaagcttcatcccagaggggcacccacctgtatgaggtgtctgtcggcccctactgggaagtgtttcccagttaggctacamtggggtcagggacccacttgaggaggcagtctgtctgttcccaa

SEQ ID NO: 426014 - DNA, 623 bp, Homo sapiens
attacctccaaaacttagtagcttaaaacagtccatgtttgattatatgacacagttctaggggttaggaatgctggcagtgcccagcagggcaactgttctgctccctgtggcattaactgaggagcattagtggaattcagctagtggytgtactacatagagggctgaagatgatgccactcacatgtttggcatcttggcaggggtggctggaggtatgggctcaatgtgaccatcaactgaagcacctgcaagtaacccctctctccatcacggtggtcttagagtaatcggacttcttacatggtgtttcagggtgcccggagacagcattcttagagaacagaagggaacattgctaatttcttaaggcctgagccagtacagcattgttttggcaattttgttaaacagtcacagaaaccattcagattcaagaggaagggtgtagaccttaactcttgatgggaggaatatcaaataatttgaagttttctttaattcactacacaaatgtaataataattcatttatggttctgtttactaaatgttttgtgtatactaacatagattttaaaaataaaagcaaacctaaaaatagtccagtttaataaagta

SEQ ID NO: 426015 - DNA, 634 bp, Homo sapiens
actgtaggagaatacatttttgttatgtcaatttctcatggcmaccacagaaaaccaaagtaaggtccaagtagtttactgataaggtaaaggaaaacatgggttggggaatgggaaagtgagacagcaaagaggaggcaagcaataaagatggttatctagctagcaatgtaagaagatggatgctggggaaaggctgggaggtggcataaaatgcatgcatcaaagttaatggatctgaggagaagggaactagagtatttatacactcattccagttagccattggctgagagctattctctgggggtgttatttctccagaactttcagctttccatatgaacagcaaagttcactccagcagcaagacagtaagcccacaaaaagaagcaccgatacatcagtgagagatcttgcgatggtggtatgtttcattaataactctgttaccttgggtgaggtatggtaaggccatgcatagatcaagagaggctaattggaaagagttgtagttttatgcccacacaattttcttgggagaacacagatacccaccaaccccactacctctaacataaaaccactcaggggaagcaacagggtcagtcctgaggcagaggaagaaagcaga

SEQ ID NO: 426016 - DNA, 468 bp, Homo sapiens
gcaagcactggtgcataggggctgtctttagttgtttggtacctgtccctgaggtgcttagcaaaaggggatcatggcctgagtctcatgaaaattccataatggaggtgactggggtatagacttaatttggctgatcaagaagaggaattcactgacttttatgcagggcctcagaactgggtaaagatggcatttaaaaaactatactaaaaattatacaagtctgatgaaagaaatcaaagaataaatggaagatatttcatgctcatgaataggaagactccatgttgtcagttcagttcttcccaacttgatttataaattcaatgcaatcctaatcaaaatcccagcaagttattttgtgaatatcaataaattgattctaaagtttatatagataggcaaaagacmcagaatacacaatattgaaggagaagaacaaagttggaagactgacactatctg

SEQ ID NO: 426017 - DNA, 606 bp, Homo sapiens
tgctaatataagttcaactgatattaggttctaaactggaagccagccatggtggttcacatctgtaatcccagcactttgggaggccaaggcgggaggatcacttgagtgcacatgagttcaagaccagcctgggcaacatagcaagaccctgtctayaaaagttttgggtttttgttgttgtttttaaattagccaggtatggtggtacacacttgtagtcctagctacttgggaagctgagatgggacgatcacttgagcccgggagtttgaggctgcagggagctgtgatcagtccactgtactccagcctgggtgacactccagcttgtctctaaaaaataaataaaataaagaacccttctaaaccatgtactgtgtgatattcattgtaagtgaataccaaaagatgggagctatttgtgaatgttggaactaagaaggcctaacagatgcagatggagtcatagtatgagctcaagtacaaagatggaaacagcatggcacattggagacagactcatccaccatatccaaattacttagtggttcatgaacaactgtgagtggataatcaagaatcaccagatacatgtgtagaagc

SEQ ID NO: 426018 - DNA, 606 bp, Homo sapiens
tgctaatataagttcaactgatattaggttctaaactggaagccagccatggtggttcacatctgtaatcccagcactttgggaggccaaggcgggaggatcacttgagtgcacatgagttcaagaccagcctgggcaacatagcaagaccctgtctataaaagttttgggtttttgttgttgtttttaaattagccaggtatggtggtacacacttgtagtcctagctacttgggaagctgagatgggacgatcacttgagcccrggagtttgaggctgcagggagctgtgatcagtccactgtactccagcctgggtgacactccagcttgtctctaaaaaataaataaaataaagaacccttctaaaccatgtactgtgtgatattcattgtaagtgaataccaaaagatgggagctatttgtgaatgttggaactaagaaggcctaacagatgcagatggagtcatagtatgagctcaagtacaaagatggaaacagcatggcacattggagacagactcatccaccatatccaaattacttagtggttcatgaacaactgtgagtggataatcaagaatcaccagatacatgtgtagaagc

SEQ ID NO: 426019 - DNA, 606 bp, Homo sapiens
tgctaatataagttcaactgatattaggttctaaactggaagccagccatggtggttcacatctgtaatcccagcactttgggaggccaaggcgggaggatcacttgagtgcacatgagttcaagaccagcctgggcaacatagcaagaccctgtctataaaagttttgggtttttgttgttgtttttaaattagccaggtatggtggtacacacttgtagtcctagctacttgggaagctgagatgggacgatcacttgagcccgggagtttgaggctgcagggagctgtgatcagtccactgtactccagcctgggtgacactccagcttgtctctaaaaaataaataaaataaagaacccttctaaaccatgtactgtgtgatattcattgtaagtgaataccaaaagatgggagctatttgtgaatgttggaactaagaaggcctaacagatgcagatggagtcatagtatgagctcaagtacaaagatggaaasagcatggcacattggagacagactcatccaccatatccaaattacttagtggttcatgaacaactgtgagtggataatcaagaatcaccagatacatgtgtagaagc

SEQ ID NO: 426020 - DNA, 606 bp, Homo sapiens
tgctaatataagttcaactgatattaggttctaaactggaagccagccatggtggttcacatctgtaatcccagcactttgggaggccaaggcgggaggatcacttgagtgcacatgagttcaagaccagcctgggcaacatagcaagaccctgtctataaaagttttgggtttttgttgttgtttttaaattagccaggtatggtggtacacacttgtagtcctagctacttgggaagctgagatgggacgatcacttgagcccgggagtttgaggctgcagggagctgtgatcagtccactgtactccagcctgggtgacactccagcttgtctctaaaaaataaataaaataaagaacccttctaaaccatgtactgtgtgatattcattgtaagtgaataccaaaagatgggagctatttgtgaatgttggaactaagaaggcctaacagatgcagatggagtcatagtatgagctcaagtacaaagatggaaacascatggcacattggagacagactcatccaccatatccaaattacttagtggttcatgaacaactgtgagtggataatcaagaatcaccagatacatgtgtagaagc

SEQ ID NO: 426021 - DNA, 540 bp, Homo sapiens
gatgctgggaaacatggttccagcttaggcagttggacacagtacaaacctacaagtgtttaacccctttccccatctgacatactgtatacaattatatagatttgtatccctgtatgtgcacatacacacgcacacaattctaaattctatgagtacagggatttttatctgttttacatacctcagtgtcttggcacatagtaaatatttactatgcttggcacatagtaaatatttaatgaatatttattgtctgaagttttgattgctagcctttgaattttacctgtggacaaaacctgagtcaggatcgttaattttgacaaaaattgacaaatacagttgacaaaacctagatccaggaaatgaaaaagtgaccaattccaagaamatgagtaagctgccaagccagaattggagacagcagtgtttgctagtgcataagacactgtccagttaacatgtccctctcctgtgagaaattcgactcagtctacttccagcggtggcctcatttctgtttttaagctcaggaaa

SEQ ID NO: 426022 - DNA, 610 bp, Homo sapiens
gagccactgtgcctggccaatttttttgatatattgcttcagcatagatgagggctacgcattccttgaaactttatgtacagctaagtttcaggtctttttgcatgtgatgccttatgtgttaggcagattcattttttagtcagcaattgagatagctaagagaccagaaggcttgactactgcatgtctcacatggaagagctaacattcctgatttgtaggacagttgtgaaattggtctctccgtaacttatgtagatcttggctatatcagaaatattccaagctgttgtaagaagtctagttactcacctttgggagagttgtggggaratagtatgtgccattatgagacagtctggtatgccaccacaaaccaccgccagaggtccaggacatagggaaagacatttgatgggagaggagaggtatgcagtggagtggtggctggaacacctgctcttactttctggaaacatgatcctaaatgagcatgtggtcatgaaacacaaagacaggtgaggaaaaaagtattggccatgatccttgctttggcatgttggaaatctggtcatttcatccaaatattctatttgccatcatgatg

SEQ ID NO: 426023 - DNA, 545 bp, Homo sapiens
tgggagtaattataaatggttattttgatttggacagcaacattacccactccttctctgatcaaacttctgtacaagattcaacatgttttcacctcccatatattatcagatattaactccagctgctttcttttctgtgccacatttaaaaacaccctttctttttaaggctttatcaccccatcctttatctagacctcattgacctygttctatcaaacggcagctgaaaaattattatgtgcaaaatttcaatgttttctccagcttcataattgtgaatattccaaagaagagttctgctctttcctctggcttttcatcagtgaatgtgttactcttttcctttctttaaattccaaagaaaagtatcatttttcaatatggtacaaacatttagcttttgctcactgaagcaaaattttcaagtatttgattcttcctcagattattgtactcccaggtaaattaaatgtcagcatgagggatagcttcacccacttctgtagctggctttattcaatccaaataagtcataaggg

SEQ ID NO: 426024 - DNA, 604 bp, Homo sapiens
aaaattttaacaccctgggtggtcacagcacaggtggtagcaataccaaaccaaattaatcacatacaatgacagagtatcatagaggggaacaaaatgttaatcactatataggtttcagatataagatctcaagaactgaactggagcaaatatttctaacccaattggtgaattcaagctaaggattagtactatcaggagaaaaattagtagtaggatgtggggacatggggtcaggatgatccgaattaattcyggtacactgtaacatactgcttcagtgactccctttagaaaccaggaccttgccttctgggctgtatcactgaacatctccagtatgtagtctgtcctccaagttccaacacaaagctaattccttttttgaagcttttctgtttcccacagccagaaacagttcctctctcccttatctcccgaagcattttttccaactttcttactgcatttagcactttatactatgtattctggttctgtatgtgcatcccttacttcttccattaatctgagaggtcataaaaattacataatttgcatttaccacagggcttggccatggacttgcatatcattgctg

SEQ ID NO: 426025 - DNA, 648 bp, Homo sapiens
atatatgcactaaatatatactattatttccattatattatttaagggagtggagaaggtttttgtcagtgttaacaagcactgggcatcttcctatatcaaatatacgtgttagaatagcagaggttggttttcattaataagaactgagaagatatttgaatatttgtttttaataattataatgatttgtgcaagctgcatagcttaagctaatttctaagattacatcgcttaaattcttatagaagttataatattctcctacaaagacaaactaacactctacatattcattgtctataaacctaaaatagtaatgaaatgtcttaggaaatagagacaaaattcatgctacattcaaagcaaaacattttctgtgattttaagyatgtgcaaagagattcttagcagcctgtacattgaagttgtgatttctaagttatgttccaaggaattccttttcttattttctcccagggctatctttgttttttgtattattatggattagatttgtttggaacataaaaaaacagaattgatcttccctccttgaataatgcagaagataatatatgtaggaaacttcttccaaatcatgtctgagtatatacctttgaattttacttgaaaacatgtcattcc

SEQ ID NO: 426026 - DNA, 565 bp, Homo sapiens
attttacatgagtagaatctgtggcctttggcatctgccttttctcacatagcatgtgttcaaggcctatccacgttgtagcatatatcagtaattcattcatttttatggctgaataatacaccattgtgtatatataccaaattttgtttatccatttacaattaatggacatttgtgttgtttctactttttaggtattatgaataatgctgctatgactattcatgtacaagtgttgatatggatacattttatgtacatttgttttcatctctcttgcatatgtgcctaggattggaattgttgggtcacattgtagaacccggtttcaggcatggtaacactagctttaagaaactgccatactgtttctcaatgtggctacaccattttacagtcccatcagatatactggaagataaccacacatccttgttattgtctgtttttctgataatagcctctagtgggggtgaagcrgcacctcattgtggttttggtttacatttggaataatgatgttgagcatctgttcatgtgcttatgggaatgtgtgtatcat

SEQ ID NO: 426027 - DNA, 636 bp, Homo sapiens
caacctccctgcttgaacgctcaccagctgatcccaacaagaaacacagtcagtaggaacagctctggagcacagcttgaggtagaaaatggagcagggtagggaccaagtggaaaataattgccatagctactgagacaggagagaagaaaatgtgtatatgagaaaacagttygttttggctagaataaatgatgcatgagggcaaaaagccagagtgtgcttataaaagtaagtggtagctgaaactcatcagaataatgacaaaataaagggaaacgaaaagacgtatgaatctggtgcttaactcatcagggatgtttggcgcctttcctggaaattacagataaaagcaacaggagtggagagaaatgacatcagaacataagaggtaccacaaaatatgagttagtttttagaaatgtgaatgtagcagtggccaagaagaggcagtagagagaaagcagtactctgattcctccatctcactcaatgaggtgaacaggaagaatgccatttattttctcggacaaaggcagcatagtctttagacacttgcttggatcaggagggacaggctacttccatgatttgggtcattgtgagggaagtagttaagaaaaaaaaaagaaggac

SEQ ID NO: 426028 - DNA, 604 bp, Homo sapiens
tgggtttcaggaaggacctggagggtggtcagctgcacacgtagaggtgtgctgcagccagcttgtaccagctcctgagaatcaattgtgcacatctctttccaactctgggctctgtggcttcacataaacaccaaaatatgtcatggtaggtrtagttctacccatagaaactggcaaatgctacagatgagggttcccttctcacaaagtcaactatcaaccccagagcctcttattaaacctttaccagcacaccactgatctgctgcagcttcaatttgaggacaggttgttgcaatgagcactgaggaaggtgttgcatgagaacatgttcatgaaagaagcagcaccctctgccaaagatcaccgggtgagtgtgtgctgagcaggtgcaggcatggtcctccttaaaagactggaatcagaggctgctcattgattagaactacattttgatcaagctgagagaattccaggtgatacaacctggaataagctaagcaaataaaaataagtcatcaacaacctgtcaggcatgcggaattcagtgaatagaaaattaacccattcctctgaactaagcaatgcttgatttagcttc

SEQ ID NO: 426029 - DNA, 587 bp, Homo sapiens
ttgttgggtggaatgttctgtagatgtctcttatgtccagttggtcaagtgttgagtttaagtccagagtttctttgttagttttctgccttggtgatctatctaatgctgtcagtggggagttaaaatcttcactattattgtgtggttgcctacgtttttccatagggaaagaagaacttgttttttaaatgtaggtgctccaatgttgggggcatatatatttaggataattcagtcttcttgtcagattgcaacctttatcgttatgtaatgcccttcattgtccttcatttttattgatttaaaatctgtttcatctgatgtaagaattgtgactcttgctcttttttgtttttcattgcatggtagattttttttttggccatcttttactttgaggctgttggtgttgttacatgtgagattggtctcttgaagacaacagatgatttggtctgatgtttttatccagtctgtcttttacrtggggcatttagcccattgacattcaaggttagtatagatatgtgtgaatttgatcctttcatcctgttgttagctgttttttacatagacttgattgt

SEQ ID NO: 426030 - DNA, 604 bp, Homo sapiens
gactatgtgccttagagatagatagtcatcttacacagtatctagctggggttctctgtatctcttagatttgcatgtataatctctctagtgagattaagaaaatttttgtggactatgtccttgatatagtttggatatttatscctgcccaaatctcatgttgaaatgtaatcctcaatgttggtggtagggccaggcaggaaggtgattggatcatgggggtggatttctcatgaatggtttagcaccttctccttggtgctgtctttgtaatagtgagtgagttcttgcaagatctggttgtttaaaagtgtgtggcacctcctcctctctctcttgctcctgctccccagtgtgagatgtctgctccccctatacctttcaccataattgggagcttcctgaggtctccccagaagcagatacctgtgttatgctttgtgtacaacctgcacaactgtgagccaattaaacatcttttctttataaattacccagtctcaggtatttctttatagcaaagcaagaatgacctaattacagtcctcaaatatagtttctaagttgcatattctctctccttctgtcttaggaatgccag

SEQ ID NO: 426031 - DNA, 547 bp, Homo sapiens
atccaacaatgtataaaaagaagtatacaccatcascaagtgagatgtatcccaggtattcaagactggataaacatttaaaaatcaatcaatgtaatctatcacattaacattataaaaaagaaaaatcacatgatcatatccatagatgcagaaaaaaagaattttaaaaaatccaatactcattcatgataaaaattctggaatgtctttaacttgataaatttttttaaaaatctacaaaaacctatagctaacatcttaatgatgagaagcctgaagcttttccaatgatttaaaaattaggaggaaggcaaggatgtcttctctcactactacttttgagcatcatattggaagtactagctaatgcaataacacaagaaaaggaagtaaaaaatatacagacaggaaaggaaaataaaactgttttgtttgcagatgacataatcatttatgaagaaaatctttaaaaattgatgaaacaaaaacactattacacaattatggcaaagttgtaggatataagattcatatacaaaagtca

SEQ ID NO: 426032 - DNA, 648 bp, Homo sapiens
ggcatcttctttctaaatttcttattgccaaatcttaaatgaaacaagaggcataatcacaagtacattaggagcacagcccagaaattgtttaggacaacgtgcttttaaaggttgaaggtcatgtcactttctccattttggcctgttacactcatgaagacaaaggtaagtatgtttctagttaatagagtagccacaaaatcaatatagagaaatagtaaatacatagtgcaaatgttactcgaaggaaatactatcaaggaaaagacactttcagaaaaagagaggactttagaagcaattttgttcaactgtatttttattggtgaggaaaatgaagttctgagatgtaaaggacatagggtgttttgtgtgtgtgtgtgtgtgtgtgttttcagtgtagaattgaaccyaggccctgtaagatgttagtgtttctcttaccttttacatcctattggatctaagagcgtgaattgaaaggatttaagtatagctacaatttcctttctataatagggctcgtagaaagtcaggtggactttacaaaataagtgaaaggcaattttcagcaatgaaaaggttttgattctaaactgtctctatttaataatctgtaattctgctcacatcaaaaagaatgtc

SEQ ID NO: 426033 - DNA, 551 bp, Homo sapiens
acatagcagtaaatatatttttttttctgcttgactataaagcctaactatataacactttcagtgagtgttatttaatatcttgtgttgttgtttccaactgtggagggatcttttactgttctagtactgagaaaataataatagagggcatatattgagcatttactgtgagttaggcagttrctatggactgaatgcttatttcccaaaattcatgtattgaagccctaattcccaatatgacgacattaggaggtggggccttcaggaggtaattaggtcatgaggatggagccctcatgaatgggattcctgtctcttaaagagatatgagagagaggatctttctctttctctaccatgtaagaatacagcaagaagtcacccatctgcaaacctggaagcaggtcttcacaaggaaacgaatcagccaagtgttagtttgttctcacactgctataaagaaatctagactgggtaatttataaagaaaagaggcttaattggctcctggttctggaggttacacaggaagcacagttgtttca

SEQ ID NO: 426034 - DNA, 539 bp, Homo sapiens
ctagacagacagcactttggcactacacttagggccattttagaaggtgaaatcaccaacagaaatgcacaaaaatgtgaaaatgttgcgtcacctagactgtggaaaggacacgtgtttacagcatgtgagctgaaaccagaaagcagagcatcgccttgtttgacctcagctgggagcatgtatatcaggtgaataaaatttttcacagctctgtgcatgtcttcaaataaccatgaaagtgccgcaagtattgattttggagttataaataaattgtagtgagcagacaaatctgcaaatatgaaatctgtgaataacaagtgttaaagatgaaatatttgtgccctgaattgataggtaggtcccctatcccacagtgtggatgtatttggagatggggcrtgtaaggaagtaactaatgttaaataaagtcctaagtgtggggtcctgatcagacacgactaatttccttataaggaagagacactggagagttttctctttctgcacctcatgctctgaagaaaggacatata

SEQ ID NO: 426035 - DNA, 510 bp, Homo sapiens
ccttccttacaatctttcttcaactttctgtttttgatgcgggaagcagcaaaattaagggaatttgtgaattttatgagaaaatgccaccagataaatgaaggtacatttaattgaacaagtcaycagaaatgcattcagtatatgagtgacatgacaaaggaaaccacagagtgtaagaggtgcatggttgtctttcagtttgtcaccaacccttagagtgggctgcaaggtacgctcaagggaatgcgctcaaggtcaagatcacagcacaggcaacagttgagagcgtggtgggggacaggtggaggtgggagcagcttaagaatgactcacccaggcaagtgaagacaaagcctttctcagcagacctaaatcccagttgcttcctcaccttcattttgcaaaaaataccctttgcttagaaaggataagaagaaaccatgattccactgaagaagttctctgacaaaacaacctccagattgtcaatggattcttcctgcttgt

SEQ ID NO: 426036 - DNA, 632 bp, Homo sapiens
ccagaatacatacataatttctacaaatcaataacagacaacccaacggaaaaacaggcaaaagccaaaacactgttaagagaaagaagcatggccaaaacagatataatgaggtgctcaacctagctaataatcaaggaaatacaagttatgaccataataagatacagttttacacctatttaattatctcagattagaagatctgacaatacccagtatcagagaagaagtgaatcaatgggaaagccagtaggcactaagtggttacaatcactttggaaaacaactgggctttctcttgtgaaagtgaatacttacatgttgtctctacccagcagctgtatttctaggtaagtgattttgacccctggaatacctytggcaacgtctggagacatttttggttgtcacaacttggagacactactgacatctagtgggtagaggccagggatgctgttaaacctgttacgatgcataggacggtttcccacaacaaagagctatccggctccacacatcagtactgctgaggttgagaaactctgtcctaggtatatgtgtcagtgacacttgcatagatgtgcaataggagatgtagaagagtatactcatgacagcaacagcta

SEQ ID NO: 426037 - DNA, 642 bp, Homo sapiens
tgctcacctcctgctatgtcagtttctaacagcaaccagtaccagtaccagtacccatccatggcctgggagtcgaggacccctgacttacatatacatatatatacatacatacaaacatacatatgtcacatatattcttttgtactattgtattaaaattaagtaaacaaaaatcattaatcaggcagatgtggagaggtagattgtacaatataaccacacaaggaactacctgaaattacagcaaccaacttgcttttgtccttttggagaggagatgctgctctttttatgttaggactaggctcaaaatcctaatcctaacatgaatgtatctcatgagtgtaatttatctcatgaggtctgtcccagtagctcrctagagtagcaaccatcacatcaatattgttgacttaagcaccccttacctttaagttatgttggcaataaacacaaagaacacaaagcaaataaaggatagcatggggattgttaagacatttctctctctgtctctgtctctctctttctatacactgtagtcatacactggtaggggcataataccatatgtaacaacagggagtaggtggatgatctgctggatttgtttgtttcttcaagaagaccctgattctc

SEQ ID NO: 426038 - DNA, 512 bp, Homo sapiens
gacccattcttgtacaattccctccctttaactgtaagaggaacccttggatatgaaaggacatcactyctgttaagttacacagcaaaaaagatcttgcagatgtaatttgggatgctaatgagttgactctaagttaatcaaaagggagatgatttggatgggcccaacctaatcacaggagccccttaaatctgggtctagaggtcaaagacaaagttaaagacttgaaacatgacaggatttgacttggcacaacaactggaatagaaagggggccatatggtaagggtggcctctaggagctgagagcagccccccactgacagctagcaaagtaaccaggacctcagttttataactgcaagaaactgaattctgccaaaaacgataatgaatttagaagtcagtttttccccagagtctccagccaagaactcagtctggttgacaccatcatttcagacttatgagaccctgagcagagaaaccagccttgccacgtccagact

SEQ ID NO: 426039 - DNA, 627 bp, Homo sapiens
ggagttaagtgttgggcaactcaaattttttgtccatgaatgtgtgtgaaaattagaaaacaccacaagtattgatttggaggttacaaatcaattttattatagcatgtagggaaattcagatacagaaccagtaaataatgaggatggactgtaccaacatagatagttggggatacctggtgtcacaggccaggcattgtccatgtgttttggttttcctctttgtagccagtagggtgagtccacaaacacagggtacaagttaaggcacagttctttaccttaaagctattgctcagggacacatccgccttattagttaggggtctgttacctccctctagagccttcttgttagcaccctggaagcttccttttctaaaacagggagtctgttctgcttccatttycagatggaaggactactggagagtggcccaggcccccgctgctactctttctcaccatatgtcatggtcatggaaacccccccaccgccagcctaacagatgtctatcttcctccccactcagaggccttgctgggcccatctctctgaccaatggtgaaggtgtgcctgcagtcactgaagtctcagctcagttggcttgctcccctgggtct

SEQ ID NO: 426040 - DNA, 556 bp, Homo sapiens
tactcaaggagaaggggattatgtggggtatgtacaacaaggggtcctcttagaattcttgcctaccacagcccaccctctggcccccaacaattgacatcccttccacatgcaacatacatttacaccctcctaagattccctggagtctcattacagcatgagctcaaagtctaaaatgttatcatcttaatctaaatatcattgccttaaagttcaaaatctaaatcaagtccaggtacagatgggcttctggttgttagccaataggtacagccgctggggcacaattcctccccatctgtggtcctgggaaactagagttatctgccccagcattctcaatatacagtggtgggacaggcacaggattacagttgcagacattctgggtcaaaaagtggggaatgcaaagtcaaaaggcatcatgagtctgytgagtctatcacggtttggaaatccagccaggcaaatatttgactatttttgattagcttgcaagacctaggaataatctcaggggctcttagctccttcctctgggcatggttccacc

SEQ ID NO: 426041 - DNA, 556 bp, Homo sapiens
tactcaaggagaaggggattatgtggggtatgtacaacaaggggtcctcttagaattcttgcctaccacagcccaccctctggcccccaacaattgacatcccttccacatgcaacatacatttacaccctcctaagattccctggagtctcattacagcatgagctcaaagtctaaaatgttatcatcttaatctaaatatcattgccttaaagttcaaaatctaaatcaagtccaggtacagatgggcttctggttgttagccaataggtacagccgctggggcacaattcctccccatctgtggtcctgggaaactagagttatctgccccagcattctcaatatacagtggtgggacaggcacaggattacagttgcagacattctgggtcaaaaagtggggaatgcaaagtcaaaaggcatcatgagtctgctgagtctatcayggtttggaaatccagccaggcaaatatttgactatttttgattagcttgcaagacctaggaataatctcaggggctcttagctccttcctctgggcatggttccacc

SEQ ID NO: 426042 - DNA, 382 bp, Homo sapiens
ccttgcccatgtcacactctgccctctttctctttcaaacaggatgcgggtgggaggtatgtcttcagtttccctctctgaggttcttgctgctcagtcagagaggcctacaggcagtggccaaattgactgcgattgcttcatccagcccttacccatcttcagtgtgcttaatacccaggggatagagagttctgtctcaatcgccatgtcatgattcctttctgaatcatcttgaactttcttttacgaggtaagggtcagtggaacagattgctcatgagaatcttaagacagttatttcagtatcctataaagaaattgccagaatgggtgtgtctgttgggtggctygagttattaactcaagcgtgattgcaaag

SEQ ID NO: 426043 - DNA, 430 bp, Homo sapiens
gctggcagcaggaggaaggacaggtggctgctgccacctttgccgctgggcctcccgggctctcactttttcttcgaagtgtcagggatcttccaagtccttttttgagccccttccttacagactttgaggaaaagaggactcagagagggggttcccattggagctggtggtggcagcctgccgtgtgcaccaggcacctgccactcctctccccttcaagccattcytgctttacaggtgtggaaataggttcggaaaggataggtgacccacccaaggcccctcagctggaatgtggtaggactggtctggagggactatggcccttctggcccacttggcaccatgctgatctcaggattttaggggcctgctccatggtaccttggccagagagaccatgaatgatggaatgaggatgccccac

SEQ ID NO: 426044 - DNA, 583 bp, Homo sapiens
caggctggcccaggtggcatctaaggtgatgtgtgaacagctgtggactttggagtcatgcagacttgtgttctgcctgggccagttggcagctgcgtggccgtrgggaggtcctgaacctccccagctgcggtgttctgtcctcatctgtgcatggaggacatgggatcaggtcatcttgaagggcctcgagggcttagtgatgaggccaggagagcccactctcaacaacgatgctgaggaaaagcattttgtgttctccctcttggcaaaatatttataattctatgcctgttggaaccaagcaaggtcagcacaaaagaattggccctccactatcctaagaaaactaaagcaggaacagtagagcaaataccacatgctctcacttgtaagtgggagctaaacatcaaggacacgtggccccgaggaggggaacaacaggcacaggagcctacttgaaggtagtggatgggaggagggtgagttgggtgctatgctcattgtcttggtggcaaaataatctgtacagcaaccccctgtgacactcaatttacctatataacaaacctgcatatatacc

SEQ ID NO: 426045 - DNA, 583 bp, Homo sapiens
caggctggcccaggtggcatctaaggtgatgtgtgaacagctgtggactttggagtcatgcagacttgtgttctgcctgggccagttggcagctgcgtggccgtggggaggtcctgaacctccccagctgcggtgttctgtcctcatctgtgcatggaggacatgggrtcaggtcatcttgaagggcctcgagggcttagtgatgaggccaggagagcccactctcaacaacgatgctgaggaaaagcattttgtgttctccctcttggcaaaatatttataattctatgcctgttggaaccaagcaaggtcagcacaaaagaattggccctccactatcctaagaaaactaaagcaggaacagtagagcaaataccacatgctctcacttgtaagtgggagctaaacatcaaggacacgtggccccgaggaggggaacaacaggcacaggagcctacttgaaggtagtggatgggaggagggtgagttgggtgctatgctcattgtcttggtggcaaaataatctgtacagcaaccccctgtgacactcaatttacctatataacaaacctgcatatatacc

SEQ ID NO: 426046 - DNA, 583 bp, Homo sapiens
caggctggcccaggtggcatctaaggtgatgtgtgaacagctgtggactttggagtcatgcagacttgtgttctgcctgggccagttggcagctgcgtggccgtggggaggtcctgaacctccccagctgcggtgttctgtcctcatctgtgcatggaggacatgggatcaggtcatcttgaagggcctcgagggcttagtgatgaggccaggagagcccactctcracaacgatgctgaggaaaagcattttgtgttctccctcttggcaaaatatttataattctatgcctgttggaaccaagcaaggtcagcacaaaagaattggccctccactatcctaagaaaactaaagcaggaacagtagagcaaataccacatgctctcacttgtaagtgggagctaaacatcaaggacacgtggccccgaggaggggaacaacaggcacaggagcctacttgaaggtagtggatgggaggagggtgagttgggtgctatgctcattgtcttggtggcaaaataatctgtacagcaaccccctgtgacactcaatttacctatataacaaacctgcatatatacc

SEQ ID NO: 426047 - DNA, 567 bp, Homo sapiens
tattggaactttttctttagtgccagtcaatggataattccttgagagcaggttttgatagggtaggrgtgaccctagttgaaagccctgattgattatgggtgggaagagggagagacctgatgacagagaaaaaaaattgttctgcctggaaaaatgttgctgggatcattataagtgaatccacgaaatagcaattagttttataacaagccacttctgacatttatgtccctaggtgtgttgacctcatgttatgctctgacttgattccttggggagtcataaattaagtgtcctcaaaggactgctagcaataatcataataatcctcttgtattttggttgcattctacactttgggacacactttcatttatattattttatttgatcaaaatgacaacaatgtgtgctcgttagaatatgacttatcatcttcatttttcaggtgaggaagccgaagttcagtgggtggaagggacctgctcaggcttgtacaatcacttgttggtatcactggattgagaacccaagtctttagcccaggcctttttccactgttcc

SEQ ID NO: 426048 - DNA, 593 bp, Homo sapiens
ctctcccctgtgcccttggcaactacttttgtctctgtggatttgcttattctggacttttcatataaatggaatcatacaacacgtagcctcctgggtctggcttctttcattttgcataacgcttttaaggttcatttgtgctgactatatttttctgaacaattaaaaattacaggctcctgcagcacagtgcaggtgccacctggcccaaccagcttcttggaccacggccaacctgagtgcaccttcatcaccatcaagccagacagtgtgcagcatggcctggctggcaagatcgtgaagtgctttgagcagaagagattccacctcgtggccakgaagttcctctgggcctctgagaacatctgaagccgcactactttcactggaaagactgcccattcttcccgaggctggcaaaatacaggaactcagggcctgtcttagccatggtctgggaggggctgaatgcggtgaagacaggccgagtgatgctgggggagaccaatccagtggattctaagccacacaccatttgcagggacttctctagtcaggtgggctgatgcatcattcatggcaatggctca

SEQ ID NO: 426049 - DNA, 593 bp, Homo sapiens
ctctcccctgtgcccttggcaactacttttgtctctgtggatttgcttattctggacttttcatataaatggaatcatacaacacgtagcctcctgggtctggcttctttcattttgcataacgcttttaaggttcatttgtgctgactatatttttctgaacaattaaaaattacaggctcctgcagcacagtgcaggtgccacctggcccaaccagcttcttggaccacggccaacctgagtgcaccttcatcaccatcaagccagacagtgtgcagcatggcctggctggcaagatcgtgaagtgctttgagcagaagagattccacctcgtggccaggaagttcctctgggcctctgagaacatctgaagccgcactactttcactggaaagactgcccattcttcccgaggctggcaaaatacaggaactcagggcctgtcttagccatggtctgggaggggctgaatgcggtgaagacaggccgagtgatgctgggggagaccaatccagtggattctaagccacacaccatttgcagggacttctctaktcaggtgggctgatgcatcattcatggcaatggctca

SEQ ID NO: 426050 - DNA, 578 bp, Homo sapiens
atatgtttgtggatttcacagtttgtgaaaaatccacaatatgtttgtggatttttatcatttccatttttctgatgagattcccccatctgataaaaaaaaaaaaagagaaccaaatagaaattctagaactaaaattttactatctgaaattttaacaaattcactagattggataagagcagattggacactgcagaagaagtgcaaagtagttgaaaaggcaaatatgtgggcacattaacagatttgttttcttagtatctcagctaggtgatcaaggtcatcatcaatagtcatgaattacgttgatggtacgtacccttggtatgatgtgatgagaatagcatgttacctctatggtcttcctccccgtaactcataaccccagtatcatcatgagaaaaacattagaaaaatccaactgaggtacattctacaaaatacctgataaatactcctcaaaaccgttaaggtcatcaaaaacaaggaaagtttgagaaactgtcayagccaagagaagtctaaggagacacaattactagatattatgttgcatcataggtgaaatgttgaac

SEQ ID NO: 426051 - DNA, 464 bp, Homo sapiens
atgtgttcaaaggtatgcaaagtgtacctcaattttcaaagagaaggttaaaatgtggatgcccgagattctaattttaattattccatatgtagcctttgagatttttaaaagctcccataaccaacgttaaaaatcactgttataagtatttgcctagtgataggatcacccgtcatttctgtttgtcatgtgaatgcttctctctggctttgttgtgtggaacctggaagttggatgcatgggtttacatacctgcttggtcgttgggtcccctgaagatggttaattggcaagcaacaagtgccaaaggctcragaagaagacaggagcaggatggagcccccaaaagcccctccagctcttctctttctacttctctgagaatgatcctgcttattcagggagtggattgttatggtgatggaaaaagtaaatagtaaggggatcagaggaagtattat

SEQ ID NO: 426052 - DNA, 548 bp, Homo sapiens
gatgtctgttaatatgtgatgcagcttttaaagttactaacaaaaccgggcctctcgttccttcatagggatatatagctttgctaactgctttttgctttctctggtttgcaaagaaataaattcaactgctataaagcttttgctatttcttggtgtaaaaagtagagtaagagtattttcatcctttcagtatttgcaaattcttacagaagccatgtggctcttcttggctttatatcatatgtacattttacaatatttctttgacacacttggattttcatagtgagactcttaactgagctgctgtaaatggttgttccacttttgaagttctgtgagtataaaacagattaaacaggctaaccaaaattatgctgctaaagatgtaaagtcattgccccagggaaatgtttacatttgcagataaaakaaaaacctaattgttaagtaatgaaaattgagctaggaatgaaagattgatatgaatgaaatgcccagtactagtagaaaagcaaggatttttcttttcttttggcaaggag

SEQ ID NO: 426053 - DNA, 634 bp, Homo sapiens
acagaataaaatagcccctgcacttgagaagattacatagtctagtagggagggagagacaaagtaaacaattatctccaacaaagagtaaaggaaagctaagaatttataccactcctcaaaggaaaaagtagtcaacagtcaattctactgaatgggggggagggagagattgggtatctgtagaaaaacttcataaacaaggtgacctcaatcagagtcttaaaagaaaaataagyagtttctaagcaaaaggatatggagattggccaggtgcggtggctcacacctgtagtccctgtactttgggagccccaggcaggtggatcacctgaggtcaggagtttgagaaaaacctggccaacatgatgaaaccccatctctactaaaaatacaacaaattagccagacatggtggtgggcacctgtaatcccagctactcgggaggctgaggcaggagaatcgcccaaacccgggaggcagaggttgcagtgagccaagattatgccactgcactccagcctgggcgacaatagcaaaactccaactcaaaaataaataaataaaataaagagcaggtatggatagtggcactccaggcaggagcaatgttagcaatgacacaaagcacat

SEQ ID NO: 426054 - DNA, 561 bp, Homo sapiens
ttcagcactggcagcatccaccacgaactgactggagaactcttgggccttgagtgaacatcggcagtagccaggctgtacttgccatgggcttgggatggtggtggccatgcagagagactctttgcttgaggaaagaggagaaaagagtgggaagaacttgatctgtggcttgggtgccagctcagcttcagaatacagcagcagatagatttctaaggttcttgattccaggccctgcctcccaggtggcatcaatccaaaagaaaagggcttaatgaacaagaagaaatcatctgaaggtacaaaactcactggtaatagtaagtacacagaatattctaaaactataattgtaaaaccatttaatataactactatggagaacagtttgcaggttccttaaaaaactaaaaatataatgaccatatgatccagcaatcccactgctaggaactcaagagaaaggaatcagtatattgaagagataactgcactcccatttttactgcagcactatactcartagccaagatctggaagcaacccaagtgcccatga

SEQ ID NO: 426055 - DNA, 510 bp, Homo sapiens
tctggccttttagagtgcacctctcatttgtttctactgctgtctgtctgcttttctctttactctacctaatctctctattgcttcagattcaatttccctctctgagtgtattttccactcaaaactccttaggaaagagggtcaaaatgaattggctgatcattatctaatttgtattgcctgcaccagtcaagagttctaagccacaaccttaactgctggtcttacaaataagcagacagatggctgcttgcgactccgagtgccaactcctggaatgtgattaaggtcacaaaacaaagcaactgatacccacttagctcagaagggagaccatgaagacagcaggtaattctcattgtacttttatttttttgacacaggatcttgctcttttggccaggctggagtgcagtggcatgctaacaactcactgtagcctcractcccaggctcaagctgtcctcccacctcagcttccctagtatctcagactacaggcacatt

SEQ ID NO: 426056 - DNA, 528 bp, Homo sapiens
ttccaggacatacttcactcacacacacacatacacagggacataaatgattctagtgaactaattaaacttgcagaattattttctttttttaacttttaattttgaactaatttgggacttgcagagaagtttcagaaatagcacaaagaattcccatatccctctcacctggtttctcccaattaaaacatcttatgtaaccattgtacaatgttcagaccaggaaattaacactggtatagtgctactcactaaactatagaccttgctggagtatcacccatttttycaataatgccctttttctgtttcgggatccagtccaggatctcccattacatttagtggtcatgtccccttagtcttctccaactggtgacagatcctcagcctttctttgctttcatgaccttgatacttttgaagagtcccagttacctcttccttagaatatccctcagtttgggttcatgtaaagtttcctcaagcttagaatgaggttattcaattttggcagaaatgcca

SEQ ID NO: 426057 - DNA, 580 bp, Homo sapiens
tcttcctactggaaggacctgcgagcaaacagagaactttttcctttggtgctagagcataaatgaagctgggstagaagaatttcccaaagaccaaatgcattagttcattccagctgctaaaacagaatgtgatagattgagtgaattataaaaaacagaagtttatttctgacacttctaaggctgggaagtccaagatcaaggcagatttggtgaatggagagggcccacttcctggttcatagatggtcatcttctcactatgtcctcacatgttggaaggggcaagggacctctctggggcctcttttataagggcactaatcccactcatgagggctctgcccttatgacctaatcacctcccaaaggccccacctccaaacaccatacattgggtgttaggatttaacctgtgaatgttttgatggggaggaggaacacacacattccatttatggtgccaaggtataatataataaaagggaaataaacactgagaggggacacaaatctctatgtggcttacaagctacaggaaatcaatcattacctcgaagttcattaaatggatagt

SEQ ID NO: 426058 - DNA, 361 bp, Homo sapiens
atgagctcacaagttcaaaaccaacctgtgcaacatgacaaaaccctgtctctacaaaaaatacaaaaattagccggtcatgatagtgcatgcctgtagtcccatctacttgggatgctgaggtgggaggatggcttgagctggaaggtggaggttccagtgagctgagatcatgccactgctctccagyctggacaataaagccaagtcttttcacaaacaaacaaacaaacaaacaaacaaaaattatggagagcaaaagctcattatctgagccctattcttatatccatttgcctgttcaacaaacagctggccccactcaaaaagtaatagtcccaagggaactagcatagcgcct

SEQ ID NO: 426059 - DNA, 567 bp, Homo sapiens
ttgggctaaacctgaagttatataaaagtttcctaagcatttttctcctttgtaacaagatagtatttccaagaagaaaatccactaattgatttcttggcattgagtgtttgcctggggtgtctttytccatttattttaacaggtagatatatgggcctgtcattgtggttaggccaaaagaaagttctcattctcctctcacaccatgcatcaaaacaaattctagattaaccaaagaattagactgaaaaaactcaaaccaaaaataaacttagaagaaagcactttgcaggccgggtgcggtggctcacgcctgtaatcccagcactttgggaggccgaggcgggcggatcacaaggtcaggagattgagaccatcctggctaacacggtgaaaccctgtctctactaaaaatacaaaaattagccagagagccaggtgtggtggcgggcatctatagtcccagctactcaggaggctgaggcaggagaatggcgtgaaccggggaggcggagtgcagtgagccgagaccatgccactgcactccagcctgggcgacagagc

SEQ ID NO: 426060 - DNA, 567 bp, Homo sapiens
ttgggctaaacctgaagttatataaaagtttcctaagcatttttctcctttgtaacaagatagtatttccaagaagaaaatccactaattgatttcttggcattgagtgtttgcctggggtgtctttttccatttattttaacaggtagatatatgggcctgtcattgtggttaggccaaaagaaagttctcattctcctctcacaccatgcatcaaaacaaattctagattaaccaaagaattagactgaaaaaactcaaaccaaaaataaacttagaagaaagcactttgcaggccgggtgcggtggctcacgcctgtaatcccagcactttgggaggccgaggcgggcggatcacaaggtcaggagattgagaccatcctggctaacacggtgaaaccctgtctctactaaaaatacaaaaattagccagagagccaggtgtggtggygggcatctatagtcccagctactcaggaggctgaggcaggagaatggcgtgaaccggggaggcggagtgcagtgagccgagaccatgccactgcactccagcctgggcgacagagc

SEQ ID NO: 426061 - DNA, 567 bp, Homo sapiens
ttgggctaaacctgaagttatataaaagtttcctaagcatttttctcctttgtaacaagatagtatttccaagaagaaaatccactaattgatttcttggcattgagtgtttgcctggggtgtctttttccatttattttaacaggtagatatatgggcctgtcattgtggttaggccaaaagaaagttctcattctcctctcacaccatgcatcaaaacaaattctagattaaccaaagaattagactgaaaaaactcaaaccaaaaataaacttagaagaaagcactttgcaggccgggtgcggtggctcacgcctgtaatcccagcactttgggaggccgaggcgggcggatcacaaggtcaggagattgagaccatcctggctaacacggtgaaaccctgtctctactaaaaatacaaaaattagccagagagccaggtgtggtggcgggcatctatagtcccagctactcaggaggctgaggcaggagaatggcgtgaaccrgggaggcggagtgcagtgagccgagaccatgccactgcactccagcctgggcgacagagc

SEQ ID NO: 426062 - DNA, 452 bp, Homo sapiens
tcaggaacccaaaagcaaatgtaacaaaaacaaagatcaatagatgagacttaaactaaaaarctgctgcacagcaaaagaaataatcagcagcgtaaacagacaacccacagagtgggagaaaatcttcccaatctatacatccgacaaaggactaatatccagaatctacaaggaactcaaacaaatctgcaagaaaaaaataaacaatcccatcaaaaagtggactaaggacatgaatagacaattctcaaaagaagatacaccaatggccaacaaacatgaaaaaatgctcaacatcactaatgaccagggaaatacaaatcaaaaccacaatgcgataccaccctcactcctgcaagaatggccataatcaaaaaatcaaaaaataatagatgttggcatggatgtggtgaaaagggaagacttttacactgctaggagaatgtaaa

SEQ ID NO: 426063 - DNA, 452 bp, Homo sapiens
tcaggaacccaaaagcaaatgtaacaaaaacaaagatcaatagatgagacttaaactaaaaaactgctgcacagcaaaagaaataatcagcagmgtaaacagacaacccacagagtgggagaaaatcttcccaatctatacatccgacaaaggactaatatccagaatctacaaggaactcaaacaaatctgcaagaaaaaaataaacaatcccatcaaaaagtggactaaggacatgaatagacaattctcaaaagaagatacaccaatggccaacaaacatgaaaaaatgctcaacatcactaatgaccagggaaatacaaatcaaaaccacaatgcgataccaccctcactcctgcaagaatggccataatcaaaaaatcaaaaaataatagatgttggcatggatgtggtgaaaagggaagacttttacactgctaggagaatgtaaa

SEQ ID NO: 426064 - DNA, 582 bp, Homo sapiens
tcaggaacccaaaagcaaatgtaacaaaaacaaagatcaatagatgagacttaaactaaaaaactgctgcacagcaaaagaaataatcagcagcgtaaacagacaamccacagagtgggagaaaatcttcccaatctatacatccgacaaaggactaatatccagaatctacaaggaactcaaacaaatctgcaagaaaaaaataaacaatcccatcaaaaagtggactaaggacatgaatagacaattctcaaaagaagatacaccaatggccaacaaacatgaaaaaatgctcaacatcactaatgaccagggaaatacaaatcaaaaccacaatgcgataccaccctcactcctgcaagaatggccataatcaaaaaatcaaaaaataatagatgttggcatggatgtggtgaaaagggaagacttttacactgctaggagaatgtaaactagcacaaacactctggaaaatagcgtggagatccataaggaactaaaagtagatctaccatttgatccagcaatcccactcctgggtatctacccagaggaaaagaagtcattatacgaaaaagatac

SEQ ID NO: 426065 - DNA, 582 bp, Homo sapiens
tcaggaacccaaaagcaaatgtaacaaaaacaaagatcaatagatgagacttaaactaaaaaactgctgcacagcaaaagaaataatcagcagcgtaaacagacaacccacagagtgggagaaaatcttcccaatctatacatccgacaaaggactaatatccagaatctacaaggaactcaaacaaatctgcaagaaaaaaataaacaatcccatcaaaaagtggactaaggacatgaatagacaattctcaaaagaagatacaccaatggccaacaaacatgaaaaaatgctcaacatcactaatgaccagggaaatacaaatcaaaaccacaatgcrataccaccctcactcctgcaagaatggccataatcaaaaaatcaaaaaataatagatgttggcatggatgtggtgaaaagggaagacttttacactgctaggagaatgtaaactagcacaaacactctggaaaatagcgtggagatccataaggaactaaaagtagatctaccatttgatccagcaatcccactcctgggtatctacccagaggaaaagaagtcattatacgaaaaagatac

SEQ ID NO: 426066 - DNA, 582 bp, Homo sapiens
tcaggaacccaaaagcaaatgtaacaaaaacaaagatcaatagatgagacttaaactaaaaaactgctgcacagcaaaagaaataatcagcagcgtaaacagacaacccacagagtgggagaaaatcttcccaatctatacatccgacaaaggactaatatccagaatctacaaggaactcaaacaaatctgcaagaaaaaaataaacaatcccatcaaaaagtggactaaggacatgaatagacaattctcaaaagaagatacaccaatggccaacaaacatgaaaaaatgctcaacatcactaatgaccagggaaatacaaatcaaaaccacaatgcgataccaccctcactcctgcaagaatggccataatcaaaaaatcaaaaaataatagatgttggcatggatgtggtgaaaagggaagacttttacactgctaggagaatgtaaactagcacaaacactctggaaartagcgtggagatccataaggaactaaaagtagatctaccatttgatccagcaatcccactcctgggtatctacccagaggaaaagaagtcattatacgaaaaagatac

SEQ ID NO: 426067 - DNA, 580 bp, Homo sapiens
cctgtctctactaaaaacataaaaattacccgggcatggtggcgtgtgcctgtaatctcagctactcaggaggctgaggtgggagaatcacctgagcccaggagtcagaggttgcagtgaaccaagatcgtgccactgcactccagcctgggtgacacagcragaccctgtctcaaaaaaaaaaaaagaaaaaaaaaaaaagaaaaaataagattgggcaacttacatcaagatatcaaaatttattataaagctacagattagtaaattagatttcattagaattaacaactgttgattaccaaaacacaccattaagagagtgaaagagtagaggtcagaagatacttgcaatacatatgtatgtcaaaagaaagcagataatatacctcttacaaatcagcaagaaaaagatacaccaatccactataaaaatgggcaaaactttgaacagatactttacaaaagaagatatcaaaatagaaaacaggcctctctacatcactggtcatcagggaaatgtaagttaaaaccacaaggagatactaatacactcccgttttgatggttaaacaatacc

SEQ ID NO: 426068 - DNA, 487 bp, Homo sapiens
cttgacccaggggtggtccacgccaacgtgccctcracccaggggtctgagaatcacgtgtggcactgcctttccccacggcaccctcagcctgtcctgttgcctgaggagtccagagagagccctcctcatctcagacaatccttcctctgagggccacggggaaggcggggaaggggccgtcctcagtcccactcggctttctgcctgggctctgcagctctccgcgtcctccacttactgagtgggctcctgagattccctttggcggggccgtctaaaacttttcttagtaaaaaatggaatctaaattgggcagaaggtgtgtggtgtaaactcccttcctgctgtggtgaggacggtccgagcagatgttctaatgcccgaggtgctctccaggctcagaagtctccgtgggtgtccctagccccagcagagccccagggagaggcagcctccccagcagggagtctgagagtgcagcgtg

SEQ ID NO: 426069 - DNA, 487 bp, Homo sapiens
cttgacccaggggtggtccacgccaacgtgccctcgacccaggggtctgagaatcacgtgtggcactgcctttccccacggcaccctcagcctgtcctgttgcctgaggagtccagagagagccctyctcatctcagacaatccttcctctgagggccacggggaaggcggggaaggggccgtcctcagtcccactcggctttctgcctgggctctgcagctctccgcgtcctccacttactgagtgggctcctgagattccctttggcggggccgtctaaaacttttcttagtaaaaaatggaatctaaattgggcagaaggtgtgtggtgtaaactcccttcctgctgtggtgaggacggtccgagcagatgttctaatgcccgaggtgctctccaggctcagaagtctccgtgggtgtccctagccccagcagagccccagggagaggcagcctccccagcagggagtctgagagtgcagcgtg

SEQ ID NO: 426070 - DNA, 584 bp, Homo sapiens
ggatgagtctttagggttttcttggtatatgawcatatcactggggaacagcaacagtttggcttcctctttactgattcggatgccctttatttatttcttttgtctgattgccctggctagaacttccagtaatatgttgaatgtaagtggtgaaagtgggcatccttgtcttgtttcacttctcagagggaatgctttcaatttttcccaattcagtataatgttggcagtggatttgtcatagatggcttttattaccttgaggtatgtcccttctatgccaattttgctgagggttttaatcataaagagattctaattttgtaaaatgttttttctgcatcttttgagatgatcttatgatttttgtttttaattctgtttatgtgatgtatcacatttattgacttgtgtatgttaaaccatccctgcatccttgatataaaacccacgtgatcatggtgtattatctttttgatatgttgttgagttcagttagctagcattttgttgagagtgttgtatctatgtttatcagaaatattggtctatagctttctttctttgtttcccctttcctg

SEQ ID NO: 426071 - DNA, 584 bp, Homo sapiens
ggatgagtctttagggttttcttggtatatgaacatatcactggggaacagcaacagtttggcttcctctttactgattcggatgccctttatttatttcttttgtctgattgccctggctagaacttccagtaatatgttgaatgtaagtggtgaaagtgggcatccttgtcttgtttcacttctcagagggaatgctttcaatttttcccaattcagtataatgttggcagtggatttgycatagatggcttttattaccttgaggtatgtcccttctatgccaattttgctgagggttttaatcataaagagattctaattttgtaaaatgttttttctgcatcttttgagatgatcttatgatttttgtttttaattctgtttatgtgatgtatcacatttattgacttgtgtatgttaaaccatccctgcatccttgatataaaacccacgtgatcatggtgtattatctttttgatatgttgttgagttcagttagctagcattttgttgagagtgttgtatctatgtttatcagaaatattggtctatagctttctttctttgtttcccctttcctg

SEQ ID NO: 426072 - DNA, 584 bp, Homo sapiens
ggatgagtctttagggttttcttggtatatgaacatatcactggggaacagcaacagtttggcttcctctttactgattcggatgccctttatttatttcttttgtctgattgccctggctagaacttccagtaatatgttgaatgtaagtggtgaaagtgggcatccttgtcttgtttcacttctcagagggaatgctttcaatttttcccaattcagtataatgttggcagtggatttgtcatagatggcttttattaccttgaggtatgtcccttctatgccaattttgctgagggttttaatcataaagagattctaattttgtaaaatgttttttctgcatcttttgagatgatcttatgatttttgtttttaattctgtttatgtgaygtatcacatttattgacttgtgtatgttaaaccatccctgcatccttgatataaaacccacgtgatcatggtgtattatctttttgatatgttgttgagttcagttagctagcattttgttgagagtgttgtatctatgtttatcagaaatattggtctatagctttctttctttgtttcccctttcctg

SEQ ID NO: 426073 - DNA, 584 bp, Homo sapiens
ggatgagtctttagggttttcttggtatatgaacatatcactggggaacagcaacagtttggcttcctctttactgattcggatgccctttatttatttcttttgtctgattgccctggctagaacttccagtaatatgttgaatgtaagtggtgaaagtgggcatccttgtcttgtttcacttctcagagggaatgctttcaatttttcccaattcagtataatgttggcagtggatttgtcatagatggcttttattaccttgaggtatgtcccttctatgccaattttgctgagggttttaatcataaagagattctaattttgtaaaatgttttttctgcatcttttgagatgatcttatgatttttgtttttaattctgtttatgtgatgtatcacatttattgacttgtgtatgttaaaccatccctgcatccttgatataaaacccacktgatcatggtgtattatctttttgatatgttgttgagttcagttagctagcattttgttgagagtgttgtatctatgtttatcagaaatattggtctatagctttctttctttgtttcccctttcctg

SEQ ID NO: 426074 - DNA, 541 bp, Homo sapiens
tatgttcagagaaaggctaagacctctctcccaggcacacatccttaactttcrcaaataaacttcccaaagggattgagacttgcctcatcacttttctcgattgacagtggagtgaagacctctgaaaagtcacctctcaataaaagcagttcttaggaactggcatgatgcgtcaaaataaactttttcaggactgtgaaaattaaccaaaggcttacaggaatccaggaagtatttattcaaaaaaatggatgagtctcagtaagaccaatgagctttatgagattttaaattgccttagtctaatgcctcatccccaggcacagctgtagttttgagagataaaattctcagtactacagggagcagataaagctggagctcttttgtacaggctcattcctaaagaattgatgttatttgagctatttagtcattccctgaaaggctgacttaaaaggcttccctttatttttcttgacttgaagtccagctagtgcttctcccttgggggcattattcaaaccctacagacaag

SEQ ID NO: 426075 - DNA, 608 bp, Homo sapiens
aataaatgatccaacatgaaggagtacttgatcaaacaaaatactttaatataaaacatttttacacacaatttcctcacccttttctaaaaccagatacatgaatttccaatattraaagtattttttattttggatttgaatttacttaagaccatgtggtttctaagatgaaaatcaacagagatctttttgtcatggcttttactggggaacgcgtactaagaaaaaaggctgaaatgacttctgaggtgccacatcaacctaatgaagcaatttcgatgggccaaatgtaaatacatctggacacatgagtttcattttctgtataatatacaggggctcactatgagaagaaaatgttttgccagggtttgagcaccaaatgtttgaagaaatattttgaaatatttaataaaatatgattggatctaggaacctagctgaaatattaatctgtctctggaagtacttatttatataattagaagctaatagttattttaagaaagtatgggaagtttttaagaaagtatggagaggaagcatctataagaaaatgtttgaaataatttagaacctaatatgtaagagaatgtaaaaatgtg

SEQ ID NO: 426076 - DNA, 608 bp, Homo sapiens
aataaatgatccaacatgaaggagtacttgatcaaacaaaatactttaatataaaacatttttacacacaatttcctcacccttttctaaaaccagatacatgaatttccaatattaaaagtattttttattttggatttgaatttacttaagaccatgtggtttctaagatgaaaatcaacagagatctttttgtcatggcttttactggggaacgcgtactaagaaaaaaggctgaaatgacttctgaggtgccacatcaacctaatgaagcaatttcgatgggccaaatgtaaatacatctggacacatgagtttcattttctgtatratatacaggggctcactatgagaagaaaatgttttgccagggtttgagcaccaaatgtttgaagaaatattttgaaatatttaataaaatatgattggatctaggaacctagctgaaatattaatctgtctctggaagtacttatttatataattagaagctaatagttattttaagaaagtatgggaagtttttaagaaagtatggagaggaagcatctataagaaaatgtttgaaataatttagaacctaatatgtaagagaatgtaaaaatgtg

SEQ ID NO: 426077 - DNA, 550 bp, Homo sapiens
ttatatgttcattttagtctgctctgaatttcttaggcctgaaaatgtggaaaattagaaatcttgaggttagttgataaggtttccagtagtctctgcttctagttaagatataaagagcaagaggtgagacacatggcaggctcatgcttccagcttactcatggataaggtccagcagcactgaaacaaatgggaatctaatctaatctgatgcactcacaatgttaaaaggcagcttcagccaggccagtaaattttactttgctaatggcagacacaagactcactatagggactatagtgtttccaagaagagagtgtgatttactccaggactccrttttatttgtgtcctagatacatcatcagaatttctgctaactacaatcaagatttctgcctgagaacagcccctgggactaaagtacttttcttagaaatcctaggaaatccttggacatgctttttccttgatcctgcacttgacctgagctgattttctctgggatcagagcctgcccagtggcccatgaatgtcctgaagata

SEQ ID NO: 426078 - DNA, 548 bp, Homo sapiens
gtagagctctggcactggcttattaatcacagtgttcctagaagtgaaagtgataggaagccttctgcattcttacttagtttgtataggcagaaaactttcaggtcgagtggacaaaaaactaatttaaattataaaaatagagaatcactactgggggaaccagccctcaatatttcaacgtaggttctcttctattttccctaagtgttggccggtctgagaaataaagggaaagagtacaaaacagagaaattttaaagctgggtgtccgggggagacatcacatgtcagcaggttccgtgacgccccatgagctgtaaaaccagcaagtttttattagcaattttcaaagaggagggagtatacaaatagggtgtgggtcacagagatcacatgcttcaagrgcaacaaaatatcacaaggcaaatgggcagggcaaggtcacaaggccagggtaaaactagaattactaatgaagttcccggtcccgctgtgcacatattgccattgataaacatcaggaaatggggtttttgagagcaggc

SEQ ID NO: 426079 - DNA, 592 bp, Homo sapiens
cagtgcgtttggtaaacatggaaacatctgcaatataatggcatccaaattgaaatctgcatcaacaaaatatcacactgtatttaaaattattgtttctttatcctaagaagataaaaatgcactgtgaactcaacatgaayggaaatattttgaactctgagtttcagttctagaaatctttttaggggcaggtaagtgatgataatagctgtgactgagccttgaataatttctgaagttgctgaaatgattaactcaggatccgagttaaccatgaaagctgctcctgcctgttgcgaaggctgctgtatccagtgtgactattggaaggctctgagaagctgggggcttaacaaatagaaattattcaacttaggtaacagaaactgtgattttcccacatgaaatgcttgtgtcaaataaaagcaaaaaactaatgaagccctcccagaacccagcttagatggagacacagacctggcctgggataaagtgaggatgccactggctcttcctccaccctctcctgacatcccgtttccgtggagcagcgctgacccgctccaggcagttggtcattcgggagatt

SEQ ID NO: 426080 - DNA, 608 bp, Homo sapiens
gtgtccctgctgaaagaaaagcctctcctaatatcctcctgtttttcaaaccrtaaaactgaaaccctccgagtcctgcccggaggaagctctcataagcctgacagtcttgggctcagatgcaggggaggtaaagtcagtctatgtggtttgggtaggggcaggagggaggcacagcatagactgagaagcagctcctgcaggccccagagccagtcttggagccagaaccggctccccgagggtcatgatcacctggagggcagcaggcatttttcctgggtccttccagcaacgctttccggagctggtggctttctgcctccctgggctccacatgagacacagaaaggaaccccaaggaactccctgctcttgggcaccccctttatttactgttcttgaggaagctccaatcagacctgactggggtcggtgagtttatttttaccatctgtgtggacggtccagatgggcccagctccaggcctgaggaagagcctcccttacaatctatccatacgtctcatggtttccagttccaaaacatggatcttccgtcatgtaactccttccagcatgactgaccgacccgctccagcaccgca

SEQ ID NO: 426081 - DNA, 608 bp, Homo sapiens
gtgtccctgctgaaagaaaagcctctcctaatatcctcctgtttttcaaaccgtaaaactgaaaccctccgagtcctgcccggaggaagctctcataagcctgacagtcttgggctcagatgcaggggaggtaaagtcagtctatgtggtttgggtaggggcaggagggaggcacagcatagactgagaagcagctcctgcaggccccagagccagtcttggagccagaaccggctccccgagggtcatgatcacctggagggcagcaggcatttttcctgggtccttccagcaacgctttccggagctggtggctttctgcctccctgggctccacatgagacacagaaaggaaccccaaggaactccctgctcttgggcaccycctttatttactgttcttgaggaagctccaatcagacctgactggggtcggtgagtttatttttaccatctgtgtggacggtccagatgggcccagctccaggcctgaggaagagcctcccttacaatctatccatacgtctcatggtttccagttccaaaacatggatcttccgtcatgtaactccttccagcatgactgaccgacccgctccagcaccgca

SEQ ID NO: 426082 - DNA, 557 bp, Homo sapiens
agttcaggctttgatgggaagtgggagaaaatcttcaaatctatacatgcaacaaaggactratatccaaaatctgcaaagaactcaaacaaatcagaaaaaccaagcaaaacaaaaaaacaaacaaacaatcccatcaaaaattgggctaaggacatgaatagacaattcttaaaagaagatatgcaaatggctaacaagcatagggaaaaatgcttaacatcactaattatcagggaaattcaaatcaaaaccacaatgagataaccccctacttctgtaataatggccataataaaaaaatcaaaagataataaatattggcatggatgtggtgagaagggaacacttttacactgttggtggaaatgtaaactagtacaaccactatggaaaacagtgtggagattccttaaagaactaaaagtagatctaccgtttgatccagcagtcccgctactgggcatctacccagaggaaaagaagtcattatacgaaaaagatacttgcagattcatgctttcagcagcacaattcgcaattgcaaaaatatggaa

SEQ ID NO: 426083 - DNA, 557 bp, Homo sapiens
agttcaggctttgatgggaagtgggagaaaatcttcaaatctatacatgcaacaaaggactaatatccaaaatctgcaaagaactcaaacaaatcagaaaaaccaagcaaaacaaaaaaacaaacaaacaatcccatcaaaaattgggctaaggacatgaatagacaattcttaaaagaagatatgcaaatggctaacaagcatagggaaaaatgcttaacatcactaattatcagggaaattcaaatcaaaaccacaatgagataaccycctacttctgtaataatggccataataaaaaaatcaaaagataataaatattggcatggatgtggtgagaagggaacacttttacactgttggtggaaatgtaaactagtacaaccactatggaaaacagtgtggagattccttaaagaactaaaagtagatctaccgtttgatccagcagtcccgctactgggcatctacccagaggaaaagaagtcattatacgaaaaagatacttgcagattcatgctttcagcagcacaattcgcaattgcaaaaatatggaa

SEQ ID NO: 426084 - DNA, 557 bp, Homo sapiens
agttcaggctttgatgggaagtgggagaaaatcttcaaatctatacatgcaacaaaggactaatatccaaaatctgcaaagaactcaaacaaatcagaaaaaccaagcaaaacaaaaaaacaaacaaacaatcccatcaaaaattgggctaaggacatgaatagacaattcttaaaagaagatatgcaaatggctaacaagcatagggaaaaatgcttaacatcactaattatcagggaaattcaaatcaaaaccacaatgagataaccccctacttctgtaataatggccataataaaaaaatcaaaagataataaatattggcatggatgtggtgagaagggaacacttttacactgttggtggaaatgtaaactagtacaaccactatggaaaacagtgtggagattccttaaagaactaaaagtagatctaccgtttgatccagcagtcccrctactgggcatctacccagaggaaaagaagtcattatacgaaaaagatacttgcagattcatgctttcagcagcacaattcgcaattgcaaaaatatggaa

SEQ ID NO: 426085 - DNA, 644 bp, Homo sapiens
ggggccctcagtcttctctctccatgcctctacctgactggatgaggcgcacccacttagtggagggaggtctgttttactcaaagtcgtctgataagtgcccatctcatttaaaaaataccttcacagcaacgtagagattggagttgctgggtaccacagcccaatcaagaggacacaaaactaaccaccacactcgcttctgaattcctcagacattgaacacagcctctgtacgagcccctaaggaaacagaggttggctttgccaaaaactaccttaatttctagatttaacacactcagcttctcgtggctaaagacaccgacyccagtgctgcctctccaggatcagtgacagaccccgaggttctggagccgggaaaaaaccatgacattgtgcaggtagatgaaatgccgcgttgtgcgggtgaggaccccgagactccgaaatggcacgaggcacatcccggctgcacagctcatgccttggccccttatggagaccccagtccagggtctgaagaggatgaccgtttctggatatgttgcactttgccctcattttggactaataagaagaggttctttctctcgggaggctgccagcatggaacactggggaggacgccctcactgagtttt

SEQ ID NO: 426086 - DNA, 602 bp, Homo sapiens
tcatgacttagcattgcttaacttgggccaaagtgagtcctgaaaatttgatttgtgaaaacacacactagctttataagtctttccatattttctcttagagaagttacatgaagattctcagaggtagcaattaaaggtgctgataactaaagaatgaaaaataataatgtggcaagttcttttatcatttcctgacttaattagtgtggctcatttgcatttaacaaatatttatggagtacttttctgtcaaagtcacatttttttcctcagtcaatggcagtctcatataaaactgtttcatagcttacaaaatatcctaggataaaaacaaataaattagaaaatcagtacaagtagaacaagaattcagaagaaaaaagataaagcttaagctgctgttggtgaacaaaatgtgtgcagaagggacctgtcccacaggaaaaacacatgtgggctgagctgagaaaccaaggcaaggagagaaatggaatatttgcatccctgtcagaygagatgtacgcgccgaagcctccctgccacagtcttgtttctgttcagcattgctgtcagaagctaatcagatgattgaggaaaag

SEQ ID NO: 426087 - DNA, 586 bp, Homo sapiens
agggcagccccagagacacacacatccctgatcacagtgctgttgtgaggtacgggaacaccactgtgtgcttggggagtacccagttcccagtgtcctttcctcactaaccctaaagttcttcaaaaggccaagtgctaaatagtgaccaagaggatggggtctgtgagaatgtaacatcgagcatttttaaatgtgraaaatatatagatcttctctgcatttctctgaggatacataagaagcagaggtttagcctgcagggataccgtttaactgcacgttttcactgtagaaaaagttttgtcatcataactagtaaaagtaattaggtttagattagcataaaaataaaaatacagtattaaaaaaattgtgctaggactgtagcctcctaagaagagtattaatatagtccacatttgaaaaacaaaaacactggactagatgttttctacttcaactgggcaaagacaggaggaatagatgcaggcctaaaggataggaaggcaatgaagacagaattgctcatggagtataaaaggaggatgatgggaaacctaatgcttcttaaagtggaagggtg

SEQ ID NO: 426088 - DNA, 586 bp, Homo sapiens
agggcagccccagagacacacacatccctgatcacagtgctgttgtgaggtacgggaacaccactgtgtgcttggggagtacccagttcccagtgtcctttcctcactaaccctaaagttcttcaaaaggccaagtgctaaatagtgaccaagaggatggggtctgtgagaatgtaacatcgagcatttttaaatgtggaaaatatatagatcttctctgcatttctctgaggatacataagaagcagaggtttagcctgcagggataccgtttaactgcacgttttcactgtagaaaaagttttgtcatcataactagtaaaagtaattaggtttagattagcataaaaataaaaatacagtattaaaaaaattgtgctaggactktagcctcctaagaagagtattaatatagtccacatttgaaaaacaaaaacactggactagatgttttctacttcaactgggcaaagacaggaggaatagatgcaggcctaaaggataggaaggcaatgaagacagaattgctcatggagtataaaaggaggatgatgggaaacctaatgcttcttaaagtggaagggtg

SEQ ID NO: 426089 - DNA, 592 bp, Homo sapiens
cagggccaggtgcctccagccctgacctggccttgggagtctggtcccagcccccacagcccagagccatcagcatggattcagtgctgctccccgtgagggatggcatgactgttgcttgattaaaggaaacgtttctttttgaatcaaatcatactgcataaaccccaaattgtcccaagcctgccacacatgcagtcactttcccccagagagctgaggcctcggcctggggctgagaccaccctgcgcttttagcagctcctgagcctccctggggagaatcagtgcctgtgtgtggagctgaggtcttcmcacagcaggggcacagctgtgggaaagcctggttccctgctgctttccacaaccacccttttccagccctgcaggatttaaatgaagaaaagcaaacacagccattcaggtcagcatttttttctccctctcccttattatttcttctttgtttacactcagtataagctgactgtggatcgtgattggaaagtcgagattgaaaaagcctattccagtgcacctggtgtcctcgggtgaagctggaagggggcgaggaccagagaccccaggggat

SEQ ID NO: 426090 - DNA, 550 bp, Homo sapiens
cggccctctttatctttcaggcctatttctaaaagagatgccaaggatgtttgccttgaatatatccaagactccaggttcattgtgttgaggatgaggacaatgtgtcctggacagcttaggtaagcccctgaagatccatgccccrtgtcatgtgtgacttaggatgtggaactgaagacctacagacttaggactagctgctacacttgagtttcatttcccccaagagacccaaagaaagtaggcaggattctctgcttagcaattcaacagcacccactatagcaaccaaagggggatatgtacaaatgctctgctaggctgctaaaactcttctgggctagagcccacatgctctcagtgtctatatcaggatagctaaaatctgaagaagaaccatgaagcttggatgctaacatttggaattccaaaagggctgcagtatgcaaaagtatgtgtgtatgtgttgattgcagaggagaggataaggatataaaaaaactctgagttccaaacccaatctttctttgtaaagttaatactaatc

SEQ ID NO: 426091 - DNA, 622 bp, Homo sapiens
tcgcctgtaatagggagattagacaatgcgttttattagataactcttcctaatattgaactccttataaactacttcctgtaatactgcatagggtaatggaaatgctccatgtctgtggagcactttaagtgttctctgcattacaaacactaaggaggagatgttgaaaaaaataacattggaaatagtcataaaagaaggcgacctcacattctcagaggccaattctgccactctgmtgatttggcaggtacaacttagggtgtcaaaaagagactgtctatttttctgtctgtacatattaaaaacttgggaatgggaaacaattcagtaaagtccaagtccactttttgtttcttttctccgaatttccccctcattgaggaaggctctggaaatatctgcttcagcaccacacaggccaagtttgtccttcctagagaaagataccatcaatgttctctaatcttatgcaaatccaacatcccacctccaccttccactgtaatatgtccttgcccttggtttgggcaaaccattaataaattattcattcattaaattattgaataaacccttgtggaatgaacatattaaatatcttttatgtttgtttgtt

SEQ ID NO: 426092 - DNA, 634 bp, Homo sapiens
taatgatggtgttgccagagagtgtttatgaatacaatgttaaaaagtggaccaaacaaaacacaccttatttccactcactaagaatgcattgcctttcctaacaggagcaggctggcataaatattattttattataataaatacttttgttattatgttaaatatctaccactacagaagataccaaagaattgcaggatctctgtcctcaaattgmttagagtcaagttagattaagaaaaataaaccaataatgaatagtataagacactgtgttatacagtaggagcatttttggtcccaattaggttctgaaggaattcagaacaggatctttgtggaatctagagtggctgggcaggaattcctataaggatgaaatctggtctggcccttgacaaatgggatgtttagatagaaacaaaactaagattacatgaataaagatagtccacagccacctgtatgctgagagtggggcaggcagatggcaaataaagaagaagccacaaccagattcaccaccaaaatgtagagataagtgaaacaggaggtttcagataaaagaaatcccttagggataagaggggacatttagtatatgttatatcttctagtttcagaagatctc

SEQ ID NO: 426093 - DNA, 634 bp, Homo sapiens
taatgatggtgttgccagagagtgtttatgaatacaatgttaaaaagtggaccaaacaaaacacaccttatttccactcactaagaatgcattgcctttcctaacaggagcaggctggcataaatattattttattataataaatacttttgttattatgttaaatatctaccactacagaagataccaaagaattgcaggatctctgtcctcaaattgcttagagycaagttagattaagaaaaataaaccaataatgaatagtataagacactgtgttatacagtaggagcatttttggtcccaattaggttctgaaggaattcagaacaggatctttgtggaatctagagtggctgggcaggaattcctataaggatgaaatctggtctggcccttgacaaatgggatgtttagatagaaacaaaactaagattacatgaataaagatagtccacagccacctgtatgctgagagtggggcaggcagatggcaaataaagaagaagccacaaccagattcaccaccaaaatgtagagataagtgaaacaggaggtttcagataaaagaaatcccttagggataagaggggacatttagtatatgttatatcttctagtttcagaagatctc

SEQ ID NO: 426094 - DNA, 588 bp, Homo sapiens
tatatcattgtctctgccattaataatagaggacataataataaagtttgaggtacataaaataatagtaaagagagtgctagacatttgagaagaggatgccagcctgcttttaccactatagatcccccatgtcaagatgckcagagctgctatgacattatgggctggcaaagctaggatttggagaaacaaatttggaaaaacattaaaactctggacaaatcagcaaatctgaataaacaaatcctttaagttatttctactcccaaaagaatggatgactcaattcattgtgcttgatccaacatctgccttgacaaactttagggagaaattgccccaaatatcttagacacctaaagtgtttggcagaatctttgaagctttcctaggccatggtgggttgatttttgctattgaagtgagctactctgcacaaaggggtgggagtctgagagcctgaagcccatcagctggtctcatccttaactgctgctcaccccatcccctctctggtcactcagcagagctgctaagatacagtgacaaaatattcgtacctcttgaaatgcagtttgaaaacca

SEQ ID NO: 426095 - DNA, 460 bp, Homo sapiens
atgcaacattctccaggatagaccatatgttacaccacaaaacaagtctcaacaaattttgataagtcaaaattatatcaagcatcttctcagatgacaatagaataaaactagaagtcaataacaaaaggaatgctggaaactgtatgaatatatggarattaaacaacatactcctgaacaaccaatgagtgaaggaaaaaattaagaatgaaaataggcaaatgatctaaacagacattgctcaaaagaagacatacgaatggccaagaaatatattttcaaatacccaacatcactaatcatcaaggaaacgtaaatcaaaacaccaatgagatagcatctcaccccatttagaatggccattatcaaaaagataaaaaataacaaatgttggtgaggatagagaaaaaaaggaactctttacactgttggtgggaatgtaaatttgtacagccac

SEQ ID NO: 426096 - DNA, 677 bp, Homo sapiens
tattaataccccttcctccataaaacaaaattcttttcagttataagcacgtaattagtaattattatttttttaatttgcttttgttttgaaataattaacaattaaaaagaaaattaaatttttaatgtaaagctattattcaaatatattagagatcttcatgcataaacttaaatttgcacttaccaaagacaaaatagtacacttcatggtttgtattttattttattgttttaaatattaaaaacaagtaaatgctccaagtagtctcattgaatgacagaactaactcaagacctgtttctttatctctcaatcatttttctacgactgcctagttcaaatatattgttcaaatgcagaaatatatgctaccaaggttttagagacactgactgtgatgtgatctctaatattccaaaccactgtgaatttacagctaagttcatgtatgctaaggcttcctggagagctaggagttccccagagtaactccatatagaatacgatgtgtcttaaaagataaacttttaagtgtgttaaaatgtaataaatattaacaataatagtcattattttaaaatacaacagaactcctggcaattactyagaacttagattgacagcttttttccagagatgagtatttttatcactttaattgcctgaattgc

SEQ ID NO: 426097 - DNA, 575 bp, Homo sapiens
ccttttttcctcttttaatggtgacacatttgtggtgaattacagggcagctttataaactaggctccaggccagtctcaggccctgcgtccatgtgaacgttccttctcccggttggcctcccggactggtggtaaatcaaggcagctgtcacagtacactaagttagtgtgcgtcattggggagagcaggaagcgttgggggtataattctgtccatcaaactaatatgttatatcagtagctttgtaatcttctgccataacttatgggaagtgacacctaagaattcactttgaaggcaatgtgtttcttagactttaagtcaaaacagacccgattcacagcaacagttcctctgtttacatgagtggatttctagtgccggggaaccakgtccctatcaatgtggcagtatttaacacgctccaccaccggctggactctgtttacagccctcacggcaggatttgtaaacttttcaaacagggtttcttctcttcttgttacccttgccttaacctccagtagcgggatagataaacatgctccttgaatgttatcatgacaaagcaa

SEQ ID NO: 426098 - DNA, 590 bp, Homo sapiens
catattcaactgtgttaaatgaaaaatttgtggcccagtgaggtggctcacacctgtaatcccagcactttgggaggccgaggcaggtggatcacctgatgtcaggagttcaagaccaaggtggccaacatggcgaaacctcatctctactaaaaatacaaamaaaattagccaggcgtggtggcacatgcctgtaatcccagctacccaggaggctgagacaagagaatcacttgaacctgggaggctgaagttgcagtgagctaagatcatgccattgcactccagcctgggcaacaagagtgaaactgtctcaaaaaataaataaatacataaataaataatttgtggtttgctgtaagttaactaggcaaataaattaaacagaaccattctccaagcattttagtcgatctacctggaaatgcagtattgtgacctattaaaaaatattaagtgatcaaacccaggcaaatatttaaaaagaagcaatattttctatttctttaaaacttgtcagaaggtgaatattttccttccaatgtctgcctctttgaatgtgagacacagttttctcttggctgtaggat

SEQ ID NO: 426099 - DNA, 534 bp, Homo sapiens
catcaagtgttgataagaaaggcatttagcatttcataggatgaggctgctgtaagtgggtggtatgacatgataaattatggccaatrtcatattaataattacaggcccttccacacatgctcactctgttctcaagccaatgatatgttatcctgcacaaagccttccgctgtggcagatgtgatagagatgttcctctcccagaaaaattctggaattcttcaaggtttagaggtgagggccatctttgtggtccataagcaaaaactaaactgaactcatactttctgcaaatgtagctctgcttacgtctgactttccaccttgatccatgtccttccctccggtattcaatctacttctctgcaatataagcacaaaatctggggctaggaaggcattttaaaattagaaaatcatctttatccaaccctaaagaggcatgtcttaggatgttaagaaatgtttttgacggactcttcagagactcccaaagagagaacttgctcttgaagaagatgaggctagggt

SEQ ID NO: 426100 - DNA, 534 bp, Homo sapiens
catcaagtgttgataagaaaggcatttagcatttcataggatgaggctgctgtaagtgggtggtatgacatgataaattatggccaatgtcatattaawaattacaggcccttccacacatgctcactctgttctcaagccaatgatatgttatcctgcacaaagccttccgctgtggcagatgtgatagagatgttcctctcccagaaaaattctggaattcttcaaggtttagaggtgagggccatctttgtggtccataagcaaaaactaaactgaactcatactttctgcaaatgtagctctgcttacgtctgactttccaccttgatccatgtccttccctccggtattcaatctacttctctgcaatataagcacaaaatctggggctaggaaggcattttaaaattagaaaatcatctttatccaaccctaaagaggcatgtcttaggatgttaagaaatgtttttgacggactcttcagagactcccaaagagagaacttgctcttgaagaagatgaggctagggt

SEQ ID NO: 426101 - DNA, 542 bp, Homo sapiens
tctccatcactaatactggagttaacatctccttgataatttttaagtactctaatctctttatttaaagaaaaaaaaatcacaaaattatattataccgtagatttatttgcctcctgaatagactgctactaaattctgtttaataygggttaaaatcactacgtgtgacaggtatggttttctcatcaaggacttaaaaagcactgtgttctttctaaagtgccgaggcagcagtaatgagccagagctctgcacagccaagtgtccctccctgcacccactgagagcaataaaaagctgagttccaaccttggtgactggtgagttccctggaagcagaaggcaagggcgtgtagtggcgctccggggagctggcaacgtcctcactagaagcctgtgtgacaaaagcaaagtcaacatgaagcaacaccaaacaccaaataccaaataccctcatttaccagacctgtctccttgggatctgagcttggagaaaatattattcaccaagatacttcttaggaagcaagagctgtttt

SEQ ID NO: 426102 - DNA, 542 bp, Homo sapiens
tctccatcactaatactggagttaacatctccttgataatttttaagtactctaatctctttatttaaagaaaaaaaaatcacaaaattatattataccgtagatttatttgcctcctgaatagactgctactaaattctgtttaatatgggttaaaatcactacgtgtgacaggtatggttttctcatcaaggacttaaaaagcactgtgttctttctaaagtgccgaggcagcagtaatgagccagagctctgcacagccaagtgtccctccctgcacccactgagagcaataaaaagctgagttccaaccttggtgactggtgagttccctggaagcagaaggcaagggcgtgtagtggcgctccggggagctggcaacgtcctcactagaagcctgtgtgacaaaagcaaagtcaacatgaagcaacaccaaacaccaaataccaaatacsctcatttaccagacctgtctccttgggatctgagcttggagaaaatattattcaccaagatacttcttaggaagcaagagctgtttt

SEQ ID NO: 426103 - DNA, 542 bp, Homo sapiens
tctccatcactaatactggagttaacatctccttgataatttttaagtactctaatctctttatttaaagaaaaaaaaatcacaaaattatattataccgtagatttatttgcctcctgaatagactgctactaaattctgtttaatatgggttaaaatcactacgtgtgacaggtatggttttctcatcaaggacttaaaaagcactgtgttctttctaaagtgccgaggcagcagtaatgagccagagctctgcacagccaagtgtccctccctgcacccactgagagcaataaaaagctgagttccaaccttggtgactggtgagttccctggaagcagaaggcaagggcgtgtagtggcgctccggggagctggcaacgtcctcactagaagcctgtgtgacaaaagcaaagtcaacatgaagcaacaccaaacaccaaataccaaataccstcatttaccagacctgtctccttgggatctgagcttggagaaaatattattcaccaagatacttcttaggaagcaagagctgtttt

SEQ ID NO: 426104 - DNA, 512 bp, Homo sapiens
tatgaactgaatgtttatgtccccctaaaattcatatgttgaagttctcatccccagtgcgatagtatttggagatgaggcttttgggaggcaatttgggttagagcagataatgagggtaggcccctcatggtgaaattagtggcctcataagaagagaagaaagtgatagtcctgttagaagcatgtagcrctgtccacagcttcactgggagaggacaaatgaaagatctacccatggagcttacttagactctgatttatgtgctgcttttttgactgactttaatctggaccccttccagaatatcactatgctataatacaccataactgtgagtataacagacttcactgagttctgtgagtccttccagtgaatttctcaaacccggagattgccttggggacccctagacttgaaattggtatcagcaaggagggtggtcttgcaaacccctgaacagtgtggttggtgtcagaaatgaaggtggtcttggggactgcctaac

SEQ ID NO: 426105 - DNA, 547 bp, Homo sapiens
ccctcggaggaagagggtggggaccgaggtaagcgggcgggggtgggagcgctgtctccgggccgccgctgatggcatcccagggctccgtcctcctcctgcctccatgtgggttgaaagaggttttgttccaggagaaagtttgatgcctagacttgaggagccaaattcgggggtccctgaggtccgcgcctttaaagaggcagcccgccctgccgtgtgagcccgtgccctgcgtgtgggcacgtgggaacccgtacctgagcagcattcctgacacgggaccttccttgagaaaattcccctgtggaagaatcccccttggggagggggctttgtggagatggcacccagagcccgcccagtgtgggttttgcttgaaaacagtgcagcaggtwgtcaatgcccccttgttatcttcccgtagaatggactcgaccaagatctatgatctaagagcttcaaaaattaaatctaccttgccatctaattaaacatccccaaacactagtgtgttcaaggtgccaataattactctgtcgattct

SEQ ID NO: 426106 - DNA, 422 bp, Homo sapiens
tgtgttcatcttactgtgaataaatatgaccagatgtaatcaaagagttttaaggcctctcacttgaagtgacaaaattgcctgccatgtgaattttagaggcaaaattgggatgctgctttctaataggttgrtatcgaaaaatggcacatttttattctggaatatagtaaaccaaataaaattcaattagcaaagaatgattttgtataaatagttatgcaacaaaaaatgcaactaatttttagcagtacatatctatttaagagcccagaatggcttggtttatttatttggtaaacatataacaacattctttgggtaaaatgagtgtgcttgtttcacatgtgaagtagtagtggcattagaggcctaattatctaaaaacaaaaaataaacctctcatatgctttactcacccg

SEQ ID NO: 426107 - DNA, 422 bp, Homo sapiens
tgtgttcatcttactgtgaataaatatgaccagatgtaatcaaagagttttaaggcctctcacttgaagtgacaaaattgcctgccatgtgaattttagaggcaaaattgggatgctgctttctaataggttggtatcgaaaaatggcacatttttattctggaatatagtaaaccaaataaaattcaattarcaaagaatgattttgtataaatagttatgcaacaaaaaatgcaactaatttttagcagtacatatctatttaagagcccagaatggcttggtttatttatttggtaaacatataacaacattctttgggtaaaatgagtgtgcttgtttcacatgtgaagtagtagtggcattagaggcctaattatctaaaaacaaaaaataaacctctcatatgctttactcacccg

SEQ ID NO: 426108 - DNA, 422 bp, Homo sapiens
tgtgttcatcttactgtgaataaatatgaccagatgtaatcaaagagttttaaggcctctcacttgaagtgacaaaattgcctgccatgtgaattttagaggcaaaattgggatgctgctttctaataggttggtatcgaaaaatggcacatttttattctggaatatagtaaaccaaataaaattcaattagcaaagaatgattttgtataaatagttatgcaacaaaaamtgcaactaatttttagcagtacatatctatttaagagcccagaatggcttggtttatttatttggtaaacatataacaacattctttgggtaaaatgagtgtgcttgtttcacatgtgaagtagtagtggcattagaggcctaattatctaaaaacaaaaaataaacctctcatatgctttactcacccg

SEQ ID NO: 426109 - DNA, 501 bp, Homo sapiens
actactgccttgaagtgcacgcatggctttcccattttgtctccacgcactctccatgacgtcctctacctctccctacatcttscatcctccacccatgttggatcacttcctgactcctgaaagtgtcactgaattccaagcatctgtggttcagatcattttttacacccacctgagaagctgttcttcttttaccccacctaaaatcatcaagctttcttcaaacacttcctaatgtcccaggccaagactgatgactctttcctctatgttttctctgcacttctataatagcacctgtttgattgtttccttgtttgtatctagttgctactctaaatgtaagcttctttacaaaaagagctaagtcatagttatttgtaactcccacataaccatcagcagttccagagtatcaaaagagatcatttttgtttgactcttagttaggcaactgtatatctgttttaacatcttctctggctcagaaatatactc

SEQ ID NO: 426110 - DNA, 549 bp, Homo sapiens
aggattctgtctggattggacagtcctattatatttaattctaaacttgcaatttcttctgcaaaaatagtcttgtagaagaacatattaaaagcgtgtgaacttattcaagattatctgggcagatactgagtggacaatattgtcttggttggaatgcaaaayaaatcaaagatgcaagacttgacctcgaaaagtgtagttggataaacaagagaccacgtatatgaagcaagtggcaatcacagaagcatgaagagtagaagtgtacaaagagtatctagagcaagggaaattaaccaaattagatatgaaagccaggttgggaatgtgtttgagagagggtaagaggaaattccagataggaactggacgagcaaagtgttacatgtaagtgttggaaaccgtatccatttggctgactcatacggccctgttgtgtaacaagttatcaggttggttaaattggattcatattttctgttacatcaaatgggatgatgataattgtgaggagtaataagtctgtcatttacttccaaagtaatt

SEQ ID NO: 426111 - DNA, 549 bp, Homo sapiens
aggattctgtctggattggacagtcctattatatttaattctaaacttgcaatttcttctgcaaaaatagtcttgtagaagaacatattaaaagcgtgtgaacttattcaagattatctgggcagatactgagtggacaatattgtcttggttggaatgcaaaacaaatcaaagatgcaagacttgacctcgaaaagtgtagttggataaacaagagaccacgtatatgaagcaagtggcaatcacagaagcatgaagagtagaagtgtacaaagagtatctagagcaagggaaattaaccaaattagatatgaaagccaggttgggaatgtgttkgagagagggtaagaggaaattccagataggaactggacgagcaaagtgttacatgtaagtgttggaaaccgtatccatttggctgactcatacggccctgttgtgtaacaagttatcaggttggttaaattggattcatattttctgttacatcaaatgggatgatgataattgtgaggagtaataagtctgtcatttacttccaaagtaatt

SEQ ID NO: 426112 - DNA, 549 bp, Homo sapiens
aggattctgtctggattggacagtcctattatatttaattctaaacttgcaatttcttctgcaaaaatagtcttgtagaagaacatattaaaagcgtgtgaacttattcaagattatctgggcagatactgagtggacaatattgtcttggttggaatgcaaaacaaatcaaagatgcaagacttgacctcgaaaagtgtagttggataaacaagagaccacgtatatgaagcaagtggcaatcacagaagcatgaagagtagaagtgtacaaagagtatctagagcaagggaaattaaccaaattagatatgaaagccaggttgggaatgtgtttgagagagggtaagaggaaattccagataggaactggacgagcaaagtgttacatgtaagtgttggaaacygtatccatttggctgactcatacggccctgttgtgtaacaagttatcaggttggttaaattggattcatattttctgttacatcaaatgggatgatgataattgtgaggagtaataagtctgtcatttacttccaaagtaatt

SEQ ID NO: 426113 - DNA, 636 bp, Homo sapiens
acatcatctacaaaactccaccacactgccctgtctcagggtactatctcatccctatctcagggtactatcaccatatagtcattgggcttgtctttttttttttttttttgagatggagtctcactctgttaccttggctggagtgcagtggtgcgatctcggctcactgcaagctctgtctcctgggttcaagtgattctcctgcctcagcctcccgagtatctgggattacaggcatgcaccaccaggcctggctaatttttatatttttagtacagatggggtttcaccatgttggccaggctggtcttcaacccctgacctcaggtgatccaccctcctcagtgcttatgtcttctatactgttccataaattctgggaaggcagaaacctatagtatgatttcctaccccagcattaggacaatgaccagtacataataggtgctcaataagcctttgttaggwtggatgtactaaaccatttccactccttgttagcttttaaccaatacctgtttaaaacattcatttaatttacgtcgtaccttcaccaccattacccaccattccctgccacatacaccttcacggtcttctgcaacaaccaggattgtcatgtctattgctttc

SEQ ID NO: 426114 - DNA, 597 bp, Homo sapiens
ttgtggagtaaggattagaatatcataaattggttactatttaatatatcttaaattccattaattctattaatgagaggcaacccagtctagggatctcaaaactgagctagacgttacagactcacattcttgttctattaagtaatgcacacacacatatgcacatacatttataatattcaacttgggcagattaactaatgttgcaaaattattaatgmcctgacatatgtcagagcatactaattaaacacaaagacaaaaaagtgcaggaaatgttttaaacctttcatatcatcaattaagaatgtcactttctcaaactaattttcataaaagcctcttttgaaccaacggctcttcctgataacactaacttcttttcctcccctttaacagaaacctgtgatatattctgtgataatcagcattttcttctctagtactttactgaatttttaaataaaatttttttctttaatttacctttatgtttcttaattaaagtcagaatttggcttcttgtgaacaatgctaattgcctctattatacctttatcctcatcaaactctgggtggatttttttagctgag

SEQ ID NO: 426115 - DNA, 600 bp, Homo sapiens
tatataaatacatctttcaaatcaatttaaaaaccttactatcttaataaaataatggcaagagacrtgattagaggtatgatttttcttcacaaagaaaaaatgtaagtggctaacaaatgtgaaatgggtcatttttagtaattaaagaaatgcaaactaatgtaagatgaataggatcaagacagtttctactattaaactgggttttttggttgtttttataaggtaaccctcaattctggccaaattacagggagtataaggtgatacagcctttctggaaagttatttagtaacaggtgctaataacttcaaatatgtaaaagtaatgtgtaaaagtatcagtaattgcatttataggaacctgtccttagaaaataattagaaatgccagtacagatttgtataccacagtgttcactgcaaaattatttgtagtagtgaaaaattgaagatcacccaaatgaacaactataaggagttatttatataaattatggttcaccaatactgacattattgctgacattaaaaattaggagtttgaagaatattaaaatggaaatatttattaaaatgtgttcaatgtaaatttgg

SEQ ID NO: 426116 - DNA, 600 bp, Homo sapiens
tatataaatacatctttcaaatcaatttaaaaaccttactatcttaataaaataatggcaagagacgtgattagaggtatgatttttcttcacaaagaaaaaatgtaagtggctaacaaatgtgaaatgggtcatttttagtaattaaagaaatgcaaactaatgtaagatgaataggatcaagacagtttctactattaaactgggttttttggttgtttttataaggtaaccctcaattctggccaaattacagggagtataaggtgatacagcctttctggaaagttatttagtaacaggtgctaataacttcaaatatgtaaaagtaatgtgtaaaagtatcagtaattgcrtttataggaacctgtccttagaaaataattagaaatgccagtacagatttgtataccacagtgttcactgcaaaattatttgtagtagtgaaaaattgaagatcacccaaatgaacaactataaggagttatttatataaattatggttcaccaatactgacattattgctgacattaaaaattaggagtttgaagaatattaaaatggaaatatttattaaaatgtgttcaatgtaaatttgg

SEQ ID NO: 426117 - DNA, 497 bp, Homo sapiens
ttaatgactccatttttcctccatatctatcaaattaccaacttctactgtctctctcttcaatgtctcctagacctggccctttctttcccctcctgcagtcagcccagtagtttggcttagctcctcattactcttggcctgtttggaagacttctctgactctccattgctctcagttttgaatcctgaacccagcctgggatgcatgattctcagtaacatgcttctcacctagcttttcacattagtccwcggactcccttacacacatcagccagaccctcacacccctgtgctttcacttccctgtgatgttcctgctactagcagtgcacttcattcattcattcattcattcattcaacagacatttactgagcaaatttcagagcactaggcactctggggtacaaagatgaattaaacaaaagtctctgcctccaagaggctccaagtcatgttgaggagacagacaaataaacatttgtgtgaaa

SEQ ID NO: 426118 - DNA, 626 bp, Homo sapiens
tctaatcaaatcccaaaccacttgaatttccctttcagaagaagacaggygggctcaatgcttacctaagcattaagaataaataatgctttaccagctatctaagcgtctcttaacccagtgaggttaacacccaaactcaacaatcacattcctttcctcaaataatcactattgcatgcatattgtggaggcccaaacagatgatgatggaagggctgggcatacttattattttgtactagctatgtggctgctcagatttttaaagaaaacataaactacacaaccttgaattgctaattctaaaaatctacctcttttcatctgagacataataaccagcaagataaagtaacttcctcaaagagacagctaaggattttagtttggtagaataagtttcaagaactagatgattttcaaattattcaaaataagattcaagattaaataaataagtacatgtctaatatttaaagcaaacattttgttttgtctggtagaattcagatgttgactatttatggtatcttatatgagtaaacatagaacattgattgccaagataaaccagagataaataaacacaattataggaaatttcttctgacatatacatattg

SEQ ID NO: 426119 - DNA, 567 bp, Homo sapiens
cctgcttttgtggcttcatgatgccatggagacctgctgaatggagctgtggagctggggtgtagggtagggttggggaaagrtgatagtgctacctgtacataaagctcaaataaatataatttatcctgaagctcctgaccatcaagaggcatttcagcaattgcaatggacatgaactcttttgatagaatagtttatgtcgattgcaatttctgaaatagcctactgaattaaaaaaagctatgaaagctatgaacaaaagcctctaggatgaagcaaagttatgtaaactatcttatcaatgtctaacacaaataaaacacataccctttttctgtacactcgtctgaagctccatattgatttttgggggtatttttttcttatcctcttcaagacatcagtcatatacagatgcatagttaggatgtggagcagatgatttgcccacaccctctcccactcagagatggcaccgtctgtggcctctgaaattctgcagtgacatttaattgatgcttagattgtcatggaaaatggttcatggacacaggtgatattttc

SEQ ID NO: 426120 - DNA, 528 bp, Homo sapiens
tcaaaccttaccacaggacgctacttcctctcacatcttcacaatttcaaggaactccccattcaggtgaagaggtggctagtaagacccatgatgctttctctcatcatcctctgctctcctccttcgcaatctcataattttttttatccttcagccactgttattttgttcttctcttgaccctgccttatttcttgtatctttctgttcttcctctctatgtcttcttccttttccattcttctctgactgcttatctgaccttscttcttcttttcctttgatctctttcctctccttttctatatttaccttcctctcttcctatcctatcttctcttccttgtccttattttttaactgaaaggaatatgaaagaaaaaaattatgttttagcctgtcttaaattaagttttatattatttgtccctaatttaaaaaaattagacaatctgaacagttagtgattgaagaaaaacaaaataagtggcctttttctgttgtgcccacaaagggaattgtgat

SEQ ID NO: 426121 - DNA, 599 bp, Homo sapiens
ctttgcaaataacacagagaagtgaagcttggggtaaggagaaagagaaacaagactagagaagaataaagtagattcaaaaagaaaagatgaagagggagagagagaaagtgaaagaagattcctctatgaggcccagatgcttagaagtggaggcaaattaattttctctcagtttgagaaaaaacaacaacattaaarcaggcagagtaaatgcaaatcacagaatgggaagcagacactcagacaatggatagtcattttagagagaatcattacccttcttaggccaaaaatattaaagaattttgcaaagcatgtaagaaagatgtaaagtcccctgagaaaccatttgatatagactgtgtgtaatgagaatcattcgcatatgcaaaagattgaacactagtaaaagaaccaaatcaaatgatccgttattccagtcaggacagaacaggataagagtgctaacaggacatcaacaatcagtactggaaaaacacattgttagggagagttcaaagaaacacaatacctcattatcttggacacaaggtgtaagaaatcatttcagcttccaaatgaggagaaagcacagt

SEQ ID NO: 426122 - DNA, 586 bp, Homo sapiens
ctaacaggacatcaacaatcagtactggaaaaacacattgttagggagagttcaaagaaacacaatacctcattatcttggacacaaggtgtaagaaatcatttcagcttccaaatgaggagaaagcacagtaatggcatgcactacrtgatagttctagtttgttgtatacgatttgctcaagttaactgtatagttttatatatatagtttatagatattatatatatattttatatatataatatataatcccttttgtttataaagtatatatatcatatataaactatatatataaataaactatatatatatactatataaactatatgtatagttcccatttcagaataagggttcagttattctaacaaaatgctccgtaatcttcagagtccaatgctgcagggatctgaaaatcatcttggaagacccgacctatgtcatacaacaaaatattattttgtgttcagaacaagaaagctagacaaatcattcctttataaaatattgtcttagcctggctttaaactggtttgttacaagttactctgaacttttaagtaccctgagttacatggaa

SEQ ID NO: 426123 - DNA, 472 bp, Homo sapiens
tttttttggccaggaatgaaagcgaagctgaaatatatttaatgcctaataagtctctcaagctgctgaacttttatattattgtatatgcaaacctgggtcataataagcaagcaattaactaccttgttcagtgtgacacagttaagaatggggaatggaagaatttcaaccctgtctatctgattctgaatctcattccctttaactataactttatatttcaccataaaaaagaggaaattctggctattgtccaccaggatgtcttgtaattccttgatacctactggacagcattagaagagaaagtaaaatagagaatgtgaaagagaccctggaattttcacttgacaactccaggctgaagaaagcytgagacagaggaaacagcattgttcactttggccaccatcacgttcaaaatatgcctatgagttctacaaagagtgttctgaagacaaagtcacaa

SEQ ID NO: 426124 - DNA, 593 bp, Homo sapiens
tgtagtcagttggtcagaagcacagacaaaaccaccaggagcttgctattagcatctgaattgagggcagtcttatgagactgagacctaaatctgtggaatctgatgctatctgcaggtggatagtgtctggattgaactaaattaaatgatacccagctgttgtctgctgcagaatgcattactttcctgttggtggagagaaatccccaaatatttgctcacagaagtcttctgtgttgactattgttgagtgagacgatagaaaaagcaatttgagttttttttttcactcaaaacctcaagaygattcttttttaaagctgattcttagagaggatcaataatattataaatattcagtcagattaattatgaatcataatttaaaattagcaagttaacaatatcagaaataagagggtagcttcactggaaatcctactgctattaaaatgatataaacaacttgggactaacatattcaatacttattaaataaatcaaatgtgcaaattccttgaaagatacaaactatcaaaactcagttaagaagaaatagaaaaccaaataaacctatatctataaagaaa

SEQ ID NO: 426125 - DNA, 586 bp, Homo sapiens
aagatatgtatattttccattgctgagaaaaattgaagatgacaaagtaagtggagcaatatatcacctttatagtccagaacacttaatattattagaatgtcagttcccccaaactttactgatagctttagtgcaatccctatcccaatcccagcaagatatttkgagacactgactattttattctgaaatttgtatggaaacacaaaactttgaaaagcaccaaaacatctttgaaaaagaacaaaattggaggacaaataccatctgatttcaataaaaagttacagaaatcaatacagcgtggtattgatataaagatatatcagtgagatcaaatagacctacacatatatagacaatggactttagacaaaggcacagaggagtgaagaaagaacaggcttttcaataaacggtgccacaacaattgaaaatctgcatacttaaaagaatgaacgtcaattcttaaacaaaaagagcgacgcagaagacaggtgatttctgcatttccaactgaggtactgggttcatctcactggggagtgccggacagtggctgcaggacatggggtgcagctca

SEQ ID NO: 426126 - DNA, 586 bp, Homo sapiens
aagatatgtatattttccattgctgagaaaaattgaagatgacaaagtaagtggagcaatatatcacctttatagtccagaacacttaatattattagaatgtcagttcccccaaactttactgatagctttagtgcaatccctatcccaatcccagcaagatattttgagacactgactattttattctgaaatttgtatggaaacacaaaactttgaaaagcaccaaaacatctttgaaaaagaacaaaattggaggacaaataccatctgatttcaataaaaagttacagaaatcaatacagcgtggtattgatataaagatatatcagtgagatcaaatagacctacacatatatagacaatggactttagacaaaggcacagmggagtgaagaaagaacaggcttttcaataaacggtgccacaacaattgaaaatctgcatacttaaaagaatgaacgtcaattcttaaacaaaaagagcgacgcagaagacaggtgatttctgcatttccaactgaggtactgggttcatctcactggggagtgccggacagtggctgcaggacatggggtgcagctca

SEQ ID NO: 426127 - DNA, 596 bp, Homo sapiens
ctacaattcagctaccgtatcccatgcgttgaggaaattattattcattcttcaaaacccaagtcaagcatcatcccactagactacttccctaacctcacctccaactctatgcacaaagcacatgccttacctcatagcacttaacctcatgaatggccagtttctattctaagtttctaggattagactgtgagctttatggggaggaacagcttctgattcaactttgcatattcacagaacctaactcttgttccatattgttgaatgagataggtagaaaagacagagacagaagaaagagaagcaggagagaaagagaaagaatggaaatcagaaggtgagaaaggaaggaaggaagggaagtaaaaaaagagcaaaagaaagaataaaatgaaataatgtagtatcacagaacataacggcttgtgatcaaataattggcaaaaataaaacttgcaattatytacttggtcaaactgacaaatgttcttaactaaaaggcaatgattcattaattcctcaaatatttcttgagcacctattctgtgccaggcatggcgccactggatgatatattataaacaagaaaa

SEQ ID NO: 426128 - DNA, 572 bp, Homo sapiens
aacaggaataattttcagtataaaaggtaaaaatgcaaaattcaaaatatgacagatggaagaatttcatagaagatttctctctggaatcacctatgacttggatggagtttggatgttcatcctgtgggaataggacagtgttggcaagcatattgagaacatcaggaaaaagggggtaccttcaaatttgaagyattaaaatattcatgagaagatttatttcaattactttgtacctattttatgtttaattttgtctatttttaattatatacagaggaggtattataaatcatcttcaatgttaactcacttacaggtcttattctggctctctggaaagagattagagagacctgactgacgatgttcaggaagtccaagcccatattatcactctttttccccatgccttcaccgcatggccaagaaaagcttttctgagcaatgaagcacaatcttctgggggtgtgatggttaactttatatgttaatttgactgggccgagagatcttcagacatttggtcaaacactattatgggtgtttgtggatgagattagcatttg

SEQ ID NO: 426129 - DNA, 572 bp, Homo sapiens
aacaggaataattttcagtataaaaggtaaaaatgcaaaattcaaaatatgacagatggaagaatttcatagaagatttctctctggaatcacctatgacttggatggagtttggatgttcatcctgtgggaataggacagtgttggcaagcatattgagaacatcaggaaaaagggggtaccttcaaatttgaagtattaaaatattcatgagaagatttatttcaattactttgtacctattttatgtttaattttgtctatttttaattatatacagaggaggtattataaatcatcttcaatgttaactcacttacaggtcttattctggctctctggaaagagattagagagacctgactgacgatgttcaggaagtccaagcccatattatcactctttttccccatgccttcmccgcatggccaagaaaagcttttctgagcaatgaagcacaatcttctgggggtgtgatggttaactttatatgttaatttgactgggccgagagatcttcagacatttggtcaaacactattatgggtgtttgtggatgagattagcatttg

SEQ ID NO: 426130 - DNA, 525 bp, Homo sapiens
atcattttatcctggatagcaaggctttaaccattcaatgtgtatttgttaatcatccacatctatgcacaggttatggaaatatagttattcatctcatggaaaccagggcaagaaagcaaaaatttctttcaaagatattgtattacttacaaagaactttcccataaaaaatgtccaaaacagcaccagaaatgtgaacttttaacatatttttagatgcttctsttttttttttctctttcctagttcctcatggaacttacaatggccttgtgctatatcccctggcattgcagggtctacaggaatagatgcagggccagccttgtcccttccttactctgtagactgaaattctggatttgcagttctggtgctttcttccactctctgtttgataaacatggctccttccaccagttcacagatgggtgctgaggtagacagagaaacctatcattattttctgggcaaggtaagaagggaaagccccataggtagatctcatatgttcatcttcct

SEQ ID NO: 426131 - DNA, 562 bp, Homo sapiens
agagaaccaccaccgtagaggtttctagcctgagtaataaataggacataatagtgaatagaaagggtataataaataaacctaacagtgtcctgatgtccaagtcaatgaaattgatctttatccaayagtaacaagagggtaagcagggttttttttttgtaaaattaataattcaggttaaaaaatgtggaagtagtctagatctagggtattgaaccagagcagaatctctgaaccttggaactgttgacatttcgggctagataattttgtgttattagggctcttctgtgcattgggcgatatttaacagcattccaggtctttattcactacatgatagtagcaccttctccttataacaaccaaaaatgtctccagaaattaccaagtatcaactgagaggcaagattgcctctagtcgagaactacccacatagaacagtgctgtttccatttgccttttaaattattcatcttaatttggctagtatttcttgactaccaattaggtctcagactgggcctggagtacagatgcagagatatacaaggcaca

SEQ ID NO: 426132 - DNA, 557 bp, Homo sapiens
atcatttttctattgtaaaatcaactttaaaaagatataaatgtatgtatgtatatgcatacatgtaagtgtacactcatatattttatacaagttttcaaaaagttcatggaaaatgcatgttttcaaaacactatgcatggatttcaaagttgttgagccaaaataaactcacattaacttaggacatgtatgaaaaggatctactctgaggcactaagaagaataagaaattagtttgaaaagagccccaagtagagcaacatgaattcygctaaaactgaagcaagaacaaacatcaaatgtatggtaaagcatgggtagaagaattgtaaaatcattgatgtgttacaaaaggtttagggggacaatggcccaaagaaatcaatagtttacaaataaataacttgttttgggaagggatgagatgatattgaagatgaagcctgcagcagcagaccatccaggtagatttgtgagaagagaatttatcttgtccatgccctaattgaagaggattggcaattaacagcacaaacaaaagccaacaccacaga

SEQ ID NO: 426133 - DNA, 637 bp, Homo sapiens
tttaatagattttggggtactgttttcttctgcttactttgtatgtgggatatagttgaggatagcaaaatctcacagctccaccaaacttccttgcttttacattgtctgccattagctatgacaatctggcagagaattagaggacaggaactaccccaatattgtgtagcttgagcagattggaaaaggcctatcatagaatatcttcaagatcaaacttgcaatccaggaacacattacacagaactctaccagaatgggactgggcccatcagagttttagctcgcatttgtttcaatttgtctaggtgcctgactgttgctgatttcatttatgatggatataaagagaaaagttggaaaatgaataaaatatagattgttcataaatcaatttctcctttctccttttttctcctctcagaaaggatgtgtgcatcaaggatgtaaacaatataaactgcattttcctctttctactcagtagtcttttaaataatatattgattggatataggattacagtaaaacatctgtcttacatgttttatatgaatgcaaaaaaaatgggtaattgcattacctcaataataaatctaacaatgagagaaaaaraaatactgttcctaaaaac

SEQ ID NO: 426134 - DNA, 599 bp, Homo sapiens
tacaagaaacttccatttttaaaagttctcaaaaccttttatatttggctaatctttattattcagtctccatgtactgtcttctccttaactgtagacgagaagatattcaagtctacaattcagtgttatagagaagttcgatgaaacgtatagctcacttttaggtgctggaaagctatcccaggggtttgcattagttaggttatagttaagggctgtaacacgcaggcctcaaaatacaaagtgcctaaactcaatggagtttatttctcatrcattggttcttactaagcaaatggctttcttccaaataaatggttctcaacactttttattttatctcaagaccagtttacactcttaaatattactgagaactgtaaaagttttgatttacttctgtgatagctatgaatatttatagatataaaaattaaaacaaatttaaaatatttactaatttctttaaaagtagtaataactctgctatgttaacataagtaatgcacttgattagaaaaaactacatattttcaaacaaattttagtgagaagagtgacactgctttacatttttataaacctctataatgtct

SEQ ID NO: 426135 - DNA, 345 bp, Homo sapiens
ccctcagacattatgtctcttagaactaagggcaaaggcttaacctagagagtattctctatgtaacattaaagcagtacttgattaagagtttttgagccattaggttcttgatagaggtctggtgtttattctgactacaaataatttctrtgtttcttcatttaaaaaatgtcttcctcccccttctttctgagttctgtaacctcttaactttctggagaaaatgatggtttcaacaacattttctcgtgagctgatagtttcttcagctgaatggggagcaccttttctgatttttatctgctctacctcagtttttgttttgttttgttctttattgta

SEQ ID NO: 426136 - DNA, 545 bp, Homo sapiens
tcttattttctcatgtctcatgtctaaggccatgaggaggtctgagaaacaaggctctaggcagatggaataacaccaaaaaatgaagtgagagaaggatctgcttggaggttttgaaggayagcagaaagtagaatgccatagaggaatctgcaagggatagtgggcagagaatgagctgaggagatagcagaggccatttcagccagtgtcttgcatgccattgtgttaaattctttcctacagaactattaatatattattatcattttagaactaattttctgatcttaaaagcaccgtaaaataaaccacctagggatatattataactattctcttactgttggatagttaggttgttatattttcccagtataaataatgttttaacatctttgcacataacactttgtcctaatttctaattatgtgtaggacaggacactctgaagttgcattttaattactgataacatttaaaaacaaagaaaaattataactttgttgcgtaagaaaccaatacagaaaattgatgctaaata

SEQ ID NO: 426137 - DNA, 582 bp, Homo sapiens
aaacactcttgtctcgttatctcgtaagcaattaacattttatgtttccttgcatggaacatttcagacccattattgctgttagataatattctgttaactttgttttcaaaactatgcttctagctttatatttattgaggtataacttaaagagaaaataatattcagttgtactaattatttggctatttggcaatattaaactcagctatctttgttttttatttttcattgagaaggaaacaagaaacagacaagaagaattggactcattatgyagcacactatgatgccgcagttaacacactgcagaaatgcgttagaaaataagtactggggggtctgggtgtaaaaatttctcaatggattacttgtactcataaaaccagagtgcaaaatctcgagtccattcattctgtaggctttctggtgaatcgagtgtactgggtgtaccttccgggggggtcacagcctttgcgagtgcctatatagctacagatctcttcagaagcaattgcaagaagtgtgcctgcttgtgtgctattggttcccctctaaggactaattgagggcaccaaa

SEQ ID NO: 426138 - DNA, 601 bp, Homo sapiens
tccctgcatcataaggcaaaaatctgctttgatagttgggaaataaaaattttttctaattastttagtaatagttaattgaaattttctcagatatataaattttacagtaagaaaatcaaaatttaaaaaatgaacccaatatattatcatcataatatttgttaaattttgtcttaaatcaattattataggtagtctttgtttaatagtaattgctcatatatttttatctcatgaagaagactaaagaggaagagttattttttcaaataaaaaaagattacagcatatttctctgcataccatctttttacatatgaggtcagaaaagcaaattttgatacaagcattggttttattgagcaaaagaatccaaatatctgatatctttctaaatgaattattcattttgttacagaagaaataaaactgacattgttggaacagtacattattccacattgcacttgcatctggttttaaggatttgttccctatagtctacagtatatgacaacttttatctccttcctgtctcttacattcaaaagagtgcaattttattccctaaagcttaaataagccacattgttacatg

SEQ ID NO: 426139 - DNA, 601 bp, Homo sapiens
tccctgcatcataaggcaaaaatctgctttgatagttgggaaataaaaattttttctaattactttagtaatagttaattgaaattttctcagatatataaattttacagtaagaaaatcaaaatttaaaaaatgaacccaatatattatcatcataatatttgttaaattttgtcttaaatcaattattataggtagtctttgtttaatagtaattgctcatatatttttatctcatgaagaagactaaagaggaagagttattttttcaaataaaaaaagattacagcatatttctctgcataccatctttttacatatgaggtcagaaaagcaaattttgatacaagcattggttttattgagcaaaagaatccaaatatctgatatctttctaaatgaattattcattttgttacagaagaaataaaactgacattgttggaacagtacattattccacattgcacttgcatctggttttaaggatttgttccctatagtctacagtatatgacaacttttatctccttcytgtctcttacattcaaaagagtgcaattttattccctaaagcttaaataagccacattgttacatg

SEQ ID NO: 426140 - DNA, 609 bp, Homo sapiens
tctatattctgttacctgatttttttcagttgattaaaaagtctcactaagtattctataacatatgtgtcagttcaatcatttactgtgagttattcaactactattatttatttcaatattacttagctttttgtcattttcttgcttatattatgatcaattcccagaaatttccattttgcaaaaaacggtttagtttagtaagacatataaactcttttggaaatcatgcctgaaaatattttgcttaaacactattcttaagacagactatcaatgttagaacatccaacaggcattattttaatgaacatataaacatgacttttaagttttatgaagctccaaataaaaacagtatmccaaaggtattcaattttcttgaagtaaaaagtgaaaaataattccctttgattgaaaaaataatactcattcagcatgaaaacacctgtatatgattaattgcttgcctttactggtgcaaaacatttcatgccaagatatttacattcctatagtcctaaggctgggagcatgccactgaagcgtctttaaacacctacaattataaattaagttatatagaaacattaccctgcatgtatg

SEQ ID NO: 426141 - DNA, 470 bp, Homo sapiens
ggcattcattatgttcctgacctgatgcctcacccattatttttatgttcctgaaatctgtgatacaaagaacaatgtatagccaatcgatagcttacgttatcttaatgtaaattcttggtaaataaacatagaaaccgctttttttcttaaaaattcacttgtaactgctgctaatcacagtgtatatccagggcaacttgaacctatgctcccaggtggccatcctcaagctttgggcttgaataaactctatacctaatgatattttctgaatctcattatttaaggcttagagaataaaaatcatagcaaacacaaayattataactgaagatataattagatatatttaagattcccaaacatatattaaaaaaaaaaaagcaaaacccagaaacttagtaaataattaaaccaatagtaatgctaggaaactagataagacttgcatgaaaaacaagatgtca

SEQ ID NO: 426142 - DNA, 453 bp, Homo sapiens
ttaaccattgatatttagacagcctatgaatgaaaatgttttactcctatttaatacaggtaatattcctgtacaacattgtgcatcatttgtttaaatatgttgctgcagtcacacatacttcattatcctagatataaatcactgaccagccagcttatgtacagaaactaggttattcacaacaactacaagagtgaaataccttatgctttgtacccagtaggaaaaacctttttcctaatcgctttggtgagcaatctgaatttaagtgggttatgagtgattcatacactagaaatagagttcagggaactcaaaragtaagtgctactagatgtcagctattctttccatctgtaaagatggatccttgtctgtgttaggcagaatagagcaggcatttggtgtatcataagattacaggtagaatcttactttgatgagcttgct

SEQ ID NO: 426143 - DNA, 561 bp, Homo sapiens
ctaaataaaataaattatattaactgtgtgcctggtgcagaatttcatattgagtccctgctcactctaatagaatccaagcctcaatcattatttaaggagccagagaggagcattaagaaaacatttcaaagatctttgaaggcttctgaggacygatcagagattgaccttcagcatcacccagacagaggaactcttgctgccagtgtagtcttggtaactgaatcattacagaaaacatactccataacagatggagatgtttcctaatctttgtgacatcttttgaaaggctctctgttgaaaaaattcacaaacaaacaaacaaaaacctctacttccttaacattttataactatggcaatgcccaacaagattagtcaatttactgaagggtcgtttacaccttagcacaaacttggcatctgagattaagatcaattgacgtcaaacttacttgcccaaggatctgggcaaacagggcccaccagagacttgtatccaaatgtagcaggaaagagcacctctgggaaaaggaaaatgaaggtggctggtta

SEQ ID NO: 426144 - DNA, 604 bp, Homo sapiens
ccgtggttaccatatagtagagaacatatgatatggaatagcaaatgggaaccaacaaacaagacaaggcaaaaccagtcagcaaaacaaactgccatgagcacagtgcccctctgaaggagatttaaacaacagagtgagggtgatcacatgtcaatcagaatattggctaccaacttagtttgtactctctgagcagattggggcagatgatacctgtctgatacactgaaggggagaattaaaacaatttatttgagtcatatttatgctcagaaaccaccccagtctatttcagtggaaattattwttcctattttggtatgaagcacacagaaaaatatgattcagaaggaaagcaactgagaatctgaggcctgcagctgtgagagattacagatattacagttgagatgtgtctaaaacagaggggctgagaaagccatcatcattaccagccacatgctaattgcggagtgacagggcactagtccattcatcaggttcacaggttgaccccaatagaggctgaacttgtccctcatcatggggaagaaattgttcccaatatggtttgtttttcattgaggtataatttacatac

SEQ ID NO: 426145 - DNA, 526 bp, Homo sapiens
agtactgtagtttatgtcttctgtattttcacagaatttctattttatcagctcttgagaatggtcttgaaatctcaaactgtaattgtgtatcatctattaaccttttagttctatcagtttttgcttcaggtgctttgatgctcttgttaagaggcayatatgcatttaggatttttacgccctcttgaagaattgattccctcattattatataatatctcttccgggtaatactttttccgaagtctgctttgcctgatattgattctttagctttctttccattgcattagtgtggcatacctttttccgtattattacctttaaccttcctgtctcttcatatttgaagtggattttttttggtacacatcatagttgattctgattttttaatccaaatcaacatctctgactgttcattggagtgtctaggccatcttatgttttatacaattatcaatatgggtgagtttaaatctcccaccttgctagttgttttctacttgtctcatctgttctt

SEQ ID NO: 426146 - DNA, 589 bp, Homo sapiens
tggccttccatggaggctatttcagctttgcctgcctttgccacgatggctgttcttgcatagtctggccatcatttatttctaccactgttgcctcacctgcttcatcccctgaagagcmtcgaggtggtgccagagttcacttttgctgctattcttgcttgtggttatttgcatcctgttgctctcaaagcttcctctgctggcctgttacgctggtgctgctcaccgcaactgggtaagctttttttacccctcttcctgtcgctcttcaaggtttccaaaagaccatctttcagcagttgcctcaattaaggccttggaaccaggtataccggggactgggcatgagggtaactgagggaccccctttcctggaggtactttaaagtacttctccctaaggatggtcaacccagtggcacaatccaagtgacaagtcttttgacttcccctgtctcagggtgacttactgcctttataggccaccccttcttcccgcagaagtcggagcaacttttgacttccgtctaggttcatgagcatttctcctaaaatcctaaggccacccttcattttgtttcctatt

SEQ ID NO: 426147 - DNA, 625 bp, Homo sapiens
agatgtaggcatgtgcctttgaatagctttattcctttaacacatatgttcagtattgttttgactattgagtgttgaacaagaggggtacagtctctgccccctgtctagcagaaaatatagtcacacaagtgcaggcaatatagtttgataaatgtttatgaaggtacacggaagattcttatttgtaaaggcaagagaagggaaacaattccaaatgtaacccagctattggccttggtcaccttcacatttgagatttaaaccagtyggtctaatcttgcatttcactctctgtcagaggttcaattccaggtcagggggtggaggagtaatattctcacagtcacttctggcacataattccagcttccaaagaacactgagtcatacctggatatcaccaactgctgttgctctcttcttttggctctatgccaatcaggcatggaaatcagtccctttcctgtcattttccccccagaaccaatcactcaagacattgcatgtggcaggttttactaaaggtaagaaatattgaatggttttacatcaccataaggccttaccccagtctttctccatgtttcttatgctttttaatccctggcttctttctgtccct

SEQ ID NO: 426148 - DNA, 440 bp, Homo sapiens
aaacagcatggatcatttcttctggagagagctcagtcacatagtcacacctcactgcaagggacactgtgaaatgtcatctagctgagtgccaggaggaagagcaagtagatttagcctctgccataggagagttaagaagttggggttccgagaggactgatgagaaactatgtagtcagtaaataggcrtcattggtgacttcccagaatacttttagcagagccagggaggtggaagtcaagtggccaagtatagggctgtgctgatcatgaaaagaaaacggacttctctttatatcctgttctttccaggaatgaccaagggttgctatcagcttgaattctaatcacctggctgcagctgagtggaaaaactagccaccataatcaggttaaaactttttctttctgcagaaagctgcaaagcttcagggtat

SEQ ID NO: 426149 - DNA, 440 bp, Homo sapiens
aaacagcatggatcatttcttctggagagagctcagtcacatagtcacacctcactgcaagggacactgtgaaatgtcatctagctgagtgccaggaggaagagcaagtagatttagcctctgccataggagagttaagaagttggggttccgagaggactgatgagaaactatgtagtcagtaaataggcatcattggtgacttcccagaatacttttagcagagccagggaggtggaagtcaagtggccaagtatagggctgtgctgatcatgaaaagaaaacggacttctctttatatcctgttctttccaggaatgaccaagrgttgctatcagcttgaattctaatcacctggctgcagctgagtggaaaaactagccaccataatcaggttaaaactttttctttctgcagaaagctgcaaagcttcagggtat

SEQ ID NO: 426150 - DNA, 609 bp, Homo sapiens
gcccttccccttcttccttctgctcagctgactcaacaggaagatgacaaggatgaagacacttatgatgatccatttccacttaatgaagagtgaatatattctctcttccttaatgattctcttaataacattttcctttctctagcttactttattgtaagaatatagtatawaagatatataacataaaaattacatgttattcgactattgatgttatcagtaaggcatccagtcaaactgatgttatcagtaaggcatccagtaggctgttagtagataaatttttaggaagtcaaaagttgtacataaatttttgacggcatgagggccggcacccctaccccagcatggttcaagggtcagctgtcgtctgtttattcaaagcaggtttgttgagacaaataattttgaaaagcatctagaaaagtgcttggcacatcacatgttctcaaatagcctacagataagctttaactttgtagcttggctctgaaggctagtcttaatggcaggtaaataacatgaatattaccacacaccatgacagttccgtgtgtattttgagtaaatactcagatacacatgtgcagtgccagaggctaa

SEQ ID NO: 426151 - DNA, 576 bp, Homo sapiens
tgacagtggtgaaggaaaatcctcccaatgaatacagttttaggaaatacaccaaagaatcatctactttgtgtgtaatgtgtttctaggtaataatatatacaaacttgtgggcagtggcaattggcttggttggttggttagacacttggaatgagaaagattaggagattggtcagaggaaaggagcttgtaaagggacctgtgtgggtggacatgaaatgtgaagatttttgctttgcatcttaatgtccaccgaagagcatcaaccatggatgagacactaaacaatcaagcagacagattgattttgccagtggatgtcagtcggcctttgtcattggcaatcccagcgctggtacaaggaactcatgaatagccatggtggcagaggtagaggacatacacgggcccaaaagccagggatctggctttccattactaatawtaacggttgctaacaaatatccaaacttccagcagtagagaccaataatgagggagaccttgatatggcacctacttggcagcaagttaaacacattgggccccttttactttgaaaaggttagtgat

SEQ ID NO: 426152 - DNA, 606 bp, Homo sapiens
aattgaagccaataatgtcaatattaaaaaaatctgagtgacataattaaaagcaggaaaggataacctatgtccttaaaaaaggcccttgcttttttcttagaaaacaaattcaatgaagaagcctctcatagttgcttaattatatgatgtgataaaatttttttttcaatgcacaacatagtctgttggagcattcttgtctactgtgcttaggaatgccccgaaaagtaagctgttttcttaccttcattttccataattgatcatagctactgaatggcattcatatcatcatttggagaactctgaagagttagttactctgtgaacctgcattgaatgtggtaaggaggccatttgtgtgcctttggggtacaacatggaggaattctgggatgatccagtgaggaatttattttttatgataaatgaagtttattgttctaactgagtgtaactgccagctgaggttaagtggattgtagccttagttggaagagaggctattgataaagggaaaagatcatggacttaagagwaggtagatgtaggcatgtgcctttgaatagctttattcctttaacacatatgttcagtattgtt

SEQ ID NO: 426153 - DNA, 566 bp, Homo sapiens
aattaatcagggatatttcagaaacgaatcatctccaaggggttattgatttactgtcatgacaygtttttcttatgggctgagatggtgctctggagctgggatgcactggcatgtatttttcagtgactaagccttgatctgtcctcctggattactgccatctctgcactgacatctgcaaacactcacatttgacggcctcatgcctgagtgtggtggcttccaagttgattagaattagttcagaggggttttggactagtctgagtgtaatcgaaagcagagaaccatgagtctcaagagactggcaagcaccctgcaaatggcattatattaacagagaatgtgcctgtgcatatgcacacacacatgcaaacatacgcaagcacacgacatgcaagcctatatactagtacagattcatgcatttgcacacatgcaaacacacacactcatccatgcacacacacacaagcacacatacccatgtgcacacacacaaatgtgcacacacacatattaacatacttaaagaatgaagaatatttcagctttaatcttca

SEQ ID NO: 426154 - DNA, 588 bp, Homo sapiens
gtcagtaccagtttttgttatgatggctgtcaagttttaaaatgtgacaatgggaatatattttcygaataagttattcccctgagtaaaccctttagaaatccagccatcgctatgggcaatggaggttccaaatgatgaacgctcttcacacttgaaagggttaagtgactgactgcaaggccaaaggcaccagactgcaaaagaaatgttgctttagtgagctctgaaaggtttctaacaagtaccaaatacttgttgatctgttcacaataaacaccagcaggattgtcaggctcctttcactgtctggggagatgcatttacatactgcacctaggaagaacagcttgttggtctcctttataaaagttgagtagctagaagcctcattcagtgtctcccatccaaatgactgaaagaagatgcaattgaaatagtggagtctctcgtctggcttgggcagcataaatgctgtgcataaaacacttggagtagttcaggcacaagacaaacccacctgaatggacgaggaacactgtctgttgccatggcagcctgatctaattacatgagtgatcaggactg

SEQ ID NO: 426155 - DNA, 435 bp, Homo sapiens
ccccagggcgcggaggccgggcgaccacccgcggagaagtccagccctccgtgagaccccctctctctcaccgccctctccggggaggaggaatgggaagagggcggccgggaaagggaccaccccccaaccccagccgcygcctcccccctgcgccacccggagggaggaggacatggctctccgcactcgcgaccggaccagcagccgggggagcggggcgccgccgccgctctccccgcccgcgccccccgcccgggcgcgccccctagcccggcgggcgcccacccagcccctgacagcccccccgccggccgcccctgcgcccagagtgggggtgtcggcccgggagcctggagccggggacggttgtatgtacacacatacacacacacacacacacacgcacacacacagaacacgacgcgtcgattt

SEQ ID NO: 426156 - DNA, 583 bp, Homo sapiens
actttctttctcctcttgagttttctaaattatgttttaccatagaagcaaaaatgataacattgtctgatatggttctaaatatatgtacaggaaataactaaagataattttttaaagagctgggtaaagagacataaagggagatttacagttcacttaaactggtaaaacaattgcatcagtagactgtgataagttatgtaaacatagtgtaatacttagaacaaccactaaaaaggctatacaaagagatagtctcaaaaacactataaataaatagtttatttttcagaattctgaaacaatgttaagtaaccgacaggaaggaagaaaacaggacataatgcagagagaacacgtagacaaaaaaagacttaagccctaaaatattaataatacattaaatgtaaatggtcaaaatagacgttgasaggctggattaaaaaacatgatccaactatatgctgtctataaaaaactcacttcaaatataactatacaggcaggttgaaactaaaaggatggaaaaagatatatcataggaacattaatcaaaagaaatgagaaatggctatattaa

SEQ ID NO: 426157 - DNA, 508 bp, Homo sapiens
aatctctaacattttttctagatcttgtcatttatggctctatgaaatgtccttatcctccagcactgctttgccaagttttcattgtagcaaattaaaataaaagaatatcaaccaggattcatcttagagggggcaaaaaaatctttatttaataaatgttattaatgacatccatgagtcatttggttgaaaaaagtaggccccaatccagtctaaaggaagaatgcagaataaaaaatatgatgaatttatgtrtttaattaaacgaatgagattggatttattttcctttcttttctgttttttccttttctttttctttttttgtttgctgccctctccccccaaaagagaagacgaagagaggcagcaaaggtaggatgagtgagcaatgagatggggcagccaaaggatttttcaaagcagctatgcctaatgtgccatttttagatgtgcacattactaggctgtacgtttatatccccagcacctgcagtaatcactg

SEQ ID NO: 426158 - DNA, 491 bp, Homo sapiens
cagcatggcagcagctggtccagacctccgctgctgccatcataatcaccggcatcagcactattcacagtagcaaagacatggaataaagctacatgtccatcaatgatagaytggataaagaaaatgtacttatgcaccatggaatactatgcagccattaaaaattagatcatatattttgcaggaacgtggatggggctggaggtcattatccttaacaaactaacacagtaacagaaaaccaaatactgcatgttctcacttataggtgagagctaaatgatgagaatacatggacacatagaggggaacaacacacactggtttattggaagatggaggataggaggagagagaggaacaggaaaaataactaatcgttattaggcttaatacctgggtgctgaaaaagtctgaacaagaaacccccatttgttacatttttctgtgtaacaaacttgcacatgtacccctgaatttaaaataaa

SEQ ID NO: 426159 - DNA, 491 bp, Homo sapiens
cagcatggcagcagctggtccagacctccgctgctgccatcataatcaccggcatcagcactattcacagtagcaaagacatggaataaagctacatgtccatcaatgatagattggataaagaaaatgtacttatgcaccatggaatactatgcagccattaaaaattagatmatatattttgcaggaacgtggatggggctggaggtcattatccttaacaaactaacacagtaacagaaaaccaaatactgcatgttctcacttataggtgagagctaaatgatgagaatacatggacacatagaggggaacaacacacactggtttattggaagatggaggataggaggagagagaggaacaggaaaaataactaatcgttattaggcttaatacctgggtgctgaaaaagtctgaacaagaaacccccatttgttacatttttctgtgtaacaaacttgcacatgtacccctgaatttaaaataaa

SEQ ID NO: 426160 - DNA, 491 bp, Homo sapiens
cagcatggcagcagctggtccagacctccgctgctgccatcataatcaccggcatcagcactattcacagtagcaaagacatggaataaagctacatgtccatcaatgatagattggataaagaaaatgtacttatgcaccatggaatactatgcagccattaaaaattagatcatatattttgcaggaacgtggatggggctggaggtcattatccttaacaaactaacacagtaacagaaaaccaaatactgcatgttctcacttataggtgagagctaaatgatgagaakacatggacacatagaggggaacaacacacactggtttattggaagatggaggataggaggagagagaggaacaggaaaaataactaatcgttattaggcttaatacctgggtgctgaaaaagtctgaacaagaaacccccatttgttacatttttctgtgtaacaaacttgcacatgtacccctgaatttaaaataaa

SEQ ID NO: 426161 - DNA, 491 bp, Homo sapiens
cagcatggcagcagctggtccagacctccgctgctgccatcataatcaccggcatcagcactattcacagtagcaaagacatggaataaagctacatgtccatcaatgatagattggataaagaaaatgtacttatgcaccatggaatactatgcagccattaaaaattagatcatatattttgcaggaacgtggatggggctggaggtcattatccttaacaaactaacacagtaacagaaaaccaaatactgcatgttctcacttataggtgagagctaaatgatgagaatacatggacacatagaggggaacaacacacactggtttattggaagatggaggataggaggagagagaggaacaggaaaaatarctaatcgttattaggcttaatacctgggtgctgaaaaagtctgaacaagaaacccccatttgttacatttttctgtgtaacaaacttgcacatgtacccctgaatttaaaataaa

SEQ ID NO: 426162 - DNA, 626 bp, Homo sapiens
ttcgtaattaattgtaagtttataaacttattattagttaacataatttggctcttcaccaaattgttagtaatgccaagattccagatttaatctttttaattctgacattttgatagcctggctttaggatgggaattggggagacctataccagatgttattcccaaggaaactactggaaattgtaaactttagcaagataagcaagatgtattttggagagatgatgtgaagactgaaaaaataaggcytctcttaaagggctagtagtatattttcctattcacgtgtgatatcaacgaattgcatatagttaattgcattgtttagaatattgcgaaaaaatgctttaaaattaatttttcctatagagttacaaaataatatttgagtcacctatttttagctagtaaacataaaatttcaaatcagtttagtctttaaatattacacttgaatgataacagacctataacttacagctatttattttcactcaaatcattccagaaagtatttaatattattgaatagctccataactttaaatgacagtaaaataatacaggtaagtagttacaagcgcatggtagacatttcagtcagccaagcttgagatttaa

SEQ ID NO: 426163 - DNA, 626 bp, Homo sapiens
ttcgtaattaattgtaagtttataaacttattattagttaacataatttggctcttcaccaaattgttagtaatgccaagattccagatttaatctttttaattctgacattttgatagcctggctttaggatgggaattggggagacctataccagatgttattcccaaggaaactactggaaattgtaaactttagcaagataagcaagatgtattttggagagatgatgtgaagactgaaaaaataaggcctctcttaaagggctagtagtatattttcctattcacgtgtgatatcaacgaattgcatatagttaattgcattgtttagaatattgcgaaaaaatgctttaaaattaatttttcctatagagttacaaaataatatttgagtcacctatttttagctagtaaacataaaatttcaaatcagtttagtctttaaatattacacttgaatgatracagacctataacttacagctatttattttcactcaaatcattccagaaagtatttaatattattgaatagctccataactttaaatgacagtaaaataatacaggtaagtagttacaagcgcatggtagacatttcagtcagccaagcttgagatttaa

SEQ ID NO: 426164 - DNA, 626 bp, Homo sapiens
agtttttacagcattattttacttaccaacttatattgatcttggtgactccagtcatatgttcctattaccacaatccctaaataatatactttcctcttaaacctagcctccaaacagtaacatttcctctctatattgaaaaagtcatgcyttatctttaaggtctactgtaaatttcaaaacttaagactctcagaaatcctatgaccgaagagagttccgtgcagaaactagtccttgtgaaggaagtaaccgatgattgtacagtgatctgaaagttttatgttaatagaaaataaaatgtgtaaacatatttcctggagagtgctattattttttgagaataccttacctcttagttgcaaaaaagtctggtaacttacagctttagataaaattcccaggtctggggacatgagctctgtaagcctttaaaatattttttcattctcagtgaactctgtagattccatttaataacaatttacttaatcgaaataaggctcaatgaatttacttctatacatcatttgtctcttaaaaatattattttcttactaataactttaataacatttaacaaaaattatttaatgtatttgattagaatatttttaaaaatt

SEQ ID NO: 426165 - DNA, 611 bp, Homo sapiens
tccaccagttcctgcatgtagtcttctccgtaacatggcattctgctccttccagctgccgggataatctatcatgatttacatctcctctctaagaaagtgtccagtatcttttaagggtacatctaattaggttatgtccacttagctcctccattttgattacatcaaagttaactgactatatctgaaaaatctctttgccatgtcaaatagtgtcatcctaggaattatattccatcatattcactggtcttgcttacagttaagggtaaggcrattatacagggcatgtacattggggtcaggtggagtcttttgggaaattaagaattctgcaaaccacaaagtgcaaaaaggaaaaaaagtaagtgtgcagttagacagaagttggattgataaaaattaaaattatgccttctatatatatatagtggaaaataaatgtagatgagaaatggtgatgcaaggattaaagtatatatattttttcaggtgataggagatttgacaagggaagaaagaatgtatttcaacaaagaacaagtcagataatgtaatgaaaatgaaaatgcaaggactgattctgtaggtcaacttggccagtaaac

SEQ ID NO: 426166 - DNA, 573 bp, Homo sapiens
gattgtacagtgatctgaaagttttatgttaatagaaaataaaatgtgtaaacatatttcctggagagtgctattattttttgagaataccttacctcttagttgcaaaaaagtctggtaacttacagctttagataaaattcccaggtctggggacatgagctctgtaagcctttaaaatattttttcattctcagtgaactctgtagattccatttaataacaatttacttaatcgaaataaggctcaatgaatttacttctatacatcatttgtctcttaaaaatattattttcttactaataactttaataacatttaacaaaaattatttaatgtatttgattagaatatttttaaaaattattatttctccaaatgtgaatgctttaaacacagaaaataattcatatcatttgggaaatgttataaacaatttcaacataattttatttaaaagtatttaaagacaattgaggtgaaatattatttttgtaccataaaatgaataatgcaatgagcatatagaggataartggtctaaagcggttcacaaactgatatcattttgt

SEQ ID NO: 426167 - DNA, 552 bp, Homo sapiens
aaactaattctgaatatcatcaccagctattataagtcaagcattttgcaaagcactgagtattcaaagatgaacatggcaggatccctattttcaagatgttcccagataacatttaaattttaaagtttaccgaagtatcattatctgtaagcattaagcacatttatgaagtggcccctattcctgttgttgttttcatactgggagaaatgttaaatagatagaaaccccatcacaatgtgtatatatgaaaatgtaagcaatgtgcataaataattttttacttctaaaatggtttaagtacctatgtactctattaatgaaaattatacctgattaattttttttgtttaaaatattaagtggatttacccttatgctcttatctccccttgttagtttgttattgcaaacrtgtattacataataaaaacaaccttgagtaatttttcaaattccatttttaaaaagttaaagtgcatatataatccttggtgtcctctggtgtggagggcttccagttaaatagagatagatctctagatagat

SEQ ID NO: 426168 - DNA, 628 bp, Homo sapiens
aaataataagactggattttggggattgaatgttaggaagagaccaactattcatcccatcctatcataaaagaaggagaaagtaaagctatctgtagatcatgcaaggagaaataaattatttgtccaccaaaatactactgacttttcctatccaggggaagattttcttattttgtttgttttattttatttttttcttaaggaaaagagtcaaaatttgcattggactctcacatatgatgtttgtggtttgctgtattttttagcataagtttagtaaaattgtagggtaattctccaaatttagggtaattctccaaatgaactttgttattcttaaataactcttctatgttttgtaaaagactgtataaattaattggtcaagacaaataaacrttattaagcatttcttgactattacatatagggagaattttgtcttatacatctactaaaggaaaacaaaagcctttgtaatatatacaagcaattttaaaattttggaacaaattcggaaaagatttctgacctcaaagattcaggagcatcattgattttaaaatggtaaagtataaacgttattggatctataattcttaagaacaggtagctgaaattgcgg

SEQ ID NO: 426169 - DNA, 438 bp, Homo sapiens
ttgtaaatttttaatgcattttaaccagactgaagaaatttacaggaagatagagatgctacygtgcgtctaggagatagtttctgaggtaaaaaagaaaaaaaagtcctataattaaagttttatattgtaaaataatttctacagctggtgtgaggacaaaggagagacttcttagaattctgtaagaatttggcccctctcttcctattattcctccattcctctttgctaccccacgtctcagcttccaagttacatgcgaccttgaggttcaagtctccatgatctcttcatagcagagcagagctaagtcttgatattttattccttgctttggtctaaaagaactcataaccggccccctctatttttttttaatcagaacccacagaaaccattgagaggcttttgctgaaaaaaaaaaatgccacttga

SEQ ID NO: 426170 - DNA, 622 bp, Homo sapiens
ttttgtttttgttgtctgtgcttttgagaccttagccacaaaaacttacactagatcaatgtattaaagagttttccctgttttcttccacctgttttatatgttcaggtcttacatatgtttctaattcatcttgagttgatttttgttatgtggtgagacatagaggtctagttttattctkctgaatttggatgtctagttttcccagtaccatttattgaaaaaaccacccttccttcactgaaatttcttggtaccttgttgaaaatgacttggctgttaatgtatgaattcatttctgggttctctgtttcgttccattggtcagtgtttgtttttataccagtcccatgctattatggttactgtagcctcataatatattttgaggctagagagtgtgatgcctccagctttgttcttattgttcaggattgctttggctaattggtttttttttttttttggtttcacataaattttagaataatttttactgtatttgtgaataatgacattggtattttgatagggattgtactgaatctgtagtttgctttgtgcagtatggtcattttaacaatattaatacttctttctaaaaatctattaataaaaa

SEQ ID NO: 426171 - DNA, 622 bp, Homo sapiens
ttttgtttttgttgtctgtgcttttgagaccttagccacaaaaacttacactagatcaatgtattaaagagttttccctgttttcttccacctgttttatatgttcaggtcttacatatgtttctaattcatcttgagttgatttttgttatgtggtgagacatagaggtctagttttattcttctgaatttggatgtctagttttcccagtaccatttattgaaaaaaccacccttccttcactgaaatttcttggtaccttgttgaaaatgacttggctgttaatgtatgaattcatttctgggttctctgtttcgttccattggtcagtgtttgtttttataccagtcccatgctattatggttactgtagcctcataatatattttgaggctagagagtgtgatgcctccagctttgttcttattgttcaggattgctttggctaattggtttttttttttttttggtttcacrtaaattttagaataatttttactgtatttgtgaataatgacattggtattttgatagggattgtactgaatctgtagtttgctttgtgcagtatggtcattttaacaatattaatacttctttctaaaaatctattaataaaaa

SEQ ID NO: 426172 - DNA, 601 bp, Homo sapiens
ggtttttttttttttttggtttcacataaattttagaataatttttactgtatttgtgaataatgacattggtattttgatagggattgtactgaatctgtagtttgctttgtgcagtatggtcattttaacaatattaatacttctttctaaaaatctattaataaaaaattttgttaacatattttaatcattggattttttttcattttttattttaggttttgggggtacatgtgcaggtttgttacatggttagattctatgtcgctggggtttggtatacaaatgattttgccaccagtgagcacagtacctgataggttgctattgatcctcatcctcctctcaccctcctctctcaagtaggcatcagtgtctattgtccccatctttttgtccatgtgtactcaatgtttatctcccacttataagtgaaaatatgagtcagccacgagtgcatgcatgccagaggagcagcaggtccccaagtgcatatgtgaaggggagtctgtgggggaaatgcccaytggtaggagatcctctgcaaaagcactctgatggaagggtgggggctgctgacaaaagagttatggtggtg

SEQ ID NO: 426173 - DNA, 620 bp, Homo sapiens
ccagggcctgtgtcctccttctatccactctcgatgccttctttcctaagatctgctcgcagtttgcccgtcgattttatgttctggtatcagtgggagaagttcttcctggtttcttctaatcagccatcttggctcttgtattaattcttctgattcrtaaacatgtgatgtctttccatttgtatgtctcctctacaatttctttcatcagtgttttgtagtctttcttgcagagatcttttacctccttggttaaattaatttctatttattttattgtattttacaatttttgtgggtattgcgagtgagactgccttatttatttcttattggtgtgtagaaatgctactgattttttttattgtttttcatcctgcaaatttactgaatttgtttatcagttctaagagtttttggtggagtgtttaggtttcccaaatgtaagattatggaatctacaaagagggacagtttgacttacttctttccaatttggatgttttttatttctttctctcgcctggttgttccagttaggacctccaacactattttggttaaaggtggtgaaagtggttattcttgtcttattccaggtcttagagaaaatgctt

SEQ ID NO: 426174 - DNA, 620 bp, Homo sapiens
ccagggcctgtgtcctccttctatccactctcgatgccttctttcctaagatctgctcgcagtttgcccgtcgattttatgttctggtatcagtgggagaagttcttcctggtttcttctaatcagccatcttggctcttgtattaattcttctgattcataaacatgtgatgtctttccatttgtatgtctcctctacaatttctttcatcagtgttttgtagtstttcttgcagagatcttttacctccttggttaaattaatttctatttattttattgtattttacaatttttgtgggtattgcgagtgagactgccttatttatttcttattggtgtgtagaaatgctactgattttttttattgtttttcatcctgcaaatttactgaatttgtttatcagttctaagagtttttggtggagtgtttaggtttcccaaatgtaagattatggaatctacaaagagggacagtttgacttacttctttccaatttggatgttttttatttctttctctcgcctggttgttccagttaggacctccaacactattttggttaaaggtggtgaaagtggttattcttgtcttattccaggtcttagagaaaatgctt

SEQ ID NO: 426175 - DNA, 577 bp, Homo sapiens
taaagagagttccctcttcttcaatattttggaatagtttgaggaagacttgtattagttctttatacatttggtagaatttggcatttaatgcatctgatcctaggcttttttttgataggagacttttttgcatattttattttctttygagatagaatctcactctgtcatctaggctggaatacagtggcacgatcacggctccctgcaatctctacctcctgggctcaaggcgtactccctcttttgcctccccagtagctgggactataagtatgcaccaccatgcctggctaacttttgtatttttttgtggaggtggggtttttccatccagagtggtcttgactggactcaagctaccaacttgccttagcctcccaaagtgctgggattgtagacatgagcaccacgcccggctgatgcaaaactttatttcagatttaatcttactacttgttattggcctgttcaggtttttatttctttttaattcaatctcggtagtttgtatgtttttaggaattttctcatttcctctaggttttccgatttgttagagaatagttatata

SEQ ID NO: 426176 - DNA, 577 bp, Homo sapiens
taaagagagttccctcttcttcaatattttggaatagtttgaggaagacttgtattagttctttatacatttggtagaatttggcatttaatgcatctgatcctaggcttttttttgataggagacttttttgcatattttattttcttttgagatagaatctcactctgtcatctaggctggaatacagtggcacgatcacggctccctgcaatctctacctcctgggctcaaggcgtactccctcttttgcctccccagtagctgggactataagtatgcaccaccatgcctggctaacttttgtatttttttgtggagrtggggtttttccatccagagtggtcttgactggactcaagctaccaacttgccttagcctcccaaagtgctgggattgtagacatgagcaccacgcccggctgatgcaaaactttatttcagatttaatcttactacttgttattggcctgttcaggtttttatttctttttaattcaatctcggtagtttgtatgtttttaggaattttctcatttcctctaggttttccgatttgttagagaatagttatata

SEQ ID NO: 426177 - DNA, 577 bp, Homo sapiens
taaagagagttccctcttcttcaatattttggaatagtttgaggaagacttgtattagttctttatacatttggtagaatttggcatttaatgcatctgatcctaggcttttttttgataggagacttttttgcatattttattttcttttgagatagaatctcactctgtcatctaggctggaatacagtggcacgatcacggctccctgcaatctctacctcctgggctcaaggcgtactccctcttttgcctccccagtagctgggactataagtatgcaccaccatgcctggctaacttttgtatttttttgtggaggtggggtttttccatccagastggtcttgactggactcaagctaccaacttgccttagcctcccaaagtgctgggattgtagacatgagcaccacgcccggctgatgcaaaactttatttcagatttaatcttactacttgttattggcctgttcaggtttttatttctttttaattcaatctcggtagtttgtatgtttttaggaattttctcatttcctctaggttttccgatttgttagagaatagttatata

SEQ ID NO: 426178 - DNA, 613 bp, Homo sapiens
caaaactttatttcagatttaatcttactacttgttattggcctgttcaggtttttatttctttttaattcaatstcggtagtttgtatgtttttaggaattttctcatttcctctaggttttccgatttgttagagaatagttatatacaatattctctaattactttttataattctgttgtatcagttatattgtctacttataaaaaattcagctacacttttagatggaagggatacatgtgcaatttattacatgggtatatcgcatgatgctgaggtttggggtatgaatgatctggccattcaggtagtgagtacagtaaccaacaagtagtttttcagccttatctccctccttcccctctttttggagtctccagtgcctgttgttcccatctttgtgtctttgtgtgcccaatgcttagttcccacttataaatgagaatatgtgtggtatttggtattctgttcctgcattaattcatttaggataatagcctctagctacatccatgttgatgcaaataacacaatttcattcattttttttttctggttctgtagaattccatgatgtatttttaccacatcttctttatgtaatccat

SEQ ID NO: 426179 - DNA, 613 bp, Homo sapiens
caaaactttatttcagatttaatcttactacttgttattggcctgttcaggtttttatttctttttaattcaatctcggtagtttgtatgtttttaggaattttctcatttcctctaggttttccgatttgttagagaatagttatatacaatattctctaattactttttrtaattctgttgtatcagttatattgtctacttataaaaaattcagctacacttttagatggaagggatacatgtgcaatttattacatgggtatatcgcatgatgctgaggtttggggtatgaatgatctggccattcaggtagtgagtacagtaaccaacaagtagtttttcagccttatctccctccttcccctctttttggagtctccagtgcctgttgttcccatctttgtgtctttgtgtgcccaatgcttagttcccacttataaatgagaatatgtgtggtatttggtattctgttcctgcattaattcatttaggataatagcctctagctacatccatgttgatgcaaataacacaatttcattcattttttttttctggttctgtagaattccatgatgtatttttaccacatcttctttatgtaatccat

SEQ ID NO: 426180 - DNA, 613 bp, Homo sapiens
caaaactttatttcagatttaatcttactacttgttattggcctgttcaggtttttatttctttttaattcaatctcggtagtttgtatgtttttaggaattttctcatttcctctaggttttccgatttgttagagaatagttatatacaatattctctaattactttttataattctgttgtatcagttawattgtctacttataaaaaattcagctacacttttagatggaagggatacatgtgcaatttattacatgggtatatcgcatgatgctgaggtttggggtatgaatgatctggccattcaggtagtgagtacagtaaccaacaagtagtttttcagccttatctccctccttcccctctttttggagtctccagtgcctgttgttcccatctttgtgtctttgtgtgcccaatgcttagttcccacttataaatgagaatatgtgtggtatttggtattctgttcctgcattaattcatttaggataatagcctctagctacatccatgttgatgcaaataacacaatttcattcattttttttttctggttctgtagaattccatgatgtatttttaccacatcttctttatgtaatccat

SEQ ID NO: 426181 - DNA, 630 bp, Homo sapiens
ctcccagtcagccctggccatgcaagctacctcaccaccctctttctttactttaggtatttcctgtcacttttcttttgaatttcagtgttttctcttggatgatatatttgaaatgtgattatatattcactattttggttcttcttcattgaggttaagaatacaaaatgcctgttgtcaaccgcttgaagcccctcctctaatttctgtttttgtaatcatttttaaattggagagtaggcagcacaccctgaagtgagattagaagtttttgaaaggacccgatcatgatggaattatatgccctgctaaaataaaacaaaacaaaacraaacaaaaaccctagacgtattcctgtacaaagtgaagtgacagtatagattttactaacaaaaataattttagatactagaatgtaaatcacttcatagcagtattaagaatgtattgaagggttggaaaggatgtaggcataaacagaaatttaaaggtagttgtagtaatagaaatgaacaatctcaggggcagagttttaaacattatagcaagaaatggaactaagtgagtcaagctgaatagttaattaagttcttgatttgctttgatgattgattagaaaagagagaa

SEQ ID NO: 426182 - DNA, 630 bp, Homo sapiens
ctcccagtcagccctggccatgcaagctacctcaccaccctctttctttactttaggtatttcctgtcacttttcttttgaatttcagtgttttctcttggatgatatatttgaaatgtgattatatattcactattttggttcttcttcattgaggttaagaatacaaaatgcctgttgtcaaccgcttgaagcccctcctctaatttctgtttttgtaatcatttttaaattggagagtaggcagcacaccctgaagtgagattagaagtttttgaaaggacccgatcatgatggaattatatgccctgctaaaataaaacaaaacaaaacaaaacaaaaaccctagacgtattcctgtacaaagtgaagtgacagtatagattttactaacaaaaataattttagatactagaatgtaaatcacttcatagcrgtattaagaatgtattgaagggttggaaaggatgtaggcataaacagaaatttaaaggtagttgtagtaatagaaatgaacaatctcaggggcagagttttaaacattatagcaagaaatggaactaagtgagtcaagctgaatagttaattaagttcttgatttgctttgatgattgattagaaaagagagaa

SEQ ID NO: 426183 - DNA, 630 bp, Homo sapiens
ctcccagtcagccctggccatgcaagctacctcaccaccctctttctttactttaggtatttcctgtcacttttcttttgaatttcagtgttttctcttggatgatatatttgaaatgtgattatatattcactattttggttcttcttcattgaggttaagaatacaaaatgcctgttgtcaaccgcttgaagcccctcctctaatttctgtttttgtaatcatttttaaattggagagtaggcagcacaccctgaagtgagattagaagtttttgaaaggacccgatcatgatggaattatatgccctgctaaaataaaacaaaacaaaacaaaacaaaaaccctagacgtattcctgtacaaagtgaagtgacagtatagattttactaacaaaaataattttagatactagaatgtaaatcacttcatagcagtattragaatgtattgaagggttggaaaggatgtaggcataaacagaaatttaaaggtagttgtagtaatagaaatgaacaatctcaggggcagagttttaaacattatagcaagaaatggaactaagtgagtcaagctgaatagttaattaagttcttgatttgctttgatgattgattagaaaagagagaa

SEQ ID NO: 426184 - DNA, 630 bp, Homo sapiens
ctcccagtcagccctggccatgcaagctacctcaccaccctctttctttactttaggtatttcctgtcacttttcttttgaatttcagtgttttctcttggatgatatatttgaaatgtgattatatattcactattttggttcttcttcattgaggttaagaatacaaaatgcctgttgtcaaccgcttgaagcccctcctctaatttctgtttttgtaatcatttttaaattggagagtaggcagcacaccctgaagtgagattagaagtttttgaaaggacccgatcatgatggaattatatgccctgctaaaataaaacaaaacaaaacaaaacaaaaaccctagacgtattcctgtacaaagtgaagtgacagtatagattttactaacaaaaataattttagatactagaatgtaaatcacttcatagcagtattaagaatgtattgaagggttggaaaggatgtagscataaacagaaatttaaaggtagttgtagtaatagaaatgaacaatctcaggggcagagttttaaacattatagcaagaaatggaactaagtgagtcaagctgaatagttaattaagttcttgatttgctttgatgattgattagaaaagagagaa

SEQ ID NO: 426185 - DNA, 551 bp, Homo sapiens
ttgtcatctccttatgtttggtctttgacatgtggtcaaaattgtacaacattttttagtaaactcccttttatgaatatgttcacaatgtataccatctatgttaggcttggacattctgacttgtcctaaacatctctcttttcaaacaactgtttattttacttactttaggatagaaaataagtaaaatatgtagaaacaaatcacttattttaaatttttgtactttttataacaaacatttaaagctgtaaacttctttaaagttactgttttgtttgactccacaattgtatttgtttggattcaaatattttctaatttactctttgaacaatgtgttaatcgatgtgttgttgaattttcatatatgtagtaattttttatatatctttctctattgatttccagtttmattcagttttggtcagagaccacattctgtaagatttcaataatttcaaagtcattgaaactcattttatggcccagaatattttacgtacatttgtaagtagtggcaaatccatatgagtctgcagcaactc

SEQ ID NO: 426186 - DNA, 551 bp, Homo sapiens
ttgtcatctccttatgtttggtctttgacatgtggtcaaaattgtacaacattttttagtaaactcccttttatgaatatgttcacaatgtataccatctatgttaggcttggacattctgacttgtcctaaacatctctcttttcaaacaactgtttattttacttactttaggatagaaaataagtaaaatatgtagaaacaaatcacttattttaaatttttgtactttttataacaaacatttaaagctgtaaacttctttaaagttactgttttgtttgactccacaattgtatttgtttggattcaaatattttctaatttactctttgaacaatgtgttaatcgatgtgttgttgaattttcatatatgtagtaattttttatatatctttctctattgatttccagtttaattcagttttggtcagagaccacattctgtaagatttcaataatttcaaagtcattgaaactcattttatggcccagaatattttaygtacatttgtaagtagtggcaaatccatatgagtctgcagcaactc

SEQ ID NO: 426187 - DNA, 560 bp, Homo sapiens
agctgtcacatcccaacctaggtcaaatatggcggaatattgatttcgtctctaactccctgtatctcttacaaaggtaaagcaggtagcgaagccaccttgcttccctggtctttgcctagtggctggcaatgtttacaagtgtaccttactttatatcaacatgaatttgtgaaaaagctgtatgtcaatggattttttaaaaattaaaaatgtattttgaatgaccctaagggagctggctctttaaaagcatcctaaggtaaagattttttttaaatgaagaatctttttataaagcaatgaacaatctctgattttataaatctwaattttcctatgggttttcttaaagtgaaatacaattataagaatacattttaagggtaacattaacaacctagaacccagtttgggttactaaaaataaaatgtcagtattatcaattgataactaccacagttttatactctgcaagtgtgtactgcatgatggttaaggaaaaacaaatttattttagaacaaagcaaaccagagtttaaagatcagggatttcctt

SEQ ID NO: 426188 - DNA, 529 bp, Homo sapiens
agggataacattaggagaaatacctaatatagatgaccgattgatgggtgcagcaaaccactatggcacgtgtatacytatgttccaaacctgcacattctgcacatgtatcccagaacttaaagtataataaaaagaaaagaaaaaaatcaaaaaaaaaaaaaaaaaaggctttcaccatgctagaagagggttttgttcttttgctaacatagcttgtaaagaacttcagttactatttttgtttacttaaaattctggaaatttttctagcatttggttaaagctttaataaaatataattcaataaaaatataaaagtcacttttttgtggtagctgatttgatctacatgataataaagcacacagatatatgtgtacatgcacgtgtctattatgttatcagtttccttcctatgcattagaaataacatattttattgggtctttaccaaattaaaaatatatatatagagagagatatataaatcatgctaaatgtgctgtattcacagagttcacaggta

SEQ ID NO: 426189 - DNA, 490 bp, Homo sapiens
cagtactgatagctacctctgccaccatggtgagggagagcatgtctgagaatgaagctgagagagctaagcaaagtcaagacagagtgaaagataatggcctgatgatatctttggaactcctgaatacagctgtgcctgaagcccttactagcatggccatcctaatcatataagtcaagagactagtttaaattatatttctgttgcttgcaaccaaaatactcctaataaacttgatccaaagcaaaacaaagtcccaaaggaaattctccttcaygggtagttcttgtggaattctgggctcctctctgacaacgatcctgaatgaattaaaactttttcttcctacgacattgttgcaaaaaagtctaggcttaacattattccctatcattctcggcaccaatggttcatcttaccagtgctgccagtcagcaaatatctcattctccccacccttgatcctgcactcctgctcaccttccct

SEQ ID NO: 426190 - DNA, 339 bp, Homo sapiens
taaacataagaacctctgtgaaaaggtcgtattcatgaaaaccaccaagaaatattaagtgagtgcttactgtggacaagggactatgctggctatattgaagtctmccaaaaaaaaaaaaaaaaaaaatcagacacacactctggcctcaaggacttcgtatcactacataaatacaaaacagaaaattaccagcaacgtaagaaaggcccagagaactgttctggaagttcaaaggatagaaatctccagaaggcatataggaatggaatggagaaaaaggttgtaaactctttgttcataagctagcatcgtattttgcaaacagcacaaaaatgt

SEQ ID NO: 426191 - DNA, 511 bp, Homo sapiens
tttgtggaaagtatgaatacatgaaccaatgaataaatgactctgaagttacatgagaagcaaacaaacttacctaaagatattaatgaaagtccaaagtcctaagaaacaaggtatgcaggactaaagctcttggtgtattgtatcatctgactcctctaaattcttttctttggggaggtggtttgggtggagaaatggcagagttaagatactataaagttgttaaattaacatactcagcaggtccacagactttctaaagctgaataccaactgggataattaaaggccagagccttcttttttaattgactctccaataaactacctgctgacaaaggcatagttaagttgattcctgcaagaataaagaaacgtttctcttccattcttaattttttaaaaagtccccactttcccctctagctcgatgagcacttaaattcaccagaattaaaargaaagttaccaaatacttttttttttaaactaagcaagcctgtaacat

SEQ ID NO: 426192 - DNA, 514 bp, Homo sapiens
taagtaacaagttcatatatttcgtctaattgaatagcatcattgtggagaaaactggaaggtgagactgatgaactgaccacgatactgaaacctctctggactatcacggtcacctctagttctgcattttttactccacattttgcctrcttaggatgattttcacttctttacttcacaaagcaattatttatatctttactggaatccaggtaaatagcaaactcaagctttttcttaatttcaaccaaaataagctagcaagcattttaaaaaacctgcaaaacacacacaactattagttgtttatgtatagagcagacactgtaagcaggtcaggtcaagagatgtgcagaagaatatgaagaagagaattggttaagaatacccatcagactttggttgtgccacttactgcttgtgtaatcttgcttacactacttgtaaaatgatagcaccatctcaaatagctgttttagggagttagtaacatatattgaattatcacaat

SEQ ID NO: 426193 - DNA, 588 bp, Homo sapiens
taaacttaagctaaatgatttaacccttccaagcttcattattctaatttgagatatcaagatcatgatatctataagtaatattattatgacacatgtaaaaaaaagaaatacacataaaataattgtactgtgcttggcacataagtgcttaataaatgactgtcatttttaaaaataagctgctaaatacttaggtagttgtaaaactattgcaacatattattatgattacaacatataaatatttgtyatatttatgttatatatgtatatatgtcattatggtcatataggtcattacaattattttctcaactcccttaagaaaaaaatactcaataatgctttgttgaatcatggaatgcagccagttgtgaatttagggcaagtattacagaagcttagtcaagggagacaagaagagttacccagaataaattctagtcaaagctagacatagagaaatacatacagcatgaaggtcagggaaagcttcagagccagggaggctgtcaagagatagatgtcaatagataccacaaggtagggtaagaaggtagtttcagtgtccactgggaaagagag

SEQ ID NO: 426194 - DNA, 566 bp, Homo sapiens
agtcatttatataagatgcaaagttggttgtcaggggttgccctgcaaatttatttgcaccttccaagtcagatcaacagaaaggattcgactgaggccagcttaccagacagttataattggcccacacattgttgtgattttaataatttctcctgcttatttgtccttaagagcttgtttaggaaactgatctggattaagatgttccattctcatctctactgctatccatctaaaaattcttaccctgatccagaatttggtgacaaattccattttagtaattttatattgcatgctgtgctatttttactttcctaattttaaatttgtattttctaattctttacctgcctatgttcttaatctgaaaattcttcataaacattcacagmcttctggttgagatcttcccttctttgaaacaaatccttatgttttcattcctcatacacaggcctgtttaagttcttctgtaaactctgttatgtcttcactgccaacattgtgggattagggatcaaagaggaagcaaagccaactcttctgaactctgatttcca

SEQ ID NO: 426195 - DNA, 670 bp, Homo sapiens
aactcttggaaaaatatgtacacaaaattagtttctgttgtaatgtgcttctatattttgtagtactcttttacaatttgaaaataataatttaccttcctttgtagttttatctaagtaaatggtgcaaattatggtgactcagaatcacctggagggcttgttaaaccatagattgccgggctccaccctacagtttctgattcattaggtctgggtgggtctaagaactagtatttctaacaagtgcctgcaagatactgatgaatctaggctagagactgtactttggaaaccactgatttaagcattgtgccatgatagtagcctaaagagtgawctaattcacttaataatctagatctgttcaaatatgataatattttatgtattttatgacttgtcaatgtaatgataatactttatttagttttcactttcatctggatactttataaaaatgtagattcagaatttgtctttcttcccaagctacgtatcaacatcaacattgttttctttaatagttgctcttagaagatcccaaaaccatttttttaaagagtattaattaatttacttgaaacttgttaaattcactatcaatatcattgtcattgttctttgacattagagataatgatgatcacatttctaccagaaagaatgt

SEQ ID NO: 426196 - DNA, 580 bp, Homo sapiens
ttcatctttactgctgccatgacaatgaatttattaaaatcttctcccaaatgatttaaatttcagacttatctagtatattggaaaaagtttttttctcaattaaaaattatgagagaggaggaggaaagtggtaatgatgtgcagaggtctatgtctgtgtttgtgtgtttctctccatgtgtaagtttgaatgtatgtcctcacacattcaatactattgagagaaagtcaggggataattacttgtgaggaaattcccataatctcatgggaaagtctatcctgaaaacaaatgatccttcttcacccatactatttattgatactgtgtatttatgtttaactctaatatacttccattgtttatattatagtttatttcttcctcagtctttttattcattagtctataakccctgattcattttcttcagaaaaataatcaaattccataccatacatataggacatatagggtctaggcaacaaattttgatgaactaaattattatcccatttcagtcttacagttgtattctctaaaggggaagagagtttggtattacataactagatc

SEQ ID NO: 426197 - DNA, 580 bp, Homo sapiens
ttcatctttactgctgccatgacaatgaatttattaaaatcttctcccaaatgatttaaatttcagacttatctagtatattggaaaaagtttttttctcaattaaaaattatgagagaggaggaggaaagtggtaatgatgtgcagaggtctatgtctgtgtttgtgtgtttctctccatgtgtaagtttgaatgtatgtcctcacacattcaatactattgagagaaagtcaggggataattacttgtgaggaaattcccataatctcatgggaaagtctatcctgaaaacaaatgatccttcttcacccatactatttattgatactgtgtatttatgtttaactctaatatacttccattgtttatattatagtttatttcttcctcagtctttttattcattagtctataagccctgattcattttcttcagaaaaataatcaaattccataccayacatataggacatatagggtctaggcaacaaattttgatgaactaaattattatcccatttcagtcttacagttgtattctctaaaggggaagagagtttggtattacataactagatc

SEQ ID NO: 426198 - DNA, 600 bp, Homo sapiens
ctggagaaagatgaccttgcctggaccctcaaagtaatggctctcacattctataaacagattatttacatgtacctataaaatagcataaccagtcaaatcaattgttaatggaatgttacaatacatctccaccttcctctccatccttcatacattttttgcttctctattgtaatatttgatggatggaaattgctacaagtgccactagacttcaattagcagaacytaggctaagttgggacaaaactttatttacaatcatgatatagtcctgatctcttaacttacacattggtaatgattttcaatgacacatatacacagctcaatatccatgcatttcctcatgctgcagatcctcaagagtacctgctgagtctctgcttaccttaaaaaaggacttatttatttacagacatagagtctttagtttggggattattcctataaatgtggcaattcttgtgctcacattcagtgaaggctggaatgaatttgttgcctaagaacatagcatattgtgctcattttttaaactatcaacctacccttacaaatttgcaaccacagttcttttactctacgaaaacaagt

SEQ ID NO: 426199 - DNA, 580 bp, Homo sapiens
tagggtctaggcaacaaattttgatgaactaaattattatcccatttcagtcttacagttgtattctctaaaggggaagagagtttggtattacataactagatctcttttctcagccacagaaatatgtagatgggataaagtaaataatagtaataaatgacatataaaaataaatgcaatatttggcaatattcacaccaagaaatttatctggattcactcatcttcctgcttccagtcatttaagcaaatggagatcttttttaaaaaactgaaagttgatgttaaaactgactcaaaaatagtgtaatggtatccaggttaaatattcctaagacaaaataaggcattgttttattcagcacataacttgagttgtagcagcttctaataaggaagttccctgtgaatggctgaaagagatttttcaaytgatatccttacataaatcagctctacagatattgaattatacttttcaaaattaggctaagaaaatgaaatcttcctaagtagtaagtatattgattattgtttatcttatgtaattttctgaaatactgccaaatagggttta

SEQ ID NO: 426200 - DNA, 580 bp, Homo sapiens
tagggtctaggcaacaaattttgatgaactaaattattatcccatttcagtcttacagttgtattctctaaaggggaagagagtttggtattacataactagatctcttttctcagccacagaaatatgtagatgggataaagtaaataatagtaataaatgacatataaaaataaatgcaatatttggcaatattcacaccaagaaatttatctggattcactcatcttcctgcttccagtcatttaagcaaatggagatcttttttaaaaaactgaaagttgatgttaaaactgactcaaaaatagtgtaatggtatccaggttaaatattcctaagacaaaataaggcattgttttattcagcacataacttgagttgtagcagcttctaataaggaagttccctgtgaatggctgaaagagatttttcaattgatatccttacataaatcagctctacagayattgaattatacttttcaaaattaggctaagaaaatgaaatcttcctaagtagtaagtatattgattattgtttatcttatgtaattttctgaaatactgccaaatagggttta

SEQ ID NO: 426201 - DNA, 610 bp, Homo sapiens
tggagcaaacaacacacaacaaacggagactgtctagagatagagtgatgcggaaaccctaagttgagttactgaaaacatcactgatttccttctgaaatgagagtcccatgattgtgcacttggggaagagagagcctgtcagacaaacgagcttgtactgtggctgttgattctgctctctcaagttcatctcttaaagcggattagccaaggctggcctgtgggccaaacctagctccaacaccacttctttgtatacagyctgattgtaagaatggattttacatttttaaacgggctgacaaagaaagcaaaaggagaataatatttggtgacatgaaagttacaggaagttccaatttcagtgtccaccaatatagttttgttcgaacaccacggcccttcgtttatgggttatctatggctgttttcacgttaccatggcagggtggaatatgccccgaggctatctggctctttacagataaagtttgttgagtccattgtaaagaaaagtaaattacttagcagtggctaatatttctcctgaagaactttcacaaagatttttggttcaatattcagagatggtttatagaactttgca

SEQ ID NO: 426202 - DNA, 488 bp, Homo sapiens
tgcggaaaccctaagttgagttactgaaaacatcactgatttccttctgaaatgagagtcccatgattgtgcacttggggaagagagagcctgtcagacaaacgagcttgtactgtggctgttgattctgctctctcaagttcatctcttaaagcggattagccaaggctggcctgtgggccaaacctagctccaacaccacttctttgtatacagtctgattgtaagaatggattttacatttttaaacgggstgacaaagaaagcaaaaggagaataatatttggtgacatgaaagttacaggaagttccaatttcagtgtccaccaatatagttttgttcgaacaccacggcccttcgtttatgggttatctatggctgttttcacgttaccatggcagggtggaatatgccccgaggctatctggctctttacagataaagtttgttgagtccattgtaaagaaaagtaaattacttagcagtg

SEQ ID NO: 426203 - DNA, 518 bp, Homo sapiens
aggaaggttagtggagggttaagagggagtgggctgtaatcccaacaatttcggaggccgaggcaggtggatcacttgaggtcagaccagcctggagttccagaccagcctggccaacatggtgaaaccccatctgtactaaaaatacaaaaattagccaggtgtggtggtgcacacctgtaatcccagctactccagwggctgaggcaggagaattgcttgaaccagggaggtggatgttgcaatgagttgagatcatgccactacactttagcctgggtgacagagcaagactccatctcaaagaaaaaaaaaaaaagcaggcggaggagtcagacttggttaatgggtacaaaaaaatgaataagatatcctattttataggacaataaggtgaccatggtcaattataacttaagggtatatttttaaataacttaaaaaatgtaattggattgtttgtaactcaaaggataaatgcttgaggggatagatattccattctccacgatgtactg

SEQ ID NO: 426204 - DNA, 545 bp, Homo sapiens
ataaaacaaccgatccattttttcttcaactttccaaacttgtttttatccatttgcttgaaatgttttctctctgctcttaaagtatgtttttgtgtagtgcctgattctccctatggtatttgctttccattaacttcctattgattttcagttgtgtgtacacagtactgcaggaacataaactgcaaacaccagacttaaagaagtccgaactctaactgttttatcttggtgacacagtactacaacgtgaatattacctgtggcctcttttaaaaaatgtatttaaaggcagttgtgacaagtagggtcaagtctgaataatgatgtatataaattacagtggaaaaatatttggcgtctcaggatgaaggatgttcaagttgaaagggcaggttggaacagataaagakcagtttttgaaaatatggcattacagaaggtgaagcaaagtataagtcactgtaaaaagaaaggtaccaaaagatgacaaaagtgaggaggagtgggaaggaagtaacacacagcaagttgatatgaca

SEQ ID NO: 426205 - DNA, 665 bp, Homo sapiens
tggaagttattagggtgttcagcaatttttagcagctacctgaatttgatgctatatgtcctggactttgctctaaaaatgatatatacatgacttcatgtgaaggccatgcatagataaaaacacaaacttgaaaatgggaataaattaaaatttcttctccctgtgtaatgtcttcttagtggagtggagcatgtttttttgagcaacagcacccagatttgtaagacatcaaactaactgcttcattaggcctgtttttctcatggtaattttggcaggattaagatgccatgagctactcaggaaggaaagtaaaatgagaaaatacaaaaatagctacattaaagtgtggcttaagaaagaggtaaagcccagtaaacgtggaggttagtgagaagtgggcagatgattctacttggtgaaaatcatcattgactgcaattccraacaggcatcatgaaattgtgcctagatacatgagtttagatattgaatgaagacttaaaatattgaaagaagcagcaaaattccaaaagaaatgttgtggatgtaatgtactgtgatattttgtgggggttttacatgttttgcatgttattagctaccccaaatgaatggattgcctcagagccacacaataaatcattgtcagagttcgttgt

SEQ ID NO: 426206 - DNA, 566 bp, Homo sapiens
tgacaggtgatgtacaaaattttttgtatttatttgctatactggtgcaaaaataaaaaaaaatggttctctcactcttrccctagtatatcatctattagttggcaccagccccaaactaaaaacatgttttattagtttcttatgttcctttcagaaattatgtaaattcaatcaagtataaatacaatttatatctatctcatcatacatactatacctagtttgctttattcaattactatgtcttagagatctttccaaattagcatatccttttatatgcaaactgggatgttccagtttatggatgtaccataatttatttataagtcctgcgttgatagatatttagttattatatcagtccattctcgcattgctgtaaaaatacctgagactggataatttactaagaagagaggattaattggctcatggttcttcaagctgtacagaaagcatgatgctggcatctgttcagcttctggggaggcctcaggaaacttaaaatcatggtagaagttgaagggggagcactgacatcttacatggcaggagcaaga

SEQ ID NO: 426207 - DNA, 487 bp, Homo sapiens
ggcggccaaagaccaagttggggccacagaacaacatgactctggcatcccagggtcaacacaacagggtacctctcataaccaagtgttcagccttaaacaattgcccaaatagagttagcaggaagccaaagcaaaaactgcaaagaaaacatatatttcaaggtgagaaataaaataaaatggctgacagaaaaataaaatcgtgttagaggagaaacgacctagaaaaggggcaatagggatgtaattaggkatgctatggcagactttgaattgactgtctaagccaaaggccttattttcctggctcacctgatatttgggggatgagtcaaaagggatacttacctgtccacaggagccaaaatagggccaactggtctctgatgtacagtgcaggtgaaggtttgctccccaggtttccccggcttgggcaggcttggttgctgcgagggaattggcatgtgatcctgcagcctcccag

SEQ ID NO: 426208 - DNA, 487 bp, Homo sapiens
ggcggccaaagaccaagttggggccacagaacaacatgactctggcatcccagggtcaacacaacagggtacctctcataaccaagtgttcagccttaaacaattgcccaaatagagttagcaggaagccaaagcaaaaactgcaaagaaaacatatatttcaaggtgagaaataaaataaaatggctgacagaaaaataaaatcgtgttagaggagaaacgacctagaaaaggggcaatagggatgtaattagggatgctatggcrgactttgaattgactgtctaagccaaaggccttattttcctggctcacctgatatttgggggatgagtcaaaagggatacttacctgtccacaggagccaaaatagggccaactggtctctgatgtacagtgcaggtgaaggtttgctccccaggtttccccggcttgggcaggcttggttgctgcgagggaattggcatgtgatcctgcagcctcccag

SEQ ID NO: 426209 - DNA, 561 bp, Homo sapiens
ataattctctaagtgtcagagaacttaagcatttcacaagttctttcaagtgcagttgtttctgggtatctgttcaaactctctttatcgtcatcccctctggctttcaagccttccctaagacataaatatactcctgtaaaagcatacccttcttcactttccatctacaataactccttggaaagctgaggccgatcaatcaatcaatcagacagtattgattctctactaaagtgctttcttcaggttttttaaaataaattttttgaatagatgattcrtgcacattattaaaatgccaaaactacaaccaaaaggtatatggtgaaatgtgagtctcctttctatctctataccaatctgttatagattcaaacatgttctgtgcatattcaagctctttttcccttttacacaaatgataatgtaataaatactgttttccacctaatctatctaggagataggtccacatccattcaggtagatctaaagattttggtgactacagagcattgttattttgtgatgtaccagttgggtttgaagtcagggact

SEQ ID NO: 426210 - DNA, 404 bp, Homo sapiens
aataataataatagtaataataatgaaaagaatcaccttggaaataaacaccatttaaacattttaattctcacctatcttttcaaacaacaaaataaatgtactatctgttcaaaccttataaaaaatgtcttttatttatttatttatttgccaagaaacttaaggctctcatagatctcaagatcatcagcaaagccaatcaaaaaaatgtttttatactttaarttctgggatacatgtgcagaatatgcaggtttgttacataggtatacatgtgccgtggtggcttgctatacccatcaacccatcatctacattaggtatttcccctaatgctttccctccccttgccccccatgccccaacaggccccagtgtgtgatattcccctccccttgccc

SEQ ID NO: 426211 - DNA, 501 bp, Homo sapiens
tgctgtgctggcagcaagaatttcaagccagtggatcttagcttgttgggctctgtgagggtgagatccgctgagcaagaccactcagcttcctggcttcagccccctcttcaggggagtgaacagttctgtctcactggcattccacacaccattgggatacgaaacaaaactcctgcagctagctcagtgtctgcccaaatggccacccagttttgtgcttgaaacccagggccctggtggtgtaggtacccaagggaatctcctggtctgtgagttgtgaagagagtgggaaaagcatagtatctgggccaagtaacaccatccctcactcacagcttcccttggctatgggagggagttccccaaccccttgcactttctgggtgaggaaatacctcaccctgattctgcttgccctccatgsgctgctcccacgttctaaccagtcccagtgagatgagctgagtacctcagttggaaatgcaggaatcacccacc

SEQ ID NO: 426212 - DNA, 565 bp, Homo sapiens
tcctgtagaaagtaattaagcaccggtggtagatcaaaggttagtcttaaacaacctagctagatacactactctgccttcttccttacccacttgaagctttttactcaaggtaaggattaggttgccttcagccattgtcttatcctgagacttctgtaaaaaccttcaggccttccaagaaagtttgtgtttatttttataactatctttaatatttttcccaccagcctgattgaactcccacataacaacacacaaaaatatgaggaatcttaacaatataataataataaatgaatctaaagagtttacatattctgcratgcatttttaataaaatttatgaccaagataatagttcctttttatgaatgcaaatacgtgcaattcaactatatgaaatggaaggcaaggaaattgtttttttatttttttgcaaacactatggtgacttaaaggcaaggaaattgttaacatggaattcagcaatatggctaccttgagtagacaaaggcagagggacacgatgggaaaagcaaccatatggttagatgtaggttgt

SEQ ID NO: 426213 - DNA, 565 bp, Homo sapiens
tcctgtagaaagtaattaagcaccggtggtagatcaaaggttagtcttaaacaacctagctagatacactactctgccttcttccttacccacttgaagctttttactcaaggtaaggattaggttgccttcagccattgtcttatcctgagacttctgtaaaaaccttcaggccttccaagaaagtttgtgtttatttttataactatctttaatatttttcccaccagcctgattgaactcccacataacaacacacaaaaatatgaggaatcttaacaatataataataataaatgaatctaaagagtttacatattctgcaatgcatttttaataaaatttatgaccaagataatagttcctttttatgaatgcaaatacgtgcaattmaactatatgaaatggaaggcaaggaaattgtttttttatttttttgcaaacactatggtgacttaaaggcaaggaaattgttaacatggaattcagcaatatggctaccttgagtagacaaaggcagagggacacgatgggaaaagcaaccatatggttagatgtaggttgt

SEQ ID NO: 426214 - DNA, 633 bp, Homo sapiens
tcttctgtctgtatagttatatatgtgttgtgtgtgtaatgtttatataaaagagctctaattaattggcttaaagaaaaataagtgcttaaatattttgaaagaaaactaaaagctataattccttttagtttacgtgactttaatcatctttaggaaataagaacagctttaaagatcattggtaaaacatagacatttggtccaaattaggcaggtcasatattaggtttactaaatgctttaaggttgtaaactgctttcacttttgaaaattgttcaacttgcctgctttacagctaggtaaggcctggggatgtgtggggttagccatgccccctagctatgctggaaggagtcagaccttatctgcacttccgtctgatgtcctaggctcaatcctaatacataattaaaattgcttactgaccaggtttttcaccaaaagttgctaagagttaacagtataacttgtactcgagacttctaaaaaaatagttttacatgccaggtgtgtgaagaaagtgaaatgtgcctttagtaaaagattataagaagacatgggaatgtacatttttgcctagtttagagggttaaaggattgttttaaattaaataggataggagagagat

SEQ ID NO: 426215 - DNA, 640 bp, Homo sapiens
cttttaactcattttataaacagggaactacgagtcagaaaaattaaatgaagaagacaggattcaactccaagtttaattgagtccagagaatgagcttaactactatactgcactgtgccttaatgtgtgctgtgccacacgtgcaaaggggaagctaagatgaacttgacatggtgtcatcttttcaggaggataggcaaaaaagagttgagagtcgttcctgtgggttaacacctagaactaatgagaggacatatttccatcccaatgggattttttgagtgctaatgtgctaattagagctaattcacattgagggtgataatagcaataacattttagtgtttttacaaatgtcaaataccatggcatgcacttttttaaaaagcatgttatttagtcaggtgcagtggctcctggtactttgggaggccaagacgggaggatcacttgagcccaggagttcaagaccagcccagacaacatarcaaaaccctgcttctacaaaaaataaagaagtaaattgggcatggtgatgcatgcatgtattcccagctacttgggaggctgaggtgggaggattgcttgagcccaggagtttgaggttgcagtgagctatgattgcatcattgcactc

SEQ ID NO: 426216 - DNA, 535 bp, Homo sapiens
tagccaactccaacaactttggtattaaaagactacatctgaaattgtcccagattttttgttctgaagatgcctcattcattttgaacttaaccatattcaaaattggccttacgcaaacacatacagacatcaacactgcatcttcctccactcttttatttacagttattcttccacatgaaatgctatctcacaaccacakacccaccacatggagtgcctgccttcttagtaattacagtcacacagaaatcatcatgccctgtccttgtggctcaaagtgtggttgcagggccagaaacatcagcatcacctgagaacttgttggaaacacagaattcatgaatccttagacctcagagccaaaagtgcacattttcacaaggtccgaaggtgatttgtatgcatcctaaagtttgagaggcactgctctataccatgtgactgcatcgcccaggccacaatttattggaccaggaatgagtccctaagccaaaaacatgtatccactagttggcaagctgcctaagcg

SEQ ID NO: 426217 - DNA, 580 bp, Homo sapiens
aaagttactatgaatttagtttttttttttaattgctttttgtagtgatgtttttctttccccaaactgcgtggctttctcccattcctacctcagtcttcatagcatgcttttctactccaagtgcgcatgttttgctttctgagaatgtgagattcacccaaataaaaaagaaagggtttggtgttgtttgtcatttggagtttttagtgcctccctgtactacattaggatggacaaaagagattgtaatgccatgaatataaagagttattgttcactacttacgaaaaatactctagctactcattatttcaaagtagtttattttaatcatttaaaaattagttgtgtccacactttgtgctttaatcttttattgtaatttttaatgctaaacatatctagtactccataacacatgctaaatgttgcgttttgatgtatcctcccttctctcctwatctagcttcgtagtcctttgaatacattaattttgtaaattaccgcagtagcagccagatttcataaggatgttttacattgttgtaactggtttcattttcttacttgttcctat

SEQ ID NO: 426218 - DNA, 576 bp, Homo sapiens
gatagtgttaagtttgaagaccctttagggcatcaaagagatgtccagaaaacatgactcaggagtgatttggtggaagtcatcaatattgggggcagtgaaggggattgtcattgaacttacgaaaatgaaaaaaatattctttgggaggtagaggaggtgatagcagttctttatggaagagaggagagatgtgtaaaggattaaaagtagttattttactcatacaggttttactgaggtaggtgcaattctgggtttcattcttattccaagtgcagactkaataaatgatcccccttttcatatcgatttggagaaagagttgaaggtcatgcttatcaacatgttagagaacacgttagaggtaattcttttgatggttttcttcagacaagactaataatccccattcttcttcccacaaatgttaagcagaatcttgataatttatacaatggcacttttgatgcatctttcaccccaggtgaaagaaaaaagccaataaaattccctggagaaactctgtctgtgtgcttaccttatctctctagctgtctttttttctttcttata

SEQ ID NO: 426219 - DNA, 576 bp, Homo sapiens
gatagtgttaagtttgaagaccctttagggcatcaaagagatgtccagaaaacatgactcaggagtgatttggtggaagtcatcaatattgggggcagtgaaggggattgtcattgaacttacgaaaatgaaaaaaatattctttgggaggtagaggaggtgatagcagttctttatggaagagaggagagatgtgtaaaggattaaaagtagttattttactcatacaggttttactgaggtaggtgcaattctgggtttcattcttattccaagtgcagactgaakaaatgatcccccttttcatatcgatttggagaaagagttgaaggtcatgcttatcaacatgttagagaacacgttagaggtaattcttttgatggttttcttcagacaagactaataatccccattcttcttcccacaaatgttaagcagaatcttgataatttatacaatggcacttttgatgcatctttcaccccaggtgaaagaaaaaagccaataaaattccctggagaaactctgtctgtgtgcttaccttatctctctagctgtctttttttctttcttata

SEQ ID NO: 426220 - DNA, 558 bp, Homo sapiens
aaaatcaatgctgttactttttagttatgttttattactattaggaaaatatactgataattatttaaaaaggaaatatgaatgaacagactgagctawgtgcataggagaaaaacacattcttttaaaatatatgtgcttatatattctaaactcttaagcatcactttaagagtgtactaaacgtaattattcaatgggacttattacttacttggattctgtcattggcaaaaaatataaataaaacccatatctagacatggtgctaatggaatggagatctttttaaattagatatttaaaacagtgttgtatacatgtctggtcatctggttccaaagatcatttcttaagaataaaaaagttagtatgttttgacaaacttccaacaaatggctgtattagtttcttttttagtgtaattgattattctaaattactgtcctttaatttatagaatgatattgctgtttcatccttaaattgccttgtgagtctactgcaaagtttctctctttctcatctcttattgcatttgagttgtgcggccctgaa

SEQ ID NO: 426221 - DNA, 525 bp, Homo sapiens
tctgcagtttctgactcggtrtatgggaaaagtccattgatttttatttttaaaaagttcccaggtgatgctcatgcagctggttcagggaccatactttgagaactattgctttagtaattttaagctaaatgctatagataaaggctgctttgatcattgttccatatattagatggggtttttttgctaaataaaatgattttcgtatgtcaacttgggtttagcaagtaataaatgtgcaggacagatagaattataaagtatctgacatttaagttcttgcaatgtgagttaggacattatgtaatagatattattatctgtattatacagttgaggaaattaagacttactggaacctcataagtggtagaaccaggaatcaaacccaacatttggctccacagcctgtgttgttaagtgatatgctatactgcctgaaacaagtgtgagtatcatagtgtgcaaatgatatgactgtggacaataaagaagatttaaaccaaagttttgatatttgga

SEQ ID NO: 426222 - DNA, 525 bp, Homo sapiens
tctgcagtttctgactcggtatatgggaaaagtccattgatttttatttttaaaaagttcccaggtgatgctcatgcagctggttcagggaccatactttgagaactattgctttagtaattttaagctaaatgcyatagataaaggctgctttgatcattgttccatatattagatggggtttttttgctaaataaaatgattttcgtatgtcaacttgggtttagcaagtaataaatgtgcaggacagatagaattataaagtatctgacatttaagttcttgcaatgtgagttaggacattatgtaatagatattattatctgtattatacagttgaggaaattaagacttactggaacctcataagtggtagaaccaggaatcaaacccaacatttggctccacagcctgtgttgttaagtgatatgctatactgcctgaaacaagtgtgagtatcatagtgtgcaaatgatatgactgtggacaataaagaagatttaaaccaaagttttgatatttgga

SEQ ID NO: 426223 - DNA, 227 bp, Homo sapiens
ataaccttaattggcatactttactacaaaaataagaaaatgtatgccaaaaaacgtttttagattttaattttataagcaacctgcacataagccttaatgtgagtcttcacattggattatatttttattctcccatatttgtggctgaaatctctcccaactattgaragtgatctttcccatggtctgctttattgttttgtgttaatatctattataaatat

SEQ ID NO: 426224 - DNA, 583 bp, Homo sapiens
tttgtttaaaatattaaattaatttatactgaaagttttaactgcaatttcataattcatgaattctataaaagaaatctccctsactaaaaatatgatcaatcaaaactaccagttttgcacaccaatcccaagtttaagcatattttgtatttaaagttataatttaattatgatactgtccccctaatatggaaaataagttacaaaattcttttttttttttttttttttttgagacagaggttctctcaatgttgcccaggctggtctcaaactcttgggctcaagcgatcctccctcctctgcctctggagtagctgggattacaagcacgtgcctactatgcctgtcttcaaaatcacattgttaatttttatagccacaattattaatttgataaaacaaataattttatagaagcattaaagtattatcagaacaaaatcagagttccaaaatttggggagtattttaagattgtgaaatgttaccttttggatgcaaaccaatgatacaaatctttaagaaagaattacagtgggactcctttgaaactctgattttgaaaatagaacaaata

SEQ ID NO: 426225 - DNA, 568 bp, Homo sapiens
ctcattctctcttgacctacaaggtttctgctaagaaatctgctgatagtctcatggggattcccttatatgtgacttgacatttttctcctgcagcttttagaatttgctctttgtctttgtttcactataatgtgccttggagaggrtctttttgggttgaatctatttggaaactcttgagcttcctgaatctggatgtccatatcttttccaatacttgggagaagttttcagttattatttctttaaacaggattttgtgcctttctccatctcttcttccttggcgtatctataatgcaaatatttgtgcagttaatgatgtgtcgtaagtctcatagactttattcactcttctttactttttttttgtccactgactggcttatttcaaaaggtctgtcttcaagttcaaaaagtatgtctccttcttgatctaacctgttgttgaagctctcgattatattttttattcatttattgaattatttagctccaagacttgtttgattctttttcatatttatctctttgttggatttctctttcagatcataaaaatttt

SEQ ID NO: 426226 - DNA, 568 bp, Homo sapiens
ctcattctctcttgacctacaaggtttctgctaagaaatctgctgatagtctcatggggattcccttatatgtgacttgacatttttctcctgcagcttttagaatttgctctttgtctttgtttcactataatgtgccttggagaggatctttttgggttgaatctatttggaaactcttgagcttcctgaatctggatgtccatatcttttccaatacttgggagaagttttcagttattatttctttaaacaggattttgtgcctttctccatctcttcttccttggcgtatctataatgcaaatatttgtgcagttaatgatgtgtcgtaagtctcatagactttattcactctyctttactttttttttgtccactgactggcttatttcaaaaggtctgtcttcaagttcaaaaagtatgtctccttcttgatctaacctgttgttgaagctctcgattatattttttattcatttattgaattatttagctccaagacttgtttgattctttttcatatttatctctttgttggatttctctttcagatcataaaaatttt

SEQ ID NO: 426227 - DNA, 567 bp, Homo sapiens
cacgcagcttatggtttaaacttgtcctgcaaggtgcagccaacacaagtgtctcagaagaagggcatcatctgatgtgtgtgagggggatacaaaaactgataatagttaagttgcggtttctgctgtattcaaccagaaatttctacaaaaagaatttaactggcagtcctaaattattgaaaattataggactcaggcaagtatttcatacttttccttactctacattaaagacatttcagtaattcacttcctcrttagccatttattaggtactatctctggaacagcaaagatgcaaatatgatcagaacaaagtacactcactgtcttatgggaacgcacacccagacagatacacaccagaaaacacgtgttgacactttcatatacaagctaggatttttgataacacctagatcattttgggccctaatagctgcaagcaactggggaagacaacaacaacagcaaaaagcacctcaaaattggtgtagggaagaacggaataacttcattggctgctgcccatctacaagcccacgtggcacgttggtagctgca

SEQ ID NO: 426228 - DNA, 485 bp, Homo sapiens
aaacacataaactagagatggggctcacagattccccaaaaataaaaagaaaacatgttgaagatttagcagaaatcactgcaaaaaggtccaggggcaaaactcaacatagctccatttaaaaaatactaaagctttaatttttttcagtgacttctaatatagtagaatggaatctaggtctttgggtaatacagcccaatgggattcttaacaaatgcttgaagattaagctggtgatgacaaaaatctgctgccactgatggttgcgttgaagcagcagaattcttctctggggccactcargtccaaggctcatcaggaaagcaagcagagctccgtgtcccctatgaccaatccaccaggcattttaattttaaaagtattttcagattaaagtaaatattaaaagtgtgtctttgggagattatagaagactaaaacaatattactaattacctagaactaatttatgtttatagaat

SEQ ID NO: 426229 - DNA, 432 bp, Homo sapiens
ccagcctgtctgggctcactgtggagccaggagaacctctctaatgcaagaaagggtgagagagtgagagcccctgggggattcatgctctccacaaggacctgtgcaagactgggaacaggagaattcccctggcccccgtgtacccccctccatgcttctacactgaggcagagagccacctggacattttgcaggggcaattctcgagtctacaagccttgggccccaaagcaggccagtaccggtgccatggccccagtagcrgctgcagtgacagtggttgggagcagagggatttctccatgtccccttgccagacagggctcagcaccagcttcaagcccagcaatcccacttgggccctaagtcagctggccgttccacccacccctgccactggtagcccagcaggcaacacttgctagagct

SEQ ID NO: 426230 - DNA, 441 bp, Homo sapiens
ctgcacggggcttccccggacctgctctccaggatgcccacctcgtcaggctcacccccaccacacctgagcttctgtcygtggaggtggttgaggcggctggtgggtggcgtgtgtgtggtcatggccctgttcagttacgctgtctgttcttaacttctgccacatcctcctttggcctttaatttcgtaaaggttgttgtgggtggaatgttctgtggtccatttctttccacctcagagctacccctggacctgatgtttttgtgtaaatgctggtgctcactctgcggccatcgtagggtttgctgaagatggtggcgtgtggccgggtcagcagcagccggtgggggcttcagggtttgttgatggcacagtgggctcctccgaggaagcgaagcgctgccctcagtcccggctgctgctggcggcactcgggcc

SEQ ID NO: 426231 - DNA, 441 bp, Homo sapiens
ctgcacggggcttccccggacctgctctccaggatgcccacctcgtcaggctcacccccaccacacctgagcttctgtccgtggaggtggttgaggcggctggtgggtggcgtgtgtgtggtcatggccctgttcagttacgctgtctgttcttaacttctgccacatcctcctttggcctttaatttcgtaaaggttgttgtgggtggaatgttctgtggtccatttctttccacctcagagctacccctggacctgatgtttttgtgtaaatgctggtgctcactctgcggccrtcgtagggtttgctgaagatggtggcgtgtggccgggtcagcagcagccggtgggggcttcagggtttgttgatggcacagtgggctcctccgaggaagcgaagcgctgccctcagtcccggctgctgctggcggcactcgggcc

SEQ ID NO: 426232 - DNA, 561 bp, Homo sapiens
gaccctgactccgatggaggtagcttaagattcatttcttttttatgttctgtgattttacatatcacttaaaatgggataagttttttagttgctgactatttagttatgggcttagcaagagtgtccagaagagcttattcagcacaacatcatcacgagtctatggctgcagagtctcagccatgtgtattccatgtgtattacagtgtattcattaacctattaataaatcatttattaatttatgttttaaattaatgtatgtttattccagagaatggagatacagcagtgaacaaaacagtcaagttccttgttattattgagtttactttcaagcggaaagatgcatagtaatatattatatatcagaggctatgggtgaaaagacagaaaastagagagtcacagagaagggcatgttactgtggatagagactcctatccagtgaagacctgaactgctggagcgggtgcacccagccccacaggagcagcccaggcagagacagcaagcgcacgcctgcattcgagctgctttgcaaaggggcagaaggc

SEQ ID NO: 426233 - DNA, 515 bp, Homo sapiens
gtctttctctgcctcctctttaagcctgataactcttagatttgccctttggaggttttttcctagatcttgtaggcacgctttattgttttttatttttttattttttctcctctgtgtgtcttctcaaataacgtgtcttcaagctcactaattgatcaattmtgctattaagagactctgatccattcttcagcacttttcagttgcacttttcaactctagaatttctgcttgattctttttaattatttcaatttccttgttaaatttaactgataaaattatgaatttattttctgtgttaccttgaatttctttgagtttcctcaaaagagctattttgaattctctgtctgaaaggtcatatatatccgtttctctaggattggtccctggtgccttatttagtccatttgatgaagtcatgttttcctggatggtgttgatgcttgtagatgttcgtcagtgtctgggcattgaagagttaggtatttattgtagtcttcacagtt

SEQ ID NO: 426234 - DNA, 557 bp, Homo sapiens
tgccaggactgggtccttctcctcaaggcagtgggttcttttttggcccaaagtgcatctagaaatgtccaggagatagggyctggaagggaggtctcatgactttgccccgtgccctatcttactgtggttgaactggtatccaaggtgcaagacaaagtcctctttagtcttcactctcccctccttaagcagaaggaaggagtcattgtcattgctatgagctgtgctgcctgggtttgggggaggggtggtgcaagcactcccttagccaccctaggtcatctgtcaccctagtccactggctctaagcccagccttagaattgcagtcctaggaattgtagtccttgtatcctagactacctttcaagtttatttagaaccccagagcacttcagcccacagtggaaaagcttgccaagaaattcaagttctcactgctggcatgggcaattttcctctggctagggctgctccaaatgcttcctccatgcgtcggtgctgctgagcccaccattctctgctgtgactgggcagcactgagttcaatgtaaa

SEQ ID NO: 426235 - DNA, 470 bp, Homo sapiens
catgggccttgagattgaggtgcctcactyagcctgcatgggccttgagattgagatgcttcacttagcctgcatgagccttgagattgaggtgcctcacttagcctgcatgagccttgagattgaggtgcctcacttaggctgcatgggcctagaggttgaggtgcctcacttagcctgcatgagccttgaggctgaggttcctcacttaggctgcatgggccttgagattgaggtgcctcagttagcctgcatgagcctcgagattgaggtgcctcatttagcctgcataagccttgagattgaggtgcctcacttaggctgcatgggccttgaggttgaggtgccccacttagcctgcatgagccttgagattgaggtgcctcacttagcctgcatgggccttgaggttgaggtgcctcacttaggctgcatgagccttgaggttgaagtgcctcacttagcctgca

SEQ ID NO: 426236 - DNA, 470 bp, Homo sapiens
catgggccttgagattgaggtgcctcacttagcctgcatgggccttgagattgagatgcttcacttagcctgcatgagccttgagattgaggtgcctcacttagcctgcatgagccttgagattsaggtgcctcacttaggctgcatgggcctagaggttgaggtgcctcacttagcctgcatgagccttgaggctgaggttcctcacttaggctgcatgggccttgagattgaggtgcctcagttagcctgcatgagcctcgagattgaggtgcctcatttagcctgcataagccttgagattgaggtgcctcacttaggctgcatgggccttgaggttgaggtgccccacttagcctgcatgagccttgagattgaggtgcctcacttagcctgcatgggccttgaggttgaggtgcctcacttaggctgcatgagccttgaggttgaagtgcctcacttagcctgca

SEQ ID NO: 426237 - DNA, 470 bp, Homo sapiens
catgggccttgagattgaggtgcctcacttagcctgcatgggccttgagattgagatgcttcacttagcctgcatgagccttgagattgaggtgcctcacttagcctgcatgagccttgagattgaggtgcctcacttaggctgcatgggcctagaggttgaggtgcctcacttagcctgcatgagccttgaggctgaggttcctcacttaggctgcatgggccttgagattgaggtgcctcagttagcctgcatgagcctcgagattgaggtgcctcatttagcctgcataagccttgagattgaggtgcctcacttaggctgcatgggccttgaggttgaggtgccccacttagcctgcatgagccttgagattgaggtgcctcacttagcctgcatgggccttgaggttgaggtgcctcacttagsctgcatgagccttgaggttgaagtgcctcacttagcctgca

SEQ ID NO: 426238 - DNA, 580 bp, Homo sapiens
ttgcctggtattaattaataggaagagttaataagacaatatagaagatcatgaatgccaaattttgctgattgtagcacgataaaactttttctcattgtagcagtaaataaaaagtgtascatcaggagaaattcagagctgggtttagatgaaagaaaatgtcatcaatagcatgtcccaggatggagcctttcaagccaattatgtaaaattctcttgtagaaagttaatgtttattcatccatattatacgcattctttattaattttattttgatgggataacagataagataaacagtgccttttcagatgtcctcataactagaagccttggacaagggctctcttgtttctcatcatacaccattgtaatagcgtgatcatctcggcacatctcctctggaaaggtggaaaagataagctcgccttaaaacactcatttcccaaatggcatgtttttaccctctgtggtttggatcgggttgctgggagggggaagttcttataggtgagtgtcacggacaggaacgtcaatatcaggaatatttgttagccacatagaaataattttcat

SEQ ID NO: 426239 - DNA, 622 bp, Homo sapiens
ggttgcacgaacaaatcgaatggtggtgaatgcagaggattttattgctgatgaaagcrgcttgcagtgggaaggggagctgaaagggggatggggcaggaaggtgatcttcccctggagtctggccatctccaggcagactcttctctgaagtcctgctgtcaagccatccctcaaaagtcaagctgctgctcttcgatgtctggctgctttttctcttccctccttctctctgccctctgccagtcaggtcaggggcacaggatgtggggtagaggcaggccatggatggtttttaaaaaggcatcatttgagtgggaaaaacagagatgtaaagttctctctttgggcagcagttccaggctggaaggtgggaccattgccagagaccctgtccttttctgcctagaatttctctgcatcctgtgcctatcagtatttttctagttattgggtgtaacactatgcatgcacacaatattttacattattattttaattttataaatgaggaatctaagactagtagagattagaaaactgcctcaaattgtctgggcgcagtagctcacacctgtaatcccagcactttgggaggccaaggcagttggatcacaaggtc

SEQ ID NO: 426240 - DNA, 586 bp, Homo sapiens
tttgggtaactgagtctcactgatttcttatttttgttgtttttcattgggtaaaacacagaaaagttagccctttctgttggcagacactgtaactcaagatgcagtagagaaatgcatgagctgaaaaggatggttctaagaaaaatctcttcatcactctaagaatactcaataaaatagatttgaatgtttcagaaatgtctcagtaaagtaggtaatgaaattgtaaaactattctgaaacatgtactgacagtgatttatcaggtacaacttcatacattggtaaatttgtactttatgttgccttctgcttatgtgaattatcaattgtccacttacctaaaatattcttctgtgcactatttagttttttggaatttattttttgtatgaggcaaaattaagtttttggcacacagttctgtgcattttgacatgcataaagtcatattcccagcacctctcctgtatatagctcattgatgttctatcagtgattgtgtgtatktgtgtatatcagctttattattatgtaattgacatgctttacagttcactcattaaaagtatgcaatgcaatg

SEQ ID NO: 426241 - DNA, 553 bp, Homo sapiens
cggaacgttgatcagtagttaaaagaaatggcctcttgatacatggtacaacacagatgaaccgtaacatagttattcagagtaaaggaagccagactaaaaagagtaccttctgtgagattctgtttacacaaaatgtgaactactccacagggacagaaacaaattcatgctcccctggggggtgaggagggaggagggatggtggagggccaaggggcagaaatgagtgttgaggggaggcagtccgttcattaccttgatgccggcgattgttaaaacatccaattgtatgcttaaaatctataaaattgtacctcaatacatctgttacaaacatgacagggtgagtgttatcsgggtgttatatagttcggctctgtgtccccacccaaatctcctgttgagctgtaatccccagtgcaggaggtggggcctggtggaagctggttggatcgtgggggtggtgtctcatgaatggttttgtgccatcctcttggtgctcgtcccacaacagtgagttctcttgagatctggtggttaagagtgtgca

SEQ ID NO: 426242 - DNA, 532 bp, Homo sapiens
ttgcagcaagctgagatggtaccactgtactccagcctgggtgacagagcgaaactctgtctcaaaagagtaaagaaaaacggtgtatggtgaaraatactgagaaataaatttggacaagcaggttaggatcagatatggaagatattaaatgtagtctgagaagtctggactcccggcaataaagatgaatgacttttttgattgataaataacattaatgtggtgcttcagaggaatagctgtttagcagtaacaggcaagacaaactggaggagagaaatgactggaagcaagggtactatttagaagctactgcaataggcttgctatgaaatcattaaattggtggatatggaatggaaaatgtgagttatattagaaaagaaaaattagaacagacctggtggctgagtagatatgggaagagtaacaggaaaagaaggagtaataacatgattcaaatttcaaatccaagcgacttgggaaataatcagaagcatcacctcatcacttttaccatatttatact

SEQ ID NO: 426243 - DNA, 635 bp, Homo sapiens
ttaggcattttctcaggctccccgccagagagcgccgccaggtcctcggaaccacctcgcgcactttagctgggcgcgcgacccgcgcaaccagtgagaaccccgctcccgccctaggctttctgtggtggaaaaagcgcgcgcgcggacgagcaggttaggcgatagaggtcacgtgggccagctgtggccaatggggagcgcacatggcgacgcggccggcggcggcgcgcgcgtagctcgcctcgggctcctggcgggagcgggagttagggaggcygggttcccgaattacacacaccagcgttatttattctatcagtctttggttactctatctggcgttctcgacgccgtaataacaagttcgtgccccctcacaccgccccctcattccgcacatccctcatttcttcagtggtatcataaagatgaaggggagaaacgcgctgctgcctgaacagaaaggcaacccaggtgtcctgggccagaagtgggaggacatgggagacagcactttattggaagatccctggtttctaattgtttggcaggcattgaaagcacattggtggcccaccagactaccagtcactaatgagatttgacatataactcgcgtatggtaaaacggg

SEQ ID NO: 426244 - DNA, 565 bp, Homo sapiens
aagaccaaattataatgaaaaaatttatgtcttcagttttgaaaattaaattttttgaccctgataaaacaaatttgctatacaagtatccgttaaccgtgtgaaacctactgagtcaaactattttcttacattccttccacttcaacaccaattctaatccaattccaaattagttttcagagagtctcttgtaaggaaaaggaraatcgacttcgaattttaaaatttgtgctattattagtttatagagctttcaacaatttacaaatagtttgcataatcagtatatttaattagtatatatagacatatatatatatatttgagagggaacttcactgcaacctcccagttgcctcctgggttcaagtgattctcctgcctcagcctcccaaacagctagggttataggcgcccaccaccacgcccggctaatttttgtatttttagcagagacagggtttcatcatgttggccaggctggtctggaatgcccaacctcaggtgatctgcccgcctcggcctcccaaagtgcaaggattacaggcgtgagccaccaagc

SEQ ID NO: 426245 - DNA, 563 bp, Homo sapiens
tcttagttttatttttgagctttattaaaatggtaccattctatatacagtcttctgctattagattcttcctctcaactttgtttctaaaattgattcacactgtcacaagtagctgttcgttcaattatttttactgctgcaaaatattctattccagaatgtaactgttttcctgtggatggacactggattattcccagtcttttgctattatgaaaatgcaataaacattcttctgaatgtctcctggttcacatgtgcagtttctccagggcctatgactaggggtagaattgcagcgctgtagggtgtacacatgaattctgaaagataattccaaagtagctgtactgtgtggcttgycttttcatttctttacgtcttttgatatatagaaggttttttttccttaaagtaataaaataaaccaactttttcctttatgagctgtagttcttgtttaagaaatccctctttactctgaggtcataaagatattgccctgtattttctttaaaaatttttaaagtttaatttcccatctagaattgacttttgca

SEQ ID NO: 426246 - DNA, 267 bp, Homo sapiens
ttggcaagagcaacagttttttgtggaggaataaggtgaaccaaagtaggagagatagatggggagtcattgggacaggctcacatgctccgttaaggaattatttgcacgatcttagcctagggactctatcctgtgtacatacaacagagtgacagagtgagagtttggaattctatgtctgatttsaccggctactcctaaacaccaattagaatcttttcagaatactattttcgcctgcttctatagtaagaataggaactg

SEQ ID NO: 426247 - DNA, 547 bp, Homo sapiens
actgtgcaccctcagagactaaaccttgacagcctattcagttttcacctctcttctcttagaaacctaccttgagaccaccatgctgataggaagctgggtcgactcctggagtaagagaggccctgtaaaggagaaccaagttataccactcaacagccagcaccaacgactttgatgtttgagtgaagccatctttccccagtcaatcttctagccgactgcaatcacatgaatgagcccatgccaaactgttgttttaagctactaggtacaaaaataatttgtcacacwgcaatagataattgataacttataattaattggtgtttctgtggggaaatatgagtgagtctgttcctttcaactctgaaaactaaaaaacataaattgtttcaaacttttaattgtaaggaagagccctgaatggaataccattgtgcatgaagttcagtctgcatttttagttatctccttgtgagaacacccttggtcaagtagcgtggatatttctagatctttttctacatacttccaaaagaatttc

SEQ ID NO: 426248 - DNA, 582 bp, Homo sapiens
ccactcactccctgactcacccagagcagcttccagtcctataaggttcattcatggtaagtgccttatacaaatgtatgctttttaatcttttataatatattttactgtaccttttttctgtttttagatacacaaatacttaccattgtgtacaattgcctacagcattcaktagagtgacatgctgtataggtttgtaccttggagcgataggctattccacatagtctaggtgtatagcagaccataccacctaggtttgtgtaagtaggtttgtgatgttcccataatgatgaaatcacctaacgttgtatttttcagaaggtattcctgtcactcagcaacacatgactatactaagagggtgctgtgcagaggcaggatggtccgtcaggcagcagtctagctgagaacttgcttaaggtgaagtgccctcttagactaagtaatccatcaaagagcagatactggccatttccctaggcaaaggcagagaccaatggttcattcattcattaaacaaatatttattgaacctcaactatgtgctaagtaatattccttggggatacagataag

SEQ ID NO: 426249 - DNA, 470 bp, Homo sapiens
gctctgtctcctcttattcaacacaagggcctatagttccccctttaacccctcctgtgctgggctcttcctccaatccacttctacttttttgtctttgggatattatttaacctctctgtgcctctgtttcctcaactgggataatcatagtacctatttcatagaaytgttttgagtaaatactgagttactgagttattttagggtctctctctctctctaccagaaacttcaaattgacacactgttttaaaaaatctgggaatttcactttctaaaaatccaggttttcagcttctcgtgagtgactgggaaccacacttaccctatgtccacacaaccacctggagccgagtagaggtggctcctgctaaaaatgacatctcatgtctgtccaggtcctggtcctccattccactcaggggcagggcctttcttcatgtcctggttgacccagaggccccgag

SEQ ID NO: 426250 - DNA, 570 bp, Homo sapiens
ggggcaggcatcacctctgtgtgaattcagggcacagcgtgccctccgatggccctcagcttctctatctctaataggaggtggaggaggcacaggtctgggggaatttctgggtcagctctagcactggggacagtctagggcagtggttctcagcatcgagcagcatcagmacaccccagaaggtttgtgaaaacccacattgctgggccccacccctgagttcccagtctagtagggctgcagtggggcctgagaatgtgcatttctaacaggtttccaggtgttgctgctgctgggaccacactgagaaccactggtctaggaggtggggatgagtaaattgagagatacccatcactaggaaggaggtgaaacactgcctctgattgggtggctgtaaatgaggtggctgtatcccaaaggccccaacttttactcatattttggcctgaggtgggtctgtgtccctgaacttggtacaaactcctgttcctgggaaggccactctgccccatgggcaggtcaccatacacttatcttccgaattcagtcacacttgagtgtgaa

SEQ ID NO: 426251 - DNA, 570 bp, Homo sapiens
ggggcaggcatcacctctgtgtgaattcagggcacagcgtgccctccgatggccctcagcttctctatctctaataggaggtggaggaggcacaggtctgggggaatttctgggtcagctctagcactggggacagtctagggcagtggttctcagcatcgagcagcatcagaacaccccagaaggtttgtgaaaacccacattgctgggccccacccctgagttcccagtytagtagggctgcagtggggcctgagaatgtgcatttctaacaggtttccaggtgttgctgctgctgggaccacactgagaaccactggtctaggaggtggggatgagtaaattgagagatacccatcactaggaaggaggtgaaacactgcctctgattgggtggctgtaaatgaggtggctgtatcccaaaggccccaacttttactcatattttggcctgaggtgggtctgtgtccctgaacttggtacaaactcctgttcctgggaaggccactctgccccatgggcaggtcaccatacacttatcttccgaattcagtcacacttgagtgtgaa

SEQ ID NO: 426252 - DNA, 607 bp, Homo sapiens
ccagtctagtagggctgcagtggggcctgagaatgtgcatttctaacaggtttccaggtgttgctgctgctgggaccacactgagaaccactggtctaggaggtggggatgagtaaattgagagatacccatcactaggaaggaggtgaaacactgcctctkattgggtggctgtaaatgaggtggctgtatcccaaaggccccaacttttactcatattttggcctgaggtgggtctgtgtccctgaacttggtacaaactcctgttcctgggaaggccactctgccccatgggcaggtcaccatacacttatcttccgaattcagtcacacttgagtgtgaaaggaggcagtgctaataactgtggggacagaaggcgcaagctgggctgtctgtggcaaattgagccataggaaatcaaccgggcagctgggcctccgggaagtagccaggcccacacagagccttaaatctccctcacaagcattttgatgtggccaacttgttttcactgagatcagaggaagagagggagttgggatgctggctgctgcaaaagttttcagggcggcctctaaaatatgcagtgtagaagccagcagagcc

SEQ ID NO: 426253 - DNA, 523 bp, Homo sapiens
cagctccacaactgctaatgttcacttctgtggaaaatgataggtgacaagttgctctcggagatgcccacaatcagataagccaggaggggaaacaagttcttctggaagggaaacagcctgtactatggaaattaaatattccttagaggagagcagraaactttagatcccagccacgggtttctgaggaaggttcaccagagaaactggggcatccctggggcacggactgggaaggatggaagctgttactcctgacatctgcaactgtcatttggagcctgggtctgggctgtgtgtccccctacccctgccccaacactggcaacatgatcaaagtcatacttccccttttccccctgtgggggccccagcgcccttctagtcattcagcaatcagggcgcatgtgcttttcaagtcagtgtcctgatatttatctgcaagcagggatgtgagaggcagcctcctgccattcccgacatggggaaactgagtcacaaaagggctgaggtgagtggt

SEQ ID NO: 426254 - DNA, 523 bp, Homo sapiens
cagctccacaactgctaatgttcacttctgtggaaaatgataggtgacaagttgctctcggagatgcccacaatcagataagccaggaggggaaacaagttcttctggaagggaaacagcctgtactatggaaattaaatattccttagaggagagcagaaaactttagatcccagccacgggtttctgaggaaggttcaccagagaaactggggcatccctggggyacggactgggaaggatggaagctgttactcctgacatctgcaactgtcatttggagcctgggtctgggctgtgtgtccccctacccctgccccaacactggcaacatgatcaaagtcatacttccccttttccccctgtgggggccccagcgcccttctagtcattcagcaatcagggcgcatgtgcttttcaagtcagtgtcctgatatttatctgcaagcagggatgtgagaggcagcctcctgccattcccgacatggggaaactgagtcacaaaagggctgaggtgagtggt

SEQ ID NO: 426255 - DNA, 531 bp, Homo sapiens
gccaaacctagcaaaacatgcccctcttctagggttgaggaatccctttgctgaggatggtcaatttactttaaaattcttgggggtgggggagagggatagtttctttgtagccagcatctagaagactcctggggactttctttgaacagagaccagtggcagcacctcttgcttgtgcttaggcatggggtgacrcttcctagtagtgggcatcttggccggctagagggtgctcgagaccagcctgtttcccttaaacaggagaagtctcttttctgaaagaagcacgcctttgattaggtagagactgactcggagacctgaaaattccatgtctttcacctgcctccctctctgaacttgtgcccagatgtaagacagaaggaaggggttgggggagggtctcagaaagacccatccccggatctggccatagactggaacaggaccctcacactcttcttctggctttgggcagggacacctacttctcccatcctccatcaaccagggcctcacagcccgcct

SEQ ID NO: 426256 - DNA, 534 bp, Homo sapiens
cagggacacctacttctcccatcctccatcaaccagggcctcacwgcccgcctgcccgctggcctacctcagatgcctcagattagctaattgacatggggaggccactttgaacatttcaaggcctggtcaggggccaagtctcattacttagcttcaaagtcaaaaactccataaaaagttcattggtggagctgattgttccagattgtcctaacggaactgagcccaccacggcaccccgggcctcacgttttaatgtggggcgacagcccgtgtgtggtactgagctgggatgggggaggggggcacaggaggccaagacccagtttgcattttcttttctcttttcaaacacttaaaaattacaaaaagactaaccacactacacaacattggaaaacaagagaaaaaataaaagattccagaaacccataccctaatacaacaatatttctttatgtatattttttatatactactaatcagcatatgtatacaaaaatggcctgcttttttttttttttgctaagc

SEQ ID NO: 426257 - DNA, 534 bp, Homo sapiens
cagggacacctacttctcccatcctccatcaaccagggcctcacagcccgcctgcccgctggcctacctcagatgcctcagattagctaattgacatggggaggccactttgaacatttcaaggcctggtcaggggccaagtctcattacttagcttcaaagtcaaaaactccataaraagttcattggtggagctgattgttccagattgtcctaacggaactgagcccaccacggcaccccgggcctcacgttttaatgtggggcgacagcccgtgtgtggtactgagctgggatgggggaggggggcacaggaggccaagacccagtttgcattttcttttctcttttcaaacacttaaaaattacaaaaagactaaccacactacacaacattggaaaacaagagaaaaaataaaagattccagaaacccataccctaatacaacaatatttctttatgtatattttttatatactactaatcagcatatgtatacaaaaatggcctgcttttttttttttttgctaagc

SEQ ID NO: 426258 - DNA, 515 bp, Homo sapiens
taggggctgggcacagacggctcagtcttgtaatcccagcgctttgggaggccaaagtgggatgattccttgagtctgggagttcgagaccaaccagtaagatctgatctctaaaaataataataataattagtttggtgtagtggcacacaattgtastcccagctactcaggaggcttaggtgggaggattgcttgagcctgggagctcaaggctgcagtgagctatgattgtgccactgcactccagcctgggtgagagagcaagaccctgtttcaaaaaaaaacaaaaagaaaccccaggaaagggcactccacctccctgtgcctctgttgcctcaactgtctaggcagtggtgaaaataacatctgaatatatttctctgcaaccttgcagggaggatcaagcccactggtggatgtgaagtgtctggggcagttaaagaggcagtgacacggccaggtgtggtggctcacacctgtaatcccagcactttgggaggccaacgcgggtg

SEQ ID NO: 426259 - DNA, 515 bp, Homo sapiens
taggggctgggcacagacggctcagtcttgtaatcccagcgctttgggaggccaaagtgggatgattccttgagtctgggagttcgagaccaaccagtaagatctgatctctaaaaataataataataattagtttggtgtagtggcacacaattgtactcccagctactcaggaggcttaggtggraggattgcttgagcctgggagctcaaggctgcagtgagctatgattgtgccactgcactccagcctgggtgagagagcaagaccctgtttcaaaaaaaaacaaaaagaaaccccaggaaagggcactccacctccctgtgcctctgttgcctcaactgtctaggcagtggtgaaaataacatctgaatatatttctctgcaaccttgcagggaggatcaagcccactggtggatgtgaagtgtctggggcagttaaagaggcagtgacacggccaggtgtggtggctcacacctgtaatcccagcactttgggaggccaacgcgggtg

SEQ ID NO: 426260 - DNA, 515 bp, Homo sapiens
taggggctgggcacagacggctcagtcttgtaatcccagcgctttgggaggccaaagtgggatgattccttgagtctgggagttcgagaccaaccagtaagatctgatctctaaaaataataataataattagtttggtgtagtggcacacaattgtactcccagctactcaggaggcttaggtgggaggattgcttgagcctgggagctcaaggctgcagtgagctatgattgtgccactgcactccagcctgggtgagasagcaagaccctgtttcaaaaaaaaacaaaaagaaaccccaggaaagggcactccacctccctgtgcctctgttgcctcaactgtctaggcagtggtgaaaataacatctgaatatatttctctgcaaccttgcagggaggatcaagcccactggtggatgtgaagtgtctggggcagttaaagaggcagtgacacggccaggtgtggtggctcacacctgtaatcccagcactttgggaggccaacgcgggtg

SEQ ID NO: 426261 - DNA, 462 bp, Homo sapiens
gcaggctgaggtctagggaggttaagtgtcaggaccacatgcagatggctagcayctggtagaaccaggcttagctcagttcagttcagaacatatgtatcaatgcctcttacatttcagggcctacattttcatacagaaaagtaagatacagttcctgccctcaaggggttcacagtctcctagtggagactgacatatgaacagatccaccctactcagtggggaaagcccctggtcttctctgaccacttgagttgtctctgaaatgatttacgcaataaaagcaggatagtgtagggccagaacaatggcccccaaatctaactggtgtttggagccatctggacggcttttagaaacacagattctgattgatgggtccagaataaaaaccaggtgatattgatgggcgggcatgtttgagaccctctggtttgcagggttttttggtctttggag

SEQ ID NO: 426262 - DNA, 551 bp, Homo sapiens
ctgattactttctaattcactgtatcacttactgatttattctgtttctcatctccctcctgacaacagagtatgagctcccaagaaggcagggctgtctcctctgttcatggacatatccccaggacccagtacagtgactgacacacagtaggctttcagaaagatgcattgaatgtgtaagtcttgagcaatgcctttgcatgcaacagtgttctctaaatgctgtttggttggttggttgattgacaaagccagccaaatcagggcaggctcatctgcttctcttccagaagatgccctggactgaggcttggagacttatttctcagggttaatagagtgagccttgttgagaytgtcacagccttcccagctgggctgaaaaatgcctttggaatctgatgctggggaggcaatgggccagctccaagacttcccaaggagctggagtcagggctggctccacatcccgtttgtcagccccagcatgcagacgagaggccatcagttgccaaggactttgttttattgtcattgcagttggcttc

SEQ ID NO: 426263 - DNA, 513 bp, Homo sapiens
tctctctctaacttcctcacagacctagccttgggacatggctcatggagcttcctccagcccagcctctgttcagtttttccaaggcttrtcacagaaagagggctggggtgttatttttaagtcttagctacccagaattctcaggaaattttgatatcatcttgtagatcccaccatagacagcctgcattgcaggctagagggattgctgcttggagatgtattcaaaatgttccttctgttatatgtgcctcccagacctccggaaagaggtgctgccatattgataaattaccccaggacagttctcgccacctctggcctgtgaagcacccccacatttgtgggacaatgagcctttgcaccaaccctggtctgagacatccctgggctctggccctagagcgggcaggcctcttacactacgtggctgtctggggatggctcagccgttgtggtacatccctgttccttacttaggaagaaaaaataattgatgtcctaaaagtt

SEQ ID NO: 426264 - DNA, 513 bp, Homo sapiens
tctctctctaacttcctcacagacctagccttgggacatggctcatggagcttcctccagcccagcctctgttcagtttttccaaggcttgtcacagaaagagggctggggtgttatttttaagtcttagctacccagaattctcaggaaattttgatatcatcttgtagatcccaccatagacagcctgcatygcaggctagagggattgctgcttggagatgtattcaaaatgttccttctgttatatgtgcctcccagacctccggaaagaggtgctgccatattgataaattaccccaggacagttctcgccacctctggcctgtgaagcacccccacatttgtgggacaatgagcctttgcaccaaccctggtctgagacatccctgggctctggccctagagcgggcaggcctcttacactacgtggctgtctggggatggctcagccgttgtggtacatccctgttccttacttaggaagaaaaaataattgatgtcctaaaagtt

SEQ ID NO: 426265 - DNA, 547 bp, Homo sapiens
gccctgaattcatcttgataacaaggaacaggaccaggaactgagctcaacactccggagcttatatctcttcctcaacagctctgggaccccagggctatcctcctatgccaaggtggctgactttggtggtgaacatttctttatagtttatcacacaagtatggatccctaagctctgcagttctgttttgyccatttcttccatatatatttttaagcctctctaatctaaacatgttgcccccattccctttttatttcacatgatggatttgttgaagaaccagggtcatttagcctgcagagcttctcgcagcctaaatgtcactgattgcatccttgtagtgttggttagcatgttcctctaccctgtgtatttctgctaagttagtagttggacctagaggcttgatcacattcaggtttgagtttttctcctagatgataggtagtggtgctcttccatcaggagccacatattttctaattgtttctctttgtgttgtcagtagctgttgttattaattcatgctttgttttgatg

SEQ ID NO: 426266 - DNA, 319 bp, Homo sapiens
aattcatgctttgttttgatgtctccaggctctgctccatggccttgcatctggttttgcctctgtgctcagccctctggaataagaattattcaaaacatgatatatctgtataatgggaaattatttggccatgaaaagaaatagattctgtttttctgatatccctgggccctaccctctcagtatacacatccaaccccagtctcctgcctccaggccaggctctcagaacctgttctgatttttaacccagattaggtaattmagtatttgcagaattcttttattaattaattaatttattttgagacggggt

SEQ ID NO: 426267 - DNA, 420 bp, Homo sapiens
gggcttgaccacttctaattacctcaatgaatcatttctgaaggtcatggctttctgattacctgagcactcctcatgtgtggggtacagactttggagaagaagaaataaatcactaaytgaataatgccaggggtgcttttgaggctgaagaaattgtggaaggagcagggcagtaaaatcatggcctatccactctagaagtggctcaggagtccctgaatcaccgatggggcagagtctggcttgatgggcagaaagttattgtattaacagttgtgacaaagaaaatgataaccctaaggtctcagagtaaggactgatagaaatcatcccagatctgaaactccaatctcaccgttggctgactccatctgactttatgtgttcattcatatgtgtcttgagcagagaatgtta

SEQ ID NO: 426268 - DNA, 624 bp, Homo sapiens
atagtcttttcaacaaatggtgctgtgacaactggatattcacatgcagaagaataaagttggaccactagctcacactatataaaaaattaactcaaagtggattatagacctaaatataaaatctaaaaccttaaaattcttagagtaaaacataggagcaaatcttcgtggccttgagttaggcaaagccttctcagatatgacatcaaacatacagcaacragagaaaaaaaataaacttaactacacaaaaagtaaaatgtttgtgcttcaaaggacatcatctagaaactgaaaagacaatcaacagaatgggggggaaaatttgcaaattgtatgataagaaacatatattaatattaaaaccccttacaacttaacaataacaagaaagataaccatttttaatgggcagaggatttgaatagacatttctagaaaggaaatatatatacaaatggccaataagcacatgaaaagatgctcaacatcattagttaataagaaaatgcaaatgaaaaccacagtgagataccacttcacatctgctatgattacgtccggttcacatccaccataatcaaaacaatggaaaataataagtgttggtaaggatgtgga

SEQ ID NO: 426269 - DNA, 610 bp, Homo sapiens
gagatgatccacaggttgtgtttgcaccacctatagttgcatgcagttgataccccgcctcccacaccaagctcctatctaccctatggacatgaacatattatcgttctcagttgcaagccacagcatctactctggctagtttaaacagaaaatgaatrtattgagagatattggctaactcccagacttgggagggctggagaaacacatttaggactgagcatcgaggaacactctgagaaccatgctgcagaactgaccagatctggaagctgcttcccccacaaatgacctagaaccactcagccacagatgaacttactacccatgctgttaagaatggaaaccctgagccacagaagtttctggcacttggggattttaggcatgtattccaggcaacattctgttcacaaaatatctgggtaataaaagactggaagccccctgctatttctggccacacccacttgaggtacccctgttggctcttcctaagctggtcatctgattctccacaagcttagtttgggggctgcacattctgtaaccaagaattttggttatatgccggtgattgatgtcagtctgtctcagagctcctcgt

SEQ ID NO: 426270 - DNA, 610 bp, Homo sapiens
gagatgatccacaggttgtgtttgcaccacctatagttgcatgcagttgataccccgcctcccacaccaagctcctatctaccctatggacatgaacatattatcgttctcagttgcaagccacagcatctactctggctagtttaaacagaaaatgaatatattgagagatattggctaactcccagacttgggagggctggagaaacacatttaggactgagcatcgaggaacactctgagaaccatgctgcagaactgaccagatctggaagctgcttcccccacaaatgacctagaaccactcagccacagatgaacttactacccatgctgttaagaatggaaacccygagccacagaagtttctggcacttggggattttaggcatgtattccaggcaacattctgttcacaaaatatctgggtaataaaagactggaagccccctgctatttctggccacacccacttgaggtacccctgttggctcttcctaagctggtcatctgattctccacaagcttagtttgggggctgcacattctgtaaccaagaattttggttatatgccggtgattgatgtcagtctgtctcagagctcctcgt

SEQ ID NO: 426271 - DNA, 516 bp, Homo sapiens
ggtatcttagaagtgttgggggcacagaactgtgtcttctcctgccagcaataccaaaacccaggtccactccctggtccttgaagtttttcctgttttgctcactaaaaccatacgttctagctcgataacaggctcttttaggaaataatagcattgctctctaaactgaaagcatcggactctggcctgagagtactgttgttattatggttattattatttgaagtgtgctaataaaaacacagcttcaggaccctaaagtgattttattgcactactgtagactagtcattgagtacctctyaaatttaaagtgctttgtttgattggcttttcagattaattggttggctaacaagaaatctttttgtttgtttgcttaaaatcttagggatgaaaatcctgatggaacttattagtccctatccctgtatcagcaagaagaatgtagcaaagagaaaatctctggaggctggaaggcttaggcagacagcaggtatgaagccattggcg

SEQ ID NO: 426272 - DNA, 647 bp, Homo sapiens
gttggtgttctacagttcattatcatatgttcagattgtgtgcgtgtgtatgtgtataatcctacttaatatagcttgtgcttcttgtatctgtggattcagatctttcatcagttctaaagaatgtgaggccattgtctccttgacaattgcctcttctccatcttatcttttcttccttctggaattctttttagaattgtcaagcctccctgttctctctcccatgtctcataactgcctctggtccccatgggtcttcctctgctccagactcatacaatttctagtttataccactaaagttgaatatagacacgatttcttctgttatttcatgttcaatctggtctccctaactaaactcgaagccccttgagtatagcacccctgtcttatgtaccatttgtattctcrtggcacttggctcaattcctgatatgatgagtagtcagtgaacaccttattgatagaggcctattatttcatgttcccaaattgtcccctagcttgagacttacacacatgatctcttgggagccagatgtgtgctttgggccaggacatgcccgttgtctctctataagccctgagagcttatagtgctttgtgcaacgtgcctcagctgacttccttggattgtacct

SEQ ID NO: 426273 - DNA, 471 bp, Homo sapiens
gcctgggtgacagagtgagactccgtctcaaaaacaaaacaaaacaaaacgcttccttcgattttgccgtcttggcgcctctattgcctcctcttatcctggctgtcacacagccaatgtgttgctgatttcagttaagaaagcctctaatgcggtggttcgcaaacttcagtgagcatcakaatcacctggagggctggttaaagcggggtttgtcaaaacagaaatcgccagtctcagccccagagctactaatggaataggtctggggtggagcccaagaatgtgcatttctagtgagttcttaggtgatgctgatgctgcctgtccagggacagccctttgaaaaccactagcatagagacctgcagagtggcccagaactctcttgagggtggctcagggaagttccaggagcagcagctccccttccccaaggccaggctgatgctgcattggttttttctgttc

SEQ ID NO: 426274 - DNA, 547 bp, Homo sapiens
ctgtggtgcgtggggtatggagagaattctggatttggagactggagatctggccagaggtctctgaatgggtgacccattccctggtcctttctccctgagcttatcttctggatagactgttgtctttctgggactgttaaatattctcaataaaactcaacatgctctccaaaatgttaggttgatgatgcttttgtagccttatccatttacttattctgtccctgtaaacaggagtcatagatttaaggccatgtgactctacttagttcagtatggacctctcagatgtgctatccaagaagcagcaaactagggcacccagggaacaccagaactgtcttgtccattagtttagcttttttgttttatttttggtcacatgcaacagaaacccctttgactagcttgggcaaagaaraaaaggacagtaatttgttagaaggtccatgggagtacctcggaaatcaaaggaaggcttgaacaactaagatttggaatgaaatggggttacccctgatagtttagtagcaggagtgtccgg

SEQ ID NO: 426275 - DNA, 604 bp, Homo sapiens
atagttaatcttgacatcatccctatgagggaggtcctattatggtcttcctactacagatggagaaactgagcctcagcatattaagcactctgcctgagttcatgtgagtggtagagccagaatttgactggttctaaggtgatgtcaccccagggtctacacttacctaccactttgtcacagcaggtctggaggcaggtgttctgggtttgacgggagttcagtgtcaggatgcaagagtcagtgtgtctgattccctgggcctccccttcatggctccatgccctsctccactacacgacttctagagcaggaggctaggggtgaggggtggggcacaagcactcttcctcatgctgccctcacctctaatcaggcaggacagtgtcttccagaaacacccagagagttcccctaacatctcatggaccagagtggggtcttgtggcgcctcacatcaatgctgacaagaaaatggagtgaccgtgagtgaatgatttcagttgaaccagttctcattcctagggactaaatgtgttgccacctgaatgaaactggtttccgtcatctgcaagaaagagggctgaatggtgggtagaac

SEQ ID NO: 426276 - DNA, 622 bp, Homo sapiens
ttttgcagctcagatttgtaccacctaagttggccagggaaattcaaatcttgattttggattaaggtgagatttccagacacatatcctctataaacaatttttcaatcataatagccagcacacagtcaaaaataactaaatatacttagaaatcagatacaatgaggaacccacagatgtaacagacccatagatttcagatattggtattattagatacagactacgaaaaactatgcttgctatgattaaagaaataaaagatcagtcctgcagggaacaggaaaccataaaaaatgacatagcagatttgaaaatcaaatggaattcttagaactgaaaaatacaataatcaaagtaaagaatgatgttggtttttgaggtttctgagatagagcagttgctagtgttgatatccaaagtgtggccagtgggagtttgcagctgaagtggagtggaggagtcattcaagggagttgaagtgatgcagaaactgggaggctaaagggttggggggatttttcacgtggcctgtgaagtcatccaaaattatggtaggacttggggcrgggagacaggtgcccgagatatcactggatgaggggaagtttagcagaca

SEQ ID NO: 426277 - DNA, 537 bp, Homo sapiens
tcaaatcctgttggtgctaagatgctaccctgtgcctcaagggacacgaagcttggacacaggacagaggtggggcgggagccagggaaggtgaggggctgaactggagcagcaaccagggtggtggtgggggatgggatgagagaatttcttaagattgtttcttggacagactgaagataatgaataaattttgccccagaaaaaagaggaaggaaagaaggaaggaaggaaggaaagaaagaagggagggatgagggaaggaaagaagggagggatgagggaagaaaggaaggaaggaaggaaagaagggargaagggaagggatgagggaaggaaggaaggaaagaaaaagaaaaactaaaaatcagactataatgtttaattattgttatggtttagaaataattgtcatttctgattttggaggcccagtatgcatacattccaatagatctgtcattgtcacagcatttgcatttacagctgcttctgtctggaatctctgtagttctggtggtctccaggaacaaagtg

SEQ ID NO: 426278 - DNA, 606 bp, Homo sapiens
gacattggcattttgatagagattacattgaagctttagattgatttgcgcagtatggtcattttaacaaaattaattcttttgatccatgagcatgggatatctttccatttgtttgtgccctcttcaatttctttcatcagtgttttctggttttccttatagagatctttcacctccttgcttaaatttattcatatatatatatatatatttttttttttttgtagctcttgtaaatgggattgccctcttgatttctattttggctatttaattgttggtgtatagaaactrctgatttttgtatgttgattttgtatcctgcaattttactgaatttgtttatgagttctaagagttttctggtggagtcatctgttttttctagatataagatcttgccacccacaaagagagaaaagttgacttgctcttttccaattttgatgctgttgatttttcttgcctgattgctttggttaggacttccagtactatgttaaataggagtggtgaaagtgggcatccttgttttgttccatttcttagaggaaaggcttttgactttttcctattcagtatgatgttagctgtgagtttgtc

SEQ ID NO: 426279 - DNA, 606 bp, Homo sapiens
gacattggcattttgatagagattacattgaagctttagattgatttgcgcagtatggtcattttaacaaaattaattcttttgatccatgagcatgggatatctttccatttgtttgtgccctcttcaatttctttcatcagtgttttctggttttccttatagagatctttcacctccttgcttaaatttattcatatatatatatatatatttttttttttttgtagctcttgtaaatgggattgccctcttgatttctattttggctatttaattgttggtgtatagaaactactgatttttgtatgttgattttgtatcctgcaattttactgaatttgtttatgagttctaagagttttctggtggagtcatctgttttttctagatataagatcttgccacccacaaagagagaaaagttgacttgctcttttccaattttgatgctgttgatttttcttgcctgattgctttggttaggacttccagtactatgttaaataggagtggtgaaagtgggcatccttgttttgttccatttcttagaggaaaggctttygactttttcctattcagtatgatgttagctgtgagtttgtc

SEQ ID NO: 426280 - DNA, 371 bp, Homo sapiens
cctgtaatcccagctactcgggagtctgagggaggcaggagaattgtttgaacccaggaggcagaggttgcagtgagtcaagatcacaccattgcactccagcatgggtgacagaatgagactatgtctcaaaaaattaaatacaaaattataaaacaaaagtgcaaaatgtttgtctttatgactaataatttttaatatttaaagttgattcttggtcctcaataatatatattccacaaacccctagatttcagtttaagaaacactagattatgttatytataaagtcaagggtcatcaagtaagctaatagtgtaaacgagactgaagatcaccttaaactacttgagagaacaaatatacacaca

SEQ ID NO: 426281 - DNA, 371 bp, Homo sapiens
cctgtaatcccagctactcgggagtctgagggaggcaggagaattgtttgaacccaggaggcagaggttgcagtgagtcaagatcacaccattgcactccagcatgggtgacagaatgagactatgtctcaaaaaattaaatacaaaattataaaacaaaagtgcaaaatgtttgtctttatgactaataatttttaatatttaaagttgattcttggtcctcaataatatatattccacaaacccctagatttcagtttaagaaacactagattatgttatttataaagtcaagggtcatcaagtaagctaatagtgtaaacgagactgamgatcaccttaaactacttgagagaacaaatatacacaca

SEQ ID NO: 426282 - DNA, 502 bp, Homo sapiens
aaatgaatcacaacacagggaaactgaatgatgtttatagtccatctaactatagtggtttaaaaaaagaaccaaatagttattttcagccacatgctgtaattactgtaaagtatttttaaaagttcgccttgaacactcactgcaaataccattttctgctacttcagcttacttctcccacgtgccatgagaagtctaccattagccaacttgactaaaagccactaaatactggttttagtagatagcttaatgactgatttggtggaaattactttgcagaaataacaatttccaattaattmtttgaatttagtttaatgttgtgggtgtattttaaaatagcacctaatatactctcattacctgttttgcaacagggagtaagtacacagacaatcattaaggagacttcaaaaaaaaacacagcaatctttcattactcaggagaaaatttatagatcccgctgaaccgttaaagatcaattgttttatacag

SEQ ID NO: 426283 - DNA, 459 bp, Homo sapiens
agggacgattgttaatagggttctccaatttagcattcaagggcagtaagaagaggtaataattatccaatacctggaactgttaataatttgttactttaagattaaaaaactagtttaaaatttcgacacactagggaaaaaaattcaacacactataaagtgttcttatataaasatatgtacacatatcatgcctaagtagaatgaacaacagagaagggataatttttcaaaccctactttaaaggcaaaaaaggtacttagactgtgtgtatttgggggcagaaaggatatggaaaatctctgtaccttctcaattttgctatgaaccgaaactgctctaaaaaatagtctattttccaaaaagatacctaaaattatatatatattttacaactgccgaagtgcagaaaggtgttataattatcttcccattatttttaaaaagcaaatgtt

SEQ ID NO: 426284 - DNA, 459 bp, Homo sapiens
agggacgattgttaatagggttctccaatttagcattcaagggcagtaagaagaggtaataattatccaatacctggaactgttaataatttgttactttaagattaaaaaactagtttaaaatttcgacacactagggaaaaaaattcaacacactataaagtgttcttatataaagatatgtacacatatcatgcctaagtagaatgaacaacagagaagggataatttttcaaaccctactttaaaggcaaaaaaggtacttagactgtgtgtatttgggggcagaaaggatatggaaaatctctgtaccttctcaattttgctatgaaccgaaactgctctaaaaaatagtctattttccaaaaagatacctaaaatyatatatatattttacaactgccgaagtgcagaaaggtgttataattatcttcccattatttttaaaaagcaaatgtt

SEQ ID NO: 426285 - DNA, 617 bp, Homo sapiens
caagttaataatgacatacagggaataaaggtattatccttttctgggggaaaagggaaagcaaattgggagacagggtgggaagaagaggaaagagggaataatgccctgggctagtttagaagataagagcaaaggcccttaagcttactaggaaggacctaatttttgttgaagcctttcacatactaggccttttgcatatattatgttactcattcctcagaaaccccartgaggtggggatcattgtccccaatttactgatgaggaaatagatgcccagtgaggttaataagagtacagcatcacacagatggggtgtggtacagtgttagctttgcccctagagagatctgacttttgtccttggctcctgggaggtcatctctgagtccttggttatctcacctgataagagtatctttatctacctgggggtcttgggcaaaaccaggtagtctatactaacaatgatggatggtggggtctttgggcatgcatcggctcaacctccagaggggctagaaactaaggtcaaccacttggatggtcagccatgactacatgactgagccccaataaaatccctggacactaaggattggaagaacttc

SEQ ID NO: 426286 - DNA, 617 bp, Homo sapiens
caagttaataatgacatacagggaataaaggtattatccttttctgggggaaaagggaaagcaaattgggagacagggtgggaagaagaggaaagagggaataatgccctgggctagtttagaagataagagcaaaggcccttaagcttactaggaaggacctaatttttgttgaagcctttcacatactaggccttttgcatatattatgttactcattcctcagaaaccccagtgaggtggggatcattgtccccaatttactgatgaggaaatagatgcccagtgaggttaataagagtacagcatcacacagatggggtgtggtacagtgttagctttgcccctagagagatctgacttttgtccttggctcctgggaggtcatctctgagtccttggttatctcacctgataagagtatctttatctacctgggggtcttgggcaaaaccaggtagtctatactaacaatgatggatggtggggtctttgggcatgcatcggctcaacctccagaggggctagaaactaaggtcaacyacttggatggtcagccatgactacatgactgagccccaataaaatccctggacactaaggattggaagaacttc

SEQ ID NO: 426287 - DNA, 471 bp, Homo sapiens
tatcctgtgttgaggctcaccccttccttgtaactactgtttaagatcggctttctagaaagttctctggagacaactccaacacaccctacctctagcccttatgcttgaccttcagcccttatccatggcctccagcagctatacacgggttttcccaaacttgactcatatgtaggcrtattccaaaggaaagaatacctcccagactcccatgagcatacctgagaaccccgggcgtctatataccccagtgtgagagacactatcctaagaaaccaaaatccacttttatgaaaaacatctttcaatttcaaattagaattgcaaaagagaagttttgtcttttaactggtaaaataatagaaaagcacatggtaaacattctcccagaattcagtgagaaacactgagctacagttttcacttattcatcaaatatttaccgagggcctcacaggtgccaggcaa

SEQ ID NO: 426288 - DNA, 524 bp, Homo sapiens
tgacagcccaggaaggagggttattgttttaaaaattattttcttagtcctcaaagaactggaacaaagcaggattgtgctggctgcctcccctgctagaattcacattctagacccgtctaaatgccagtctaaatgctactcagaatacaattactaaacccaacaagcagcagccacaggcgggggctgcaatgttccccctcccactgattttgcgscagcttcaggcgatgcacctcagttctctgcattcagcttttctgaattaccgcaccccacttcctctcctccagattgttccttttggccttctccatgccatctcttccaggccagagagtgggcaaagctgttcgcagctcagaagctcctaaacaaaataatctcaaggaatccaatagattggacactgatcccctttgcagaacaaattcccttcattctcaacctcttacaggttggggaggaaagtagaaacctgaagaaggcacccaagactgaggatcctatatctctaagaa

SEQ ID NO: 426289 - DNA, 524 bp, Homo sapiens
tgacagcccaggaaggagggttattgttttaaaaattattttcttagtcctcaaagaactggaacaaagcaggattgtgctggctgcctcccctgctagaattcacattctagacccgtctaaatgccagtctaaatgctactcagaatacaattactaaacccaacaagcagcagccacaggcgggggctgcaatgttccccctcccactgattttgcgccagcttcaggcgatgcacctcagttctctgcattcagcttttctgaattaccgcaccccacttcctctcctccagattgttccttttggccttctccatgccatctcttccaggccagagagtgggcaaagctgttcgcagctcagaagctcctaaacaaaataatctcaaggaatccaatagattggacactgatcccctttgcagaacaaattcccttcattctcaacctcytacaggttggggaggaaagtagaaacctgaagaaggcacccaagactgaggatcctatatctctaagaa

SEQ ID NO: 426290 - DNA, 623 bp, Homo sapiens
  misc_feature (1)...(623): n = A,T,C or G
actttctttgtaatgaggagaggtcaagtgactctgggcaagggctgtaaatctgagtaatgcatatcacctctggaccaaagcatgtaagagtctgtatggaaactgcctggatcctgagtcactgccgcagccagctttcccagagtcactcaacttgctggaagcagactttacaagcacaagaagcaagtatttgttttatcatatcactgagatttcaggcctattttgttggcacaacmaagcctagtcgccatgactagtatggcatctttgtaatagtcctttaanaatgtccatttgtcttgtgtaattgtaattatgttctctggagcccgacagcatgcttcctaagaaggaatgtcaaacccatcaaaagtcttctctttaaaagcaaagaacaaggggatgttcttcagggatagtagaactactgagtactcaggggcctgaatctagaagcctccttttctcccactgtccttgccatatactctggttcatctcagagctgctgcagcaaaaggcaagcttaggagagaaacagcatatccttaattcctgggcatgctgagccaaggctgctgaaagtaatgagaatgctatatgcttgatatggg

SEQ ID NO: 426291 - DNA, 623 bp, Homo sapiens
  misc_feature (1)...(623): n = A,T,C or G
actttctttgtaatgaggagaggtcaagtgactctgggcaagggctgtaaatctgagtaatgcatatcacctctggaccaaagcatgtaagagtctgtatggaaactgcctggatcctgagtcactgccgcagccagctttcccagagtcactcaacttgctggaagcagactttacaagcacaagaagcaagtatttgttttatcatatcactgagatttcaggcctattttgttggcacaaccaagcctagtcgccatgactagtatggcatctttgtaatagtcctttaanaatgtccayttgtcttgtgtaattgtaattatgttctctggagcccgacagcatgcttcctaagaaggaatgtcaaacccatcaaaagtcttctctttaaaagcaaagaacaaggggatgttcttcagggatagtagaactactgagtactcaggggcctgaatctagaagcctccttttctcccactgtccttgccatatactctggttcatctcagagctgctgcagcaaaaggcaagcttaggagagaaacagcatatccttaattcctgggcatgctgagccaaggctgctgaaagtaatgagaatgctatatgcttgatatggg

SEQ ID NO: 426292 - DNA, 623 bp, Homo sapiens
  misc_feature (1)...(623): n = A,T,C or G
actttctttgtaatgaggagaggtcaagtgactctgggcaagggctgtaaatctgagtaatgcatatcacctctggaccaaagcatgtaagagtctgtatggaaactgcctggatcctgagtcactgccgcagccagctttcccagagtcactcaacttgctggaagcagactttacaagcacaagaagcaagtatttgttttatcatatcactgagatttcaggcctattttgttggcacaaccaagcctagtcgccatgactagtatggcatctttgtaatagtcctttaanaatgtccatttgtcttgtgtaattgtaattatgttctctggagcccgacagcatgcttcctaagaaggaatgtcaaacccatcaaaagtcttctctttaaaagcaaagaacaaggggatgttcttcagggatagtagaactactgagtactcaggggcctgaatctagaagcctccttttctcccactgtccttgccatrtactctggttcatctcagagctgctgcagcaaaaggcaagcttaggagagaaacagcatatccttaattcctgggcatgctgagccaaggctgctgaaagtaatgagaatgctatatgcttgatatggg

SEQ ID NO: 426293 - DNA, 515 bp, Homo sapiens
gtttcccctcttctataaaagagattttattgaattggtgttaattctttaataatttggtagaattctctagagaaaccatctggcctgaaggtttccttttttgaatatttttaaattattaatttcattttcttaattataaagcaattcagattatctgttacatattgggaaatgtggcagtttgtgttttttgagaacttggttcatttcacctaagctttaaaagttatgtgtgtagagttttcatggtagtttcttatagccctgcaggggctattaagtctgcaggggctacagtggcatccctcattcattcttgagattgataattgagtcattcctatttttttgtgtttttcatttttgctaaaggactgtcaattgaagtgattttttcaaagaarcggcttgttgtttcattgctttttccctattgtgtttgttctctgttttattgatttctgctctttattatttccttccttctgcttgcttttaggttttggggt

SEQ ID NO: 426294 - DNA, 515 bp, Homo sapiens
gtttcccctcttctataaaagagattttattgaattggtgttaattctttaataatttggtagaattctctagagaaaccatctggcctgaaggtttccttttttgaatatttttaaattattaatttcattttcttaattataaagcaattcagattatctgttacatattgggaaatgtggcagtttgtgttttttgagaacttggttcatttcacctaagctttaaaagttatgtgtgtagagttttcatggtagtttcttatagccctgcaggggctattaagtctgcaggggctacagtggcatccctcattcattcttgagattgataattgagtcattcctatttttttgtgtttttcatttttgctaaaggactgtcaattgaagtgattttttcaaagaaacrgcttgttgtttcattgctttttccctattgtgtttgttctctgttttattgatttctgctctttattatttccttccttctgcttgcttttaggttttggggt

SEQ ID NO: 426295 - DNA, 625 bp, Homo sapiens
tgttttcttctgtgattataatatttgatggtgagtagctcttcagtggagattacctcctatgggattcccatgtgccctgggctttggaagtgtccagaagtgtccacttctcacaaggcatctgtagggccccacaaggttcaaatgcttctggctggtttaaattttgatttctcagctgaggttcctgaccatgtaagtagtaggaacttagaactcaagcccatcacttggttcatgatgccaatttattcataatggctatcattacctgatacaatttggatttgcgtccccacccaaatctcatgtcaaattgtaacccccagtgttggaggagaggyctggtggaaggtgattggatcataggggcagatttgctgttctcatgatagtgagtgagttctcatgagatctggttgtttagaagtgtgtagcacctttccattctctgtttctcctgctccgtccatgtgaagacatgcctgcttccttttccctttctgccgtgattgaaagtttcctgaggcctccccagctacgctacctgcacagcctgcagaactgtgagccagttaaacctcttttctttataacttacccagtttcaggtatttcttta

SEQ ID NO: 426296 - DNA, 620 bp, Homo sapiens
catgtacatattgtggaaatatcaaatcaggctaattagtgtatccatcacttcaaatatttaacatctttgtggtaagattttctcttttctcacatcagttttggtaagttgtgttttccatttcatctaagttgtcgagttaattggcatagctgtttataatagtttcttaatatctttttaatgtttgcgggatctgtcaggacatatattctttttggtaatttatcttttctctctttaacttgtttagtattataaagggtccaaacattttattactctttccaaagacataacttttggatttaatttttatcctacttttgtctgtttcctatttcactaattacttctcttataatttctgtaaggtaataaaattaatttccttggtcacttcctgttcctcccacctcccagtacctgrcaaccactgatctactttatatttctatgaatttgattattctggacattttattttatagtcacagaatatgtgccttttctttccctcaacatgttttcagagttcattgacattgtagcatatactagtacttcctttctttttattgccaaattatattccattttatgaatagaccacactt

SEQ ID NO: 426297 - DNA, 534 bp, Homo sapiens
taagccaggaaacttcagattcctccatccccagccactgcgtaactgcaaccaygtgagaaaccccaagtgaggaacacctggagagctccagccaacccccaggactcgtgagaaataataattaataataataggctgggtgcagtggctcatgcctgtaatcccagcactttgggaggccgaggcgggtggatcatctgaggtcaggagtttgagaccagcctggccaacatggcaaaacactgtctctactaaaaatacaaaaattagccaggagtggtgaggcatgcctgtaatcccagctactcgggagcctgccacaggagaattgcttgaacccaggaacccaagagggggaggttgcagtgagccaagctcacaccactgcactccagcctcggtgacagagcaagactctgtctcaataataataataaatgactggtattatttcataccactaagctagggttggcttattatgcaaacaaccagcaactctgtacaatgagccaggcataggagacacga

SEQ ID NO: 426298 - DNA, 507 bp, Homo sapiens
ggtgctatggtggcactgtttggtggttgcaagggatgcttctgagacagctgcctgcctctgactctcccttatcccccctgagtctcagctatctcatccgtgaaatgggcatttgcaggtgctgttgtgagcactgaatgtggtagcagatggaacttagtaagagcttgatgaactcaggccactgctaccagagtagcaaatggacagaaccagggcagctgccctgaggcccagctgggtgccaaggcaacaggatggacagggagacagcaaagctctaagctgtactcagggagagcaatgcctgcagggtccatcagagggggcttcctggggagggtcctgcagtcagcagcgttcctggagggagcacggggcaggggcggggatcatacgatgggagggtgaacacacctaaagggctgggttagagagtccgcrgcaatgggtaaaggagcagaaggtggagataccagggtcaggccagatcagcgagggccc

SEQ ID NO: 426299 - DNA, 570 bp, Homo sapiens
cattccagttactctcaatgacgtctccaggctccatcccatcaggaccatggtctctggaatcctgactcacagacatgatccttagaaactctaaaactatttttataatkgtctaaataaagatcttccacaacttctgttagatttattagtaggcatctttttattgctattttaaatagcattgttttaaaagtagagttttcggccaggtgcgggggctcatgcctgtaatcccagaattttgggaggccaaggcaggcagatcacgaggtcaggagttcaagaccagcctggccaatatggtgaaaccctgtctgtactaaaaaatacaaaaattagccaggcgcagtggcccacaactgtagtcccacgtactcagcaggctgaggcaggagagttgcttgaacccgggaggtagaggttgcaatgagccgagattgtgccactacactccagcctggtgacagagtgagattccatttccaaaaaaaaaaaaaaaaaagtagagttttcaaactgttactggtttactgaaatgcaatagaattttatatattgatttta

SEQ ID NO: 426300 - DNA, 593 bp, Homo sapiens
ttgttcttttaggatgttattgttagctgcatctakctccaagaagcctgattcactagataagaagtattattttagagtaatataagccatttcttaatgtttgctaataattacctaactgaagtgaaggggaaataaaaacaagtttcagtttctgaatggacatttattacacaaactatttgtcatgattgtcacatgtaggataaaagttaaaattatggtaaatatgttcatatactatgtaaagtcaaaataatttttactggtccaaataagttggtcatataatgtatatgtagagtaaattctttcttaatttggagtattactaaacatttttaccctagctgagacgaagcgtatgtaaatatgtcttctgcatatttttgaagagaaagttagaagaaaatgaagaaaatattgtcaaattctcaatgaaaataaatgaatgagtcataggcctgcttctgatagacaaaatgacgcaccagaaatgtctataacctaattagggaataaaacaaatatcatatataagtaataacatcttgagactcaactggtccctcaaatgtgaatgttcaagt

SEQ ID NO: 426301 - DNA, 593 bp, Homo sapiens
ttgttcttttaggatgttattgttagctgcatctatctccaagaagcctgattcactagataagaagtattattttagagtaatataagccatttcttaatgtttgctaataattacctaactgaagtgaaggggaaataaaaacaagtttcagtttctgaatggacakttattacacaaactatttgtcatgattgtcacatgtaggataaaagttaaaattatggtaaatatgttcatatactatgtaaagtcaaaataatttttactggtccaaataagttggtcatataatgtatatgtagagtaaattctttcttaatttggagtattactaaacatttttaccctagctgagacgaagcgtatgtaaatatgtcttctgcatatttttgaagagaaagttagaagaaaatgaagaaaatattgtcaaattctcaatgaaaataaatgaatgagtcataggcctgcttctgatagacaaaatgacgcaccagaaatgtctataacctaattagggaataaaacaaatatcatatataagtaataacatcttgagactcaactggtccctcaaatgtgaatgttcaagt

SEQ ID NO: 426302 - DNA, 593 bp, Homo sapiens
ttgttcttttaggatgttattgttagctgcatctatctccaagaagcctgattcactagataagaagtattattttagagtaatataagccatttcttaatgtttgctaataattacctaactgaagtgaaggggaaataaaaacaagtttcagtttctgaatggacatttattacacaaactatttgtcatgattgtcacatgtaggataaaagttaaaattatggtaaatatgttcatatactatgtaaagtcaaaataatttttactggtccaaataagttggtcatataatgtatatgtagagtaaattctttcttaatttggagtattactaaacatttttaccctagctgagacgaagcgtatgtaaatatgtcttctgcatatttttgaagagaaagttagaagaaaatgaagaaaatattgtcaaattctcaatgaaaataaatgaatgagtcataggcctgcttctgatrgacaaaatgacgcaccagaaatgtctataacctaattagggaataaaacaaatatcatatataagtaataacatcttgagactcaactggtccctcaaatgtgaatgttcaagt

SEQ ID NO: 426303 - DNA, 591 bp, Homo sapiens
gatggacttacaaaataatgctggttaaaaatggttaaataaaaatgtaataatgtagaattgaacatatcccttctttaagtattcttaaaaattacagttggaaatgagttttagtaaaatatattttattcacttatacatgaacaactttcaaagaagagtaatttggtggggtcctccatcttattaaacagattgaaaatcaagtactagatagattttttaaagagagtttaaaaaataaaacttgatttatcaatattgtttaatgttcgtggttacaattgatggttgaattaataaacggttcttagaaaatttaagactactaaaaccrattatatgtgcatttttttcatgttttagtgtgaaatacggagaaggtgccaaatgaaaaagcatcacaatgccaatcttgggatttatttaccaggccttttctgacgtcaatatatcaatatagtcacattttcgagcgcatattccatagcagttactttacctacatcatcttgtttagttcccacagcagtggcaacaggaaggtgatattatctctgttatatgaatgggaaggctgaaagagaa

SEQ ID NO: 426304 - DNA, 666 bp, Homo sapiens
gcatttttttcatgttttagtgtgaaatacggagaaggtgccaaatgaaaaagcatcacaatgccaatcttgggatttatttaccaggccttttctgacgtcaatatatcaatatagtcacattttcgagcgcatattccatagcagttactttacctacatcatcttgtttagttcccacagcagtggcaacaggaaggtgatattatctctgttatatgaatgggaaggctgaaagagaagctaagtaatgtatttaagttacagaaatagtaagtggaaaacctggattttgaattcaattctgactccaaagtatagatgggaaagcgtgaccagtgatcccagatcattaggaaacactgttgyctgcatagccactagcccccaagctctcctcctagggggagcccagctagtaaggcagttctatatgggtgttagccaggtagacgttggcaggatccatttttatccagacccaaggccttatcttatttttcaggtagtctatggctgcccagaaatgcctcagcacggccctgggtttgagttttttgaaatatttattctgtcaatactaactcaaggtcactggtggaaaaatagagggtaggttcttcatttcataaagtattccactaatatagtaagtaaggccaggaa

SEQ ID NO: 426305 - DNA, 588 bp, Homo sapiens
tctcctaattggttttattgattactgttgatgcagcattgcatcattgtagataaagcacacacacagatatacatgtctgcctgcgtgcrtgtaggtacacatatgccctccaaaaaattgcttatctgaggctgtaggaaaggatctattatatttttcaactcttccttcatccctaagtgacaggaaagaagggatttcctttccactcagattccccgctgttaaaagcattaatgttttctttttggagccttttgctgcctctcattatgtttttctccattgcggagttggagtcacactatgagaaaatctgaatattagaacacaaagtctgcggatatgacccataggcttgctgaggagtgatctaatagccagggagtgatggtaggtgagaggtgaaatgtacagagtggggggcatagaagagggagctatggagttcaggcaaacgcaatgcaaaagccacagcaccttagtgtgagtgccatcatctgaaactgtccttggtggtatgggaagcgttgatttggggcaagaaaaaggcaagatatttatttgatactgacttgatgatat

SEQ ID NO: 426306 - DNA, 588 bp, Homo sapiens
tctcctaattggttttattgattactgttgatgcagcattgcatcattgtagataaagcacacacacagatatacatgtctgcctgcgtgcatgtaggtacacatatgccctccaaaaaattgcttatctgaggctgtaggaaaggatctattatatttttcaactcttccttcatccctaagtgacaggaaagaagggatttcctttccactcagattccccgctgttaaaagcattaatgttttctttttggagccttttgctgcctctcattatgtttttctccattgcggagttggagtcacactatgagaaaatctgaatattagaacacaaagtctgcggatatgacccataggcttgctgaggagtgatctaatagccagggagtgatggtaggtgagaggtgaaatgtacagagtggggggcatagaagagggagctatggagttcaggcaaaygcaatgcaaaagccacagcaccttagtgtgagtgccatcatctgaaactgtccttggtggtatgggaagcgttgatttggggcaagaaaaaggcaagatatttatttgatactgacttgatgatat

SEQ ID NO: 426307 - DNA, 604 bp, Homo sapiens
cctttggggccaatgagcaagtcccataggcttgtcccttgataactttatatcggtgtaattaattctcatcttaaatctttttacctgctgtcagccaagaaatarctaggaaagctgattttccaaaagcttgtggatcttagatgagaaaaatgatgagtataatgttgaggctcatgtaccatccttttttctaattacacagcctgttctctgaaatatctttccgtcgcatccatcagggatgccctcaacatcagagggagaagtgcatggctgtgcaaaagtgaggatttaaagtcccaagacagaagacaccaggacatgttttctctcttatcataagacatgtacttgatttatcatgtatcttcaaaactattctaaaattccatattataataactttgggaatgaatgagtatcattgctagaaaataggagataccttcttgtctgatgctggaaataaaactaagctgacgattgctgatgcagttattttgaagtaacttgaaagattcaatttcacatcctcaaattttaagtacaaaattacgccatataattcatttttatttacttgtaatttaagtttact

SEQ ID NO: 426308 - DNA, 549 bp, Homo sapiens
ctgcacactttttaaagtaatattttctatggctgctttcacattacaacagcagagtgaggagttgcaagagacttgatactccaaagcccaaaatctatactgtctctttagaaaaaaaaawaaaattgtcaacatctgcattgagcatatactgaatatgcagtaaatatataattaattgttttagatcatattttccaaacgcagcatagctctccttatagaccctaagactctatatggttcctcatagctttccttgtagacaaagaccttgtgttttcagaacttgtgttctgttcaggtttcaatcacgtgaagaaaagaattattcatttagcatcaataacagcagatgccaaaatagcgatttgagatagctttcaagtttgtgctctttgagagccagcttcgaggtagctgtccctcactcagacacctgcttgcgggcacccagttttgatattccttttaaagagaatgtctgagcattatctcacgttttctaaaacagtttaacagtccctcctccaggcagattcatta

SEQ ID NO: 426309 - DNA, 508 bp, Homo sapiens
gttacaggcacagcctaatctgtgaaggtaagcggaagcagcctaatctgtgtcaggggaaaaggatacaaaaagcctgtcagtgacgaaattaggaattttgtatgtcactggggacattcacaccagctgtagaaccagctgaggtaataaacattaaataatattcatgaagagctattttccacataggtttgcagtagacccactcaattacctgggcgttgtcacgtcatmtgactattttcatgctgacctcttcccatgcttttctattaatgtgtgagacatggtcattggacttaaaaatgtacacattatatggcatctttatttatatgtgttatatatcattaaatatatacatatatgcacatatatacatgcacacattcacataaaatagactgaagtataaacagtgtttatcagtaggtggtgggttgtagccctttatgttttttattctttgcacttttccctgacttttcacaaggagcatgtgcaa

SEQ ID NO: 426310 - DNA, 579 bp, Homo sapiens
gcaaactaagtaaatgcaaagacaaacagctttgctattcaaagtatggtccccagaccaacagcattgccattggtcagtaacttgttagaaacacaaattctcgatcttgttcaacccaccaaatcagactccccattttaacaagctttccaagtgactcatatgcatattagtatttgagcagatctaactcagagtcatccattttggcctattatgattagagctcatcttttccatccaccctaatttctcataaccagaaaatcatttcccataggcaatctttatccatttacacaggcctactatttgcaaacacatatgagactcaactctagaggatgtgtggcatgacttaaggaaaccattgtcactctcttaatccacgttatatatgatcacatgtgygttcaaaggcagttactttcttatccatctgactatgacaagaaaaaaaaattggtgaagaacatggaatgaaagggccaaatgggtccaaaataatgaactaaaatagagtaaataaatatagtaaatagtataggaaaataacgatttaaaatataataaaat

SEQ ID NO: 426311 - DNA, 579 bp, Homo sapiens
gcaaactaagtaaatgcaaagacaaacagctttgctattcaaagtatggtccccagaccaacagcattgccattggtcagtaacttgttagaaacacaaattctcgatcttgttcaacccaccaaatcagactccccattttaacaagctttccaagtgactcatatgcatattagtatttgagcagatctaactcagagtcatccattttggcctattatgattagagctcatcttttccatccaccctaatttctcataaccagaaaatcatttcccataggcaatctttatccatttacacaggcctactatttgcaaacacatatgagactcaactctagaggatgtgtggcatgacttaaggaaaccattgtcactctcttaatccacgttatatatgatcacatgtgcgttcaaaggcagttactttcttatccatcygactatgacaagaaaaaaaaattggtgaagaacatggaatgaaagggccaaatgggtccaaaataatgaactaaaatagagtaaataaatatagtaaatagtataggaaaataacgatttaaaatataataaaat

SEQ ID NO: 426312 - DNA, 539 bp, Homo sapiens
cttgggaccacgctgtgcctattttacccttgatattcggctacagctaaaatcatatcaaaaaaagtcatatcgattaccctgctatattggcaataacaagatatagtcgaccaataaaattggaaaaatataagagcaagacactgcaaacggcatataaacatattcagggaaaagaaaactaaaacaacaataagataacttgatttttgtccttgaggtaggcaaaaattagcaattgaaaaaatgtgcaactgtccagtttcatcaagtttgtgagaaattggatattgaaaaagggaaatataaatcaatctctctctttccctctctctctctctatttcagtctctctctcacacacacacccacatacacaacsttgaaaggctgtgcagaagcagcactattactttatcttcaaaggttatttccaactccaatgtatcaatctaaagagtaaatttgaaaccttgttttgaaataataagagaagttgaatgtagatttatcataaatgattttaaatgcagtgc

SEQ ID NO: 426313 - DNA, 601 bp, Homo sapiens
gttttggtccttgcagtaataaatgagttctcactctgagttcatgtgagatctagttgtttaaaataaccttggctgggtgcggtggcttacgcctgtaaccccaatactttgagaggccaaggcgggcagatcacttgagaccagtagttctagaccaggctggacaacatgatgaaacctcgcctctactaaaaatacaaaaaaattagccaagcatggtggtgtgtgcctgtagtctcagcaactcaagaggctgaggtgggagaatcacctgagcccaggaagttgaggctgcagtgagtcgtgatcatgtcactgcactccatcttgggcaacggcagtcagactctgtctcaaacaaaacaaaacaaaaaaagagccagccacttcctcccttgcttgctcctgctcttgccatgtgacacgcctgctccccctttgccttccactatgattgtaagcttcctgaggcctcaccagaagccaagcagatgctagtgccatgcctctatttgcctgcagaactctgagtgcaaataagtctctttactttataaactacccagtctsacgtatccctttgtagcaacccaaaata

SEQ ID NO: 426314 - DNA, 565 bp, Homo sapiens
tcaccagattgaaatataatgtttagaaggcatcaggaaacttcaaaggcaggagtattttggctttaccaatgactaacagccagaaacactagactataccatttctttttttttgttatttttagtagagacggggattcaccgtgttagccaggatggtctcgatctcctgaccttgtgatccgcccacctcggcctcccaaagtgctgggattacaggcgtgagccactgcacccagcctagactataccgtttcttatccttcaatcccsagtaaccagaccagatgaagttgtttatttggtaacttacccacccatgataagtgacaactatgagctaagtgctggcacaggtagttatgaagacctaggcagtccaccccttcacaaaggtggatctaagcatgactccaaggcatggagcccactggccagattttccttacctccccttccactgaccatccttgtttctttcaactagtgagttctgtgctagcttcaggctctaggcatgcccttctcttctgtccataccaaggaattgtggatggaaagt

SEQ ID NO: 426315 - DNA, 475 bp, Homo sapiens
tttgagtagagctagcaatcacagggcctgagtgctgccactgcctacaccaaacatggcagacatggttcatcagttactgaccacttttggcctcacaattccttacacacaaccacaggcagcaactacagatttattgggttttcacacaaggtgaattctgcttgctcttcctaaactggaactttgaattagaatttagtggcatacgcctatatagttaagaaagggcatgatttttaacaattttaaatactttagaatgggtggttatcaaaatccttttttatgtttactcaacacttttttttctaattaaatgccaagttatatctatgtycaattacatattaacagttgtacttagtgacggcctcaaagttacttgactttgaaggatgattgtccttgagggaggacttgatcatgaggtttaaaaaaatggccatctctagcactgcatcagtatggg

SEQ ID NO: 426316 - DNA, 582 bp, Homo sapiens
cctgttattacactggacacacccaaataatccaggataatctcaccatgccacagtccctaacttaatcttgtatgcaaaggcccttttgccatgtcatgtaacacagtcacacacttcaggtataagaatgtaggtgctttcagggagccattgttctctccaccacagcaaagcaatcacatggacacataatcacaatacatcatggttaatgccatagcagcacttggctgcagaatattgtgatggtacaacccaggctgacttcatgcagctcaaggtgcaggagcaggaaaaacctgccagaggcaatcatggacagagaggtgatgacagggtgaataggaactagccatttgaaaagatgcagagactggctttcaatagcaggcagcccaygcagagaacaagcctctattaaaatcctaccatcctgcctcccacattactctcacaattaagtccttgtcactgtccagcctctgagaaaggatctggcatctactgcagggtcatgggtatggcatcttaactgcatgcatcatacccaacatccagtgaccagagtgatagttcacc

SEQ ID NO: 426317 - DNA, 567 bp, Homo sapiens
ggacacacccaaataatccaggataatctcaccatgccacagtccctaacttaatcttgtatgcaaaggcccttttgccatgtcatgtaacacagtcacacacttcaggtataagaatgtaggtgctttcagggagccattgttctctccaccacagcaaagcaatcacatggacacataatcacaatacatcatggttaatgccatagcagcacttggctgcagaatattgtgatggtacaacccaggctgacttcatgcagctcaaggtgcaggagcaggaaaaacctgccagaggcaatcatggacagagaggtgatgacagggtgaataggaactagccatttgaaaagatgcagagactggctttcaatagcaggcagcccacgcagagaacaagcctctattaaaatcctaccatcctgcctcccacattactctcacaattaagtccttgtcactgtccagcctctgagaaaggatctggcatctactgcaggrtcatgggtatggcatcttaactgcatgcatcatacccaacatccagtgaccagagtgatagttcac

SEQ ID NO: 426318 - DNA, 640 bp, Homo sapiens
attgtaacacaattttaagtatttgtgtacataaatatacctaaagatagaaaagtgacagtaaattatggcatagaagataaaaattggcacacctaaataggacacttactgaatgaaggttgcaacattggcagttgttcttggtaagtcagtgagtgagtgaatgtgaaggcctagggcataactgtacattaccttattctttataaagactgtacacttagactatgctaaattcataagacatttttcaagttatttattttttaataattttagcttactgtaagtttttcactttataaactttttcctatttaaaactttttgctcttctgtaataacatttagcttaaaacaaaaacacatttacagatgtaccaaaatattttctctatattcttatcctataagsttcttttcttgttgtttttttctttgttttacattttaaaatttttgttaaaaatgaagacacaaacacacacattagcctaggcctacacagggtcagaaccatcaagatatcactaggcaacaggaatttttcagcttcactaaaatattatgggatcaccattgtatatgaggtctgtcattaaccaaaacattattattgcagttcctgattgtattt

SEQ ID NO: 426319 - DNA, 584 bp, Homo sapiens
ctgatccttttaatctctcataataaaagcattcaccaaaggacaaagttcaaatctgttttcattttacaacaggtgcttcacagtcttagcctaatacacagttccaactccacacactctccagaattatttccacrtagtaactataccaaactaattattgtaacctgatcatagtcttttttcacatgtgtctgagagtttttccttagagcaaagttaactattcttctgctatccaactggaatatgccctctcaagctttcaaaacatcttttttatgatatcttctctgacctcttcaggaataattatcacacattatgctgttctaaaatgtccattcttcctggaattattagcatcataatattgtgctcatgtaattccctggtgaagctataatattaatgagagacattcaagtgtttatagaaagagaacaagttgagagttgcaaaaaggtaaatcacatacattatgtagacagagaaaccagaaaaaactggaagaagataaaagtatagaaaatgaaaacaagtatgtgataggaagtatgcttgtcagcatgtaacaatat

SEQ ID NO: 426320 - DNA, 584 bp, Homo sapiens
ctgatccttttaatctctcataataaaagcattcaccaaaggacaaagttcaaatctgttttcattttacaacaggtgcttcacagtcttagcctaatacacagttccaactccacacactctccagaattatttccacgtagtaactataccaaactaattattgtaacctgatcatagtcttttttcacatgtgtctgagagtttttccttagagcaaagttaactattcttctgctatccaactggaatatgccctctcaagctttcaaaacatcttttttatgatatcttctctgacctcttcaggaataattatcacacattatgctgttctaaaatgtccattcttcctggaattattagcatcataatattgtgctcatgtaattccctggtgwagctataatattaatgagagacattcaagtgtttatagaaagagaacaagttgagagttgcaaaaaggtaaatcacatacattatgtagacagagaaaccagaaaaaactggaagaagataaaagtatagaaaatgaaaacaagtatgtgataggaagtatgcttgtcagcatgtaacaatat

SEQ ID NO: 426321 - DNA, 607 bp, Homo sapiens
ttaaaattttaacatttattttaccaatcatctattgagtgaagaataggttaccgctaccagcagttcccagtgttctctaaaatgtgactccgatgggtcacttcttgagaaaaagctgagaaaatatgtttactatttctctgatgttcagtgtgcagacttttagcttgagtttcatgcgtgcccagagctgcctgcagactgccatcagcctcacctactgttatccccaaagcctccaaacccatctgtcttcaaaaaatactttggacttcctcccaggaggacatctccttacctgaaaaaggtacttcattccatcatccacatcttggccatctctgactcaatttcatctcactttctctccaaagctttccactaaccacctggattaaaatgaccagatgttaacaatttgtatctatagcaagcatttttattgttaattttttgatacataaagattgtgcatatttctrgggcatgtgatatttagatacataactacaatgtgtaatgatcaaatcagggtaactaggatatccattgcctcaaacatttatcatttctttgtgtggggaacattccaaatctttcttcc

SEQ ID NO: 426322 - DNA, 510 bp, Homo sapiens
aagcaattatattgaaagagagttttagctgggcatggtggctcacgcctctaatcccagcactttgggaggctgaggcaggtggatcacctgaggtcaggagttcgagaccaccctggccaacatggtgaaaccccatctctaccaaaaatgcaaaaagtagctgggtgtggtggcatgtgcctgtaatcccagctactcaggaggctgaggcaggagaattgcttgaaccaggctgggaggcagaggttgcagtgggctgagatagcgccattgcactccaaccttggtgacaacagcaaaactccgtaaaaaaaaaaaaaaaaaaaaaaaaaaaatatctatatatatatatatatatatatatatatatatatatagytttaaaaatataaaaaaatagtgatatatgtgctttttgaaattaacacattaaataaaatctagtggccaatctaagtggtgatgatcataaatattttgagatctctgcatcaactaaatataaaa

SEQ ID NO: 426323 - DNA, 476 bp, Homo sapiens
cttctgactgttcagtgataaatcttttgaaatcagatatgacagtttctgggagtctttttcacatcatcattcaatttagggaattaaataataaaatttacttgttcatctttcactgtgtaatttaagctttacaaaattacttgttagagaccttccaactttatacatacaagataaacttaaatatttaggctagtcctttcctgttagagatgaaccagtgaggctcattcaaacagcagtttgctaccactacacacctattagagtggtcaaaatctaggacactgttaatgtcaaacgctggggagcaacaggaaccctcagtcattgctggttgggatgtaaaattttacagcaatttgaaagacarcttggcagtttctttcaaaactagacataatcttgccacacaatcaatccagcaatcatgtcccttggcctctatgcaaaggaattgaaaacatatg

SEQ ID NO: 426324 - DNA, 548 bp, Homo sapiens
ttcattagttttctcattccataaacatatattgtacctcctagacacaaaccacagagctaaactctgtgtgggataacaatatatagtatatttcttgcttattagctattatttgcatctcttcaactgctccaacctttcaaccaytgcattatccactcagacacaaataatttctggtgtctaccagtattatgcagaataatatcatttctgtactatataaaacccttttgagggcctgagaatccagcattcttcttacttcaatgacatgttattatagaagttattaaatgtaaaattgtaagctcaaatcattaaaatatctctttgacgtggcagcatgtaacagtcttcccaaccatcctctatttaaatctgcacttccagccacctcctttccactcactcctttgtttcgaagtgatatagattaagtatacctttcctgttatagaaattggatatactcagtaattattttccctggcctaagggtcagggaattgtacctacctagagcatatatatattttattctt

SEQ ID NO: 426325 - DNA, 620 bp, Homo sapiens
ataatgttatagggccattgagccctttctactttagtagaaaattctactcagcagaattagcagcttgaggagcattgatgagtttgtggatttgctcaagaaataagttaaagtactgatgcaactctaattcttttcartgatcaaaatgggaatgagtagtgattatgtccagaaactgatagataaaaaaatataatttatgctcagcattggtggctagtccactaagagtgatgtgctgtctggagtgaactaaaagaataaggttatagtcaatacttttcttcattgtattcttgttttctttcttgcaccatccctgccccttttctttttcttataatcttctccgcttccttttgtttttaaatttagtgtgctatgttatgctggatagaagtccgcagtgaaagttataaggagattttattccagagaaatgaaaaaaagtcactctgagtaggtattaaatctagttatgttgaattcggaagctctatcactgtgagggaaccccaggattcttttcaggaacaatagtctttactccccaaacatgacatcattaggtcccttttatttcaagttgggcctaaatttggtgatgctattaa

SEQ ID NO: 426326 - DNA, 547 bp, Homo sapiens
gtttgtggatttgctcaagaaataagttaaagtactgatgcaactctaattcttttcaatgatcaaaatgggaatgagtagtgattatgtccagaaactgatagataaaaraatataatttatgctcagcattggtggctagtccactaagagtgatgtgctgtctggagtgaactaaaagaataaggttatagtcaatacttttcttcattgtattcttgttttctttcttgcaccatccctgccccttttctttttcttataatcttctccgcttccttttgtttttaaatttagtgtgctatgttatgctggatagaagtccgcagtgaaagttataaggagattttattccagagaaatgaaaaaaagtcactctgagtaggtattaaatctagttatgttgaattcggaagctctatcactgtgagggaaccccaggattcttttcaggaacaatagtctttactccccaaacatgacatcattaggtcccttttatttcaagttgggcctaaatttggtgatgctattaataatactgtta

SEQ ID NO: 426327 - DNA, 620 bp, Homo sapiens
ataatgttatagggccattgagccctttctactttagtagaaaattctactcagcagaattagcagcttgaggagcattgatgagtttgtggatttgctcaagaaataagttaaagtactgatgcaactctaattcttttcaatgatcaaaatgggaatgagtagtgattatgtccagaaactgatagataaaaaaatataatttatgctcagcattggtggctagtccactaagagtgatgtgctgtctggagtgaactaaaagaataaggttatagtcaatacttttcttcattgtattcttgttttctttcttgcaccatccctgccccttttctttttcttataatcttctccgcttccttttgtttttaaatttagtgtgctatgttatgctggatagaagtccgcagtgaaagttataaggagattttattccagagaaatgaaaaaaagtcactctgagtaggtattaamtctagttatgttgaattcggaagctctatcactgtgagggaaccccaggattcttttcaggaacaatagtctttactccccaaacatgacatcattaggtcccttttatttcaagttgggcctaaatttggtgatgctattaa

SEQ ID NO: 426328 - DNA, 475 bp, Homo sapiens
ggaggtggtgagagtgatatcttggatatattttgcagatagacagaatagatcttacacaaatatatacggggtattagagaaagaaatgacattaatatgatactaaagttttcagcctgaggaacaagaatgaagttgccatttcagaagtggcgaggattggaagaacaggtttaagaaggaagaayagtagttcgttcatggccattttaagcatgagacacttacctatcagacatctttgtagaagtttcaatatagctctctctttattcaacaattgctggtgttagtagaggaatgatgaagtttttagaaggtgccctagattcagtgttaattaggggtaggtggcaagaagtttcccagagaagatatctatgctgagacctaaactataagctccatcaagacagagccaaaaagtctctttatttttatttaaaaatctgttggcaagccatggtggctc

SEQ ID NO: 426329 - DNA, 555 bp, Homo sapiens
  misc_feature (1)...(555): n = A,T,C or G
nnnnnnnnnnnnnnnnnnnnnnnnnnnnnnnagagtagtattttggtagccctttttattaggaactaaatcaatgttctttccatattcatgtctaatattaactcaagataaaagctgaggaaagaattataaacactaatttcatgaagatattctctaccagatgttcatcrtaattaatgttaacagtgcttgaaaaagagaaatcattcttggtaaatacacatgacaaacagccctctctatgccaatggattttttttgttgttgttgtgtatgaagcaaatggtcaaatgtaatctttgtctgcaaggggatggtgctttttattcataagtggatttagtctccaagatgagagtgaaatcaaaagtgaaggcttgatgggttgaccattccaacccccactgatgtcaatgcaggcagcacgtggctggcagaaccccatgaggacctggcctctgtggtgccctgtctggaagccagtataaagccattgcttgtctattcggtgcatgaaggcaggccttcttgatttcagatttttttctt

SEQ ID NO: 426330 - DNA, 555 bp, Homo sapiens
  misc_feature (1)...(555): n = A,T,C or G
nnnnnnnnnnnnnnnnnnnnnnnnnnnnnnnagagtagtattttggtagccctttttattaggaactaaatcaatgttctttccatattcatgtctaatattaactcaagataaaagctgaggaaagaattataaacactaatttcatgaagatattctctaccagatgttcatcgtaattaatgttaacagtgcttgaaaaagagaaatcattcttggtaaatacacatgacaaacagccctctctatgccaatggatttttkttgttgttgttgtgtatgaagcaaatggtcaaatgtaatctttgtctgcaaggggatggtgctttttattcataagtggatttagtctccaagatgagagtgaaatcaaaagtgaaggcttgatgggttgaccattccaacccccactgatgtcaatgcaggcagcacgtggctggcagaaccccatgaggacctggcctctgtggtgccctgtctggaagccagtataaagccattgcttgtctattcggtgcatgaaggcaggccttcttgatttcagatttttttctt

SEQ ID NO: 426331 - DNA, 662 bp, Homo sapiens
  misc_feature (1)...(662): n = A,T,C or G
ttgtgattacattttgacagaatggtggcaattaattatactaggtcagcaaacatcaccatgtccatcatatacacatgaggaacaagtcagaatttcaacagctctgcagtaagcctggtgtgtttagtgtgagcagcagtattctcctctctctgacagttcttctaataccatagagcaatctcagtgatgaaacatcagtttagtagggaatgaatgagtgttgtttctattctcttatatactttgggatcactcttagaaatcttaggaagactaaaattatgataacagcaataagcatttatatttatgcataaatgcatatacatacttgttataatctcaaataaagaaaagattccatcmaaacacatgattcttctaaattgtacgcacacagtttgagtacctgtaagatatctgcaaatggagttaaatgtaataatttctaacattgtgtttgcctgcgttaggaacatatctcaacagtnactgcaatgtagaatagatagtttaaatgagcatttttatctcatcatataatagtgattcagcaaatatgatggttgtgcagagatgtttgagactgaaatcaaaatagagccgtcaatgcatgtaataattttgaggtcacataatgaatttgaaataaaatt

SEQ ID NO: 426332 - DNA, 662 bp, Homo sapiens
  misc_feature (1)...(662): n = A,T,C or G
ttgtgattacattttgacagaatggtggcaattaattatactaggtcagcaaacatcaccatgtccatcatatacacatgaggaacaagtcagaatttcaacagctctgcagtaagcctggtgtgtttagtgtgagcagcagtattctcctctctctgacagttcttctaataccatagagcaatctcagtgatgaaacatcagtttagtagggaatgaatgagtgttgtttctattctcttatatactttgggatcactcttagaaatcttaggaagactaaaattatgataacagcaataagcatttatatttatgcataaatgcatatacatacttgttataatctcaaataaagaaaagattccatccaaacacatgattcttctaaattgtacgcacacagtttgagtacctgtaagatatctgcaaatggagttaaatgtaataatttctaayattgtgtttgcctgcgttaggaacatatctcaacagtnactgcaatgtagaatagatagtttaaatgagcatttttatctcatcatataatagtgattcagcaaatatgatggttgtgcagagatgtttgagactgaaatcaaaatagagccgtcaatgcatgtaataattttgaggtcacataatgaatttgaaataaaatt

SEQ ID NO: 426333 - DNA, 555 bp, Homo sapiens
  misc_feature (1)...(555): n = A,T,C or G
nnnnnnnnnnnnnnnnnnnnnnnnnnnnnnnagagtagtattttggtagccctttttattaggaactaaatcaatgttctttccatattcatgtctaatattaactcaagataaaagctgaggaaagaattataaacactaatttcatgaagatattctctaccagatgttcatcgtaattaatgttaacagtgcttgaaaaagagaaatcattcttggtaaatacacatgacaaacagccctctctatgccaatggattttttttgttgttgttgtgtatgaagcaaatggtcaaatgtaatctttgtctgcaaggggatggtgctttttattcataagtggatttagtctccaagatgagagtgaaatcaaaagtgaaggcttgatgggttgaccattccracccccactgatgtcaatgcaggcagcacgtggctggcagaaccccatgaggacctggcctctgtggtgccctgtctggaagccagtataaagccattgcttgtctattcggtgcatgaaggcaggccttcttgatttcagatttttttctt

SEQ ID NO: 426334 - DNA, 464 bp, Homo sapiens
  misc_feature (1)...(464): n = A,T,C or G
tgcgttaggaacatatctcaacagtnactgcaatgtagaatagatagtttaaatgagcatttttatctcatcatataatagtgattcagcaaatatgatggttgtgcagagatgtttgagactgaaatcaaaatagagccgtcaatgcatgtaataattttgaggtcacataatgaatttgaaataaaattaatagagaatccttttcttttgatgaggagttaaaatatatataatgaatacttgagtatcagtctgtaattttttttattccccaaagtgattagtagtgagggctataatgtgtgggaatattcaaaatatttatatggccatgcatggtggctcacacctgtaatcccagtgctttgggaggccgaggcaggaggatcacttgaggataggagcttcagatcagcctcggcaatatagtgagamcctgtctctacaaaaaataaaatttt

SEQ ID NO: 426335 - DNA, 598 bp, Homo sapiens
tccataaaaagacatagatgtaaagagagaattttatctacagtggcagtgggtttcaagtctggaatgtcctttagggctgaggcaggcttggggatgctgtgacaaattaaagygccatcctttttagcaaggggagtttgcatttttcacagagattatgagttgtataaaatacagtcttcattccactggtgtttcaaacacccccatctctacccctttgatctgacatttttaaactgatttgcttctatacactaattaatttttctgcctaggaagagaacattcatttgcaaatatcttatggatggtaaattaaggctttgtagcaattgactgaatgttccattctgagaatattctctcattcattcagtccttcatttattctttcagcacatattattgacaatatacgccatgggctcagtattgtggggaagatagtgaacaaatagcattcattgcttgctctggaaacaagaaaaataagagaactttaggaagaagacagctagctcccagaggatatatttctggtgctgacttggcatggtggtcctacattctagatcttttggaacaggcacta

SEQ ID NO: 426336 - DNA, 573 bp, Homo sapiens
ctgtgtagctaaccttttgagtcaggattgagatagtcttttgattctgtaagtactttaaggcttggctgagtgcaaacagctcgcacatttgaggagaccaattattaggcaaatttttaactctgcttccacaagagtctccataccaattactgaatacccattgtagttttttcctcagtcacctgggaggaaccatctatcgtcctgtgctgaagggagttcctcctaggtctggtcggaccttygtgtggtaattaagatttaaatcccctgttaggaaatctgctgggttaagggagttatcagtggttggagttacattacccttttctagcatagtagccccatactttaagattattgagttagtaagctacctttttgcttttttttttttttttttttttacttagaataactctgaactggtgaggtgtgctcacaatgaggtttcctctaaaagttacttttctacttttagcaaagctgttgccgctaccgactgaatgcatttggcctatccgcgggttactgggttaaggatttgctacgcccttatttacactg

SEQ ID NO: 426337 - DNA, 604 bp, Homo sapiens
tccccacaaactgttgaaatgtccctgaaatgcctgtgttttcctatccacagtcacctgcctctcatagttacaaagttggaaggctgatactggcaactggtattcctgacttgagttctgaaatccatggtgactgttactcggcaatgtttagggttaggagacgtggcctaaggtmtggactttagggtacctgaaggcaagtggcaggatttgtgcatccctcaaaactcagcgcttctcagtaaatcactaataaatcaactgtgaaattcttttcacttcttgaccacgtaagtgcccacaaccctcgtgggtcaggcattaagaaggagtcctgagctggtctcagcagactgcaaacagcatgaccctgcaggagcgcactggctgcctcatctggacaatggaagggagaatttctcctttataaaattgtctcaaggattaaataagataaggtatgttaaagcttgctgctgtgcctggcattcagtacatgttagtttatatgggatgtttaagaccatggacagatcctttctatgactaccttaaaaatttccccttcattgacctgtcatagaaccaccaaaatatt

SEQ ID NO: 426338 - DNA, 604 bp, Homo sapiens
tccccacaaactgttgaaatgtccctgaaatgcctgtgttttcctatccacagtcacctgcctctcatagttacaaagttggaaggctgatactggcaactggtattcctgacttgagttctgaaatccatggtgactgttactcggcaatgtttagggttaggagacgtggcctaaggtctggactttagggyacctgaaggcaagtggcaggatttgtgcatccctcaaaactcagcgcttctcagtaaatcactaataaatcaactgtgaaattcttttcacttcttgaccacgtaagtgcccacaaccctcgtgggtcaggcattaagaaggagtcctgagctggtctcagcagactgcaaacagcatgaccctgcaggagcgcactggctgcctcatctggacaatggaagggagaatttctcctttataaaattgtctcaaggattaaataagataaggtatgttaaagcttgctgctgtgcctggcattcagtacatgttagtttatatgggatgtttaagaccatggacagatcctttctatgactaccttaaaaatttccccttcattgacctgtcatagaaccaccaaaatatt

SEQ ID NO: 426339 - DNA, 379 bp, Homo sapiens
aaagaaggctttggctgtgagtcaggaatagcggccattgcacttgacaggttttgttttatatgtattgtatatatacataaaatatttgaaagcaccaagacatatcagcaaatgaatgtctccccgacagggagggataaactgtccaaacacaaatttttccccaagacacctaatcgatgcagtcagctgtgctcaggagaggcctgcactggccatgctcacaggcttgtgttcatttctccatgaaatgggcttcgtgatcctctcaagagatttagttctagcaggacaagtttcagattcatttatgtcaygggtatttgagtacagataggagacagcagttttacatatttgtactgtacaaagttta

SEQ ID NO: 426340 - DNA, 606 bp, Homo sapiens
ggccaccctctctgcctgtactctttcccattcaccttggaaagaacaggtgtgcacaggggatatttttctcattcatctcccactggagaattaaggctctattgaatgcttgagcctcccttcctctcccttgaccgccacctcttgcatacttccagaggaagaggtgacctcttttgggagacctcccgatcacccttttaaaacactgttcttcactttctcctgtattcgacttgtatttgacagcctgcctatttcagtgtgtgatccttgartttctcagtagccaacccaaggcatggatacaactagggatttactgcttagaaggacttgaagccagatcattcaagataagtcctcttttgcaggtccagagaggtgacttggccaaggccattttgccagttaaggagaaaagagaagcaaaggattctgcatcccacccagagctctctgaattaccttgttctgtctgttgtaatatatccgtctgcaaaattttattgttttctccaactactttttttccttcttctcttgtatatcatggttctttcactttttgaccctttcattcatgctatttctttctaaagc

SEQ ID NO: 426341 - DNA, 585 bp, Homo sapiens
gggttaaaaactatataaactactgtaaatagtaacaacatttatattgatcaaaatgtttcaaattttggttagctatatttgtgaatggtacatggtaggtggtagatggtgaaaataatttttatatgtaaggagtttcaaagatgatctaaaacatgmaggcctaaaacaatagatgaaacactatttcaaaagtattctctctttgttttcactctccatgttacaaaaatggcaacaaattacttttatgccaaggaagccaatatatcatatggtaaatgacaaatcaactgtaacattgaaacaacaattaatagctattatagctattaaaatttgaagcaaaattgtgcatctttaaaaattatacacacatgtgagaggactcatgactgaaatctcaatataccatctatccaagtgagttattttccttttttttttttttaagataattattcttcttcctacttctgggagggacagtgtatggaggtacctgtcaggcactgtgaaaaccctgggctctgaacagatatggggatttctctcagtatcctcaatgcagctccaataact

SEQ ID NO: 426342 - DNA, 608 bp, Homo sapiens
tctcaatataccatctatccaagtgagttattttccttttttttttttttaagataattattcttcttcctacttctgggagggacagtgtatggaggtacctgtcaggcactgtgaaaaccctgggctctgaacagatatggggatttctctcagtatcctcaatgcagctccaataactaatcccatttcttaatcactttgggaattaataagaaaaataatttattttagaaattcacaaaaaatatgtaaaacaacttttttctttttttccagagraataactaaaacaattcttattgaaaagccaaactatacatttttcttcacaagttgtatactaaaaattggcaaaataactccctcagtgataactttcattgttttttcttttttatgttgtttgtttctatggattttatatagttttaaaactataagctattgaaacaatagtgtgcatttatttgactgaaaatattggccacatttttattgtaatatgacctgtccaccagaattgatctaacacattctagagcttagagaaaaatagtgatgacaaagatagacgcagatgcagtcttgtgggacctaagagtttc

SEQ ID NO: 426343 - DNA, 608 bp, Homo sapiens
tctcaatataccatctatccaagtgagttattttccttttttttttttttaagataattattcttcttcctacttctgggagggacagtgtatggaggtacctgtcaggcactgtgaaaaccctgggctctgaacagatatggggatttctctcagtatcctcaatgcagctccaataactaatcccatttcttaatcactttgggaattaataagaaaaataatttattttagaaattcacaaaaaatatgtaaaacaacttttttctttttttccagagaaataactaaaacaattcttattgaaaagccaaactatacatttttcttcacaagttgtatactaaaaattggcaaaataactccctcagtgataactttcattgttttttcttttttatgttgtttgtttctatggattttatatagttttaaarctataagctattgaaacaatagtgtgcatttatttgactgaaaatattggccacatttttattgtaatatgacctgtccaccagaattgatctaacacattctagagcttagagaaaaatagtgatgacaaagatagacgcagatgcagtcttgtgggacctaagagtttc

SEQ ID NO: 426344 - DNA, 608 bp, Homo sapiens
tctcaatataccatctatccaagtgagttattttccttttttttttttttaagataattattcttcttcctacttctgggagggacagtgtatggaggtacctgtcaggcactgtgaaaaccctgggctctgaacagatatggggatttctctcagtatcctcaatgcagctccaataactaatcccatttcttaatcactttgggaattaataagaaaaataatttattttagaaattcacaaaaaatatgtaaaacaacttttttctttttttccagagaaataactaaaacaattcttattgaaaagccaaactatacatttttcttcacaagttgtatactaaaaattggcaaaataactccctcagtgataactttcattgttttttcttttttatgttgtttgtttctatggattttatatagttttaaaactataagctattgaaacaatagtgtgcatttatttgactgaaaatattggccacatttttatkgtaatatgacctgtccaccagaattgatctaacacattctagagcttagagaaaaatagtgatgacaaagatagacgcagatgcagtcttgtgggacctaagagtttc

SEQ ID NO: 426345 - DNA, 603 bp, Homo sapiens
  misc_feature (1)...(603): n = A,T,C or G
cactggtgtgtgttgttctatttccacatatttttgcatttttcagtttttcttctattgatttgtagttttattccattgtgggtaagaagagatccttggtattttaatatttttaagttaagatatatttgagacataacataatttttcctagagaaagatccatgtgcacttgagaagaaagtgtgtctgctgccgttgggtggaatgcactacatatgtctgttagattcctttggtctaaagcaatagttcaagtgtgctgtttccttactggttttttgattggatgtttttattgaaagtggggcattgaagtctctcactatttttatattgtcatctattttcyccttcatttctgccagtgttttctttgtacatttaagtgtgttaatgtcgggtttctatatatttataattgtaatattatcctaggaaactgaccattttatcattatataatatccttctttgtctgtgatagtttctgacttagtctatttttttctgatactaatataatcactcctgctcaattttagatgatttgcatganacatctttttccatccctttattntcatcctgtattggtcc

SEQ ID NO: 426346 - DNA, 577 bp, Homo sapiens
atactaaataaatatccaggggggacaaacatttcaaatttttttttctgttaggagtgttttagatagtcttagatcgttgatcttctatataaatttcagaatcacatttgcaaatttcagaaaatacactggtagacttttactgcagttgcattgaatctacagaatatgttggaaagattaatttttataatattgtttacttttgtccacaaacatggttataaatttatgtgttyaagttttaaaacttttttcttttgcctcaaaaagtgacatttatttaaagaaaaaaaaatgacaagatattcatcccttggctcccttccctacccgctcctgctgcttctcagccccccaagattgaacgctggctggggctaagtagcaagacagcccctcagatgaggtcagcaacatcgaggggcatttcctcaatggaggtgttgtagaaggtcctgatgtctcgaagagtcctcttgtcttcttctgtcaccatgttaatatccgcatccttaaggtcaaaccatctacctcgactgattctgtggatatagttttgcctgttggtggg

SEQ ID NO: 426347 - DNA, 585 bp, Homo sapiens
ttgcccactgtgctgctgatgaagctcaatgaccaatgtggaacttcrgctctactgaataccaagagcaaggaaactacatgccaaggtgctggcaaaacttgctggaggatggaaaacactggatctctaccacacttctcccagggaagccaggtcctaggatgccaacaaaacatgctaggatcttggtgcgatgtcagtgaaaattgctggagggtgaataccactgtttcttcttaaactactaacacagaagctgttgatttagatgctggagatacattggagggtgagggccattgagtctccttcagataagggcagacattcaagatttgactctggttatgggtctagggaagctcacattgacttgggagtttgacatgtcttttatctgaatccaaatgaatgttttctttccaagcaacaaggttccattatttcccaatcaatgcaacattcacatgagaaacatggtgacatggtgaattcaatcagttatttatcaacctgcacatttactgtgtttgacttcttaacaatatcagcttagtggctaaaaaaataagagattctttg

SEQ ID NO: 426348 - DNA, 559 bp, Homo sapiens
ttagcaggacattgaacagaaaagtaaatgaaacactgcaaacacaaatacccctaaagaaatcttaaagacatttaacattgttaatataaatgtgatgccgtgtttgtatataaagcataatgttaagcatctccagcatgtggcacagctcaggttttctgaagaaaaacctatctaccaaaagataactggatatttgtaaagttttactttgytgttatccagaggagtaaaagaaaaagggagcaaaccatttatcaagaaccacttatatgccacacattttgcttgccactttaggagttttatttaagtgaacattaacagtaatcttataatattaaatttaaaaactgtccctaaaagggagggtgaaacatgtcccttgtcaaaaagttaataagaagccaagccaggatgtaaattcaggcctttttctgattccaacatctggatgtttttcatttcatcatgattctttccaaaatttttctaccaaagtatttattctagagctatgtatttacccagtcatactctaaagagagatttataa

SEQ ID NO: 426349 - DNA, 559 bp, Homo sapiens
ttagcaggacattgaacagaaaagtaaatgaaacactgcaaacacaaatacccctaaagaaatcttaaagacatttaacattgttaatataaatgtgatgccgtgtttgtatataaagcataatgttaagcatctccagcatgtggcacagctcaggttttctgaagaaaaacctatctaccaaaagataactggatatttgtaaagttttactttgctgttatccagaggagtaaaagaaaaagggagcaaaccatttatcaagaaccacttatatgccacacaytttgcttgccactttaggagttttatttaagtgaacattaacagtaatcttataatattaaatttaaaaactgtccctaaaagggagggtgaaacatgtcccttgtcaaaaagttaataagaagccaagccaggatgtaaattcaggcctttttctgattccaacatctggatgtttttcatttcatcatgattctttccaaaatttttctaccaaagtatttattctagagctatgtatttacccagtcatactctaaagagagatttataa

SEQ ID NO: 426350 - DNA, 559 bp, Homo sapiens
ttagcaggacattgaacagaaaagtaaatgaaacactgcaaacacaaatacccctaaagaaatcttaaagacatttaacattgttaatataaatgtgatgccgtgtttgtatataaagcataatgttaagcatctccagcatgtggcacagctcaggttttctgaagaaaaacctatctaccaaaagataactggatatttgtaaagttttactttgctgttatccagaggagtaaaagaaaaagggagcaaaccatttatcaagaaccacttatatgccacacattttgcttgccactytaggagttttatttaagtgaacattaacagtaatcttataatattaaatttaaaaactgtccctaaaagggagggtgaaacatgtcccttgtcaaaaagttaataagaagccaagccaggatgtaaattcaggcctttttctgattccaacatctggatgtttttcatttcatcatgattctttccaaaatttttctaccaaagtatttattctagagctatgtatttacccagtcatactctaaagagagatttataa

SEQ ID NO: 426351 - DNA, 610 bp, Homo sapiens
gattcagaattaaatgaggtgatccacaaaaagcacatagcatgtattattatgcttagcatagtattgtccaaaaatattatttttactaatataaaatatggtttgatatctttagcagtatctttttcatttttccattcataaaactgtatacacagatatacatgaatatttgcatgaatatgagactatmtatagagtgcagtaaagtgttgggaatatatgtaaattagtttttatcttttatttttatttttttattttccaacttttatgtattttaggttcagggggtacatttgcatgtttgttatatgagtaaattgggtgacactagagtttagtgtgctaatgatttcctcctccaggtagtgagcatagtactgataggtagtttttcaacccttaccctcctcccaccttctactctcaagtaggccttggtgtatgttgttcccctctttgtttccatgtgtactcaatgcttagctgtcatttacaagtaagagcatccagtatttggttttctgttcctgtgttaattgggttaggattatgccctccagctccatccatgttgctgcaaaggtcatgatttcattctttt

SEQ ID NO: 426352 - DNA, 496 bp, Homo sapiens
tttcaaaaccatcagatctagtgagacttattcactatcacaagaccagcatgggaaagacttgcccccatgattcaatcacctccctctgggtccctcccacaacacatgagaattcaagatgagagtttggtggggacacagacaaaccataccaggtaatgatgttttcttctatctgtcccttgagtgtgaatgtttctcagcccatagttgtttcattcaatagactgtctcttgataaaaacacaccaaatcttatcactaatgtttaagccaggtccctaaatatagaaaacagataaaaattcattgcatttcctgtaatttagctcaggaattgctttcagtatctacttgctcaaattcccatcctttgtcatgtactgctgtttttaatcatttgaacctagcttcacctactgtctcttatttatttattttagttwctcttctcttctttactcttttttgtaactacaattcctattaattc

SEQ ID NO: 426353 - DNA, 580 bp, Homo sapiens
tcttctatctgtcccttgagtgtgaatgtttctcagcccatagttgtttcattcaatagactgtctcttgataaaaacacaccaaatcttatcactaatgtttaagccaggtccctaaatatagaaaacagataaaaattcattgcatttcctgtaatttagctcaggaattgctttcagtatctacttgctcaaattcccatcctttgtcatgtactgctgtttttaatcatttgaacctagcttcacctactgtctcttatttatttattttagtttctcttctcttctttactcttttttgtaactacaattcctattaattctggaagagataaactgattttggaaccattccccagttcatttctttttcccataaaagaaaggatatatttctttctttcctccaratgatatatcaaaccttattcataggggaaaaagaagatttgccatttaatcagtggtcctcaaaatttagcaggtatgagaatcacctgaagaacttgttaagacacagaacactggtcttgctcttaaagtttctgattcattagatctggggtgaaacatgaga

SEQ ID NO: 426354 - DNA, 518 bp, Homo sapiens
agaatgtactttcatacaatcaactattcaggctccacaatcaactgaagcccaccttctgtacgctttctttagtaacaccagttggaagtgatttcttctctctctgaagtcttctaaagttgtcttaaatcttacatcatttagcactgggtttaaaagcacaggctttggaacaagattaccrggtttgattcaggttgttgcactttctagctctgcgactttgggcagtttacctaatctctctgcaacccagaaacacaataatattacctacttcatatggttttgtgaggattaaataatttcatacatacgaaatattcagaacattccaggcacttggtaagagcttcataactattagctcttatcaatagtaccacttcccaccaccaccaccatcatcaccatttggcaaccgtcttatatatgtttggacgttagttatttttacatgtgtttaggaaaatacgtggtcatttttccctcttcattcagaaactgacactgta

SEQ ID NO: 426355 - DNA, 618 bp, Homo sapiens
tggcaacaaaaccacattattgcctgttacttaagcaaaaactcaaattaggttacatttcctgtgcaataggaaatggttcaccagttgagctgtaaagttagttggtgagaaatacaygggctttgggaggaagaaaaagccaatccactggtaataaatatgctacagtacctttattgcctcaatttattaggaggattcttatttctttgatttggaccagatttccttttcatagacactaagaatactttactttcttttctttagttttgtctgaactaagaatatttaaagagatcaagggtaccagttagctgactgcatcatacattttgcaggattaaatagcaactttacatttttttgtgtgtggaaaaactaaatgtatgcctctaacaagaaaagttcagttataaataaatagtaaattatgctcaacatacactgacaataataagtatctttaagtgaagtcaaattaattcattcttatttgcttattcatataaaaactagtatatgagtgctatttttgaaggattctattgaaagctgaagatacagcaattgttagagtatctatccctatagatcttacattctacaggtaag

SEQ ID NO: 426356 - DNA, 544 bp, Homo sapiens
tcctcggaggtctagaacccagctctgtcaggcctcttctgctatattccaggttctggtaacaaccatatcttgactttgctcctcctgtctgagcagagatagcagcttctttagttgctacctctgtgttgtctctctgctcctttttggatgttttttttttcccccggcttgctctctagttctggaattaccaattccctatgtaaaattatcttttaaaaacgatctgatatggtttctatttttctagactagaccttgattggtccatttgtataaatacaggtaaaacaaccctaaatgaaatgctaccaaactaaacttataaaaaaggaaattttwaaaaagctggaataggaagaggagctaagaatgagaaaataaagaaactattacaaagatagagggtgtgtttaatgagggctaagatggataaatcaaaatgtatttatttatgtagttaatcacattaaaaatataatggaaaaattatctgattattttagtagaatttgaaaagctttatgtaaaacaaaca

SEQ ID NO: 426357 - DNA, 544 bp, Homo sapiens
tcctcggaggtctagaacccagctctgtcaggcctcttctgctatattccaggttctggtaacaaccatatcttgactttgctcctcctgtctgagcagagatagcagcttctttagttgctacctctgtgttgtctctctgctcctttttggatgttttttttttcccccggcttgctctctagttctggaattaccaattccctatgtaaaattatcttttaaaaacgatctgatatggtttctatttttctagactagaccttgattggtccatttgtataaatacaggtaaaacaaccctaaatgaaatgctaccaaactaaacttataaaaaaggaaattttaaaaaagctggartaggaagaggagctaagaatgagaaaataaagaaactattacaaagatagagggtgtgtttaatgagggctaagatggataaatcaaaatgtatttatttatgtagttaatcacattaaaaatataatggaaaaattatctgattattttagtagaatttgaaaagctttatgtaaaacaaaca

SEQ ID NO: 426358 - DNA, 544 bp, Homo sapiens
tcctcggaggtctagaacccagctctgtcaggcctcttctgctatattccaggttctggtaacaaccatatcttgactttgctcctcctgtctgagcagagatagcagcttctttagttgctacctctgtgttgtctctctgctcctttttggatgttttttttttcccccggcttgctctctagttctggaattaccaattccctatgtaaaattatcttttaaaaacgatctgatatggtttctatttttctagactagaccttgattggtccatttgtataaatacaggtaaaacaaccctaaatgaaatgctaccaaactaaacttataaaaaaggaaattttaaaaaagctggaataggaagaggagctaagaatgagaaaatraagaaactattacaaagatagagggtgtgtttaatgagggctaagatggataaatcaaaatgtatttatttatgtagttaatcacattaaaaatataatggaaaaattatctgattattttagtagaatttgaaaagctttatgtaaaacaaaca

SEQ ID NO: 426359 - DNA, 532 bp, Homo sapiens
aatctgttggttattggattggcttgaatgtcctactttgtaatttacctgcttaagagcttttgaaaagttgcttaaactctgggtgtctgagcttctccatctgtaaaatggagataatatatcacctactgaayagtactcctccaataattgaataagatgatccaggtaaaaagagaacttacaaaagtgtctgacatttaatatctgttcaatgctattaatgatttttattattggttctgaaattaaaaattgccttcgatttccaatgtctgccaagggtatctcaagggaaaaggaagttactgcatattctctagaataatgctggaaagagacagacttgttggcagaagtgacatcactgtaaaatcatatagaaagtattacaaaacatttgctttggaaagaacaagtcagttatgtcattagaaaatcttcacaaatttatgtttaaagactttctaagaaatgtccattttttttttcaagagttcaggaaagccaacaatgtgctgtgaatatc

SEQ ID NO: 426360 - DNA, 567 bp, Homo sapiens
aacaaaacaaaacacacacacacaaaacgacaacaaaaacaaaaaaacaacctggaaatgtaaagaagatgtaactctggaatctgaaacagcacatagtaacctgcttgtatctgaaaataaaaaatctgctacttttgtgaacaaaaggtaaaaagttaatgttgctaatttcatgttagttctgggttctgaaggatttgagtcaagcaaatattactggatgtcaagcccaaatggatcctggggctttgtaagaattccctgtccaggaagggaaagcagtccctgtcagggcagaacagacactgaataattcagaagcaaagtggtgactatggggcctgaggccctgttccagtcactcttctgctaaaggagaagccaagaggaattgggatatatccggactgtgagttggctgagctatccttttactacttgaatgacagaactcacatctatyctttcacatatctatgtctttaagtacataaagccttatttctaaattggaatcaaaatctattacaatctgtgcagtaacaggctgtgaagggtcaactg

SEQ ID NO: 426361 - DNA, 537 bp, Homo sapiens
aatgagatcctgcaacttggaatggggacacgtgggaggaccctgatgaagctagaatcacagagcttgtaaactctgatgagctttctctgccagaggaaagagcctccccacccctagtggtggcaacatttcctcctccacccatatgccatcagcccttccacctttgcctgaggagattaaccatgcactgcctgagtcaacagtgttagcctcccctgaggcagtggccaggtaagacaatgatgattctcttcaggacctacccccaacacggctatttgcttttagacctgtaactagactcaagttctggcaagaccttagaggtgaggttcagagtgcgacccatgaggtgtgctacactcaraaagaactgctagagttttctaatttatataagcagaaatctggagaacagtcatagactgaatattaagggtgtggaataatggtggaaggaacataaagttggatcaggctgaatttcttgatatgcacccatgaagcagagatcctgcatttaatgtggca

SEQ ID NO: 426362 - DNA, 527 bp, Homo sapiens
taactagactcaagttctggcaagaccttagaggtgaggttcagagtgcgacccatgaggtgtgctacactcagaaagaactgctagagttttctaatttatataagcagaaatctggagaacagtcatagactgaatattaagggtgtggaataatggtggaaggaacataaagttggatcaggmtgaatttcttgatatgcacccatgaagcagagatcctgcatttaatgtggcagctcaaggagctgaaaaaggttctaatacctgggaggtggaggtttcagtgagctgagatcaccgcattgaactccagcctgggcaaccagaacaaaactccatcgcaaaaacaaaacaaaacaaaacaaaaccaaaaaaggttctcataatttatccactgtgagagagctggaaatgcctggtctcccttggtttaatgtagaggaagggacccaaaggcttaggaagattggaatgctatagtggattcatgaccttagatctactcatcccagctgggatggtcc

SEQ ID NO: 426363 - DNA, 642 bp, Homo sapiens
aatagtaaatcaaaaacaatatcacatcgctggtgggattgcaaagattagtgctaccgtcaagaacttgaaagatgcaggggtcgtgattcctaccacatccccattcaacactcctacttggcctatgcagaagacagatggatcttggagaatgacaatggattattgcaatcataagcttaaccaagcagtgactccaattgcagctgctgtaccaaatgtggtctcattgcttgaacaaattaacacatttcctggtacctggtatgcagccattgacttggcaaatgcctttttctccatttctgtctataatgcccaccagaaagcaattggccttcagctggcaaagctagcaatatacctttactgtcctacctcagggatatatcaactctctggctttgtgtcataatcttgttcacagggatcttgatgcttttctcttccacaagataccaccctggtccattacattgatgacattatgctgactgaaaccaatgagctagaagtagcaaacacattgaacttattagtaagacatttgcatcttaccartgtatgggaaatgggaaataaatctgacaatgtatgggaattacccatgccattaacagtgtatgggaacggaaaata

SEQ ID NO: 426364 - DNA, 556 bp, Homo sapiens
aaccacaaggagaaaattaaacttctcttaaatgtagttaaaatccctagagagacatgagtttgtcacgactgcctgagaagatattggctgggattaaatattgaatgtgtctgccaacaatgactgcctgacgtgacacacragagtttctcagtgaggaaaaaaaagaccatgtaagagtacatggattttatatttttctgtgacttagatgttggtaccatttattagacgaaaagaaaagtgctggagcagttggggattttaagaaactacaattattgaaataagagctaagtgtgataggaggtaaaaccaactggggatatgtaagaagtttgctgataaatgtttagggcagtggggaaataggattccatagatcctttactgccagcaacctggttacatgctttttcttgatcatagataaataacttaactgtagaaggtaagaagacaaatggaaggagttaacagatatttgaagatatgcagatggtgggagaaagttcaatggtaattgagaattggttcgctgacaagagggttt

SEQ ID NO: 426365 - DNA, 556 bp, Homo sapiens
aaccacaaggagaaaattaaacttctcttaaatgtagttaaaatccctagagagacatgagtttgtcacgactgcctgagaagatattggctgggattaaatattgaatgtgtctgccaacaatgactgcctgacgtgacacacgagagtttctcagtgaggaaaaaaaagaccatgtaagagtacatggattttatatttttctgtgacttagatgttggtaccatttattagacgaaaagaaaagtgctggagcagttggggattttaagaaactacaattattgaaataagagctaagtgtgataggaggtaaaaccaactggggatatgtaagaagtttgctgataaatrtttagggcagtggggaaataggattccatagatcctttactgccagcaacctggttacatgctttttcttgatcatagataaataacttaactgtagaaggtaagaagacaaatggaaggagttaacagatatttgaagatatgcagatggtgggagaaagttcaatggtaattgagaattggttcgctgacaagagggttt

SEQ ID NO: 426366 - DNA, 583 bp, Homo sapiens
tttagggcagtggggaaataggattccatagatcctttactgccagcaacctggttacatgctttttcttgatcatagataaatawcttaactgtagaaggtaagaagacaaatggaaggagttaacagatatttgaagatatgcagatggtgggagaaagttcaatggtaattgagaattggttcgctgacaagagggttttccataagaaatagtctctctattggtttagaaaaagtgtaggacattagtaataagcttttgaatctccaaattatgcccaataaatattcgaattagagttgcttccagacagagatgccattcatttgggaagtttcccaccccccttcaaatttctgaatgggacaatagaggtagaacccagacaactgggacatcttcataaaatattcttgaacattcatgagttgagtttagtgctatttggaaggaaactggtaagcctgagaaaggcactaaattgataatgaaacactaaaaaatagcttataatttggtggcattaataatttcaggtactcttttatgtttatctacattataccatttaatagtcag

SEQ ID NO: 426367 - DNA, 583 bp, Homo sapiens
tttagggcagtggggaaataggattccatagatcctttactgccagcaacctggttacatgctttttcttgatcatagataaataacttaactgtagaaggtaagaagacaaatggaaggagttaacagatatttgaagatatgcagatggtgggagaaagttcaatggtaattgagaattggttcgctgacaagagggttttccataagaaatagtctctctattggtttagaaaaagtgtaggacattagtaataagcttttgaatctccaaattatgcccaataaatattcgaattagagttgcttccagmcagagatgccattcatttgggaagtttcccaccccccttcaaatttctgaatgggacaatagaggtagaacccagacaactgggacatcttcataaaatattcttgaacattcatgagttgagtttagtgctatttggaaggaaactggtaagcctgagaaaggcactaaattgataatgaaacactaaaaaatagcttataatttggtggcattaataatttcaggtactcttttatgtttatctacattataccatttaatagtcag

SEQ ID NO: 426368 - DNA, 583 bp, Homo sapiens
tttagggcagtggggaaataggattccatagatcctttactgccagcaacctggttacatgctttttcttgatcatagataaataacttaactgtagaaggtaagaagacaaatggaaggagttaacagatatttgaagatatgcagatggtgggagaaagttcaatggtaattgagaattggttcgctgacaagagggttttccataagaaatagtctctctattggtttagaaaaagtgtaggacattagtaataagcttttgaatctccaaattatgcccaataaatattcgaattagagttgcttccagacagagatgccattcatttgggaagtttcccaccccccttcaaatttctgaatgggacaatagaggtasaacccagacaactgggacatcttcataaaatattcttgaacattcatgagttgagtttagtgctatttggaaggaaactggtaagcctgagaaaggcactaaattgataatgaaacactaaaaaatagcttataatttggtggcattaataatttcaggtactcttttatgtttatctacattataccatttaatagtcag

SEQ ID NO: 426369 - DNA, 621 bp, Homo sapiens
gacaagtatcacatcaaaaaagaataaraattaaggctttctcagctgaacaaatgggaatagcctctttaaaaggaatgaacatgaggaaataatggaggcataaaatggaaattgaattttaaaatgttactgtactgttagagtacagtctgagctgctacaacaaaaagaccaaaaactatagaagctttgaaatgtcatatatctctctttgatggtatgtttcagccagatatggctcataggacagccctgtcatcctcagtatgcagtttctagcttctggattacagaagttgcttgagctcttgcaatcattcctatatctcagttggggaggaaagggcaaaatcccctcttaaaagagctacataaaagtattatctccactcacattatctccactcacagagagcttcaaatgaagctggggaatgcagtaatttgccgagtagtcttgtgccaatctaaaacttaggaattcaattaaaaaccaaaagggataattaacattggtagaaagccaccctcagttaggaataaaaagtaaatctatgtaaacatagttctcattcttcgtgcataatgagttttataattttctctgtaaattatttc

SEQ ID NO: 426370 - DNA, 550 bp, Homo sapiens
gtctgcgtcttaggtgctttgtgagagaggtaatgatattgacgattaaaaaaaaacctgtgataacaaaactaacatatattgagtgcttactatgtactaggcaaaattctaagtgtttcccatgtactaacttatttaaaagatcctatggaaccattaagtcaaccctatggatgaccttaaaggcagatatactagttatctattactgcatgtgaattatcctgaaagtyagtggcttagaacaggaatgaacatttattacatctgccagtttctgtgtatcaggaatttgggggtatctgggggttttattccagctcaccgaaaggtcaatcatatgttagccaagggtacagtcatccaaagactttactggggctggaggatctgctcccaagatggttcactccaaggctggcaagagagcaggaagctcagtttcttcccacatagacatatccacaggggtgctcgagtgtccttacaacatggtggctggcttcccccaagacaagtgatcaaagagaacaaagaagaaactgct

SEQ ID NO: 426371 - DNA, 591 bp, Homo sapiens
tgtgtgtgtgtgtgtgtgtgtgtagcaggggaggctcagagttttggcctctggctgtatggctgtatgcttgtgagtatcctttgtctgaaacctgatgatgcaggaatttacatcttggaatgggagttggtttaaacaaggaaatttattcatcactgaattctcctgagagttcagcagctcctgtgagcatggaagtgcccccgtctcaatctttttggacaatgaagatgcatrttccaaaggttagatttctctgaaatgactggtttttcaagatagtaggaaagcagtattggccacagagatccaggtggctgcatgaacaagaatgcaaccttgattttatggtctttatttcgttttccaaagtcaaggtccatgagttgattaaaaatatcacaaagtgatttaactattcctcagtaatcttgtagcctattgccatcaaactttgttgacagtgacttatggaaacacattggtatgtccacacacaaatttgtgtgctggtggttcatagcagcattcataatagcctgaaagtggcaacaacccacatgttccccagtggatgaatggataaat

SEQ ID NO: 426372 - DNA, 478 bp, Homo sapiens
catacagacctgggttccatgactgtctgattatgtttccttgggcaagtttttgaactctctgagccttagttttctcctctgtaaacttagcactggttccttcctccatcacatggtggtggtgaacaatcccatgacaatgcaggatgtagatatttagctcagtgcctggtgcataaatagtgctccactgttatcacacagggtgaaattgccttatgggctcaagcccgtggattcagaccttacttctggctgcatctgccttgctccagatgtcgactattccccttcctgcaggggaagtcgcacttttagcccaagagggaggamatggctgctccattgccaccatcctgctcaaggttcagccctactggtcccatatttgtgccttgacctgggttactctgtccccaaccccacacagtgggcctcagtgactctctcagtctgtgggggagaaagttaacaa

SEQ ID NO: 426373 - DNA, 478 bp, Homo sapiens
catacagacctgggttccatgactgtctgattatgtttccttgggcaagtttttgaactctctgagccttagttttctcctctgtaaacttagcactggttccttcctccatcacatggtggtggtgaacaatcccatgacaatgcaggatgtagatatttagctcagtgcctggtgcataaatagtgctccactgttatcacacagggtgaaattgccttatgggctcaagcccgtggattcagaccttacttctggctgcatctgccttgctccagatgtcgactattccccttcctgcaggggaagtcgcacttttagcccaagagggaggaaatggctgctccattgccaccatcctgctcaaggttcagccctactggtcccatatttgtgccttgacctgggttactctgtccccarccccacacagtgggcctcagtgactctctcagtctgtgggggagaaagttaacaa

SEQ ID NO: 426374 - DNA, 522 bp, Homo sapiens
gcacaggtgcacgtgcacaagtgttcatggcgtattttattttgaagtatcttcatttattttctttctaaaagaaatattgtatttgatagtacatcccagaaacaaattcaatgcttattaatgtataactggtttgaaactattttcagagtgactatttgccctcatcatggagatatctagattaaatctgtctttctctaagtcactaatgagtgagtacatatgacaatctttatggcagtccatgaaaatttaacctargacaaaatgttgagcatctgaaactgaagataaagagaaaatgtctaatgagttcttttaaaatgccacgaaaaatgacaaaatagaaattaacacatttagagtaattaatcaatatcagacagtgtactaagtgcttcacatgtattaatcttaccacaattttatggatcagaaatgattaatatccatattttgtaagtgatgaaactgtgatgttacattcaagatacctcaattagaaaagggcagagc

SEQ ID NO: 426375 - DNA, 605 bp, Homo sapiens
aattcactcacttccaatgacagcagaaggattactcacactgataaaggaaattggcggaagctacccagaagggccacacctccaaaaggtttttttaagtacatgaaacattgatgcacgtgccccgcctggtaagtagcttgtctgttactagggtgacatgttgcatggggtatgagcaaaggtttttgatgctgaactccatctcttccatttgttagcatcgtaactctgggaacrtttctcaaactttctgaaatgcagttttccctcctgtgaaataaagatgatgctcagtggaggtcttgaaactgtgcttgccagtccctttggtacaggaagtacacatgctcctgctgctgctccttgaaacactggctgtgtttgcactgaggccatgcctcagccagcgactgagtgtgacaaggattctcagtcctgttcctgggagatgtgagattcctttgctggcaaacttcagcttgaatattccccaggtgccttgccaaaccttcttcagtctgctttgttctctagaacatttccacacaaccttctctctctcaggatcagactcagatcgcagtctgttggctcctttc

SEQ ID NO: 426376 - DNA, 603 bp, Homo sapiens
cacacacaaacacacacacacacacacacacattgacatacataaacacacattttgaccttagtggaggagaaggcacaggatctcccctctctcctggctgctggttcatgaccaaaaacccagacagggccctcctttacttcagctctctgagctctgctcctcctgcccactgtcacatacttacctctcacctaagtcttcctcattagtaattcatcttgaatatgcatcatactaaatctgaccttgtttgatatttataygaattcccagtttctgttagatgtcctgaatttcctttgacttcatctctatctttactaccgagcaataatcacctctctgcaaaacacaagcacacacacataccgacacacacagcaaaatgcaaacaggcatagacacacacacacacacacactcaccaagaaaagtctcaaattttcagcccttgggcttggttttgtgccactattgtattctttgccatcttgatctaaatgtgacccattagaagtgctgcccaattttatagcttctttgagtcacattttaaagctcattacagggtctaaaatgatttgtatcgcctctcac

SEQ ID NO: 426377 - DNA, 602 bp, Homo sapiens
ggtgtctctcggccctactgggaggtgtctcacagtctggatacacgggggtcagggacccacttgaggaggcagtctgacccttagcagagctcgaacgccatgctgggaggtccgctgygctcttcagagccatcaggcagggacttttaagtctgctaaagctgcacccacagccgcccttttccccaggtgctctgttccagggagatgggggatttatctataagtccctgactggggctgctgccttttattcagagatgccctgcccagagaggagaaatcaggcaatctggccacagcagccttgctgagctgcagtgggctcagcccaatttgaacttcctggctactttgtttacactgtgagcataaaaccacctactcaaacctcagcaatggtggatgcctctccccccaccaggctagagcatcccagatcaatctcagactgctgctgtgctggcagcgagaattccaagccagcagatcttagtttgctgggctccttggaggtgggacctgccgagccagaacacttggctccctggcttcagcacctctttccagaggagtgaacggttctatctgcctggcgt

SEQ ID NO: 426378 - DNA, 540 bp, Homo sapiens
tcttttcagaaacaggccagagagtttctcctttccttctctaataactaattgctctgagctctgggactgaatggtaatgcctaaagcaagccctcaggtaagaacaggagtacaaaaagaagggggaaagaataggatgaggactaaaggaaaaagatggaaaagagaagagaatgagatgaagaaagmgggaaactgaggagatgggtatatggcaagaaaaagagaagcaagagaaagaagaaaaaaaatggatgataaaatgaaacagaaaagcagaacagaaaaaagatttatctaacctgagcataaccaaatacttgtttagtatagtcttggtgaagattttttcactttcctagtcagaggggaaaatagatatgaatgatcatttacctctgtaaatagtgctgaatgatacagcatcatgggaagtttctccgtctgctttgctcaagagacagtcatagaagcatattacattagcactgaaatgaaatttagaggtcattcagttcaatctcttacttaatgtaa

SEQ ID NO: 426379 - DNA, 602 bp, Homo sapiens
ggtgtctctcggccctactgggaggtgtctcacagtctggatacacgggggtcagggacccacttgaggaggcagtctgacccttagcagagctcgaacgccatgctgggaggtccgctgtgctcttcagagccatcaggcagggacttttaagtctgctaaagctgcacccacagccgcccttttccccaggtgctctgtyccagggagatgggggatttatctataagtccctgactggggctgctgccttttattcagagatgccctgcccagagaggagaaatcaggcaatctggccacagcagccttgctgagctgcagtgggctcagcccaatttgaacttcctggctactttgtttacactgtgagcataaaaccacctactcaaacctcagcaatggtggatgcctctccccccaccaggctagagcatcccagatcaatctcagactgctgctgtgctggcagcgagaattccaagccagcagatcttagtttgctgggctccttggaggtgggacctgccgagccagaacacttggctccctggcttcagcacctctttccagaggagtgaacggttctatctgcctggcgt

SEQ ID NO: 426380 - DNA, 359 bp, Homo sapiens
tattactattatctctagcattccctcacattgctttgtggaaatcgaaaacctggagctgtttctatgttcttcagtctttgagaaagcctgtctggtagacaaacaggagctttatcttaccttgaagaaaatgagacggacaacaccaatacaatggccttaggctttatttaattcctgagtttagaaaatatcagaakaaagttgattttcttaagccttcagcagcaataaagcagctccagctactaaatggaggtcttgtgtcaacgttaggatattgcaaaaccctgtgctgcctactcaggtctgattttataaaaaggcacaaaactgcattagatttgagagatttg

SEQ ID NO: 426381 - DNA, 561 bp, Homo sapiens
aagtgctttctaggggtagttgtttcactattgcagtcaaaaagtgagattttaataaaaacaattttaaataagcaagaagtagaaaacagacctgtagaggaacattatgtaatacatggtgaaaaaagaatatatttcagagggtccgtctcaaataataaattaagctttattatgccactaattatggtacttaacttattgtgatctacrtattatgtatacatatatactcacagcattgccatataatcctttggttttgctggatattaaggttgagtctcttcttgtaaatcatgactttgggaagcaggcagcaactcttggggataacgcgacccaactctcctacttttcagatgcagaaactgagaactagaaaggttaatgatttgccatagtcacacaatcagttaatgacaaagcctagcctagaaatcatgaagcttgactccttgatagtgagctggtaggtaaattctgccctgcctgcgcattaaactctctcgaatcactgaggtaccattttgtaaactattattgtaagtcattaaa

SEQ ID NO: 426382 - DNA, 610 bp, Homo sapiens
gttcattgtattcaaagcagcacaaaataccatatattctgaaaataagaatatcactttacaagtgaatgcttcacaaagaaaccctaagacataaacagatggttcatgtgtcttagaaatgcaaagaatggtagcttgttttcgttgtggaattattaaaaagcaacccagcactactaagctttcttttcttctctaagagatgatctcagttgtagacaaggagaatgctggagaaattaatatgtttctagatttcaaaaaagcactggatggtcttttgtgatataatgatggagaataagagcaagtattatgtgagtaagtagttcattaaataatgatatgcaagaaaattgatttatgtcacctaaagaagtcagtcatgtctattagtttttcttcttggccttggcttgaaaatatagaaatgattgttatcaaacactctgattatttattttcactcttgttccaaaaagaaatttagcatagcctataataatatttatactaaaacatgaaaacagcatytagaaaaagaaaacaattaacgaaaagtaagaaaagtttaagccagaaatgaggttggtactccaagcacatg

SEQ ID NO: 426383 - DNA, 587 bp, Homo sapiens
ttcattctggcttcctccagactgaaaaggaaatagcactgagtctcttctctgccttggagcctacgttattgatattctttcatcattatgtaggaacataaagcttctgttatgttgcaattattatgtgtctttactagaatgtagttagtgaaacaaaaatagatgaggcagcccaccacagggctgtcctgctgttctctgttacactgagtacaatacacagagctcagagaaagctccccawtcatgctgattttttggcaacagttgcacaaaagaaatctttctgaagttctcaaaagtgaaaatgtcataattagcatttcaacccaataggagctatgcagaagagttgagtcaattttcatacaacaatgtattattttaactcatctttctctaggtactttttatgaatttcataccatttttaagaaatgatataatgaaacaagattatgaacctcctatgggaaagagctgacaaaattttgccagattttagaagtcttttgagatttcttgcactagattttatctacctgcccagaccatggaacgtagtcctatcaacctacgac

SEQ ID NO: 426384 - DNA, 587 bp, Homo sapiens
ttcattctggcttcctccagactgaaaaggaaatagcactgagtctcttctctgccttggagcctacgttattgatattctttcatcattatgtaggaacataaagcttctgttatgttgcaattattatgtgtctttactagaatgtagttagtgaaacaaaaatagatgaggcagcccaccacagggctgtcctgctgttctctgttacactgagtacaatacacagagctcagagaaagctccccaatcatgctgattttttggcaacagttgcacaaaagaaatctttctgaagttctcaaaagtgaaaatgtcataattagcatttyaacccaataggagctatgcagaagagttgagtcaattttcatacaacaatgtattattttaactcatctttctctaggtactttttatgaatttcataccatttttaagaaatgatataatgaaacaagattatgaacctcctatgggaaagagctgacaaaattttgccagattttagaagtcttttgagatttcttgcactagattttatctacctgcccagaccatggaacgtagtcctatcaacctacgac

SEQ ID NO: 426385 - DNA, 256 bp, Homo sapiens
tttggaacagattgcatgactaaaaagaatgtccctaatcaggttccgacaggcagtcagtggccactggccttggttcagcatctgggctagtgcctccctaattccctagaattttcctaatgactgttgcatcagaatcacaagacagctgctccacctccagccatcaagtccaaatgccaactaagaatgaagatgaaggatgaagggctttctcaaggctttgcytcactgagggagacagaattgcaaa

SEQ ID NO: 426386 - DNA, 552 bp, Homo sapiens
attcataccaaaagataagaaatcaactttcatcttaatgattttaagtataattaatgattttaaagtataattcttaaaggtccaataactttgttcagaaaaagatgataatagcaataaatatattagttattcttactgtaaaaaaaaaatacttctgattgtgatcacaactattctaacttgtgatttttaaaagatattttaaagctatacttcattgttaaacatgttaaatttgtatctgtttcatagtatatattaatttaattgataaaaaatatttcacattatctcagctacataagtgacagaaaaatgtaagcaagctgccgcaaacaacctragtgtactaaaaaacaaaatttcccaccagattctcaaatatctcctgccatgaaaggacagctgtgttagtctgaagattctgttgggccaggaacaataagccacaagcactgcaggaagccagtagatttcgagatctctcttcttggtctttcctgccttaccctccctggagctgcccttttgtttctcaccctcaaa

SEQ ID NO: 426387 - DNA, 552 bp, Homo sapiens
attcataccaaaagataagaaatcaactttcatcttaatgattttaagtataattaatgattttaaagtataattcttaaaggtccaataactttgttcagaaaaagatgataatagcaataaatatattagttattcttactgtaaaaaaaaaatacttctgattgtgatcacaactattctaacttgtgatttttaaaagatattttaaagctatacttcattgttaaacatgttaaatttgtatctgtttcatagtatatattaatttaattgataaaaaatatttcacattatctcagctacataagtgacagaaaaatgtaagcaagctgccgcaaacaacctgagtgtactaaaaaacaaaatttcccaccagattctcaaatatctcctgccatgaaaggacagctgtgttagtctgaagattctgtkgggccaggaacaataagccacaagcactgcaggaagccagtagatttcgagatctctcttcttggtctttcctgccttaccctccctggagctgcccttttgtttctcaccctcaaa

SEQ ID NO: 426388 - DNA, 538 bp, Homo sapiens
  misc_feature (1)...(538): n = A,T,C or G
aatgccaacattctgctgtatttaattctttttaaagaaaagtgagaaaacatttttaagaaagtgaactatccttcccttttcctgtctccagcctggtgctcataaaccaccctcatgagaatttgatgtatgtatttcccaaccatgttacacacacacacacacacacacacacacacacaagttactgtggcttttaaaaaaggacttatgtataatattgtactgcactatataattctgcatcctgctgttttgggttcacggtacctttttgatgtctatttcacggtaatacgtgtgtctcctattcatttcaattatcgtgtacccatgtcagctttactgtatgaaggtacaatatatagtyatctcatttaaattgttatacattcacttaaattccatgatatcaatatattacagttttttattcattcgcggccctgggatgaatacccntgctcatgtttcntgctgctcgcccacatgaatgtgtctaggatacatgcctcgaagtagaaatgcatatctg

SEQ ID NO: 426389 - DNA, 569 bp, Homo sapiens
attgctaaaaaaatgtcctctggagtgacagcagtatctctcctctggagtgacaacagtatctctcctcagagtccctgggaatgtttctgttattgtggagggaacaggggatatgaggacaaggtgtgatgcaccaggaagactgggtggtcacagaaaacacacacatgcacacacacacacacacacacacacacacacacacacacacaaccaaaagccacagccaccaaaataaccggcatcattttggaagatccatctgcccaatggggggtagaattctccatgatgacctgtgacctgttccctgagacagggaagaccaggaaggtcctgggtgggaaggcagcaggacagtatttcaccatcttgctgtttcctagccttgagttgggcacatgtgttgagaactggggaaagttggggagtcaccatcatagacacatgaacacctrtattccagcagtcaggcatcccagatctcccgtgcggaaaggggccagggctcctggctctctggagtgtacaggggggcccccagagccctagctcatcctggtttg

SEQ ID NO: 426390 - DNA, 569 bp, Homo sapiens
attgctaaaaaaatgtcctctggagtgacagcagtatctctcctctggagtgacaacagtatctctcctcagagtccctgggaatgtttctgttattgtggagggaacaggggatatgaggacaaggtgtgatgcaccaggaagactgggtggtcacagaaaacacacacatgcacacacacacacacacacacacacacacacacacacacacaaccaaaagccacagccaccaaaataaccggcatcattttggaagatccatctgcccaatggggggtagaattctccatgatgacctgtgacctgttccctgagacagggaagaccaggaaggtcctgggtgggaaggcagcaggacagtatttcaccatcttgctgtttcctagccttgagttgggcacatgtgttgagaactggggaaagttggggagtcaccatcatagacacatgaacacctataytccagcagtcaggcatcccagatctcccgtgcggaaaggggccagggctcctggctctctggagtgtacaggggggcccccagagccctagctcatcctggtttg

SEQ ID NO: 426391 - DNA, 486 bp, Homo sapiens
gtcagtgcagttcaatgcacgaagtctttttgatttctttgtgccttctcagaaagaatttctaattcaagtggaaaactttaagtgggtctcatagatgattttactcatgsagagggatgcctctaatggatccaagcaatatctttctctcaaggcctgggagttctcagaagctcaagaaggcatcaggagtcacaaccctgggagggcgatagtgagtgggctgtgaagccctctttccctttggtccttttttgattcttcccctgcccttaaccaatatatccagtgcattagcaagtcctgttgattctatctgtaaaaacttgtctcacctctatccactcttccgcctaatttgggccaccatcatctcttgcctggactgtatatcagcttttgtctctttatggccactcttgtccacctacagcccattttccagggtagcaagcgcttcctaaatgcatgctggagtgtaat

SEQ ID NO: 426392 - DNA, 626 bp, Homo sapiens
ctttttgatttctttgtgccttctcagaaagaatttctaattcaagtggaaaactttaagtgggtctcatagatgattttactcatggagagggatgcctctaatggatccaagcaatatctttctctcaaggcctgggagttctcagaagctcaagaaggcatcaggagtcacaaccctgggagggcgatagtgagtgggctgtgaagccctctttccctttggtccttttttgattcttcccctgcccttaaccaatatatccagtgcattagcaagtcctgttgattctatctgtaaaaacttgtctcacctctatccrctcttccgcctaatttgggccaccatcatctcttgcctggactgtatatcagcttttgtctctttatggccactcttgtccacctacagcccattttccagggtagcaagcgcttcctaaatgcatgctggagtgtaatccctgacttcatacctgggaggatttttcatttcattttgaataaactccaaggccatgatttactatcgacatgctctgttccctacctctctctttaagcttattttgtgtccctctccccattgtcagcaagctctagcctcgttgttcttctttcccttcc

SEQ ID NO: 426393 - DNA, 580 bp, Homo sapiens
actcccaagatacaatggaggtatgggtattgagtaaatactgccattccaaaagggagaaattggccaaaacaaaggggctacaggccccatgcaagtctaaaacctagcaggacaattattaaaacttaaagcttcaaaaataacctcctttaactccatgtctcacatccaggacacactggtgccaggagtgggcttccaaagccttgggcagttccaccttgtggctttgcagagtttagcctccatggctgctgtcatgagctggggttgagagcttggggcttttccaagcacagggtgcaagctgtcagtggatctaccattctggggtctggagtacagyagctctcttctcacagttccactaggcaatgccccaatggggcctctgtgtgggggctccaaacccagttttcctttctgcactgccctcatagaagttctccatgaggactccacccctgcagcagcttctgcctggacatccaggcttttccatacatcttctgaaatctaggcagaggctctcaagcctcaactcttacattttgtgcacttgcaggcttaacaacac

SEQ ID NO: 426394 - DNA, 501 bp, Homo sapiens
attcttcttaaatctgaggatacatacttttcagtaattctgggaagtcaccaggcattatttcatcaaatattgccgttctcacattttctctgccttaattccaataacatgaactcaaaacattttcatttttcctttcctgtgtttttaaatgtagatccctgtacactaaggtccctaatgctgtttttaatgggaagaaaaattttgaataggaatatctgtaagggactacacctgcagaaatttaactcaatttaagaatgtatccaacaaatactcagtgacscacacacattactaatcccagaaatgggacagaacttcttacaaaaatagtacaacatttttactgttactataatgctcttaagccttactataagagtatcaccaaagatatgctctaacatggaatgactcagactcttcagtaatttgttaagtaaaatttcttggacaatgttcaagacaagtttatattctctagattttcag

SEQ ID NO: 426395 - DNA, 542 bp, Homo sapiens
tgttatgccaaacacttggctaatatctggatgagatgggcaatttacagactatgtaatcaactagggttctatctgtagttgtgttatgagaaacaatggttcattaattcacggaaatgtgaattaaaaatgtcattaagcgaaagactctgttagcttgaattcctattgggatatgcaagacacataacatttatgcatatttgtgatgttctaatccatttttagggaataggatattatataaagcaccctagtttaaacaaatacatgaytacggttgtcaatagagatagatataaatagtgacctgtgtaattattttgctaatgctgaaattttttttcagacaagtggatccaaaatctaccaatgatcttgcattacattaaggggaaaagtatctccttaatggggaatctttacttttttttttccaaattgtgcctatacacatgatcttatggatagataatggttgttattccttgttgtattcttatgtgcaaaaatagagaacttgatacattggttagttt

SEQ ID NO: 426396 - DNA, 417 bp, Homo sapiens
aaggaggagcaagaagatgctttttgtaactcaaatagcatcttctgagaaaggtctctattttcacttgtgtcttaacttacaactgtgttcaactctatttcctttccttgctttacattttttcttatgcacctataattatccaatttactatatattttatatttgtctgttattgtctgttttctccactaaaacataaacttcttgcaggatttttgtctgtttttctcactgttgaatcccaaaagcaaagaagaatacctagcatagagttagtgttcaagaaacatttgctaaatggatgaacacctcttcattttatgagaaatgaatcttccccaagaaggggctcccgggtgcatcttgtgtgtrgacatctctatgtccccaggctgctgtagagctgagtca

SEQ ID NO: 426397 - DNA, 599 bp, Homo sapiens
tgctttaaggtcataaactgcttatttggcttttgaaaattgtttaacttgcctgctttccagctaggtaaggcctgggaacatgtggagttggccatgcccctagctatgctgcaaacagtcaaaccttttcagaacataacttaccaggttttacattaaagttaaaattgctaagagtcaccattgtaacatgcaattaagactactagaaacggttttacatgcacggtgtgtaagaatagtagaatgtwtgtctctgtgtgtgttttgtaaaaggtttttacttctttaaaatttctgagtcattattttggcaaaataaataatctggaattccaaaatcaaacttcagtttcaaaattgtctttcctaatgcctggctttctggatggatcagagggcccctgaaaacatccagaaaggaggtaaacaggattatttgatgtgtttaggtacatgggattgccaaaatgatgttccgtgttctttaagttttttttgtgaataatactaatatatgttccaaaattgtatgggattcctaaaatagtacatgctatcaattataattatgggtattatgttaagttattgta

SEQ ID NO: 426398 - DNA, 599 bp, Homo sapiens
tgctttaaggtcataaactgcttatttggcttttgaaaattgtttaacttgcctgctttccagctaggtaaggcctgggaacatgtggagttggccatgcccctagctatgctgcaaacagtcaaaccttttcagaacataacttaccaggttttacattaaagttaaaattgctaagagtcaccattgtaacatgcaattaagactactagaaacggttttacatgcacggtgtgtaagaatagtagaatgtatgtctctgtgtgtgttttgtaaaaggtttttacttctttaaaatttctgagtcattattttggcaaaataaataatctggaattccaaratcaaacttcagtttcaaaattgtctttcctaatgcctggctttctggatggatcagagggcccctgaaaacatccagaaaggaggtaaacaggattatttgatgtgtttaggtacatgggattgccaaaatgatgttccgtgttctttaagttttttttgtgaataatactaatatatgttccaaaattgtatgggattcctaaaatagtacatgctatcaattataattatgggtattatgttaagttattgta

SEQ ID NO: 426399 - DNA, 599 bp, Homo sapiens
tgctttaaggtcataaactgcttatttggcttttgaaaattgtttaacttgcctgctttccagctaggtaaggcctgggaacatgtggagttggccatgcccctagctatgctgcaaacagtcaaaccttttcagaacataacttaccaggttttacattaaagttaaaattgctaagagtcaccattgtaacatgcaattaagactactagaaacggttttacatgcacggtgtgtaagaatagtagaatgtatgtctctgtgtgtgttttgtaaaaggtttttacttctttaaaatttctgagtcattattttggcaaaataaataatctggaattccaaaatcaaacttcagtttcaaaattgtctttcctaatgcctggctttctggatggatcagagggcccctgaaaacatccagaaaggaggtaaacaggattatttgatgtgtttaggtacatgggattgccaaaatgatgttcmgtgttctttaagttttttttgtgaataatactaatatatgttccaaaattgtatgggattcctaaaatagtacatgctatcaattataattatgggtattatgttaagttattgta

SEQ ID NO: 426400 - DNA, 599 bp, Homo sapiens
tgctttaaggtcataaactgcttatttggcttttgaaaattgtttaacttgcctgctttccagctaggtaaggcctgggaacatgtggagttggccatgcccctagctatgctgcaaacagtcaaaccttttcagaacataacttaccaggttttacattaaagttaaaattgctaagagtcaccattgtaacatgcaattaagactactagaaacggttttacatgcacggtgtgtaagaatagtagaatgtatgtctctgtgtgtgttttgtaaaaggtttttacttctttaaaatttctgagtcattattttggcaaaataaataatctggaattccaaaatcaaacttcagtttcaaaattgtctttcctaatgcctggctttctggatggatcagagggcccctgaaaacatccagaaaggaggtaaacaggattatttgatgtgtttaggtacatgggattgccaaaatgatgttccgtsttctttaagttttttttgtgaataatactaatatatgttccaaaattgtatgggattcctaaaatagtacatgctatcaattataattatgggtattatgttaagttattgta

SEQ ID NO: 426401 - DNA, 586 bp, Homo sapiens
gccacaggccccttctctcaggactgcgccctcctgcaggctccaaagaggtggctgcatttcttttcttttytttttttttgccgtatgtatttattattattattattatcctttaagttttacagtacatgtgcacaatgtgcaggttagttacatatgttacacacgcgccatgcagccctcactaacccgggggtacaaccaggtgaagcaaggatgggaacttagcatgaaggagcccagctccaggcagccaggtcagaacaaggctaggtggggtgggccacagtgatgtgcagcgagtgtgaatgagggaaaaggcttgagtgtagaaagagcaatgggacaggcatgtggacaggagatgagaggagccaaccccagagagaggcagctggagagagaggaacagggcaggagcttcaggctccctggaatctcacaaatacgaatgtggtttcttttcaaccactaccccttcatatggtttactctagtgggttcctggccaccagagatctttatctgaaaccatctatagcactctcccctcatccactgctttgctttctgcagtttcagc

SEQ ID NO: 426402 - DNA, 593 bp, Homo sapiens
aatcgcgatgtttttgcatgtcagttttctcatctccaaaatgggaataattcctgctttacctgccctgcaaagtagtcatgaggaacacacaagatgcatagtctttgccttatctgcccaygcagaaaagaaattatgtttacatttgatccttcccaccaaaaccttagagaaattgagaccagatgttatagggggtgagggtggggagaagccaaaagcccttgcttgtcttctaattagacatgtgacttttgtcaaatcaattagcttctttatttctctatttcctctgctacacttaggaggttgtacttgaacattttaaatagtttttcccatccaatctgtgaggcttctatcctagttttcttttctatgctacctctgcaactctttgctatattccccaaagatgaacggctggaacatttatgtgctataaaaaagctaggtattgccaaaacagtgtaacacatttgcagtcccactgcgattcttcttcttcttcttttttttttttttccttaaggttggttaggaacctatagcagcctaatggaattaaaatcaccaggcaatgcaaaatg

SEQ ID NO: 426403 - DNA, 566 bp, Homo sapiens
aaaaaaaaaagaaatgattaggccatcacggcttcaccctcaccaatggattactaatgctgttattaggagagtgggttagttatctcaggagcaggctcctaataaaaggctgagttcagtcctcattttttctctgttcctggaatacattttctcaccatgtgatgccttttgccatsgaagaaccctcaccagatgtcagcaccgtgctcttgggctgcttagcctccagaaccacaagccaaaaaaacttgtattgtttttaaattacccagtctgcagtattgtgttacagcagcaaacaacacagaccctcccttttttgcttgtttcaatggttttgtctgttttatccactgttattttcccagagtctagaacagtgcatgacataaagcacgtgcccgttaactgtttgctgtggcatttgtctcctcagcatttagtatgacacctggcacataatagaccctcaatacatgttaactgtacaaattaataaaggattgaaagaaatgggggtgcagaattacatcaaggaataaagtgggtgaaaatgccat

SEQ ID NO: 426404 - DNA, 572 bp, Homo sapiens
agggaatgcttatgtttctcatggttcactctccttgcacacatgggggaatcagcagaagaagcagcgatgaggacttttgtgacttcacctttaagtgaaccccaatcttcttgaagatagtgatgacaccaggggcccccataccaacatcaccccattggaggttggtgggacctgtttcctggaagatagaaatgggcttcccactgatgatgagcgtcccattcctatccttaaagattccattgaacttgacatagtggaatcaacttggaacatgaggaccatgtagttgmaaacaatgaagggatcattggtggcaataatgttcattttgccagtgttgaaaggagccctgtaaccagacacctaatactgccaaatctattgacttcaacctttacaatggtgttacatgaatgcggctggcactgcacaaaaagctgcaactgtctgtccagtggagagtagcagaaagtgcagtggggagttattgtcccaatttatagaaaggggttgaggcctaagagacattttacatttagtatacataggacacaactaatata

SEQ ID NO: 426405 - DNA, 428 bp, Homo sapiens
tctcttttaatgcccctaaaatagtcacatttccaaaataaggcttttctgctttgaaattgaactcataacatacccactgaytctgatatttcagttgggtccaggagtggtgaattcactgcttttaattcttcctgggagaaattctgggagaccattttgaataggcaaattgccacgtaggtaaattagagtcactgtcttcgaattcagcttcccccagacagcaatagccagtgcttacccccaggaagttagagcctacccaccccagagaattttcacagcagatgtggttgagtacttcataatgaaaatgctcagtctaaatttacgttttcttcttagacaacactgagacttatttttgccattttttctcatttctgcgaaagcagttcttaacccataatattacctttgta

SEQ ID NO: 426406 - DNA, 534 bp, Homo sapiens
tgccagaacctgggatgataactgggtgcatatctgtgaataaaacatatattatttctgcttttgtggtgcttaccattctgactaatgaggaaaatgaattttagacaatggactgggaccagtaggtggagatgatgcccctttgataccgtcaaataatagtaggaaacgagggctgctgctggggtccttgagtctcctgccctgtgtgtccccaagggccaattatgtcacccttcttaaactcttagaagagacagctaaattgttgggtgaaattgatgatttccaattctagggccttgaaaaaaaatagtatttcaactaatatttattgagggcttaacatgtgtccaggcctgttttaagaactttacatgataatcctcacatcagcccattagacagggtctactactatccccatcctgcagatgacaaaatggaggcacaggtggactatattcttagcttatggtcaccccctatcaaygggtgggtaatcagtgtttgaatgtgaaataatttttt

SEQ ID NO: 426407 - DNA, 576 bp, Homo sapiens
agaatatcctgaaggtgtgcagtgaggatgggggagggctccacagaacgctaaatgatgccttgacaaaaccagcacatgtaggcctgccagaagggagaccagaacagcccatcagcactagcagggatagcaccagtcacactgggctttttcctgccttcctctaatctctctcccttcccctaattctgaagctccagaaagttcagtggagaaaggtcaaagtccttacatcaatccttccctactgtagggttctgagccaactgtgagttggtggagagcggaaggatagagggagaagctatgaactggctgtgaagttcaagttttgatactagatagaatcagaccttttaatacccccaagtcagttaggcactaactaaaactgttttcaaaaatagctggaagtgataggaaaactatgagctctaacttaagctgtcatcagggagtggggaraggaaatccaagactgcaaaagtgaaagtggtttttggttttacaccattgattaaactcattttaaaaacaagcaactgttattttaaaatagaatattctatagaa

SEQ ID NO: 426408 - DNA, 596 bp, Homo sapiens
cagtgtggttgtgacccttagttttgtgtattctgactcacagctaggatttaaattggtcraaggttgtgtgtattttcaacattagtgaaatactgttttctgaaatggttggagcacgtcactcctatctgcaatgtctgtgtcccaggtgatatgtatgcccactagtttgattttgttggcggtgggtaagttttgtgagcctgacttttcatatgtgtatggatttacatgtttagccccatggcacggcttactgcttagttccagtgattccctggcctctggggtcgtggaagtatgtgcccaggtgtattactctttatctcccttcttgctaatttataaaagcctttacttccataagtacttgcctgattaacaccacttgcattaaaatcttactgtcacttcccttagctttcccagcacaactttcttgtacttcattcatgtacaccattattaatttgtacttgtgttaatttgtcagagttgatgaggcactaccctctaatctccctactgttgtcatagttttctttctttgaaaaacagttactttcctgctcaggttctcattagcccctatc

SEQ ID NO: 426409 - DNA, 598 bp, Homo sapiens
ttctagtgccaatagtttcactctgcggcaacacaaactggagcagaagttttattttgaagatatgtttcattaagcatgatttctggaagttgaaaaataacttacayaatatgcaagaaagaaaactattctgaagttccagagagaaactgaaacgatttggtgggcagaacacatggcaggggagaaaggaggtctggagaccatgccatgctgtgacacaacagtgtggcgatgtcccacagacctgaaatctggagcagccgaggctgcagaaaataacaaggtggctgagagatccagcggttcctcctgtgtcctgccaaagaacatccactttgtagcagcacttccccaggagctaagcttggtgctgagtttcactgtaactggctgtgaattctgaacagcccaccagccaaagctgatataaaactgtgatctttgagcatccttggtatgctaggcccttaagggccctaagtgaaggctcttcactgccccatgacaaatgggactagttaaaaccaatcatttgtggccttatggactcatttcctctatccaggctgcaaacttcatttcccctatccag

SEQ ID NO: 426410 - DNA, 613 bp, Homo sapiens
tccccaatgcttaacagtgcctagcgcctaacaggctctaattagatatttgctgagtggatgaataaatgaatgaatgaatgaataaatgttgagtaaaatctgcttcagtgacagaaaatctgctcaatgctgcatcttaaaatcttagaggaatttctaacagaacacaggtcaaactgaaatgagcaatgagcagatgtgaatgatgtcttcctttcrtgatgcaagagactgacaggaaagtgaccgaaaaaaacctggacagattccactcccattctgagctgacttacgggaagagataacagtgcagggacaaggggtaataactagttttcactagttcctccaagaaagaccaactgtaacacaggcaaaagtacaatcaagaacggtacagtgtattctctgtggtttcttaacaattgggcccctcaggcacaacacactatggccttgactgactctccatcacatccaaaatgcaggcaaggtttgtgggcactactttggctacctgggaaaggcactggtatggcactggaacttatttctgcaactgtttccaaatccagatctcactccaccccaactttccagtttttaggct

SEQ ID NO: 426411 - DNA, 585 bp, Homo sapiens
cttggcaccaggaggcattaaagattccaggttagctgtgatcccagtagaagcaaggtgacttttgatcagaaaattccacattaactatggttaaagatttcatgctagaaaactaggtcagtttgtaattcctttaattcatcccttatttctaagaaaaggtgctgttaagagcattttgctgtcttcatgaaggtccttaggatttgaacatctttccattgtaaaacaagtttaatagggaatcaattttattttttatgattctcattataaaataattcatgctcactaaatgcatgtgaatagaatatytaatggcagaaaaatacacatttttaaggaaaagcaatttacatatactatatatgtatgatctatatagtattattacattaatccatgcattgaaagaaaggctaaaaggctatacagataaaatgaattgtagttagttctctgtaacaaaactatgagatttcaattttcttctttttgcttttctgtattttctaaatattagtctgtataattttaattataagaaataacaaatacattttttatttattagattataag

SEQ ID NO: 426412 - DNA, 537 bp, Homo sapiens
ccaaattcacggaatattatatctctacaaagtgttaagaagtatcttcaatcacttttcataaggttctcaggatagggtcccagtcttatttacttaaaactaggtaaataagtgcctgccaggaagtatgcacyaaataattatttgttcaaatatgatctaattacttaatgcttacaatcatctacatttttaaatttttaaatattttaacccatttcccatttaggaaaaaaaaaaaaaagtacagcttgctgccagcacagtattcttggtgcaaatgggaaatcggttaatacagtccaaatcagtgtgtctggttcatttcagctccttcactgccaaaccaggggtcaaggactgctttagcttttctgccttctccttgtctgtgatgatgaatgtgtaaggtatcctctgcattgaactttaaacttcacgttgtccttattgatctattttttaaattaagaaattatggtacaaggagataaagtatctcattcaaaggcccatacttctggggattcccat

SEQ ID NO: 426413 - DNA, 628 bp, Homo sapiens
tatttcttggatgctttgttcattctttttcattcttttttctgtaaacttgtcttcasgctttatttcattaagtgcatgttcaacctctgatatcctttcttctgcttgattaatctggctattgatacttgtgtatgcttcatgaagttcttgtgctgtttttttcagctccatcaggtcatttatgttcttctctaaactggttattctagttagcaattcctctaaccttttttcaaggttcttagcttccttgcattgggttagaacatgctcctttagctcagaggagtttgttattacccaccttctgaagcctacttctgtgaattcgtcaaactcattctctgtctagtttttttcccttgctggcaaggagttgtgatcctttggaggagaaaaggcgtcctggtttttggtattttcagcctttttgcactggtttttccccatcttcttggatttatctacctttggtctttgatgttggtgaccttcagatagggtttttgtgtggacatccttttgttgatgttgatgctcttcctttctgtttgttagttttccttcaaacagtcaggcccctctgctgcaggtctgctggagtttgctggaagccaactcc

SEQ ID NO: 426414 - DNA, 569 bp, Homo sapiens
ccaggtctggtgttaaaacttttaagcattttattagttatttgaatgtcttcttttgtgaattagcatttattttcccatttttctactaaagtctatcttaatgatgtatgcctcagatattatgacaataaatcctctctgtgtcttaagtttgcaggtctttccccaaattatgtgttttcatattttgtttggcatattyagataggtaaggttttaattatctttatattagtccattttcttgtggattttaaaatattgctctaatgcttggaaggttctcctccatcttcagatgacataaacatacacctatttggccttttgaaaatatttaactctttaatctagctacaatttactttgcaatataatataaagatctaacattttcccccagtagttaatcaactgtcctagtactatttatcaaatagtttattctttatctattggtttatagctatctatatcatatacatgattttatttgtaggctctcttttccatttcactaatgtgtttgtctatacctgagtcaacactgtgtcattttaattatt

SEQ ID NO: 426415 - DNA, 609 bp, Homo sapiens
ttgttcacagtgcaagaggcatgccttttaaaaaggaatttcttattttttaattcttcagtcatttacattcagaatcaaccatcaaatttatatggaacagccatagagagcaaaattcttgtcttgaacttttcaatcaaatttgtttttaagcacttaattctgaaaacagttattaatttaaacaaagcaaaatcttgaagtcatacaattagaagtcccactctgttccatgtagatttcaatatagatcatcctaatgtgtayagtggtcccttgatatctgtagggggttggttccaggaccctctgcagttaccaaaatctaggaatgctcaagtcccttatgtaaaatactttaaatcatctctaaattacttacaatacctaatacatacaatataaatgctatgtcaatagttgttatactgtattgtttagagaataatgacaaataaaaggactgcacatatttagtagagatgtaaccatccattttttccaacaaatattttcaatctgcggttggttgaatccacagatgctggacccctgaatatggagggccaactacactagaaacacacacgctagctgagaaagatg

SEQ ID NO: 426416 - DNA, 461 bp, Homo sapiens
aagccttcaataccttctaaaaaatatattctagtcacagtgctgagttggtgagtagctcacctgtttatcagtatggagctcggcgtgacagtgcacactctgcctcattgctttatcctgactcccttggtttcaagtaacggatgcccaatttggctagttcaagtgatgataataacactattaatattgtcttggactgggttacctggaaagtagagattgaagtgaacagggattttaaaatctgagttgtatatgacaggtgcaaacctaggggagccagaatgagtaagaagggaaactacgcaaagacagatgggaaatcagtgggatgggaaacattaccaccttggctcctgcttccagaatggccaagtcattcagccggtctaccrggaacttctccagagaggtcaaagggagaaactgtaccttgcagcagtccagggatgcag

SEQ ID NO: 426417 - DNA, 553 bp, Homo sapiens
agtgatgtaccagcccttagttatgccaggtaataacagagaaattagttgaaattagttgaagaaattagttaaaattagtgaatccagtgatgcctggatttactttcccaacaagattgaacataatcggggagctaattacctagaaggctaataggatgctagaaggaagtgggtgataaatgttgtgtagacaaaatacggaaactgtgttccattcctcttcatcttttagtttatcacagcacatgactcatcatttgctgatgagactataagtgggctgttstttaaagttgtggccagccttaatgcatttcaaagtaaaatagaaatgaccttccaattatctgctactttgaattatttatgatgccacttccttctgtttgcacatcctacatctgatcatggaaaatgattatcagataaaactttggcatcttctttctttatttacaaacacttcttcagcattggtcttttatttactactgtggcaggtgttgtgggagataggggagcactgcataagatgtgattatcgttt

SEQ ID NO: 426418 - DNA, 634 bp, Homo sapiens
gactgctccttttagaaaaagaaggtgccagtagaaactgaaatacaaggaactcagctagtggtcaggaaggagcttagctggaggtggcgactgtttcgtcagaagttagtatctggttgtcattgtcatagagagatctctggtttcttcttcaaaagtcttaacacagtcttattttaacactcctctgacatttatccctagcaccttgttctccatagaaagggtttcaaatgattcaatattttctaaaccttaactggatttaattctccccttggtgactgaaaagatagcaacctatgcactatgcaactgttaaccttcccccactcaacaaaatctcttcccttagtttttgaggaatgaacttgagctgcttcctaaaattatcactcagtactaggaactgagacattgagaatactgagcaagaattttctaccaaggtaaggaccaaacaaactcaaaaaacattccaggatgaaaggaagtgagttctctatttgtccctaagtcatyctctgctcatggagctactctcccttccaaggatcctgctgtccctttgaaggcctcacttattttaacctaacagtggattatagggctgttctgttattctgctagt

SEQ ID NO: 426419 - DNA, 586 bp, Homo sapiens
cagattcctttcacttccttctcttcytttccccatttcttagagacaaaaccccaaatacagttattggttcttttcccttcaatattatccacttcatagtttctatgattatgctgtaagccctgaacttagtttcagttctgaatacacaacaatcttctaaaatcccccttcatgttaagttcaaaagtctgaacagaaattaacttcctttccctttccctcttcttcctatgtttacaatatcctctaggatctctcagtcttattggccagaaaacatggtcagaatcatcttcaagtttttctcctctctcagtccctacatttaattacacatccaatctactattctattttaataattttgaatttctattcccagtcccaccttctatatataatataggctcatatgtatgagacgttctgtctggattattacaacagccttttgactgtaattcctctctctccttttctttaagaagtattgttctatttcatattatgtgccaaggttgtgctaggagcttggagtatgaaaggaattagaccacctttctttgagagctcacagtgt

SEQ ID NO: 426420 - DNA, 586 bp, Homo sapiens
cagattcctttcacttccttctcttcttttccccatttcttagagacaaaaccccaaatacagttattggttcttttcccttcaatattatccacttcatagtttctatgattatgctgtaagccctgaacttagtttcagttctgaatacacaacaatcttctaaaatcccccttcatgttaagttcaaaagtctgaacagaaattaacttcctttccctttccctcttcttcctatgtttacaatatcctctakgatctctcagtcttattggccagaaaacatggtcagaatcatcttcaagtttttctcctctctcagtccctacatttaattacacatccaatctactattctattttaataattttgaatttctattcccagtcccaccttctatatataatataggctcatatgtatgagacgttctgtctggattattacaacagccttttgactgtaattcctctctctccttttctttaagaagtattgttctatttcatattatgtgccaaggttgtgctaggagcttggagtatgaaaggaattagaccacctttctttgagagctcacagtgt

SEQ ID NO: 426421 - DNA, 559 bp, Homo sapiens
ctcattttaatctggctactagagaatggagaggcatttccacctgggtccagccttaaatgacaatatgagtggtcaatcatttctgccacccttgttgccccaagggaggtaataaaagtagttagaacacctgtcactgaacttggatgtgcatggtgagcaaagccctccatatcttcctattcaggaggagttgccacatctcctcagyggctcctaggctgcttaagcttttgatataccctatgtagacaaaagggtacaaaagcaaggttgctaacatctaactgttgccttgagtaaaaaacaaaaggaattacagaacaaacgtttggctaatttcaaagtgtcccttagtgcttgaaaactttgtcttattattttttatacagaatcaaagtaggcctatcttagaaaagggaacatccttaatgttggagaggttttaaaataggctctcactatttccaacccagattattgtgctgacaaactgatgttttccccacttcctgtctttcttctccagttatttcacattctactttctgatttt

SEQ ID NO: 426422 - DNA, 624 bp, Homo sapiens
atggctggctccctaggatttgaaggaagaggaatacaaatgttggatgccacaggtagcccatttcctcaggagcaagctactccgtctgaaccctggaatcagacatttctcctagaagccttggttccttttagtgaggaccatggtctgggtgttaggtttgctcatggctactctggtctttgcttcttggctttctcagtaaggagagctaggcaatctaggcacatatgtataaacaaacacatacacacatacgcatacacatgcacatcaataaacagacatgtgtaaatatacacgtgcatctatctgtgcacataaatgtatgcatatttgagaaattatgagttcatatcaaaactgcagttccaatccactcccaaagtatacattcttgccttccatcrttccatatttatatgtcccttcttccacagtgagaacttccaaccacatcaacacatttattcatttgtgcaaccctttggtatacctgaagtaggtttggaattgctttgcccatgtcattacagtaacaaatctaccaagattttgagatttgcttgcagttcttcctcccctcctaccccaagaatgaggggatatagttagatactg

SEQ ID NO: 426423 - DNA, 601 bp, Homo sapiens
gttatagtgacacctggtggtacggtttgaggttttaaaaaaattctttttaaatttgttactcttttttttttctagaccattttttgtaaggaatcattttatcaactaggatgacaagaggcctctcccatcctggttgcacatcactttctataacagagagacatgggccagaagccctgatggagaaagcagccaatgtcccttacatttccacctttggcttgaaaaaaagatctgtgcactaaatacagggraaaaaaaatgaagttaggctggaagaagaaagacattgttacatggtaaaattggaaagattcataccaacagtacgggataaagcaggggtccccagcccctgggccacggaactggactggtccagggcctgttaggaactggactgcccagcaggaggtgagtggtaggaaatgagcatcacagcctgagctccgcctcctgtcagatcagtggtggcattacattctcataggagtgccaaccctattgtgaactgcacatgtgagggatctaggttgcccgctccttaagagaatgtaactaatgcttgatgatctgaggtggaatagtttcatcc

SEQ ID NO: 426424 - DNA, 584 bp, Homo sapiens
tttcttgccttctcttcagtcaccaagccagtccaaacccccattagttctctcctcttaattcaaagcattttacattgtctcccttcttcctttggtctttttcaacatagcagcaagaattatcatcaaattctaataatatcattttggacccctgctcagaaccctcctttggcttcttatctcactcagagtaaagaccctccccctgccttagatcaccttgacaatctttgcatctagtacctctctgcaatcaacttccattgcttttcctcccactcacacagcttaaggcacactgacctctgtattattcttaaactaagtcaggatgtcctctgcatctggaatactcttccttcctgtatctggagcattctttgatggatagtcacatagcttgatccctcactttcttttattatttaaatattgccttactatagayattttccttaaccattgttttaaaaattgagtaccttaactcatcagttcccctgtactgtgttatatttccctttaggagtttcatgtttgaatacaatcacacacctcataacaacactttggccact

SEQ ID NO: 426425 - DNA, 579 bp, Homo sapiens
  misc_feature (1)...(579): n = A,T,C or G
tcgctttttgagactcttgcctggatattgacgtacattttgtcttcattcaaattattccagtatcttaaaggtgacaataaactacatcttccagataaacatatatacttataatgttcaaactgtacacaatgccctcaaatataacctgtttytcaggccacaccggccttagggtaaaaacgtgattactgtgaaatncacnnnnnnnnnnnnnnnnnnnnnnnnnnnnnnnnnnnnnnnnnnnnnnnnnnnnnnnnnnnnnnnnnnnnnnnnnnnnnnnnnnnnnnnnnnnnnnnnnnnnttcatattattttttgtaaggacctttatttcccagtatcctataaattcttagaactcttacatagtacttgcccaaagcatttttaacttactagattgctagcatctgagagtacgcatttggatattattctttctccagagctcactaactgacccataataagaattcaaaaattagtgaattaattgcattcttgggcatttatcccagataaatggaaacttatgttatgcagatgttcacagcagctttattggtaatagccc

SEQ ID NO: 426426 - DNA, 587 bp, Homo sapiens
gtggcctatttccagcaccaaccaatttatgcctagtgttccattattggaacgctaagcatgtgggagttatttatatcctactgctcaaggtcattgccaaggtctgattgcaaaaattcaaaaaattgcaacttcaggcataaatggattaaaactatttcattaaattacttttttattatttttcttatggagtaatatatacatatatatttttttcagactccagtagttgtgaaaaatgaaatcacgtttgacttattttcagcaaatgaacatttactctgcagcgaggtatgtacagaaatatgaactaaagtctcaccatgaaatgacttccagtcctgcttaaaccattcccagacagtcgatttcaactctcccttgctcacctttaagttttggtattatatatatatatataakaccaaaaaatatatatgggggtgggtgtttgagacagagtcttgctctgttgctcgggctagagtgcagtggtgtgaacacagctcggtgcagtctcaacctcccgggctaaaaatgatcctcccacctcagattcctggtagctgggactacaggga

SEQ ID NO: 426427 - DNA, 485 bp, Homo sapiens
gttttggagatcactgatatattgaaaaatattgttttttctcccagggcctaagttttttyaactgcaaatggagattttaacatctaccatgtagaaatttcgtagatgttgaagaatttaaaaactgttaatgtctctatctgtccttccccacatgtattaaaagcatggttttgctttgtaaaataaaatttcaaattaaaattaaatctattgattctcgatttctcacatttctgatttcttttaaaaattaatatagagaaaattaatagaaaaatcaaactgtttagcagaaattactattggagatgagtataagaataacaatgatagtttactaatataactggtggtcataacactaaacctatgcattaaaagaggtcgtttaaacaagttaatttatgtttctttctactaaaaaaaaccctgtcggccacaaaaagtaagagtttcagtgttttacacatattactttc

SEQ ID NO: 426428 - DNA, 600 bp, Homo sapiens
gactctaacttcttactaatgttaatatgtacacagatattgactcagccctatcacctggggatcaggtagaaagaaataaaaatttctgccctaagcctagagagaacagattctactaatcagaaaaccaggcagctgcctctctatcacatgcctaccaaaataattcatagggaactggtatgtcagtgctcacagcatcctctgtaggcattcctctgatgagaccactgaggaaacagagggagccagtggagctgaggtccagtctctaccacatcgttccctaaagggctaaattatctagaggtgggctaaatgactggaccagactgagatttccaaagtgggctcaatamatttttaaacaaatttctgaatcaagtggagttgagcttgtgaataatcagtatgattaaggagaaataagtcacattttctttgcaaaatggaaagtgatgttaatgaatgttaactcctatgcaggaggaaatttgaaaaccaaggagggatgtcaggaagcagaaagagagaatgagaaataaatcaacagggttggttcaatgtttcaaaacacttcatagttttgaccttcct

SEQ ID NO: 426429 - DNA, 583 bp, Homo sapiens
tgttgccatcatatggaagataatgtttacatccttttaaacatttttatatgacaattcctcaggatttggtaaggcttccaagttgtagcttttagtgtaagtgctggggtggtaataaaatgttacctccagtcttatggtcattttgagtcttatttttgccaccttattgcatcctcgctttttaggggggtttttagattctattagccacgaaggcttgaggtttctctttagcgattttctattcaaaactttggaaaggccaggtatggtggctcatgcctataattccagcactttaagaaggtgaggcaggaagatcacttgagcccagaagtttgaggtcacagtgagctatgattgcaccatggcactccagcctgagcaacagagtgagaacctctttcttaaaacaaaacaaagcaaaacaaacaaacraaccttttgaaacttcgtgtaaagttactttccttacttataactaacttaaccattcatagctggtgtggcatgtggtcgctcttcttaaatacattaaaatgaccttcttaatgactgaaaaagtactcatagcaca

SEQ ID NO: 426430 - DNA, 459 bp, Homo sapiens
tgatagaatggtgctatagtttgaatgtctcctccaacattcacattgaaatttaatttccaatataactgtatttggaggtgaggcctttaagaggtgattaggtcatgatggcttgtcatcattacaggatgggttagttattgcaacactaagattgttataaaagagagtttgtcctgatttctcctctctctctctcwcacacacacacacacacacacacacacacacacacacacacacggactcacttctcctttccaccctttggccatgtgatgatgcttctctctcttctctctctttctctctctctctctctctctcacacacacacacacacacacacacacacacacacacacatggactcacttctcctttccaccctttggtcatgtgatgatgcttctctctcttctttctctctcacacacacacacacttgcttctgtc

SEQ ID NO: 426431 - DNA, 459 bp, Homo sapiens
tgatagaatggtgctatagtttgaatgtctcctccaacattcacattgaaatttaatttccaatataactgtatttggaggtgaggcctttaagaggtgattaggtcatgatggcttgtcatcattacaggatgggttagttattgcaacactaagattgttataaaagagagtttgtcctgatttctcctctctctctctcacacacacacacacacacacacacacacacacacacacacacacggactcacttctcctttccaccctttggccatgtgatgatgcttctctctcttctctctctttctctctctctctctctctctcwcacacacacacacacacacacacacacacacacacacatggactcacttctcctttccaccctttggtcatgtgatgatgcttctctctcttctttctctctcacacacacacacacttgcttctgtc

SEQ ID NO: 426432 - DNA, 575 bp, Homo sapiens
tattaacttttggctgctttgtgatagagcaatagctaatcaaaatgtgcattttgcatgaagattatatcaagttttgttaaaagctaagtattatagatgacagaatgaatagaaaattagtaaatttgatctatagtaacagttgtgcctgcaatctaatggtcattagattgtattagtctctatgggcattgattgctcggtaacagccctgtggagcccacctatatgaaaagtcatcccttcccatatgsaggtttcacatctcacaaataccatatttttgataagcagttggttgaaaacagtccacgtctaagttgacctgtgcaattcaattctgttttgttgaaggatcaactgtattcagaaccttaccttagtaaagattgcctgtttttaatgagagcagaagaatgccaagaatttaaatattttgacattaaacttttatgttctcatcgatatgtttttaaaatagattaaaacaaaaaaaagcaaaaagaaaaactccaaaagacaacaagcctagtcaccctaaaaaggtttcttagcttcaataaactataaat

SEQ ID NO: 426433 - DNA, 622 bp, Homo sapiens
atttacatacccaccaccaatgtataagcatcctcttttctctaaacctcacctgcatctgttattttttgactttttataatatccattcttaatggtgtgagatggtatttcactgtggttttgattggtatttctctaatgattagtgatgttraatattttttcatatgcttgttggctgtctgtttatgtcctttgcccattttaagtggggttgcatgttttttgcttgttgatttaagttccttatagattctagatattaaactattgtcagatgcatagtttgcaaatattttcttcaattctgtagggtgttcatttactttgttgatagtttcttttactgtggagaagctctttagtttaattaattcccactagtcaatttttgattttgttgcaattgcttttggagccttcatcataaaatattttccagggcctatgtccagaatggtatctcctaggttttcttctagggtgttttttcaaatagttttacattttccacttaagtctttaatccacttcagttgctttacgtatatagtgaaaggaaggggtccagtttcaatctcctatagatggctggccagttatcccagtaccatttatt

SEQ ID NO: 426434 - DNA, 622 bp, Homo sapiens
atttacatacccaccaccaatgtataagcatcctcttttctctaaacctcacctgcatctgttattttttgactttttataatatccattcttaatggtgtgagatggtatttcactgtggttttgattggtatttctctaatgattagtgatgttaaatattttttcatatgcttgttggctgtctgtttatgtcctttgcccattttaagtggggttgcatgttttttgcttgttgatttaagttccttatagattctagatattaaactattgtcagatgcatagtttgcaaatattttcttcaattctgtagggtgttcatttactttgttgatagtttcttttactgtggagaagctctttagtttaattaattcccactagtcaatttttgattttgttgcaattgcttttggagccttcatcataaaatattttccagggcctatgtccagaatggtatctcctaggttttcttctagggtgttttttcaaatagttttacattttccacttaagtctttaatccacttcagttgctttacrtatatagtgaaaggaaggggtccagtttcaatctcctatagatggctggccagttatcccagtaccatttatt

SEQ ID NO: 426435 - DNA, 432 bp, Homo sapiens
cttcccccttctagctttgtggttggtttgctattgtttttctggttcctcttgttgtgrtgttagattgctaatgtgagaagcgtctaactttttgatgtgggcatttagcaatataaaattcccttttaacactgctttagcagtgtcccagagagtcttatatgttgtacctttgttttcattagtttcaaagaatttcttggtttctgccttaatttcattgcttacacaaaagtcatttcaggagcatgttgtttaatttccacttcattatatgacttttagagatcttggttttgaatactccttataacactgtggtccaagagtgattggtatgatttcaaaattttttcaatttgttgagaattgctttgttgtcaaagacatggttgattttaccgtatgtgccatgtgaaaatggggaga

SEQ ID NO: 426436 - DNA, 515 bp, Homo sapiens
tacagagatattcatatctccaatccaatttatttcttctttagtgaatattgttagtttgcatatttcatggaattgataaytttataagttatcaaatatttggataaagaatgacttgtaatttttttatccctttgatatctgtgggatctgtagtgatgtcttctctttgatttctgatattgatagttgtgttttctctcctatattcttgatcaatctgatgaaaggttgttataaattgtggtctttgatctgctctattatttatatactcaaataactggatttttggttacatttatttttagagaaaaaaatgtttctatgttttctagtctattgatttctgctttaattcttattatttacttacttttatttactttggacttgctctttttttcttacttaaggtggaaactgctgtattattttgatacttgactaggtatttcgtcctataaatttcaccctatgttactgtagtggcattccacaaattttaattt

SEQ ID NO: 426437 - DNA, 579 bp, Homo sapiens
gggcaacacgagcgaaactccgtctcaaaaaaaaaaaaaaaaagaatagaacttggctggatgcagtggctcacacctgtaatcccagcactttgggagggcagggcagttggatcacttgaggccaggagttcaagactagcctggctgacatggtgaaactccatctctactaaaaatacagaaaaaaaaattagctgggagtggtggcacacacctgtcatcccagctactcaggtagttgaggcacaacaatcacttgagcctaggaggcccaggctggagtgaggtggcaygatcttggttcactgcaacctccacctccagggttcagagtagctgggactacaggcccacactaccacacccggctaattttcgctttttttcagtagagaccgggttttgccatgttggccaggctggtctcgaagcctgagccataacctggcgaaaagatactttgaaatgtaacatcgtttttcacttcaaaatcaaggtattttaccaacttgtctttggtacctccccaaaaactgatctactacatttgcagtttcattcatttttccaacatta

SEQ ID NO: 426438 - DNA, 591 bp, Homo sapiens
agttggttgtgatggtaggtgcctatagtcctagctacaagaggctgaagagaatcgcttgaacccgggaggtagaggttgcagtgagcagyggttgagatcatgccattgcactccagcctgggcaacaggattcagtctcaaaaaaaggaaaattcagagagtaactgaagttttatcattaatgggactaaagtgctttagcccagaaacagatttgtaaaaccattactgctaacaaagacatcattataagcacagctgtactgacactgaaattaaaatttgacccatcttggaattttggccccttggtcctgtttccctgggacagattgccttaaaccagttgtgccctttatacccacttttggcatccctaaacacttagtgcttgccaaaaacctatcaccatggctatggattgtagattttcccaattccattaatgcctatcactagttgggcatttctatagtattttctataacttattttcccagcctcagactcaacatgactttctccaagtagctccatcaatactttaagctcaaaaccaattagcacaggggcctatgaaacctgaca

SEQ ID NO: 426439 - DNA, 631 bp, Homo sapiens
tccctaaacacttagtgcttgccaaaaacctatcaccatggctatggattgtagattttcccaattccattaatgcctatcactagttgggcatttctatagtattttctataacttattttcccagcctcagactcaacatgactttctccaagtagctccatcaatactttaagctcaaaaccrattagcacaggggcctatgaaacctgacaatttgctcatatggagaattaggaaatattgcactttaatgcataagacaccttgtaaaatacccataaaattttaactggctgcagtgttaatgaagcaaataccatggagttataatagcttttgaatgtgatttatgcttacagctaatgaacagatgaaaagcactgtccttttttaagtaaacactacacactccagatggattgcaaaaatttattaaaattggagacactgttttaatcttcttgtgccatgagactccatcaggcagtctacaaagaccactgggaggctgaggatcacttgagcccagaagtttgaggctgtagtaagcttcaaaggccactgcactctagcttgggtgaggcaagaccctgtctcaaaaaataagacaagacttttagccacattt

SEQ ID NO: 426440 - DNA, 369 bp, Homo sapiens
atcatcattgctttggctattttctaatcccttaaaagtgagaagtacaaaatagaggtgtctcacctgtgtgccaatggcttgagttaggcttgctctttaggacctgggaagaaacaacttcatgtgaacttaggtgtactctctatgttccccaamtcaccattttgggtgcctcagttaagataatggtggttaagatcctcatcattctagcactcaagagtagcaaataaactgtcatcattgtggcacatccaatggctttaaacctttttgagagggaattttcaacttacttcagtagctattctcatccttccttggggacacaactagaaaacaaaaagatgcaagcaaaacagtgag

SEQ ID NO: 426441 - DNA, 491 bp, Homo sapiens
cttgcagcaggtagtaaaatactaagaagagggatatcaagctatgtagaattgcatttattcagaaagctttcctcctccagagaaaagttgtaaagttatgagatgttatattcagtctgcaagtaccttatagttaacacttaaaagtccttccccctaccttctgttgaacttctgttttgatgttatataacttattagtaaggaaagcayggtcataacatgaatttttaggagtctaaagatcactttttagttttaactatgtcctcctgtgaaacttaaactgaaaaacctgttggtgattctgtttccacatctaaatataaggaaggtatttcttttatctggagattttgaaactttaccagataactatgtttaaatacttttgaaatggaaaccatccgggaagtaaaattataattattaatgagaatatggtttcttttttcagcagggttgaatgcaccctcaggcacgaccat

SEQ ID NO: 426442 - DNA, 491 bp, Homo sapiens
cttgcagcaggtagtaaaatactaagaagagggatatcaagctatgtagaattgcatttattcagaaagctttcctcctccagagaaaagttgtaaagttatgagatgttatattcagtctgcaagtaccttatagttaacacttaaaagtccttccccctaccttctgttgaacttctgttttgatgttatataacttattagtaaggaaagcatggtcataacatgaatttttaggagtctaaagatcactttttagttttaactatgtcctcctgtgaaacttaaactgaaaaacctgttggtgattctgtttccacatctaaatataaggaaggtatttcttttatctggagattttgaaaytttaccagataactatgtttaaatacttttgaaatggaaaccatccgggaagtaaaattataattattaatgagaatatggtttcttttttcagcagggttgaatgcaccctcaggcacgaccat

SEQ ID NO: 426443 - DNA, 584 bp, Homo sapiens
ttgctcctggggaagctgtccagggctctgtgtccaccactgggccagactgaaacatccagggggagggggctgaccctcttcccctwtgagccataagcagccagcatcagagccatgggctgatacttagattcacaaaatgccacatcactaggccagaagatgctcccaagatgttgccaaactggaggatcagcaacttacacaaaagcactaaaggctcctcccttcttattgcccgcctcacactttggaaaataatcaagcaaatcaactttctaattcagggatcaacagccttggtttgttaactttataagaaaaaaggttttttaacaaaacgatgatgataaatggtcatttatctatcagtcatgtttgaacactgtactttggtccatatcatcttggtggctataattgcccggatctaaaaaatgcagcaggagcctcaaccatccgaagcagccaaccgcaagagaggaggtagtcatgatggtgatgaggaggagaaatttctcctcttccttccctggcataacatgcatttttgtgtttcaagaaaaaaatgaatactggtg

SEQ ID NO: 426444 - DNA, 517 bp, Homo sapiens
aaattttattttttgtcattttttaaatgtttccagttccctctacatcagtgaaacagggttttccaaagatggtttgaagayagaaaaaactttttccccccgacttcatagttgacatctggtattggttggaattggtctggtggcagagtgaagtagggaacttcatttttttcttttttttcttaaaggcagggtctcactatgttgcccaggctggtctcaaactcctgggctcaagtggtcctccttcctcagcctcctgaggagctgggactacaggcgtgtgaccacacctggctgtaaatgtcattcttaatagctgaataatctttggtcaagaagtaacttttccagagttttagctgttacttgacattaattgggtttcttttaactggtgaaaactgtatttattttgtttgaccagactgtctaacttaaatgaaagcaatggataatggaaaggaaactgaacaaagacaaaagtcttcttcatcatagtgaaaggcat

SEQ ID NO: 426445 - DNA, 517 bp, Homo sapiens
aaattttattttttgtcattttttaaatgtttccagttccctctacatcagtgaaacagggttttccaaagatggtttgaagatagaaaaaactttttccccccgrcttcatagttgacatctggtattggttggaattggtctggtggcagagtgaagtagggaacttcatttttttcttttttttcttaaaggcagggtctcactatgttgcccaggctggtctcaaactcctgggctcaagtggtcctccttcctcagcctcctgaggagctgggactacaggcgtgtgaccacacctggctgtaaatgtcattcttaatagctgaataatctttggtcaagaagtaacttttccagagttttagctgttacttgacattaattgggtttcttttaactggtgaaaactgtatttattttgtttgaccagactgtctaacttaaatgaaagcaatggataatggaaaggaaactgaacaaagacaaaagtcttcttcatcatagtgaaaggcat

SEQ ID NO: 426446 - DNA, 517 bp, Homo sapiens
aaattttattttttgtcattttttaaatgtttccagttccctctacatcagtgaaacagggttttccaaagatggtttgaagatagaaaaaactttttccccccgacttcatagttgacatctggtattggttggaattggtctggtggcagagtgaagtagggaacttcatttttttcttttttttcttaarggcagggtctcactatgttgcccaggctggtctcaaactcctgggctcaagtggtcctccttcctcagcctcctgaggagctgggactacaggcgtgtgaccacacctggctgtaaatgtcattcttaatagctgaataatctttggtcaagaagtaacttttccagagttttagctgttacttgacattaattgggtttcttttaactggtgaaaactgtatttattttgtttgaccagactgtctaacttaaatgaaagcaatggataatggaaaggaaactgaacaaagacaaaagtcttcttcatcatagtgaaaggcat

SEQ ID NO: 426447 - DNA, 562 bp, Homo sapiens
gagcattagctgtgtggccttcctactgataatctgcagttatcacagtaaagagatctctgttcctaggtcaggccttagcaattacaaatacaggaaataaaggggtactcaatgctgaagacttaattttgggtacctacaaagtcctgggaagggaaaaagaagaccttggcatttgtatttgcataaccagagatggaatgtttgaggcttttaggcataaagattaattagattttatcatataaagattagggcaaattatttttttttccagttcattcttaacatgttaagggacarattttaatgaataaaaatttaaaggccttaaaactttcttttggattcacatttccactctggtataatccactctggtgtagtctgccctttatgacagagaaagcctttgaaaatattgtcccagggaatgaaaaatcttaatgatgatctatggaaatgtctctcattctctattacagccctttgggccctcctatagattctctgtgaatttaagtttgaaatcatttggtgtttgcatgaaaaataattc

SEQ ID NO: 426448 - DNA, 562 bp, Homo sapiens
gagcattagctgtgtggccttcctactgataatctgcagttatcacagtaaagagatctctgttcctaggtcaggccttagcaattacaaatacaggaaataaaggggtactcaatgctgaagacttaattttgggtacctacaaagtcctgggaagggaaaaagaagaccttggcatttgtatttgcataaccagagatggaatgtttgaggcttttaggcataaagattaattagattttatcatataaagattagggcaaattatttttttttccagttcattcttaacatgttaagggacaaattttaatgaataaaaatttaaaggccttaaaactttcttttggattcacatttccactctggtataatccactctggtgtagtctgccctttatgacagagaaagcctttgaaaatattgtcccagggaatgaaaaatcttaatgatgatctatggaaatgtctctcattctctattayagccctttgggccctcctatagattctctgtgaatttaagtttgaaatcatttggtgtttgcatgaaaaataattc

SEQ ID NO: 426449 - DNA, 514 bp, Homo sapiens
acttagaggatggatcaataggtgcagcaaacsaccatggcacatgtatacctatgtaacatacctgcatgtattctgcacttgtatcctggaacttaatgtaaaagaaaaaattttaagaaaaagaaactgcccccatgggccaatcacctcccaccaggccccaccttcaccactggggattacaatttgacatgagatttgggtggggacacagatccaaaccatatcattcttcctttggccctttcaaatctcatgtccatcttacattgcaaaatacaatcatcccttctcaaccatcccccaaagccttaacccatttcagcattaactcaaaagtccaaagtctcatctgagacaagccaagtcccttccacctatgagcctgtaaaatcaaaaacaagttagttactcccaagatacaatgggagtacacgcattgggtaaatactcccattccaaaagagagaaatcagccaaaagaaaggggctacaggcctcatgcaagtcc

SEQ ID NO: 426450 - DNA, 514 bp, Homo sapiens
acttagaggatggatcaataggtgcagcaaaccaccatggcacatgtatacctatgtaacatacctgcatgtattctgcacttgtatcctggaacttaatgtaaaagaaaaaattttaagaaaaagaaactgcccccatgggccaatcacctcccaccaggccccaccttcaccactggggattacaatttgacatgagatttgggtggggacacagatccaaaccatatcattcttcctttggccctttcaaatctcatgtccatcttacattgcaaaatacaatcatcccttctcaaccatcccccaaagycttaacccatttcagcattaactcaaaagtccaaagtctcatctgagacaagccaagtcccttccacctatgagcctgtaaaatcaaaaacaagttagttactcccaagatacaatgggagtacacgcattgggtaaatactcccattccaaaagagagaaatcagccaaaagaaaggggctacaggcctcatgcaagtcc

SEQ ID NO: 426451 - DNA, 594 bp, Homo sapiens
ggggaaagcggagggatagcattaggagatatacctaatgtaaatgacgagttaatgggtgcagcacaccaacatggcacatgtataccacatgtaacaaacctgcacgttgtgcacatgtaccctagaacttaaagtatataaaacaaacaaacaaacaaacaaaaaaccatgcatttgaagatatggagtaatgccttattgggttgaaggtctgaatctttaaaaagttaatgaacgraagattgccataagcaaacatggcattctgtttctatgacaggaatcggcaagacgttctgaatcaatgtaaataagcaatggcgaaagcagacaaaatctaagtattacatagatttttaaaattcctaaatctaattgcgtacataggggcacaagccagctatatgttccaaaaacaatctcctactggtcttcctaaaaagaaagtctactaagaaagtctgtcttataactttttttcccccctaaagtgatggcttacttattattaaagattatggtagaaagacagactaatgttctaacagtaccattttttcctccagaaaggacaatatatttatcattaga

SEQ ID NO: 426452 - DNA, 638 bp, Homo sapiens
cctcgttgctcacacaaagcctgtttggtgtctcttcacacggacgtgagtgaaacacacaatgaaaaaaagtaggccgggcatggtggctcactctgtaatcccaacacttttggaagccamggcaggtggatcacttgagcccaggagttcgagaccactctaggcaacatggcataatcccgtctctaccaagccaggccatggtggcacatgcctgtacttccagctactcggaagactgagatgggaggattgcttgagcccaggaggtggaggttgcagtgagccgagataatgccactgcactccagcctaggtgacagagtgagaccctgtctcaaaaaaaacttataaaggcacaaaaaaacaagttgaatgtattagtcaaagatatgcaaaaacaaggcatgaattaaataccactctgttattatactaataatcttttaaaaaataatgcttattattagaaaggatggattggtagtatcaattaaattgctataacctgcaaatcaatctgcagtatgtatgaagccataaaaatgactgcattctttgggtcattaatcccaatcttggcactttatcttcagaaaaaattcatgaaataatcattaaacacctcagaataa

SEQ ID NO: 426453 - DNA, 600 bp, Homo sapiens
agcaatatgaaagaagtgtttttgttttttagaaaaataattgggctgcactatgagagatgatttggaggaagaaagtctgaatgtgacaaaaccagacaggcctcttcagcagtgtaagcccgtcatggggtccatgggccccgcagagtgatagaggtcagaaaggggagggaagaacaggactggattacgtggatgctcacagcagtgagaacatccattctagagttttccactctttcatgcattcatgaactcactcattcttcaaatatctatctactgggcacccagcaagctaggaacttagagcatgaagacatggttcctgccctcaaccacttactgctgctagaaatgccagaaaatgtaayagatgctagaagaggagtgattacttgattaaatgatgacctgcaaaaggaaaggtcaaggtttctggggtatgtgttgggaggggaagggaaagtgtgcagggtgtcaggaaatctcataccagaggttgccaagtatcggagctaagctgccaatttgctgatttttgtttgtttgttcttcaactgtaagaactatattttgatgttatcacatccacca

SEQ ID NO: 426454 - DNA, 600 bp, Homo sapiens
agcaatatgaaagaagtgtttttgttttttagaaaaataattgggctgcactatgagagatgatttggaggaagaaagtctgaatgtgacaaaaccagacaggcctcttcagcagtgtaagcccgtcatggggtccatgggccccgcagagtgatagaggtcagaaaggggagggaagaacaggactggattacgtggatgctcacagcagtgagaacatccattctagagttttccactctttcatgcattcatgaactcactcattcttcaaatatctatctactgggcacccagcaagctaggaacttagagcatgaagacatggttcctgccctcaaccacttactgctgctagaaatgccagaaaatgtaatagatgctagaagaggagtgattacttgattaaatgatgacctgcaaaaggaaaggtcaaggtttctggggtatgtgttgggaggggaagggaaagtgtgcagggtgtcaggaaatctcataccagaggttgccaagtatyggagctaagctgccaatttgctgatttttgtttgtttgttcttcaactgtaagaactatattttgatgttatcacatccacca

SEQ ID NO: 426455 - DNA, 544 bp, Homo sapiens
cagtgacatgaacacagctaactgcagcttcaaccacctgagcctaagcaattctcctacctcaacctcctgagtagctggaactacaggcaccagccaccatgcctggctaatttttgtattttttagtagagatagggtttygccattttggccaggctagtcttgaactcctgaccacaggtgatccacctgagtcggcctcccaaagtgcttggattacaggtatgagccactatacctggcctgccacattcttaaacattaacttaatcaagcttctcagtcatttgcatgagatactccctactctaggaatcatctttctccccgttatttatttatttatttatccattaaggctcaaatcaaatattatttttcttctatgtttgtctatcctgatgcccctagaaagtgtactccatatcagcagacttaccatttttttttttataattgcctgtttttatattcatttcccccactggattccatcagagtgaagatcacgtctcacttgttttagtaccttatttgtttc

SEQ ID NO: 426456 - DNA, 565 bp, Homo sapiens
gaaaagtgtggggatagggattatacatccatctaaaggatataccaggattcagatattctacaaaaggaactctttacatgaatggagcaaatccatctgtctatgatraaatagcccagtctggcaccttatgttcatccttccaccttcaaatggaaaagaacaagtcaacgctacataactccttggtgccagggagaacagaggttggcaagtgaagaagtcaaggcactaggataaacgggaaaatgggagccacagaagaagccaacactttgaagacatggctggtccatctgtctttaagagttgcttcaagaaggaaccagctgtctgatattggagaaagcagaataataacgtgcacttaaaataaaattatactagcaagtagtcaggtctgggccaggcacggtggctcacgcctgtaatcccagcactttgggaggctgaggtgggtggatcacgaggtcaagagatcgagaccatcctggccaacatggtgaaattctgcatctactaaaaatacaaaaattagctgtgcatggtgatgcacacctat

SEQ ID NO: 426457 - DNA, 565 bp, Homo sapiens
gaaaagtgtggggatagggattatacatccatctaaaggatataccaggattcagatattctacaaaaggaactctttacatgaatggagcaaatccatctgtctatgatgaaatagcccagtctggcaccttatgttcatccttccaccttcaaatggaaaagaacaagtcaacgctacataactccttggtgccagggagaacrgaggttggcaagtgaagaagtcaaggcactaggataaacgggaaaatgggagccacagaagaagccaacactttgaagacatggctggtccatctgtctttaagagttgcttcaagaaggaaccagctgtctgatattggagaaagcagaataataacgtgcacttaaaataaaattatactagcaagtagtcaggtctgggccaggcacggtggctcacgcctgtaatcccagcactttgggaggctgaggtgggtggatcacgaggtcaagagatcgagaccatcctggccaacatggtgaaattctgcatctactaaaaatacaaaaattagctgtgcatggtgatgcacacctat

SEQ ID NO: 426458 - DNA, 579 bp, Homo sapiens
cccaggctggagtgcaatggtgcagtcccagctcacggcaacctctgcctcccgggtgaagcgattctcctgcctcagcctcccgagtagctgggattacaggcacctgccatcttttagtagagatggggtttcaccatgttggccaggctggtctcgaactcttgacctcaggtgatttgcctgcctcaggcttccaaagtgctgggattacaggtgtgagccactgtgcctggcctagcccatttatatttaaggttagtattattatatgtgaatttgatcctgtcatcatgatgctagctggttattttgcagacttgtttatgtagttgcttcatagtgtyactggtctgtgtagttcagtgtgtttttgtagtggctggtaacagtttttcgtttccatatttagtgcttcctggtggtgatgaattctctcagcctttgcttgtctgaaaaggatcttatttctccttcatttatgaaccttagtttggtcagatatgaaatcttgggttggaaattcttttctttaagactgtagaatattggcccacaatctcttctggcttgtagggt

SEQ ID NO: 426459 - DNA, 586 bp, Homo sapiens
taccacaattttgttattcaattacctgttaataactactttggaaaacggttttagcagcttcttaaaaaataaaaaaaggctgggcgtggtggctcacgtctgtaatcccagcactttgggaggtcaaggcgggtggatcacttgaggtcaggagttccagaccagcctggccaccatggtgaaaccccattgctactaaaaattaaaaaattacctgggcttggtggcacactcctgtaatcccagctacttatgaggctgtggcaggagaattgcttgaacctgggaggtggaggytgcagtgagccaagattgcaccactgcactccagcctggacaacagagtgagactctgtcttaaaaaaaaataaaaaacaaaaaataaaataaaaaacaaaaagtaaaaaaaatctacctaccattccattcccaggaattcactcaaaagaaaagaatgcatatgtccatataaaaacttatacatgaatattcatagtatctttatctgtattagctaaaaattagaaacaattcatctccatctacacagcacagataaacaaattgtggtatattcataaag

SEQ ID NO: 426460 - DNA, 503 bp, Homo sapiens
agctaatttttgtatatttagtagaggtggggtttcaccatgttggccaggatggtctcaaactcctgacctcaagcgatctgcccaccttggcctcccaaagtgctagggttataggtgtgagccaccacgcccagtctggaacatcttttatatgtctgtcatgtgcatttctttttcatatctttggcccattttcctactgggttgatggtcttacttgcctggaattttacgaaggtgttttcatccaggaggttagctctttgtgatataagtccaaatatttttccccgctttgtcgcttgccttttgactttgctcgtggcatttttcactatttaaatacttttttattaatatagtaggatttatcatggtttttctttaagaatgagtcayagttataaaatctttggcttatactttcgtagactttaaacatgttgttccatggctgttttgctttgtatgttgctgtttagaagtctgttgctaacctc

SEQ ID NO: 426461 - DNA, 583 bp, Homo sapiens
taagtaattgccagaggaagtcccgcaaaccttacgtttatgacaagaaygaattggtccattttgaggagtgagggtaaataaatactccaggctctgaacaaaccagggagagacctgggtgtggaaatccaatcttttgccatcactgtcaaaaaatgtattgagagtgtcctataagcacggtgctgagccacatactttgggtgataagagatgtcaaagacctctgtgctctgtgatcccctagccagtgaaacacaagtgtacatacctgtatattgaatgtcaggatgcctgtgccaactgtggtaggtaaccaatgtatagcccagggctcacagggtgacagaggaaggggtctctttccagccccaggaagatcttgcttgtctatcttgctctacctgacttttttttttaaatgtccttattaaaaaataataattcttaagattatcccattatgtctattttctgttatatctaagctatataaaattctctagccaaatatttgaaaaaaaaaaaaagcttctaaaatgcttctttattgaaggaacaaatagaaaacccagggttg

SEQ ID NO: 426462 - DNA, 513 bp, Homo sapiens
ttttaaacttttaaactttttacaattattttacattttaacattttcaaagcttargtgtgtcttacaattgttggtgccttacactaacaggcagattcttttctttctcggttgtacataaagtaaccatatgtcttaaaaccagcgacttattaaatttgatgaaatatgtctaggaaaatatttccaaagaatgtgaaatagaatggaaatgttaatgttaaaaacaacatcccaaattacagagcataactacaactatgtaaagcaaacaaaaacacaaacacacaaaacctatgtatagaaaaaataattttgaaatgttaacggtgattgcctctgagtaatgtagtttgcttgtggatgcttaatttccttctttcttcaaatgttctgttttttccgaagcttgtataatagatcatgcaaatgcttttatagtagaaatgtctctcttaaatggtattttgaatgaataaacaaataaccttttttttttaagttcaaact

SEQ ID NO: 426463 - DNA, 548 bp, Homo sapiens
atgttcaactttactactgactttcctaayaagcaaagagcatttatgctgaaccacatcttctggaaagtcttgcttttaccccaactgtctcactgttcatggatggggaggtgcaactaaactgggttgtagtgaggacagaacatgtcactctgttactggctttagaaaaagtagagccagtggcctatgattccaaatagaagaactattgcccttctacagaatgtgctttcaaaccttgcccctgacccacaacaaaaaatacggctaacacaaaaaccccagtaacaagctaacatgtgtgcaagtaaagcaaaagtttcacaaaacaactgctcttaccacatctgatgcagtctgatattgtctatgctattcaatttaatatttttaaactgtggattacagctcagcaaactgattttatgacctactagtgagtggaaagccacagtttgaacaatgctgacaaggagacagtgctttcttcccctggacctgtaggcactatgtaacggagtatctagtcatgaagaaaactg

SEQ ID NO: 426464 - DNA, 548 bp, Homo sapiens
atgttcaactttactactgactttcctaacaagcaaagagcatttatgctgaaccacatcttctggaaagtcttgcttttaccccaactgtctcactgttcatggatggggaggtgcawctaaactgggttgtagtgaggacagaacatgtcactctgttactggctttagaaaaagtagagccagtggcctatgattccaaatagaagaactattgcccttctacagaatgtgctttcaaaccttgcccctgacccacaacaaaaaatacggctaacacaaaaaccccagtaacaagctaacatgtgtgcaagtaaagcaaaagtttcacaaaacaactgctcttaccacatctgatgcagtctgatattgtctatgctattcaatttaatatttttaaactgtggattacagctcagcaaactgattttatgacctactagtgagtggaaagccacagtttgaacaatgctgacaaggagacagtgctttcttcccctggacctgtaggcactatgtaacggagtatctagtcatgaagaaaactg

SEQ ID NO: 426465 - DNA, 548 bp, Homo sapiens
atgttcaactttactactgactttcctaacaagcaaagagcatttatgctgaaccacatcttctggaaagtcttgcttttaccccaactgtctcactgttcatggatggggaggtgcaactaaactgggttgtagtgaggacagaacatgtcactctgttactggctttagaaaaagtagagccagtggcctatgattccaaatagaagaactattgcccttctacagaatgtgctttcaaaccttgcccctgacccacaayaaaaaatacggctaacacaaaaaccccagtaacaagctaacatgtgtgcaagtaaagcaaaagtttcacaaaacaactgctcttaccacatctgatgcagtctgatattgtctatgctattcaatttaatatttttaaactgtggattacagctcagcaaactgattttatgacctactagtgagtggaaagccacagtttgaacaatgctgacaaggagacagtgctttcttcccctggacctgtaggcactatgtaacggagtatctagtcatgaagaaaactg

SEQ ID NO: 426466 - DNA, 548 bp, Homo sapiens
atgttcaactttactactgactttcctaacaagcaaagagcatttatgctgaaccacatcttctggaaagtcttgcttttaccccaactgtctcactgttcatggatggggaggtgcaactaaactgggttgtagtgaggacagaacatgtcactctgttactggctttagaaaaagtagagccagtggcctatgattccaaatagaagaactattgcccttctacagaatgtgctttcaaaccttgcccctgacccacaacaaaaaatacggctaacacaaaaaccccagtaacaagctaacatgygtgcaagtaaagcaaaagtttcacaaaacaactgctcttaccacatctgatgcagtctgatattgtctatgctattcaatttaatatttttaaactgtggattacagctcagcaaactgattttatgacctactagtgagtggaaagccacagtttgaacaatgctgacaaggagacagtgctttcttcccctggacctgtaggcactatgtaacggagtatctagtcatgaagaaaactg

SEQ ID NO: 426467 - DNA, 687 bp, Homo sapiens
atcattagtatcatcaggatcacctggacggcaggtgaaacagattactgggtcctttccgcagaatttcagattaaataaatctagggcaggtgagaattggcatatcaaacaagtccccaggggacgttgattctgctggtccaatgaccacattttgagaaccactgccttaaagagatgatgcctgtgcagatcacaaaatataataataaaggtcagctactggaagcctaactctagtgaagcaagcagaacagctgtacctaattctgaattaagagtaagaattagaggccagggacagtggctcacatctataatcccaacactttgggaggccaaggtgggaggatcacttgaggccaggagttccagagcagcctgggcaacagagmaacactcccatccctacaaaaaataaaataaatcattttttaaaaaaagagtaaaaattagtaggagagaaagggaagtcagaccctaagttgctgtaaaggtaaaagttcataaaaaccagaaaataaaaacaagtaagcaactctcttcccatacacgacaaccttattaatgcatttattcaacatttattgaacaagaactatataccaggtacaacacatggagaacacaaacataaataagcattaactgctaaagagctcatcatctataaggtgaaacaga

SEQ ID NO: 426468 - DNA, 493 bp, Homo sapiens
ctccaaatgacaattcttatattttctgtgtgtctctccacttttgacatgtactagtattctgatatttrttcctaattaattcatcattcaaacagtctaactacagtgactttagtttgagagaagcaggattaggccttgtaagaactattctatcaaattagctctgtgtcataaggagtccatgtgtttcagaagcaaaggagtggaagatgatctaagtctggctgagccaaataagcggtggttattcttatgtttattcatattatttggaaagaaaactgaaaaatattatatgctttcttaaaataccacttgcactattttctcaaaattttatgtaactttggaattagcatgctgttttcatgtccaaaatttttccaaactcccctagggaaggaatcatggactgcagaactctgcacccacccagacagccagcataaaaagcagtgggcactcagtaggttcgtgatctttgtat

SEQ ID NO: 426469 - DNA, 432 bp, Homo sapiens
taaaaaactggtgtctcttttcaaccacagataaggcttgaacactgctattgggaaatgtgctgtatggctgcaggcattcctccagcccaccttcatgaagaggtggatagcccttaattaaggtaagaaaacaggtctggaattttcacatcaaaataccatctctgccatttgcacaactaacatgaatctctagtttacctgtcctggctttttactagtgactcccatctcaaattaccctactcagcttttagtaatgaccaaatacctggtaactatagcagytatgtatgcccctaaagtctccaaacttgagtcctccattaaaccagatatccataaaaccacaaaattggaacaggctatgcctgacctcacattatgcctttcactttcacataagctgcctccaattgttgcaaaaat

SEQ ID NO: 426470 - DNA, 571 bp, Homo sapiens
agcatctgtaaaatggttaattctcgaactttatctttcttccatagcacttgacacaggtgttcaccctgtcttcgtaagtacactgtcctcacttccttcttagggactcctcacttgctcaatcattgctctgtctcctgcattagctcctcttctctcattgttaaagttggagtcttccaacaatttgttcttgaacccttccccatcatcacttcctcctttgttgacctcatccagactctagactttaaatgccatctatattctgatgactattgccttgacagagccattggtcataaactgtctccaccctcttataactgaggccaattttgtatttaaatttccccagccctaaaattgttagaataatacctgtgtcctctctctcacaccatacatccratctcagaaaatactattggctcaaacttcagaacacatccaaaccccaatgcccctcacaaactccacttaagtttaggccaccatcacatctcactttgatgacccaatagctcctcacaagttctctgcttctattattttcctactacaatct

SEQ ID NO: 426471 - DNA, 616 bp, Homo sapiens
ccatagctgaaaagcaatctgataaatgtagcttttatctttcayttatatttgtaggtaccacagaccctaagtgggtgtgtaataagccaattgcattgctagtcacagcccaccttgtggctactcaacgtcagtacatacatgaactcccacacttaacatttccaggtaacaatagctaaacaccccacttaaaagagttcatcaagcattgcatctactgctggatgattgattagctctcctcaaacttaggcatgctcctctctcactaggctgtaacttttgggataaatgattaagatcaccactctaccatgcttatagaaaattctggtgaaaagagagggaaaggagggaaactatcacatttttattacagcttcggtctcattatttgttattggtctgttcagattctggatttcttcatgattacatcttggcaggttctatgtgtctaggaatttattcatttcttctaggttttccaatttattggcacccatgattgctcatagtagcctctagcaatcctttcaatttatgtggtatcagttgtaatgtctcctttttcatttctgattttatttgggtcttctctctttcttaa

SEQ ID NO: 426472 - DNA, 616 bp, Homo sapiens
ccatagctgaaaagcaatctgataaatgtagcttttatctttcacttatatttgtaggtaccacagaccctaagtgggtgtgtaataagccaattgcattgctagtcacagcccaccttgtggctactcaacgtcagtacatacatgaactcccacacttaacatttccaggtaacaatagctamacaccccacttaaaagagttcatcaagcattgcatctactgctggatgattgattagctctcctcaaacttaggcatgctcctctctcactaggctgtaacttttgggataaatgattaagatcaccactctaccatgcttatagaaaattctggtgaaaagagagggaaaggagggaaactatcacatttttattacagcttcggtctcattatttgttattggtctgttcagattctggatttcttcatgattacatcttggcaggttctatgtgtctaggaatttattcatttcttctaggttttccaatttattggcacccatgattgctcatagtagcctctagcaatcctttcaatttatgtggtatcagttgtaatgtctcctttttcatttctgattttatttgggtcttctctctttcttaa

SEQ ID NO: 426473 - DNA, 616 bp, Homo sapiens
ccatagctgaaaagcaatctgataaatgtagcttttatctttcacttatatttgtaggtaccacagaccctaagtgggtgtgtaataagccaattgcattgctagtcacagcccaccttgtggctactcaacgtcagtacatacatgaactcccacacttaacatttccaggtaacaatagctaaacaccccacttaaaagagttcatcaagcattgcatctactgctggatgattgattagctctcctcaaacttaggcatgctcctctctcactaggctgtaacttttgggataaatgattaagatcaccactctaccatgcttatagaaaattctggtgaaaagagagggaaaggagggaaastatcacatttttattacagcttcggtctcattatttgttattggtctgttcagattctggatttcttcatgattacatcttggcaggttctatgtgtctaggaatttattcatttcttctaggttttccaatttattggcacccatgattgctcatagtagcctctagcaatcctttcaatttatgtggtatcagttgtaatgtctcctttttcatttctgattttatttgggtcttctctctttcttaa

SEQ ID NO: 426474 - DNA, 586 bp, Homo sapiens
tcacttttctttttttatttcaatagtttttgggggaacaggtggtgtttgattacatggataagttctttagtagtgattactgagatattggtgcccccatcacctgagcagtgtacattgcacccagtgtgtagtcttttatcccttaaccccctcccactcttccctccaagtccccaagtccattgtatcattcttatacctttgtctcctcatagcttagctcccacttataagaacatacaatgtttgcttttccattcctgagttacttcacttagaataayggtctccaactccatccagattactgcgaatggcattgttttgttactttttatagctgagtagtattccatgatatatataccacattattttattcactcattgactgatgggcatttgggctaattccatatttctgcaattgcgaactgtgcttcaataaacatgcatgtgcaagcgtctttttcatagaatgacttattttcctctgggtagatatccagtagtgggattgctggatcaaatggtagatctactttaattctttaaagaatctccatactgttttctttaa

SEQ ID NO: 426475 - DNA, 599 bp, Homo sapiens
aagtatagctactcctactctcttttggattccatttgcatggactatcttttcccatccctttatttttaatgtttatgtgtgtgtttataggtgaagcatattttttgtagtccacagatcactgggtcttatatttttatcccttgagctattctatgtcttttgaatagagagtttagtttagttgcattcaatgttattattgataagcaaggacttattcctgccattttgttttcttgttgttttatagtcttgccttccttctttccttcytttctgtcttccttttagtgaaggtgattttctctggtggtattctttaatttcttgatttttatttttgacttgaggttaccatgaggcttgcaaataatatcttctaagccattattttaaactatgacaacttaacactgattgcataaacaaacaaacaagcaaagagaaaactagtaaaaatttgacaccttagcttcctctcttggctttttgatgttttgttgtttctaattttgtattattatactgtccatgtaataaaaagttgtaattattattttaataggtttatcttttagtctttctactcaaga

SEQ ID NO: 426476 - DNA, 525 bp, Homo sapiens
tgtttttttttaattattattatactttaagttttaggatacatgtgcacaacatgcaggtttgttacatatgtatacatgctctcgctgcttttaggattctttctttatccttgacctttgaaaatgtaagtgttaaatgtcttcaggtagtcttatttggattaaatctgcttggtgttttataaccttcttgtactagatattgatatttttctctaggtttgggaagttctctcttgttatccctttgaatgaactttctatcccatctctctcactactttctctttaaggccaataactcttagatttgcccttttgaggctattttctagatctcataggtgtgctacattctttttttattcttttttcttatayttcctctggctgtatattttcaaatagtctgtcttcaagctcactaattctttcttctgcttaatgaattatgctcttaagagactctgatgcattcttccatatgtcaattgcatttttcaacttcagaatttttgcttt

SEQ ID NO: 426477 - DNA, 609 bp, Homo sapiens
aagaaatgtcaatcagagtgtagggtcctcaaatagctattttttaaatttaagcaacaaattataaaatgaaaataggcaaaataaaacaagtgtgtatgtaaataaaacaaattwaaatatttaaataaaatagtcattaaatctgggagagaaagggaaagggagagcaattgctaatggatacgaggtttttttgatggataataaaaatattctaaaattatattatgatgatgcttgcacaagcctgtaaatgagctaaaaatgattaaatcataaatatttaagtgagctttatgagttgaaaattatatctcaatgaagctctaaaaaaatcattaaaacttaaaagtttcaatagaaaagtcaaactataaatccaacacaaaagaattatcatatttcatcaattctaacttgtacatattcttcaatattttaacatccctgaaatcaggaagcatctcataaccaatgatgactataatcactatcacctaggcagctcttatggtgaaattgtcactgtctcacatctcacatgtgtgaacttgcttatatctatgccattatttatgtgatccgttagtcccacacatacttgat

SEQ ID NO: 426478 - DNA, 481 bp, Homo sapiens
tgataaattctttccagatgttttcaacttagtttgcccagatccatcaaaggaatcactatctctgacagctagtcttacaaaatatgttcctcaaataataagatttgaaagtcaaaattagtccttgatccatggcttacagaatgagtgttgtgttggcaggcagaaaaacaacattaatctccttgtacatctccatcagagctcttgggtgaccaggtgcattgtcaatgagcaataatatttttaaaggaatcttttttgctgaacagtaggtctcaatagcaggcttaaaatattcagtaaaccataaaataatcagatatactgtcatccaggctttgttactccaggcagagtagtttagcaaaattcttaagagttctaggattttcaraataaacaatgagcatcggcttccacttatagtcactgattgcatttgtctctaacaagagagtcagcctgtcctttgaaa

SEQ ID NO: 426479 - DNA, 603 bp, Homo sapiens
  misc_feature (1)...(603): n = A,T,C or G
ttggtttatattatatagatagtttagtttcctttaaccctatgaactaatttctgctaccttcaaacctttctctctattttctatttttttcaacttttattttacattcaggggtacatgtgtaagtttgttatataggtaaactgcatgtcatggggtttagtgtacagattatttcatcatccaggtaataagcatagtgcctgatgggtagttttttgatcctctctctcctcccaccctcatttcaagtaggccctagtgtctgtggttcccttctttgtgtccatacatactcagtgtttagctcccacttataagtgagacnatgtagtatatggttttctgttcctctgttagtttacttaggataatggtctccagctccacccatgttgctgcaaaagacatgatctcattctctttaatgactgcataatattccatagtgtatatgtaccagattttctttatccagtctactattgatgagcatttagyttgatttctgcttttgctattgtgcatagtgttccaaaaaacatacacgtagcagaatgatttatattccttgggatatatgcccagtgatggaattgc

SEQ ID NO: 426480 - DNA, 609 bp, Homo sapiens
aagaaatgtcaatcagagtgtagggtcctcaaatagctattttttaaatttaagcaacaaattataaaatgaaaataggcaaaataaaacaagtgtgtatgtaaataaaacaaattaaaatatttaaataaaatagtcattaaatctgggagagaaagggaaagggagagcaattgctaatggatacgaggtttttttgatggataataaaaatattctaaaattatattatgatgatgcttgcacaagcctgtaaatgagctaaaaatgattaaatcataaatatttaagtgagctttatgagttgaaaattatatctcaatgaagctctaaaaaaatcattaaaacttaaaagtttcaatagaaaagtcaaactataaatccaacacaaaagaattatcatatttcatcaattctaacttgtacatattcttcaatattttaacatccctgaaatcaggaagcatctcataaccaatgatgactayaatcactatcacctaggcagctcttatggtgaaattgtcactgtctcacatctcacatgtgtgaacttgcttatatctatgccattatttatgtgatccgttagtcccacacatacttgat

SEQ ID NO: 426481 - DNA, 625 bp, Homo sapiens
ctagaagtgtgcagcctacaaagactgaatcatgaagaaacagaaaatctaaacaaacctataagtagcaaggagattgaatcagtaataaagagaatcccatcaaagaaaagcccagacctgatgctttcactgaagaattctaccaaacatttaaagaagaattagcactaatccttctcaaactcttcgagcaattaaagagggggaagcactttcaaactcattttatgaggcaagcattaccctgrtattaaaaccagacaaatatattacaagaaaagataactatagatcaatatctctactgaatattgatgcaataatactcaacaaaatactagcaaatcaaattcaatggcacataaaaaaaatactacaagatgatcaggtgagacttattcctggcatgcaaagatggtacaacataaaaaaatcaaatcaatataatacatcatgttaacagattgaagaacaaaagctacctgatcatctcaatccatacagaaaactaattcgacaaaattcaacagcctttcatgatttaaaaaaacacttgacaaactagaaataacagaaaatgttctcaatataacaaagggccatatgtgaaaactaacctcat

SEQ ID NO: 426482 - DNA, 625 bp, Homo sapiens
ctagaagtgtgcagcctacaaagactgaatcatgaagaaacagaaaatctaaacaaacctataagtagcaaggagattgaatcagtaataaagagaatcccatcaaagaaaagcccagacctgatgctttcactgaagaattctaccaaacatttaaagaagaattagcactaatccttctcaaactcttcgagcaattaaagagggggaagcactttcaaactcattttatgaggcaagcattaccctggtattaaaaccagacaaatatattacaagaaaagataactatagatcaatatctctactgaatattgatgcaataatactcaacaaaatactagcaaatcaaattcaatggcacataaaaaaaatactacaagawgatcaggtgagacttattcctggcatgcaaagatggtacaacataaaaaaatcaaatcaatataatacatcatgttaacagattgaagaacaaaagctacctgatcatctcaatccatacagaaaactaattcgacaaaattcaacagcctttcatgatttaaaaaaacacttgacaaactagaaataacagaaaatgttctcaatataacaaagggccatatgtgaaaactaacctcat

SEQ ID NO: 426483 - DNA, 625 bp, Homo sapiens
ctagaagtgtgcagcctacaaagactgaatcatgaagaaacagaaaatctaaacaaacctataagtagcaaggagattgaatcagtaataaagagaatcccatcaaagaaaagcccagacctgatgctttcactgaagaattctaccaaacatttaaagaagaattagcactaatccttctcaaactcttcgagcaattaaagagggggaagcactttcaaactcattttatgaggcaagcattaccctggtattaaaaccagacaaatatattacaagaaaagataactatagatcaatatctctactgaatattgatgcaataatactcaacaaaatactagcaaatcaaattcaatggcacataaaaaaaatactacaagatgatcaggtgagacttattcctggcatgcaaagatggtacaacataaaaaaatcaaatcaatataatacatcatgttaacagattgaagaacaaaagctacctgatcatctcaatccatacagaaaactaattcgacaaaattcaacagcctttcatgatttaaaaaaacayttgacaaactagaaataacagaaaatgttctcaatataacaaagggccatatgtgaaaactaacctcat

SEQ ID NO: 426484 - DNA, 625 bp, Homo sapiens
ctagaagtgtgcagcctacaaagactgaatcatgaagaaacagaaaatctaaacaaacctataagtagcaaggagattgaatcagtaataaagagaatcccatcaaagaaaagcccagacctgatgctttcactgaagaattctaccaaacatttaaagaagaattagcactaatccttctcaaactcttcgagcaattaaagagggggaagcactttcaaactcattttatgaggcaagcattaccctggtattaaaaccagacaaatatattacaagaaaagataactatagatcaatatctctactgaatattgatgcaataatactcaacaaaatactagcaaatcaaattcaatggcacataaaaaaaatactacaagatgatcaggtgagacttattcctggcatgcaaagatggtacaacataaaaaaatcaaatcaatataatacatcatgttaacagattgaagaacaaaagctacctgatcatctcaatccatacagaaaactaattcgacaaaattcaacagcctttcatgatttaaaaaaacacttgacaaactagaaataacagaaaatgttctcaayataacaaagggccatatgtgaaaactaacctcat

SEQ ID NO: 426485 - DNA, 596 bp, Homo sapiens
gggttttttaaaatgaaattttataacctccaatgtaataactgattcaacaagaatgccaaactgttgagttaaaggttgctgaaggcagaatgtttacatggacccaagatactamcccataaattacttataattagaaagaagaaaatgtacttttacaatgaagagatctggcattcaacaacttaaccaagtaatagttggacatctggtcattatgttatacaataaaaattatataacatcacctacaatttttgccaaaaatgtgtaaccttaatctaatcatgtggaaacaataaagaatgtgagacattctgcatgacaactagcctgaactcctcaaaaagtcaatgatagaaaaaaatcagtgggcaggaggctgttctgggtgaaaagatactacagagatataactgtcaaatgcaagatataaattttgattgaatcctggaatttaaaaaataataaccagctatgaaatacatttttaggatcactggggacatttgaatatgatatgtgtagaattttatattaccaaattgttgttaattttcttatgtgtaggagaatttattcttagaagttag

SEQ ID NO: 426486 - DNA, 596 bp, Homo sapiens
gggttttttaaaatgaaattttataacctccaatgtaataactgattcaacaagaatgccaaactgttgagttaaaggttgctgaaggcagaatgtttacatggacccaagatactaacccataaattacttataattagaaagaagaaaatgtacttttacaatgaagagatctggcattcaacaacttaaccaagtaatagttggacatctggtcattatgttatacaataaaaattatataacatcacctacaatttttgccaaaaatgtgtaaccttaatctaatcatgtggaaacaataaagaatgtgagacattctgcatgacaactagcctgaactcctcaaaaagtcaatgatagaaaaaaatcagtgggcaggagsctgttctgggtgaaaagatactacagagatataactgtcaaatgcaagatataaattttgattgaatcctggaatttaaaaaataataaccagctatgaaatacatttttaggatcactggggacatttgaatatgatatgtgtagaattttatattaccaaattgttgttaattttcttatgtgtaggagaatttattcttagaagttag

SEQ ID NO: 426487 - DNA, 579 bp, Homo sapiens
gatatagaaacaatttaccaaagataaaatccttggtggaaatgggaagcgaaaataaaaagaaaatcacagtggtcaagaaattctaatgagaatttccaataaaagaagtataaagaacagttcgtaagaataacattgatatcacaatgtaatcagacaactactaaaagattgtttgtatcctgtggtagaaatagaatcagagcatggttttccacgtctgccagaggtgtattctggtcatcagtttcttgatctgtaaaacggagataatctagcctgcctacctaattgtatgattaggattagaaaagtgaaattaatcactagtaacttaaaaatattattgtacaacaaacatatgataacattttctgccctttgcaaatataaagatgtcacttttcaccctcaaagtgatcacaacttaraggaactcaaatagacatcaacaaacaatggggtgaatgtcctataccggagataagaacagggcaatggatactgcctgggcaaaacagggctgacgctaccgcacaaacaggatggtactattgttttaaagaataaagattt

SEQ ID NO: 426488 - DNA, 608 bp, Homo sapiens
tgtttgagtaattgttgtttgccaatggaaagctcatatcttgagaaatttgtgtacaaacaagtagaagaattagtttcttcattcatctggaatgtgggatactggtgaaatactgcagaatatgaaacaattcgctccacagagatgctttccatgttcattttcttgcaaagcgtctctaaaaacagcaaccttttttttctaggatacaaaatgataaatttattctactttggatgtttaccattcaaatatrtataatctaatttcatttgatataagtattctgtaatcactgataaggaatgtctaacgtattaactctgtatttagcagctactaatttctttgatatgtttcataacttcccttgattctaaataagattctttttaaagatataatcatatttccaggttttgtattttctcagtaataggtctaatattttgttcctataaatttactaatatgttttgtcgtcacacctcagcaattaagtgagtatcctcataaatgaagcttagattttagactataaaatttaaccaatattacacagcaggatttgacacaaactttggtttggtctaagttacagcagt

SEQ ID NO: 426489 - DNA, 608 bp, Homo sapiens
tgtttgagtaattgttgtttgccaatggaaagctcatatcttgagaaatttgtgtacaaacaagtagaagaattagtttcttcattcatctggaatgtgggatactggtgaaatactgcagaatatgaaacaattcgctccacagagatgctttccatgttcattttcttgcaaagcgtctctaaaaacagcaaccttttttttctaggatacaaaatgataaatttattctactttggatgtttaccattcaaatatatataatctaatttcatttgatataagtattctgtaatcactgataaggaatgtctaacgtattaactctgtatttagcagctactaatttctttgatatgtttcataacttcccttgattctaaataagattctttttaaagatataatcatatttccaggttttgtattttctcagtaataggtctaatattttgttcctataaatttactaatatgttttgtygtcacacctcagcaattaagtgagtatcctcataaatgaagcttagattttagactataaaatttaaccaatattacacagcaggatttgacacaaactttggtttggtctaagttacagcagt

SEQ ID NO: 426490 - DNA, 609 bp, Homo sapiens
tcaaacgtctggatcacagccttacctagcccttacagcacctgactgtgcaaacttgggtgagtcactcaagtgatctgagtgtctgttttattgtttgatactgagggatagggaatgtactacttctaatgtttcttccagcccaagaagcctcagctgtcagcagacaaactgccaaattcatcaccaatttggtcaaattctaatcactctaatatcatacacatgttatctgagtatattattcaattgtctattttttaaagccaaagtaaaaagagttaaatgaatgctgtgaattggaactaccgcraagcaacctgcattagttttattaacaatatcttacatttggtagcactttatagcaatcttttatatattcttctcttactttaccttaaaagctagtttatatgcatgttaatatttgtctcattttacaattcagaaaactgagactcaggcgattgcccaggattaaacaaccagtgatagagtctgaactcaaactcagcactgacaccaagtcgaatagtatttttataacactaaaatatttctcaatatgccagacatgtaatgtctaaatataatttcagactt

SEQ ID NO: 426491 - DNA, 609 bp, Homo sapiens
tcaaacgtctggatcacagccttacctagcccttacagcacctgactgtgcaaacttgggtgagtcactcaagtgatctgagtgtctgttttattgtttgatactgagggatagggaatgtactacttctaatgtttcttccagcccaagaagcctcagctgtcagcagacaaactgccaaattcatcaccaatttggtcaaattctaatcactctaatatcatacacatgttatctgagtatattattcaattgtctattttttaaagccaaagtaaaaagagttaaatgaatgctgtgaattggaactaccgcgaagcaacctgcattagttttattaacaatatcttacatttggtagcactttatagcamtcttttatatattcttctcttactttaccttaaaagctagtttatatgcatgttaatatttgtctcattttacaattcagaaaactgagactcaggcgattgcccaggattaaacaaccagtgatagagtctgaactcaaactcagcactgacaccaagtcgaatagtatttttataacactaaaatatttctcaatatgccagacatgtaatgtctaaatataatttcagactt

SEQ ID NO: 426492 - DNA, 542 bp, Homo sapiens
ttagcacaagttaacaaatgggcccatgggaaagactaaaattttgtgccagaacattctctcatctcccatatgttcactcctcatagctttgacggcttcccagaaaatctatctagtaaatagtttttttcccctacatccactaaccttgaggtaacacagaagatagccctagtaggatgtcaacttgatttgagcaatgtttctttttgcacacaattatttcctcagcccctagaacagtaccaggcataaaacaagtgctcaacatttattaagataaatgaaagagggacatgtgtccagtgcgtgagttccaaagaaacaatgcacggatagttttccttttctactttcttttcttctcaatgtgaaaygtggcattgttttctttcttgctcatttttctcttcaactagcacaactctcagagagtaactgcgtaactgacttttctccttgttgcatggcactgaccaatataccctggccaatctgggttagtctggagaggtgagagtcatcaatgagaactgtgt

SEQ ID NO: 426493 - DNA, 542 bp, Homo sapiens
ttagcacaagttaacaaatgggcccatgggaaagactaaaattttgtgccagaacattctctcatctcccatatgttcactcctcatagctttgacggcttcccagaaaatctatctagtaaatagtttttttcccctacatccactaaccttgaggtaacacagaagatagccctagtaggatgtcaacttgatttgagcaatgtttctttttgcacacaattatttcctcagcccctagaacagtaccaggcataaaacaagtgctcaacatttattaagataaatgaaagagggacatgtgtccagtgcgtgagttccaaagaaacaatgcacggatagttttccttttctactttcttttcttctcaatgtgaaatgtggcattgttttctttcttgctcrtttttctcttcaactagcacaactctcagagagtaactgcgtaactgacttttctccttgttgcatggcactgaccaatataccctggccaatctgggttagtctggagaggtgagagtcatcaatgagaactgtgt

SEQ ID NO: 426494 - DNA, 576 bp, Homo sapiens
gtgctatatctcgtagttccattaatccaagactacaattgatatttttaatgtaacggttgtacaatgtggcccatttctcaggggatggtgatggaagcagtggaaagctttccttctctatgttcaagcaacatgaaaaatacagtatttgatctagactaaaataggaagtrctttgtataagtgtctcatatatgtgcaaaggaactaaagctaccagaagaaattcaaactgcccattctgattttcaaatataatactatagtgaaactagaatatttatatccacttttaatactatgtgtcaaccattcaattttgttttggcaattaacacaaagttactgctcacagaaaattcattttcttctatagatgctattttaatatttaaccttggaggagaaaaaggatattttttagtttgtttataaccagaattctaagtaatggtattttaaaagaaacaaccataattgaccacaaatttgaataaagaattcccttctgataaaacaaagccactattgtggattagtggaaaaataagtaacaaaatagtttgtgtcgat

SEQ ID NO: 426495 - DNA, 521 bp, Homo sapiens
aacacaggctcagaaaaccaaataccacttgttctcacttataaataggagctgaatgatgaaaacacatggatacatggagaggggcaacacagactggtgtcttctggggagggttgggggagagagagcatcaggaagaataattaatggatgccggacttaatacttaggtgatgggatgatctgtgcagcaaaccttggcacgcgtttgcctgtgtaacaaacctgcacttcctgcacatgtacccctgaacttaaaagttgaatatttttttaaaaactaccactgartcttcatgagaaactttgtgagtagaaagaaaatgagaaagcaaagctagaattgtgtagccaaaaacaatatccttcaaaactgaatactatataaagacactttcagactgatgaaagctgggattatttgttgccggatttacactacaataaatcataaatcagttatacagccaagagcaaaatgactcttaatagaaacttggatctatataaagaaatta

SEQ ID NO: 426496 - DNA, 450 bp, Homo sapiens
gagacgaggttttaaccatgttggccaggctggtcttgaactcctgacctcaggtgatctgcccaccttatcctcccaaagtgctggaattacaggcatgagccaccatgcctggccacatctgcttagtttttaagcagcatatattgtgtttggtgctgtctatagagtaatgagctagagtgatatgtccttatgaaaccacctattttcctgtggtaaggcaggcatttaacaaatagacacaaaatgattaattataatgtgaaaacaagaacatgcaaagaaaactgaaaaggcccttagctctggcaattaagtcattgactttagtctgtaaagactgtggtttcagaagtgggagaccagtttyaggagtgtaaggggtaatccagaaaacacacagactttagaagaaaaggagtatgactactggatgcatcaatgcct

SEQ ID NO: 426497 - DNA, 591 bp, Homo sapiens
tgtgctatagatgctggtagagctaagagggtgtcagagaagacctctctgaggaggcggttctggaaatgagtaggtttcatgagggagatgggatatgggatccagcagaagaaaccacgtgtgtgaaagtctgaggggatgagaatgtatgaaagacagtggaatgatcgactgaactgggcctggaggatgggaggggcacaggccaggtctgtgagatcagaggttagaatttcacgctttctttgtcccaagatctttagaagccatccagagacacagggaatggtgagctcgtgggagaggagggattggtttggatttgtgttcctgcscaaatctcatattgaattgtaatcaccactgctgggggagggcccgggtgggaagcgaccggatcatgggggcagatttcccccttgctgtgctcatggtagtgagtgagttctcatgagatctggttgtttaaaagtatgtagcacctcccccttctctctcttccctgctcccgtcatgtgaagacgtgcctgcttttttccccttaccttctgccatgattaaaagtttcctgaggcctccacagccaag

SEQ ID NO: 426498 - DNA, 572 bp, Homo sapiens
catgaaaccaacatatgcagaccaatgtgtaaaccagacttgattttttttctttcttggtcaattggttgtgagaacaacccccaggataccataggtatgggttgagggagagaaggcaatgaaagcggagttggtgttgaaagagtctcagccacctgttsaagcaagctacgctacttctgttttcagacctgctaaagcaagctaagtctattgtgtaccatttctgtctgatgatagattgctgctttgcatgtccaagttcatgactaggctagctaacaacatccacattatgatgggaagctcaggccacatgatcccctgccatcccatggttaggtattgtctctaccaaggcacagtagtaagacagactttcttaaaagcagagtagtaatcttcagaagacataggtttgcttccctatgattctactggtgctaaaagagcctccacacaatatccctataggccgtgatactttcagtatcgttggatctgctggatcataagacccacatggtagagcagcttgtgctataactcaaacttgcaatagagccttt

SEQ ID NO: 426499 - DNA, 504 bp, Homo sapiens
aatttggaagtgaaaaacattagtcttgggcacagagggcacatgggacaccaggggagcctccagttcagcctccctgtccagggatctccaagccctggggtaggaattcttagcctgccttccttaggccttggaatcagggygtgcggggatttcttagatgtggagaggacagagctgcctttgcatgcaacacagggacagatctgatacccacaaccccagctgctgagcatacatcctgccccatctccctccaagcgtccctgtgccggcgccccttgatggcctcagtgccacgctgtgtctgagaagtgtctcatggcaagggcaaagttttcctcagcactcgtgcttgcctcctgacagagaaacagcctctgtccgcgtaggttccacttccctccaccaaactgcctcaacaaacggcgggaggatgttgcgactgactggggaacggaggcctgggtctatttctgacgcactgtggtcaaaacactt

SEQ ID NO: 426500 - DNA, 596 bp, Homo sapiens
gcgccttaacactaacaggaacttaagaatccagctctgatgtcaggcaatcccgtgtccaggtcaggtcacttttttaagtctcagtttcctcactggtaatgtgggggtgggggcctccccaatgacctcgcaactcagaccgcttttgattctctgactacagtggtggagttgagacaggtcggctgctgcaaccgccgtctgaaatagcaatccggaaaagtcaggttgggaaagtgacagagtagacgccctgcggctctgatccgggcggcgcctcagctgcccacactatgtgggcggcaacgcacaaactccttaaccacgtggtgcctccattcccctagggagtcccatcacaggataacttctagcaaaatcaatcttcaagaaaaaaagaaggggtcctgccgaagatataaggaagctccctggggatcccgcagcacagcacaaacttagttcttgagagccgcacaaaaccaacttccgccccagtggagtygcgtccggaaggcgcggccccggaggtcacgtgggcccgcggaattacagcctggcggggcgctcaggtggaagcagtaggccacatt

SEQ ID NO: 426501 - DNA, 462 bp, Homo sapiens
gtcctgccgaagatataaggaagctccctggggatcccgcagcacagcacaaacttagttcttgagagccgcacaaaaccaacttccgccccagtggagttgcgtccggaaggcgcggccccggaggtcacgtgggcccgcggaattacagcctggcggggcgctcaggtggaagcagtaggccacattatgtcgactgttccatgcaagtcagggtgggggccgtccctatcgcaggcatgagacaagtccagctgcgtcgtgtctggtaatctgagggcaagaagaacgatttgcagaagctcccagttttcttggctgtggcacagtcgctttgagggccaggttccttcggcttcctcccgactcccctgcttccccccgtaggattcccgttggtatcgtccgagccccacctccctcctcttcgccccckcacgccgaaaacaggggcctctcacg

SEQ ID NO: 426502 - DNA, 543 bp, Homo sapiens
acttcctgtgcttttgttaatacaagaggtagagcgctaaagggacgtacattgaaattcaataagattcttattagaaccatattactgcatacattattttaattgttttttaatgtaaagtggttgcacttatcagtaaaacaatctagttgttttggcggttttttttttaagtaaaaacaaaccataagtttttttatttggtaaaaattttaatagttctagaaattatatcactacataaatttcaaaaagctctttaaggtattaactaaattgggccaaattaacttttttgttatagaagtgtctcttttttttargtcataaaatgggatttaagggcgtactctttcccctttatatgggagtatgtaagagttggtgaattttggagatggaatgctctactttaagatttgttgggaaaggttctccccttactcttgttccaagtctacctatccaggaaagttgttttagaaagtatagaagactaaagcagtgagatttggaatagagtttctacagtgttatggg

SEQ ID NO: 426503 - DNA, 567 bp, Homo sapiens
agtactttttatagatttagtggaaatcttgggaaatatagaagcctaaagcaaattataattctcatcatccagagcaaccaaaatgttttcagtgattaatttcttctagtcttttttatgtgtatctaaataaatacactttttatgaaattgtacgataacgttcatgcacctttgtatttctttttttcttttctttttttttttttggaagcgaagtcttgctctgccgctcaggctggagtgcagtggtacgatctcggttcactgcaaccttcmcctcccaagttcaagcgattctcctgcctcagcctcctgagtcgctgggattacaggcacctgccatcatgcccaactaatttttgtttttttagtagagtcacggtttcaccacattggccaggctggtcttgaaatcctgacttaaagtgatccgcctacctcagactcccaaagagccgggattacaggtgtgagccaccgagcccagcctgtattttctctcttaatgtaagcattatggtatacactttacccatcctgctcttgattagagaattaggc

SEQ ID NO: 426504 - DNA, 541 bp, Homo sapiens
gatgatttgacataatctaatttaattcayagttaggttacgccacaggatactgtaggtacacaggttaggaatcctttcctccctccatatttttaaaaaactgatgctaatgaatcttctacctgctttttgtgatttctttttcttcatgcttatgccacctttttctcagtttcagtgaagccattctgtcttcacgagaaggaatacaaaacagttgtcattaaagttaccaacttgtacagccaccagaaccagtgttctttgataactgttacttttttcttagattattttaaatggaaatcgctttttctgtttcctcttgaaacattttactgcctgaaaagaattcagatatttgttttttccttattacttgataatactttctcatgtgaaatttgttggcaggatatgcctttaaaaacagttattttacttgttgaaattataaattgcatattattaagattatttttgtaacatgaaaaattgcaaccaaatattttaccttatactagtaaattcaaaagtc

SEQ ID NO: 426505 - DNA, 536 bp, Homo sapiens
gtgggggaggactctgagtacagaatataaatcactcttggcttcccagagcttacgctgactcatttgagaaacagaaaaagtgactggcaggccaacatatacatacacatgcatataatatacatatatgcacacacatatatatgaaacttttgaaaaaaatgcactagggaatttattatttgcatatttaaaaaatctaccttagatagcatcagtatgtagaggctagggacatgttcaattccaacatttattgagggctgactgagtaccaactgagggctagatacatccatgcgggcttttccatttagtcttcataatatgtgaatgtagaattccagaagcatgagatagctagacacatagatatccttggatatataaaacagttattagatttccctggctggraaatttagggatagaaactgagtatgtgtgtagatgatgcatttatctttattgagaaagtgagcattgagaggaaggtgcactcatttagagaagatgtcggatttccaaaatca

SEQ ID NO: 426506 - DNA, 605 bp, Homo sapiens
tgtgacttgtttctatcagacagcatatagcaaaggttgtaggatgtatgtgactacatctacatgattgcattatagatcactgtaacatctgccttgcgaggagattctttttccccttackggccctaaggaagcaagtggctatgttgggaaggccaatgtggcaaagaccttaaagcagtttttagccaagagccatcaacaaactgaagccccagtacacagcctgcaaaaaaaactaaattcttccagcaagtacgtgcacttggaagcagatccttgtctagtcaagccatagataagaacccagtcctggctaacatcttgattgcagccttattgaggacccagctaagccatgctcgaattcctgacttacagaaactatgaaataatcgatgggtattatttaagctgctaaatgtttcataacatagttactaaacaatacataattaatacagaggcaaacttggtaatttttttgcaagtagggtgaaatctcagatccttgatagttcttagcagttttggcagcaaggatggtatgctgacagacacgtggctttcaggaaggagaaagataagggtcttgtggacta

SEQ ID NO: 426507 - DNA, 605 bp, Homo sapiens
tgtgacttgtttctatcagacagcatatagcaaaggttgtaggatgtatgtgactacatctacatgattgcattatagatcactgtaacatctgccttgcgaggagattctttttccccttactggccctaaggaagcaagtggctatgttgggaaggccaatgtggcaaagaccttaaagcagtttttagccaagagccatcaacaaactgaagccccagtacacagcctgcaaaaaaaactaaattcttccagcaagtacgtgcacttggaagcagatccttgtctagtcaagccatagataagaacccagtcctggctaacatcttgattgcagccttattgaggacccagctaagccatgctygaattcctgacttacagaaactatgaaataatcgatgggtattatttaagctgctaaatgtttcataacatagttactaaacaatacataattaatacagaggcaaacttggtaatttttttgcaagtagggtgaaatctcagatccttgatagttcttagcagttttggcagcaaggatggtatgctgacagacacgtggctttcaggaaggagaaagataagggtcttgtggacta

SEQ ID NO: 426508 - DNA, 620 bp, Homo sapiens
attgatagaacaactaagtaggtcaacaaggaaacagaagacctgaacaacactgtaagcctagtgaactataaacattataaactagacctagaagacatttataagatatttcacccaacaaaagcagaatatacgttgttcttaagcccacatataacattttctagaaaagtctgttaggcaataaatcaaatctcaataaatttttaaaaacagaaataatacaaagcatgttctctgaccacaatggaattatataagacattaataacagaaaaaaacaggaaactcacaaatatgggaaaattaaacaatrcactcctaaatgaccaatggatcaaaaaagaaattaaaaggaaaataagaaaaattttgagtgaatgaaaatgaagatagaacataccaaaatatatgagatacagcaaaacagtgcttggaggaaaactgacaactgcaaatgaaaggaagaaagatttcaagtcaataacccaaacttacatcttaagatagacatttgaaaacgaagaaaaaaagaactaaagttaaagcaagcagaagcaaaaataaaacaaaaaatgaagattagagcagaaactaataaaatatagaatagaaaa

SEQ ID NO: 426509 - DNA, 611 bp, Homo sapiens
atttctctaactcatctgcctagtgaaaaggaagagaggtagaacatgattaatagaaacttcagttgtttcaagttttttctgttactaacagtacaaagcaaacatagttacctaaatatgaatttaaatgttaaaaagaaaaatataaaggaaaaaaataaatattctcaaccctgtttatgtcacatgtgctatatttttaattaggtaattgtacttatttattaaaagttaaatctgaatgcaaaaagagaaagttcaacgataattgatttatcagcacccactgaaatgaacatgttttcaataaaagtaagtcactaggaaaaactgttatcaagtcagttataagtgaagaatttgtcaaaacagggcaaaaattaaaattaggaaaaaataaaatctwcataatttctacattatcttgttccactttaaagaaagataagctggaaataataaatgaagcttcaagcttgtgatttatgcaaaaagacagagagagaaagagacggtgggagggggggtgcaagagagagaacttcaatcatggccaacaaaaaatagtatttttatctcagttgactcattgaagtttggatgctgta

SEQ ID NO: 426510 - DNA, 611 bp, Homo sapiens
atttctctaactcatctgcctagtgaaaaggaagagaggtagaacatgattaatagaaacttcagttgtttcaagttttttctgttactaacagtacaaagcaaacatagttacctaaatatgaatttaaatgttaaaaagaaaaatataaaggaaaaaaataaatattctcaaccctgtttatgtcacatgtgctatatttttaattaggtaattgtacttatttattaaaagttaaatctgaatgcaaaaagagaaagttcaacgataattgatttatcagcacccactgaaatgaacatgttttcaataaaagtaagtcactaggaaaaactgttatcaagtcagttataagtgaagaatttgtcaaaacagggcaaaaattaaaattaggaaaaaataaaatcttyataatttctacattatcttgttccactttaaagaaagataagctggaaataataaatgaagcttcaagcttgtgatttatgcaaaaagacagagagagaaagagacggtgggagggggggtgcaagagagagaacttcaatcatggccaacaaaaaatagtatttttatctcagttgactcattgaagtttggatgctgta

SEQ ID NO: 426511 - DNA, 511 bp, Homo sapiens
attttatctctaggaaaaaaagcatatatttgtgtgcacagtaatgttcttgaataaagaggaacaccaaccaaaatttttctttttccttctccccctctttgtccttcatctgtgtcataaatgatacaaagaaaactgaaagaattagggaatgtgacacatgaataaaccttacctgtcaggtatgactactgaaataaagatttgggaatcactgccttagaaaacaacttataatcaactctgtgcatttaatggcttatagagatgaaaaaaatcaatgcagaactgctgattttkatattttaaacaaataattgcaaacaagaattttcgaaagttcatgaggtaggaggggatcgaggggaagcaaactattcgaagtagcaggtgagaaatctctacataaagtggtttcactctttttgggtttttcttaaaataaaacaggacctcctacaattttccagacaaagagaaagtattgactccagagtgcacaggcctg

SEQ ID NO: 426512 - DNA, 511 bp, Homo sapiens
attttatctctaggaaaaaaagcatatatttgtgtgcacagtaatgttcttgaataaagaggaacaccaaccaaaatttttctttttccttctccccctctttgtccttcatctgtgtcataaatgatacaaagaaaactgaaagaattagggaatgtgacacatgaataaaccttacctgtcaggtatgactactgaaataaagatttgggaatcactgccttagaaaacaacttataatcaactctgtgcatttaatggcttatagagatgaaaaaaatcaatgcagaactgctgattttgatattttaamcaaataattgcaaacaagaattttcgaaagttcatgaggtaggaggggatcgaggggaagcaaactattcgaagtagcaggtgagaaatctctacataaagtggtttcactctttttgggtttttcttaaaataaaacaggacctcctacaattttccagacaaagagaaagtattgactccagagtgcacaggcctg

SEQ ID NO: 426513 - DNA, 511 bp, Homo sapiens
attttatctctaggaaaaaaagcatatatttgtgtgcacagtaatgttcttgaataaagaggaacaccaaccaaaatttttctttttccttctccccctctttgtccttcatctgtgtcataaatgatacaaagaaaactgaaagaattagggaatgtgacacatgaataaaccttacctgtcaggtatgactactgaaataaagatttgggaatcactgccttagaaaacaacttataatcaactctgtgcatttaatggcttatagagatgaaaaaaatcaatgcagaactgctgattttgatattttaaacaaataattgcaaacaagaattttcgaaagttcatgaggtaggaggggatcgaggggaagcaaactattcgaagtagcaggtgmgaaatctctacataaagtggtttcactctttttgggtttttcttaaaataaaacaggacctcctacaattttccagacaaagagaaagtattgactccagagtgcacaggcctg

SEQ ID NO: 426514 - DNA, 567 bp, Homo sapiens
tcattttcaatggtgctccctgagggtgttcagtgcacagtgagcggcctaatgcagcagccttgcatgggaatgttttatatactaattttaactagaaatgttcaagtcctggatgtgaggggatgatgaggtgaggtggtaactgacagaagagtgactactattaataattagtatttcataaaatatttattcatttcaaggcattttgaaatctctagctattcaaatggtcctcaaaggtgaatttgagttcctttactgagtagaaaagaatattgatgatcaagatttgactactactggcaaaatgtaaactgtaggaaataatgtaccttattttgagaagtggattattggtttactaaatagaaatagtaatayttcaactttattccataccaaaaacaaacaggaagacttactggctgcttccaatcacaacaatgaaaggaatgaggattgaaataaatgtttgcttagctttttttaatttttaatttttataggtagatagtatatgtatatatttagctttattattataaagtaatttcaagctaa

SEQ ID NO: 426515 - DNA, 634 bp, Homo sapiens
cagtgcacagtgagcggcctaatgcagcagccttgcatgggaatgttttatatactaattttaactagaaatgttcaagtcctggatgtgaggggatgatgaggtgaggtggtaactgacagaagagtgactactattaataattagtatttcataaaatatttattcatttcaaggcattttgaaatctctagctattcaaatggtcctcaaaggtgaatttgagttcctttactgagtagaaaagaatattgatgatcaagatttgactactactggcaaaatgtaaactgtaggaaataatgtaccttattttgagaagtggattattggtttactaaatagaaatagtaatatttcaactttattccataccaaaaacaaacaggaagacttactggctgcttccaatcacaacaatgaaaggaatgaggattgaaataaatgtttgcttagctttttttaatttttaatttttataggtagatagtatatgtatatatttagctttatkattataaagtaatttcaagctaaatatttttatgtcttctctattcccccaagtgcctggcatgacactttgctatattaattgaaacaattaagttttctatgttagttgggcaaaatt

SEQ ID NO: 426516 - DNA, 576 bp, Homo sapiens
tgctacagaaataaaaagaatcattaagcgtttcctttgaacaattatgcaccaaccaactgtataatctagatgaaatgaacaaatttctagaaacacgacacttaccaaaacacaaaattccaccaaacatttaaagaaaaattaacaccaatccttctcaaatttttacaaaaattttaagaggagaaaacaccatctaactcrttcgatgataccagcatttccctaataccaaagtcaaataaagacactacaaggaaataaaactacaaaccaatatatctaatgaactttgatgcaaaaatcctcaataaaattctagcaaaccaaattcagcaccataataaaaggattatataccatgaccaagtgggatttattcctggaatgcaagcatgattcaacatatggaaattaatcaatgtaatatactacagtaacagcatgaaagaaaaataaatacatgatcatctcaattgacacagacaaactatttagtaaaattcaacacccttttgtgacaaaaacactcatcaaactaggaatagaagttaactgccccaatataataaa

SEQ ID NO: 426517 - DNA, 342 bp, Homo sapiens
aacagggcaaggatgcctgcttttgccacttctgtttaacatagcactgaaagtcctggcgagagcaataaagtaagaagaagaaataaaagtcattcaaattggaaaagaaaaagtaaaatcattctgttgcagatgatataatcttatatgtatacgtagaaaaccctaaagatctcaaacacacacgcacaagcaaacacccacaaaaaaactgttakaactaaagaatatgaatgcagtgaagtattggatacaaaatcaacatgcacaaatcagtggtatctttataaactaccaataaacaacccaaaaagaaaattaagaaaaaaaaattcattt

SEQ ID NO: 426518 - DNA, 567 bp, Homo sapiens
taatacatcaataagttcaaaatattaattctcaatgcattatggcttaactccttcaaatatttaggaattcacaaaaaagaaaatttaaattcttttttcttcaaccagaaaatatgggttttctgtagttcatcttaagtaatcaatatttgtcaacacttctgttccctccagagggtagtaattaaaattgagtaataaattaccattaatgtacataaatgtaaatgtcatatgtatcttgtaaaataaacatctggtgaaaattgagtgaatctatacattataaaatggaaagcatttttcagtgtttcttcaaagcctaaataacttttatttccttcctaaaattgggggctttctgagtaacatcrttcttagtttataatctttatatttttccatggctctgcattttcccatccttacttcgctccatatgtctgaaacactgtcatttaaaacagcaagcttacgttaattaccagagacaagtgttaatggattttaattttgctttattagaatttatgcaaatttcactgtgttgagattccaaataaa

SEQ ID NO: 426519 - DNA, 565 bp, Homo sapiens
agtgttaatggattttaattttgctttattagaatttatgcaaatttcactgtgttgagattccaaataaaatccttacaatctcaatttctctctctctcttttmtgtttactttgtagaagggaatgggaaaagtttgcattagtattcagtgacaggaactgttgacagcaatattctttaaggagaaataggttttataaaattatctttaaaactgtgtgagtttgataatttgttaattagcactgatgtcttttctctataggttcaaatattcaattacactttctgatccggctgcttattttaactgtcttaatggctgcttttgtcttgaccaaaatacgtgcattgttacacacttaataacattcttttccttacgcctagtacagcccatgatataagtttattggaaagttcttctggtaactcaataaatactctgctaaatggaaaagaatatgagaattttagatgtatttttagctctaaattattatttctgtattatccaggagacataaacacaacgttgagctttctaatattcaaaattat

SEQ ID NO: 426520 - DNA, 589 bp, Homo sapiens
ggttcctgcaggagcagacactggtttcctactggcaaaatctgagggcaccamcaagctgatttggcaaaatgaactccgaaccagtctattcgtcacagtgaggggcagttaccaaccagaatggctcactggtgtctaataaagacaggaagtggtcttttggcaagtggtcattctctccatcttggagcatatttcctcttgtgactggtaggtatcagctatcaggcagcctaatttacctgaaaaatgttgttaggcataggatgaattcaggttcatggtgtaacagtttaaacagaagtagtgcaggtatttcaagaggaagtttattttctccttgaatgtgtattttactcattggcagggccacaaggctactaaacattcctaatccatatcactgctgcattttaggcaaaacaagcaagtacacctcattattttgtactgactgggtgtctgtgaacctccgtaagcagagctgtggttcttgttccccatttttcctgtactcctttgggctgaacgatttgtgggcccacaaactacaataaactagagacattttgaacaagaaatgtat

SEQ ID NO: 426521 - DNA, 587 bp, Homo sapiens
agtttcccataatacgttcctcatttccatctgagacctcctcaggatggcctttactgtccgaatttctaccaacattctgatcatgaccacttaggtaatctctaagaagattgaagctttgtctacaaccctcttcttctgatccctcaatggagtcatcctttaagatccattcttggtgatgtaggcattttctagcatgcacttcagaactcttccaagctctacccataactcagttccaaagccacttccaggtttttaagcattcgttatagccacattctattttttggtagcaatttctgtcttagttcatttggcctgccgcaacaaaatactttagactaagtaacttacaaatagtagaaatatattgctgatagttctggagcttggaaaatccaagatcaaagtgggattaggtttcaaaatattaatttggggggtacacaaacattcagacaatagcacctcctttataaaacaggaagacttattttcataaagttgctgcaagagtaaaatgaggatgtacccccagcatttagcatgrtgcctgacacagctccatgcgggcaaga

SEQ ID NO: 426522 - DNA, 615 bp, Homo sapiens
agtggatggacaatccattctgcatcaaaaagtgagagctgactttaaatccaattcaataggtagatagtaggtaagtagatggagctttgcatgtaggaaatcatagaaatagttttataaattattttgttatctatttattgccatgaaaataaaaccatttactttcagaactctactaccaaaatgtatttgaggctgtgcgtggtggctcatgcctgtaatcccagcatttggggaggctgagacaagtggatcacttgaggtcaggagttcgagaccagcctgcccaacatggtgaaaccccatctctaytaaaaatacaaaaattagccatcatggtggcacgtgcctgtaatcccagctactcgggaggctgacgcatgagaatttgttgaacctgggagggacaggttgcagcgagctgagatcgtgccactgcactccagcctgggtgacacagcgagattccatctcaaaaaaaaaaaaaagtgtatttgatacttattaaatagttatcaaatttcagaaatgccagattagagattggcaatctttaaggttccttttaattttacccttcatagatataaaaatcattaaagagaaacc

SEQ ID NO: 426523 - DNA, 613 bp, Homo sapiens
tacgttaaaaaaatctcttaactgcaataatggtttgattgtggtaactactgagggattgaaaaactactgttctttcggccccatctttcataaaaatgtctcattttaggaaacatgggtgtagtcaaggtagaaaaaaaatttccttgtggtctattgcatggaatccaattcttaagacayataagataaatatttacttttttaactgtgttgaaataactatcatcaaatagtggttgcaaaaaattgcagtgtatacctcatgttcaaataaagtccaggttttgcatttcaatccatctctcctgcctcagtgctccctttcaaagggacctgagacccagtgcagaagtgggtggggaaggctgagcccagcagggtgagaacgatgaggtctctgtaggttacaacatctgctgggcagataacatctgcagataatgacagggcaggggtgaggggtagaaaggccaagctatgcaaaagcggcagagcatgggggagggaggggagctgttgcaagagttcctggcatccactatttcccactgaatcattaatcggcagcctcaccatttaacctgtgtggatcgcagagcggcatggt

SEQ ID NO: 426524 - DNA, 494 bp, Homo sapiens
tttaggaaatcaactatcccctcttctctatgctgaaatctcccctactgctacccccagggttcaccaacttctcatacaaaacatcacccccaaaatgagctgctggctccctaatttgctgtttggctaaatgacttaaagagagaagttttgggtcagccagtggcttagtgcaaatattccctggctcctggctaaaaatatggcccaggtatttgggtttagwcaaatccctgaaatctaagcatttctcatgtcattaaaactcattaaatccttgcagggtaggtagatgctaccagtatctcccactttgaaggaaaggaatcagagaagaatgttacttaaaagcacacacctagccagtgtatccagtgcttcctgtacacagacaaaacacactgggtgataaaacatttcacaggaacttgcaaatcaataattggtccagagagtgataatagtgaatatggcttgcgtagctaggacta

SEQ ID NO: 426525 - DNA, 604 bp, Homo sapiens
  misc_feature (1)...(604): n = A,T,C or G
ccggttaatgaattttaaaaggtgaacacagaaataatgccaagtcaaacaacatgatcaacctttttcagaatattttgaaaacattactcaatagtataaagtaaaattgaaccagaatcacaaaaaagctgtttacctacttaggaatagtgaagaaaggaaaactgtatattaaaagcactgaggccacctgcggtggctcaagcctgtaatcccagcacttagggaggccaaggcgggcaggtcacaaggtcaggagattaagaccatcctggccaacatgatgaaaccctgtctctactaaagtacaacaaattagccaggcatggtggtgcacacctgtagtcccagctactcgggaggctgaggcaggggaagcacttgcacccaagagacraacactgcagtgagctgagatctcgccactgcactccagcctggtgacagagctgggagcggtggctcatgcctgtaatcacagcactttgggaggccgatgtgggcagattacctgaggtcaggagttcgagaccagtctgaccaacacgaagaaatcccatctctactaaaaacacaaannnnnnnnnnnnnnnnnnnnnnn

SEQ ID NO: 426526 - DNA, 572 bp, Homo sapiens
atacttaccgttgttacaattgcctacagtattcagtacagtaacatgtagtacaagtgtgtagcctagaggcaacgggctataccatacggcctaggtgtgtagtaggcgctctaccatctaggtttgcacaagtacactctgatgttcacacaatgatgacattgcctaacaccacatttctcaaaacatatccccatcattaagctagcatgagtgcattgtatataaaatgtatataagtttgtgttttgacaaaaaaatgtgggatttgatttcaaagattccttgcaggtcaaagatgagtctgaattccacactctttccttagcatctgtgatgcccttcttccaggatgcaaatcccttgctgacctatcctaagccttcttcaacagattctattatctccttctatgccttatatgctgttaactgccagggtcccatgctgcttttgtcacccacattttmtccaccagcaaacctcttcacttttattattttcatctaccaccaatacactgagttcctgagggctttagttatccctgtaacaacagtacctggtat

SEQ ID NO: 426527 - DNA, 580 bp, Homo sapiens
ttaataattttaaaagttttatgcgtttccagtttcagaactgtgaagctttaaagtgcattaagagaactgcaggcaccatcaaataccaaattgacagaattcagaagaaaaaaacaatctgaagccttatttttaaggcctttacaagataaggcaagttgtgttagctctgctctctggccttttaatgagttacatgatttttaagcatgctctgttgaaaatacattttgaaaaacaatggggaaggaaatatataacttgtaatttccatgagctgaatatgtagaagataaactggtaccaaatactgaccgaaagccgcttaaggagagctgtctggttacctttgtatacaacatcataacattcattgtaggtaatttcatacataaggatttagttctggagtctcagggcaagttagatgagcatctctgaatgagcartgcatgacaggaatcacaaacccgtactggttttggtgaagaaggcaaaggtagttcgttgtcagagcaggcattacagaaaatttccccacaatttctacagtggtgctattaaacagaaaaatcag

SEQ ID NO: 426528 - DNA, 565 bp, Homo sapiens
ttattaggtgtcacttggaagcgcaattttcaacaacgcaaaactataaaaaaaamccaacgtcggcctccacaggctaatcagtctccgaggcactgacggcgggagagatgaaaacgcgaaggccagaggagaaaaagaggaaggatttgcagagagaacggtaacgtggtggacatgaatacacccaagaaacccggatcccgcgcggcacattgggacgaagcgcgctggcgggcggccagcaactctgggccaggggaaggaggcggacacccagcccgagagccgaaatcggccccagtggacgctttcatcttcgcggcccagaaacactcctatttttcaccgcacaatgcaaacatggtggaccagaaaatccgccccgcgtttgccggtcgaaccacgtggggccctttccgcgccgtcgatgcctagccagggcggggccctcacagaatttgttcacggtgggggcagatcaccggagaacttctccagagcgctacggcacggttccttctacacactggcagaactgccattgccatcgccccgaggcggc

SEQ ID NO: 426529 - DNA, 513 bp, Homo sapiens
taaaagataatccaacttgatgaaaaccatacaaagcaaagtgatttgccaaatgtcccacagccacctagtggaagcagcttgtaagggcatcaggttcggaaacaaccttgctgacatggagactaggcctttggagacttcttttcawtgaaactacctgccgccctcccaggagagaagctcactttaaagtaagcctagtgtgtccctgtgaagggatctcagagatgagcacctggagccctctcattttacacatgagaaaacttaaagcctagagagctgaagctgcctgctcaaggaaacagccgtttaccagaagagctaagactagaacggaacaacctcttgctctgcaaataaacagcaatttttctctgcccaattccagaaagttagctgctagacttacaccccctagataggatactacaggattcttctctggagaaattcaactgccacagagaaaagtcctgtaaatactaaacatttgtagagggtacccaa

SEQ ID NO: 426530 - DNA, 513 bp, Homo sapiens
taaaagataatccaacttgatgaaaaccatacaaagcaaagtgatttgccaaatgtcccacagccacctagtggaagcagcttgtaagggcatcaggttcggaaacaaccttgctgacatggagactaggcctttggagacttcttttcattgaaactacctgccgcccycccaggagagaagctcactttaaagtaagcctagtgtgtccctgtgaagggatctcagagatgagcacctggagccctctcattttacacatgagaaaacttaaagcctagagagctgaagctgcctgctcaaggaaacagccgtttaccagaagagctaagactagaacggaacaacctcttgctctgcaaataaacagcaatttttctctgcccaattccagaaagttagctgctagacttacaccccctagataggatactacaggattcttctctggagaaattcaactgccacagagaaaagtcctgtaaatactaaacatttgtagagggtacccaa

SEQ ID NO: 426531 - DNA, 518 bp, Homo sapiens
ttttaggataatcaaattatattatatcttctgtacctgagaaccagattctcaatgtggaagaaaataaacacatgtaatatagaagaaagaaagtaaaatcctgtagttgagaattttaattggatgccaagtgtaaagtcaggaggtattttatcttcatatatctaatctaaagggcctaaaaacaataaccaactcagtaacaatgactgtagagtagttactcyatatactcagggtattggttccaggacccccatgtgtaccaactccatgaatattcaagtcctgcagctggatctgcagaacctgcctatagaaaagtatgcctttcctatgcgggtttcacatcccatgaatactgaactttctatatgtggatgtagatgcagaaccctggatacagaggaccaactttatttattgaaaaaaatctgcatgtaagtagacacatgcaattcaaacccatgttgttctaaggtcaattgtacttataaccttgattgtgtttttga

SEQ ID NO: 426532 - DNA, 612 bp, Homo sapiens
aaacatacaaaattagcatagaacaaattttgtcaatgtgatgagcaggactatcaaaaactaatagtcatgaacaaagatccccatttttcccaaatgaggcagtctgagcttcaataaagtaaagcatgttagtaaattaaaaccatcraccaatttaaatccatgagttcagttttggatattatatttgttacttcttattaagtaacaaattaccccccccccatttagtaattatttatctcacagtttcaaggctctattgggacatattgggacagagtctgctctgaattttactcatgtggctattgacaagccttgggtagccactagttgttggttgaagacatcagttctttgccacatgggtttctccatagggcaattcatagcatggtagctgacttctatcatggctagtgagggagagagcaagacaatgtgacgatgacagaagacacaggcttttggtaacctaatctcaaatatggcctccatacttggccatattctttttactaaaagcgaatcatttgggccagcccacagattaaacgagggcagaattattgggggccgtcttggaagttgccttccatgaactga

SEQ ID NO: 426533 - DNA, 544 bp, Homo sapiens
aaaaatatgtcccaaagtttcatgctattaagaaacaaatactcaccctgaagcaatagccttctaaataaaacaggcaaataattaaagccctggtgaaagtgatgaatttcaactaagatctgtaaccactttttactaagacacttacaacatctggtgcaactcggggtaaatatccaggcttgactctaatcaaaggcctttttggagacagataaacgaataatgactttggcattcacacaaggctggagtgaccttgaaatggcttaaatcatatgacttatctccttatcaatacatctccaaagtttgaagatacatgaggaagaattataaagagttgagctagccataatgcctctgaaaaaataaaacttaatattctatagttatttgggactaagaagccaaagactcagctcttccttccacctyatacaaaaattaactcaagatggattaaagacttaaatgtaagacctaaaaccataaaaacactagaagaaaacctaggcaataccattcaggacataggcat

SEQ ID NO: 426534 - DNA, 589 bp, Homo sapiens
gtcagcttggtcattgttggtgcaaggcagtgctactcatttgtgtacatgaattttgtatcctgaaactttgctgaatttattcatcagttctagaagcttttttgatgagtctttagagttttctagatatatagtcatatcatcagcaaacagtgacagtttgacttcctctttaccaatacgagtgcaatttattctttctcttgtctgattgctctggctaagacttctagtagtaaattgaatagaagtggtgaacgtgggcatccttgtcttggtccagttctcatggagaatgctttcatctttttccagttcagtataatgttggatgtaggtttttcatggatggcttttataaatatatgccccttctatgctgattttgcagagagttttaatcataaagggatactgaattttatcaaaygctttttctgtggctgttgagatgaacatgtaatttttgtttttaattctgtttatgtggcatatcacatttattgacttgtgtatattaaaccatccctgtatccctggtatgaaacccacttgatcgtggtggattatctttttgatacactgt

SEQ ID NO: 426535 - DNA, 615 bp, Homo sapiens
atattctgagctaaaatataccttacaaataaaataaatcaatcaattaattttattgaaaggctctccatttgattgaaataaaatttcgctaggtatacaaattaatctctgaggagcaaatttagtttgattaagaaagatgcttcactgagaattagtaaagaatatcttggccttatgcatatgcattaaatggcaattttccagaaagttcttactcgtctaattacactcaattaaaaatagtttatttttaaagccacatgggatgcttaagtaaagaacaagaaaaaataatgaagagaatacacacaacttgatagagaagggaaaaatggtagttataaaacatgagtatcagcatgtgatgattaatattgagtgtcaacttgattggattgaaggatgcaaaatattkttcctgggtgtgtctgtgacagtgacttattttgtagacaccactcagcctctttccccagccacccctgtatttgcccaatgggcctatgaacgaagtggccatggtggcaggggctggaggtaacacatgggctcagtggcatggacttccactaaccaaggctggcctgactacggctactgctgaatgcc

SEQ ID NO: 426536 - DNA, 586 bp, Homo sapiens
tatattctgagctaaaatataccttacaaataaaataaatcaatcaattaattttattgaaaggctctccatttgattgaaataaaatttcgctaggtatacaaattaatctctgaggagcaaatttagtttgattaagaaagatgcttcactgagaattagtaaagaatatcttggccttatgcatatgcattaaatggcaattttccagaaagttcttactcgtctaattacactcaattaaaaatagtttatttttaaagccacatgggatgcttaagtaaagaacaagaaaaaataatgaagagaatacacacaacttgatagagaagggaaaaatggtagttataaaacatgagtatcagcatgtgatgattaatattgagtgtcaacttgattggattgaaggatgcaaaatatttttcctgggtgtgtctgtgacagtgacttattttgtagacaccactcagcctctttccccagccacccctgtatttgcccaatgggcctatgaaygaagtggccatggtggcaggggctggaggtaacacatgggctcagtggcatggacttccactaaccaagg

SEQ ID NO: 426537 - DNA, 586 bp, Homo sapiens
cggttgtggaaattaagcacaaaacaatttattggccaaatgggggcctataatggttattaaattacaaagatgtatatgctatatctagtcatacaaatagattggaaaataagaaaatgttttctctgaattatttcactgctaaatagaacaacaacaacaaaaataggtaccaaatacttctgtcccataaataattttttagacgctatgattcttacactattattttgagaactccatttacttataatacataattaaaaacacattccataaaawattcttatctttattgatgattttaaatataattgcttgagagagccatactactgcagagcttaacatttggtaattacttttttaaaaaatttgtattgacaaaattctttggattcgtggggcatcctgtttgactatgattttagctacataattgatgtcatatgacattccagttaataaaaataaattattttcagaaataagttaaatttccttgattattcttttttttttttacaagtaggtcataaataaacaaaattattctcaaaaaaagaatgtttatgtgatgata

SEQ ID NO: 426538 - DNA, 586 bp, Homo sapiens
cggttgtggaaattaagcacaaaacaatttattggccaaatgggggcctataatggttattaaattacaaagatgtatatgctatatctagtcatacaaatagattggaaaataagaaaatgttttctctgaattatttcactgctaaatagaacaacaacaacaaaaataggtaccaaatacttctgtcccataaataattttttagacgctatgattcttacactattattttgagaactccatttacttataatacataattaaaaacacattccataaaaaattcttatctttattgatgattttaaatataattgcttgagagagccatactactgcagagcttaacatttggtaattacttttttwaaaaatttgtattgacaaaattctttggattcgtggggcatcctgtttgactatgattttagctacataattgatgtcatatgacattccagttaataaaaataaattattttcagaaataagttaaatttccttgattattcttttttttttttacaagtaggtcataaataaacaaaattattctcaaaaaaagaatgtttatgtgatgata

SEQ ID NO: 426539 - DNA, 579 bp, Homo sapiens
acaagaaggcgacagtttggctaggggctgactggcttattatggccttaactgggaccattcacccttgcttcttaccattttttatcctagagtaagctggcttgagcttgttttcatgttggttgcagtgattcaggaaagaaaatggtaatttgaaagcacttctcaaatttttactcgtgtcaagtttgttattgtcatagtgggcaaaataagtcatatggctaatgctagagttaatttggaaaaggggacaccacttcttcatggaaatagctacaaagtcaaatggcagtgagcttaggcatttgtakaggtagaatgttgatagaactttggccaacaatgcattaccccctacatctagttgttactagttttcctctgaatgtgaaaccatgtgtttctgccgttgtttctaacattaccactcttatgcaaaatcttctaactcctactttaattatggtattgatcttgtaactagattttatgtcttttaagtcttactcctcctcaatatttcctatacacatttaatgggttttcttctatgttatttaatgacaataactt

SEQ ID NO: 426540 - DNA, 598 bp, Homo sapiens
tgagggagagagagaaaacatttacagattatggtaattctgacaaatgctcctgtttcataaaaattcagtgtggataagtaaaaccatttgaaaactcaagtgaattttataactgagatagaaccaacaaaatagacctataaaaacccagagtaatagcgtaaatagagataattcattccctaagctatttttytaaaacattaccacttgaaggatgaattatgtagggaatctaatgaaaaaaaaaaaagccattgttatacacctgcatagatttctgtggtagcagtgtaatagtgatagctaaaataacagaaacagcactattaatgaatcttggtcaaattctcgacattgaacaaaggtagatgttgaggcaaagattgctttgcagttatttctgcaaaaaactgattgttctagtggaactattgaaagcaagcttattgaacatgcttatattcaattacataatttctataagttatgtactttggatcataggaaacacgtaagacaaaagtgagagatggaaaaatatattttattcaaacaaaaaattgtgaccaaagagagcatcagtgactataac

SEQ ID NO: 426541 - DNA, 595 bp, Homo sapiens
ttgcacatgcacatatcttttgaattagcaaactgtctcctaggaatttataataatgaaatattgacacaaatatgctagaactgatgcacacatatgcttattacagcttagtttataaaagcaaaatatgaaaaatacattaaatgtgtaattataatacattaatgatatgcagtgttatataatttatattagtaatttcaagtcaggttttaataactgaggtttgatagctattgaaaatgaaaatatgtatttttagaaaccaactggtacgtgttacattaaatgatttataatatactaagtgtactgtttggaagcatatatcccaaaatcttacatgtcattatttattgtgggattgtttactattttcttctacttcattactgtattcaaataagaaaaagggaamaaagaaagaaagaaatagctttttcttaagggggagaggaaaactaaaacttacttgaggataactcatctaactaatgcagccaggggcgcattggagtattaggataattacacaaagcagagagccacagttctgaacataagtaccattcactgaataaaagccacatca

SEQ ID NO: 426542 - DNA, 561 bp, Homo sapiens
gtgtcttgttctactctgctgcacttaagatcataaccattccttgaattaataattacattaaaaatgcccattacattacaaataaagtggcccatatcaacacctatctctaggtgtggacataaagttgtatctacttgataggagtaacttagatgcttttaataggtaaaatgttgagttgagtaaaattttaaggacattcttaattccttctaaaagagatacattctgtaccagtaataaggtttaactcatctaattataactgtaggcaagagtccagcaaaacctggcctgattccatcagcccctcaccacttcccacacaatccttcacccttttcaactgcttyaaacataattcaaaaatgtagctcctaacctataccactggtttttacactgatttatagtggttaataatgctttcatattctaatagttcataattaaacgtgggcaaagaaagtgagaaagagttgaatactactttttcaaactttaaattgtttttaatttaaaaactgcttttgcatttattttgtcattttattt

SEQ ID NO: 426543 - DNA, 584 bp, Homo sapiens
agcttttctaaaatacttggttatctccagctgtttatacttcagagtgaggtgcctaaaagctggctggaatccatcggtattgttgggcttgtacactggactgtcctttgtgtgattcagttggaacccatcttttttcttggagacccccagatgttggtgtccatattagtccgttttcacgctgctgataaagacacacctgagactgggtaatttacaaaagaaaaaggcttaatggacttacatttccatgtggctagggaggtctcacaatccatggtagaaggtgaaaggcatgtctcgcatggcagcagacragaacagaatgagaaccaagtgaaaggggtttgcccttataaaaccatcagatctcatgggatttattcactaccacaagaacagtatgggggaaactgcccccatgattcagttatctctggtaactgggtctctcccacaacacaagagaattttgggagctaccattcaagatttgggtggggacatagccaaaccatatcagtgtccataggtcttttctgctgggttctcgagtttctacagagaagacttatctc

SEQ ID NO: 426544 - DNA, 645 bp, Homo sapiens
ccattcacaagtaagatgccatgctgccagcccttgtcttccaataattatggttgccaattaccagacaaccagactgttcttttttttttttttcgagatggagtctcactctgttgcccaggctggagtgcagtggtgcaatctaggctcactgcaacatctgtctcccgggttcaagcgattcttctgcctcagcctcccaagtagctgagactacaggcttgcaccaccacgcctggctaatttttgtatttttagtagagacagggtttcaccatattggccagactggtcttgaactcctgacctcgtgatccacccgcctcggcctcccaaagtgctgggattacaggcgtgagccactacgcccagccaagactcttcttacatatgtttatttcccctcatagaagcagccagctgacttatttagagcaacctgtcagagtgcgtgggatcgtagtctacgaagtgatgtcttgtgtagagcaatggtgtattcctgtcaaatttcctgctggcatttcttggtgttagtgttttcttatccaraaatagggcttgcatgtcattaaaaccttcgttgaagcaattaataaaagattctggtaagtttctggagacattctttaattattcaaa

SEQ ID NO: 426545 - DNA, 579 bp, Homo sapiens
aattaaaaaacaaaaacaaaaaacctctcaaagctcaacaggtaaccaaccaaccaatggaactagaaaatgggcaaaagaaatgaaaaaatatttcatggaagaggatatacacatggcaaataagcacatgaaaagatgttcaatactattagccattagggaaatgcaaattaaaaccaccatgaaatcttattatacatctaaaatttaaaattgtgatactttcaaatgctggtgagtatggagagttttcatacattgcttgtgggaatgtaaaatgacagcacctttggccatttcttaaagtacacatgtaacaaccacaggacccagcaactacacattggacatttatatgagataaatgaaaactcatctacacacayacacacacacacaacctgtacgcaaatgtttacaacagctttattcttaatagctacaacctggaaacaacccaggtatccttcacgcttaaactgtggtacatccataccatggaacaccatatagcaattaaaagacccaaactgctgatacaaacaatgaaaggatgaacataaatactgtacgagc

SEQ ID NO: 426546 - DNA, 622 bp, Homo sapiens
atatatctcctcaagttaggaaatggaaaaatatatactgcaaagagcttcctttgctctttgcagagcgggaaggagaagttagatttcttttcttttcttttctttttttgagatggagtctcactctgtcaccaggctggagtgcagtggcggatctcggctcactgcaacctccgactccctggttcaagtgattctcctgcctcagcctcccgagtagcagggattacaggcacgtgccaccacgcacagctaatttttgtatttttagtagagacagggtttcactgtgttggccaggacagtctcgatctcctgacctcgtgatctgcctgcctcggcctcccaaagtgctgggattacaggtgtgagccaccgcacccggcaagacttactttcctagcgttctcctcccatatcctctccccatctcaytgggggggaaaataagacaaaaattctccaacaaaggcttttctcctcaaacctttttcatttccctctctgatgagctctgcagtgtgattcaaaggtgtgtggccaagtgtctctgatgatccaacaagacagttcacagctttgctcctcactttagctggttttcaaaaatgctgtaagg

SEQ ID NO: 426547 - DNA, 462 bp, Homo sapiens
gacagatgagaaaactgaagtatagcaaggttaagtcacttgtccaractcacagacaatacccttaatgaacagtgttattgttattacagcaaattaggattcttataatgtctgctttaatctactactgcatgactacatacctcaaaacttattgtcttaaaacagaagtaaacatttattttttcatacagtttctgtagtcagcaattcaggagcagcttagttggggtggttctggtttgggtatttcatgaggtggcagtcagggtggcagccagggtggtagttatttgaaggcttgtctagggatggaggatttactacaagctggctcattctgatagttggcaagttgtactggctgttggcaggaggctcagatccgccccatgtggacttcttcatagggctacttaagtgagtgtcctcatgacatggccatcgacttccccagag

SEQ ID NO: 426548 - DNA, 401 bp, Homo sapiens
aagggtaagttttttctgttttctagaaatacacttttctttggcttccaagatagggtagttgccagattccccacctatctcattgtctgcttattytttgtcccttttgttgatttttcctcttctccccaaactcttaatgttggagttcaacaaggtgaacacttggtttgcctcttcttatttcttttttttttttttttgaggtggagtcttgttctgttgcccaggctggagtgcagtggtgcgatcttggctcactgcaagctccccctcccggattcacgccattctcctgcctcagcctcacaagtagctgggactacaggcacccaccaccatgcctggacaattttttgtatttttagtagagacggggtttcaccgtgttagccagg

SEQ ID NO: 426549 - DNA, 548 bp, Homo sapiens
tctaagagactttaaaaacaataatttgattatacattctagtgggatatatcttaaggacaaatataatgggaggaaatttaaaatggttatagtattcatatcattggcgagtgctggcattccttctctaagacagctgtgctattctaatgtaattgtccagtgggttcctcctgcctgctgcacagacaaaatcaatccaccgagactgtggcatygcagcaaagagtttaactgacctgaggccagccacgagggagacagagttattactcaaatcaatctccttgaaggctgggaggttagaatttgtcaaggatagtttggtgggacaggggatgggtgctgctgattggttggggatgccatcttagggctgtggaaaatggtcctcgtgtgctgtgtctgcctctagatgggggccacgggaccccacagcagagtcatgagtcacaagtccaggtggggttagttggttgccagaatgcacatgtctaaaatacatctcaaaagaccaatcttaggttcttcaatagtgatgttat

SEQ ID NO: 426550 - DNA, 539 bp, Homo sapiens
aagtattttcatgcagtgtagtataaatagaaacagaacagataaaccaaaataatttccataacatgtttgggttatttcactatgttttgtgagaataatcagatgwattactttactttgtaaacagaaagaaatagatattatatcttaatcctaagtatacatatatacatgtgtatacattgctttcactgttcagcagatttaaaacatagtacagaaagattccttgctttgcacaagagcccttcggaatcactgcaagaaaatgacagaaaccctgattgtgttttgactcttcggtatgctttttagttaatttattggcacttgtctctttggcagagcctgctgaattgctttctaaatggagtacttgaagcatatagatagactgcctgctttccttaattgacactcctgcacttcatcaactggtcgctacgctgtctcttctgtttttcccttctaggttctgttccagatttctggcatgcctctcacaacaagcatatatacctgtagttatgcaggaa

SEQ ID NO: 426551 - DNA, 562 bp, Homo sapiens
cttgggccatacaccctgacagcccctgtgttattacattagagctatcagtggtgggaaaagatactatgtggggtttatgggaagtcctcctaagaggacttagaggattacaacatactgtaaccctagggttccagagcacactgatgccagttgcagcagatattaacacacctttcataaaaaggcccttggcacactsttgggttctggtagagacagagggcctggccatgggacactaaatgaccaggcaaccgtaattccacatcatgagctggactctgtcagagctaccaagttctaaaggtgaacaagcccaacaattcatcacaaagtggaagtgttccacccagaagtgcacaagcagaaccagagggcacaagcaagctgtccacacagctgctgcagactctatgtccccctccaccatggaacgagcacttctccttcagcacacggtgtccagtggcttaatcctttagaaccagctgccagaaaaggaagaagccccagcctggttcatagtaggccagcctattacatggggaagcaaaaa

SEQ ID NO: 426552 - DNA, 554 bp, Homo sapiens
tggctacatagtgctttttcttagtttgcataacaaagatgttaccaaatttcatatttacagtctcaatttactatcactcccatattttaaagaggaaatacaggcccctacaacccttaatttaccccctgtcctgcaaaaggagatgctcttagagtttagtaaaagcacccgtggtatgaggcatgtgcttctgaaagtataaaccgagtgtttaaacactttttatgccctttgccaaatctctttagattttgtcagaacagctagaattatttagataattctgattgcatttctgtccagagaaacaggctacaaaaattgatctgtaaagttccttttcactagttaatttgtgatgcactatactggtggctccaattcttcacctttcttctyaccatgcatttatctacacgacctcacagcccttcttgtcaaatggcagaacatacttccttatcgttgattaggaatttagtcatgtgacttgctttggcgaatgagatcttaacagatgagcagaggcttaaaaggtgcttgcatct

SEQ ID NO: 426553 - DNA, 577 bp, Homo sapiens
tgccctttgccaaatctctttagattttgtcagaacagctagaattatttagataattctgattgcatttctgtccagagaaacaggctacaaaaattgatctgtaaagttccttttcactagttaatttgtgatgcactatactggtggctccaattcttcacctttcttcttaccatgcatttatctacacgacctcacagcccttcttgtcaaatggcagaacatacttccttatcgttgattaggaatttagtcatgtgacttgctttggcgaatgagatcttaacagatgagcagaggcttaaaaggtgcttgcatctatctgcttgctctcctgtgtctctgccattaccataagaagaatatgctcaagctagcctgctggacctaggagcaggatgaaagacagatgsagcagagctacccccagtcagcccaagataagtgggtgtgtactgccaaaagcagaagttggttattttatgtaagaactttgaatgtttcattctactgctactggcttccactgttctattaaaaaaatcaactgttactcttattgtgttctctctgg

SEQ ID NO: 426554 - DNA, 560 bp, Homo sapiens
ttataattgtatactgcatttttatgtttacatttctctcaacagcaaatagtgccatatatggtctgtgtttgtgtaaattttgatacattttaactttttatcatggagttgtgtatattttatagtaaataaaataggctagtacctacatatattttacacattgataacatacctaacttttacaccacttttttttatgtttctgggctacatggtttgtctgtgagttatcttaaattattgcaaatcttgaaaataaatttcaatatatttattaaaaaatatccatatattagtggaccagcacagttcaaaccagtattattcaagggctaactgtactttatatttagatgtctgccmtgctgtttatttttgcttgatgcaaggtatttattcccatttttactctgtatgctggctgcacagttctaggaccccacctgccctcacatcatagccagaagataaaagaggaaacaagaattcaggaaattccccatgataccagttggttttcaagattttactcccttcccattgggcttacttca

SEQ ID NO: 426555 - DNA, 507 bp, Homo sapiens
tgttagaattagcagacatgtatttttcaaaatgctattatagacatattcaggacttaaaaaaatggacataataaataaagagatgagctatctcagcagagaaaataaactttagaaaaggctaacaaagacttttaatgaaagagaaatagagttggaagactcatgttctctgattttaagccttattgaaaatcagtagtaactaaaacagcatgatgttggcaaaataatggagatatagactaatggaagagaaaaaataatgatggtcaattgattttcaacaaaggtactggcccaaattcagaggatraattaatctcttcaacaaatggttctagaacaagtagacagctctaactcatacaatccacaatttgattcagtatgaagcacaaatgtaaagacaaaagtggaagctgtaattcttttaaaacaaagcataggacaataactatgtgactatgggttgggtgaaattttcttagaatacaaaaagaa

SEQ ID NO: 426556 - DNA, 507 bp, Homo sapiens
tgttagaattagcagacatgtatttttcaaaatgctattatagacatattcaggacttaaaaaaatggacataataaataaagagatgagctatctcagcagagaaaataaactttagaaaaggctaacaaagacttttaatgaaagagaaatagagttggaagactcatgttctctgattttaagccttattgaaaatcagtagtaactaaaacagcatgatgttggcaaaataatggagatatagactaatggaagagaaaaaataatgatggtcaattgattttcaacaaaggtactggcccaaattcagaggataaattaatctcttcaacaaatggttctagaacaagtagayagctctaactcatacaatccacaatttgattcagtatgaagcacaaatgtaaagacaaaagtggaagctgtaattcttttaaaacaaagcataggacaataactatgtgactatgggttgggtgaaattttcttagaatacaaaaagaa

SEQ ID NO: 426557 - DNA, 576 bp, Homo sapiens
catttggctttgctgtgccagtgggagaaccccaggccagttggataagactgtgataagtgttggtacttctcttactacttgcaaatgtatcttcaaatttatggatgtcggcacctaatgggcttggccatgctagcacactctatagtggctggtttgcctccatgacccatgagttaactctaagccatgcctaaggtttaygcaatatctggaaattctcaactctggtttcttattagaataaagtatggagatttgtaagcatacagaagcctttcttactgaatgaatatcttcaggggagcctttacacctgtaaatatttagagtggcatacatgattctgatgtgtagctcagcttgagaactactggagtacagcaactctcgagaatgtagtgagaactaaaataaatataatttggtctctgtgttaaattatattgggaccgggtatacgttaccatttctatgctaaaaaacactggaattaagcaaaaataatttagctacttacttcaaggaatatttgcactaagaatatgtttgtgaactaaccaaaaaaaaaag

SEQ ID NO: 426558 - DNA, 582 bp, Homo sapiens
gatgggggaatagtgagagtagaaataggaagacaaggaggccatgacctccaaatgttggataaatcacaactctgagatcactgtggaatgaagaacgtgtttgtttgggagactttgaggtccactgtgattttactatatgattccctgaaagtctctttcatgacttcccaagaaatttctcatcattggttttctcaggaactttctgctgtacgagtttgaaatgtcagggctaatttgttctctcaagagcctgattataaaagcattttaaaatcatgaaaatctatgcaaacatagaaaatatcgatagaaaaatgctatgggtgttaggaatgtttataagtctatcaatttcagaactaacactatctgaactcttcagaaagttagaaattatgataattcatactaatatcccaacaagcygataatcccaaaatattgttagaaatattaattattcataatgtgtctcccatttagtgtcttgggattatatcttctctcacctgatcactgaagaacagagcacacacttagcctattattatagattgcaaaataatttataga

SEQ ID NO: 426559 - DNA, 603 bp, Homo sapiens
tgcagtggctcacacctgtaatcccagcactttgggaggctgaggcaggtggataacttgaggtcaggagttcaagaccagcgtgaccaacatggtgaaaccccatgttgactaaaaatacaaaattagccagatgtgttggttcatgcctgaaatcctagctatttggttggctgtggcaggagaattgcttgaacctgggaggcagaggttgcagtgagccgaaatcgtgccattgcactccagcctgggcaacaagaaccaaactccatctcaaaaaagaaaaaaaaaaaagacaaagagggacattatataataataaaagccttgtccaacaggaaaatatcacaatcctaaatatatatgcacctaacactggagctctcaaatttataaaaacaattactactgcytaagaaatgagatggacgcagcacaataatagtggggggcttgaatactccactgacagcactagacaggtcatcaagacagaaagtcaacaaagaaacaataaacaatggatttaaactatatcctggaacaaaagggcttaacagatatttacagaatattcgacccaacaaacgcagaatatatatt

SEQ ID NO: 426560 - DNA, 603 bp, Homo sapiens
tgcagtggctcacacctgtaatcccagcactttgggaggctgaggcaggtggataacttgaggtcaggagttcaagaccagcgtgaccaacatggtgaaaccccatgttgactaaaaatacaaaattagccagatgtgttggttcatgcctgaaatcctagctatttggttggctgtggcaggagaattgcttgaacctgggaggcagaggttgcagtgagccgaaatcgtgccattgcactccagcctgggcaacaagaaccaaactccatctcaaaaaagaaaaaaaaaaaagacaaagagggacattatataataataaaagccttgtccaacaggaaaatatcacaatcctaaatatatatgcacctaacactggagctctcaaatttataaaaacaattactactgcctaagaaatgagatrgacgcagcacaataatagtggggggcttgaatactccactgacagcactagacaggtcatcaagacagaaagtcaacaaagaaacaataaacaatggatttaaactatatcctggaacaaaagggcttaacagatatttacagaatattcgacccaacaaacgcagaatatatatt

SEQ ID NO: 426561 - DNA, 496 bp, Homo sapiens
tttatttctaacttctattaatcttttttttaaaaaatttagaattcttaccaccttctattccatacagccaagcattcatggagaagcatcatgtcctggggtgaagatgtggtccatattcttcatgactaattcrtgagagaaatctgcccctgccatatacaggtgtggtatttagtcagcttccataaaaaggtctctaaacacctctagaaagaacttacgttaaattttggataaagtgaggcaatattccagaactttcaatatgttttacccagatcaaacctgagaaataagagagagcttatagaatcaccatgtctggaaaatcttcactggtgattaaaatcttaagaattttgagggagaaggaatattattttgattaaaaatttcacagataggaggagcaccaatggcatcctcctgataatcaacatcctaactccattcattatcatttactacatagttagggaattaccagctt

SEQ ID NO: 426562 - DNA, 508 bp, Homo sapiens
gacgggcatgaggtcaggtgctttatgtacagtgggctgctgagtcttatatttctatttgaaatatgtacttctccattgatcaaagaagtggattacaatagcatacattatatgagattccttaatatgtgcctttaaatattacactatatcatttatctgagccatctccaacatatctcctaatctatagattatgtttttcctaagtgatgcaggtatttgtcatttttatcatgagtacgtgtaattttttctctgattaaaatcatgtcctaaatggaacattataaactaacctggggaatggttttgatckatattctgatgttgtatacatgcttctcatttttaatttgtattcaggtattcacatcaggagggaagagtctaattgattgttctgaagacacagtacataccacatcaaaataactggaaatttgggatgcagccttgtatacataatgcattttccctagttaatatttcttttgaatttgag

SEQ ID NO: 426563 - DNA, 508 bp, Homo sapiens
gacgggcatgaggtcaggtgctttatgtacagtgggctgctgagtcttatatttctatttgaaatatgtacttctccattgatcaaagaagtggattacaatagcatacattatatgagattccttaatatgtgcctttaaatattacactatatcatttatctgagccatctccaacatatctcctaatctatagattatgtttttcctaagtgatgcaggtatttgtcatttttatcatgagtacgtgtaattttttctctgattaaaatcatgtcctaaatggaacattataaactaacctggggaatggttttgatcgatattctgatgttgtatacatgcttctcatttttaatttgtattcagrtattcacatcaggagggaagagtctaattgattgttctgaagacacagtacataccacatcaaaataactggaaatttgggatgcagccttgtatacataatgcattttccctagttaatatttcttttgaatttgag

SEQ ID NO: 426564 - DNA, 587 bp, Homo sapiens
ttatttgagcctggtacttgttggatactttaggagaaatgaaagtcatactcacttttagagccttctgtttctactactgtaaaattctcttagcctgaaagagctgctaattataatatcttctctggatactacctgaaaagttatgtttgttttttgttacttcacaatctaagagcctgaatagtatgtcaggactagtacatcatcaaggttgacatcaaaaagaaaaagcaatctggccaggcacagtggttcacacctgaaatcccagcactttgggaggccraggtgggtggatcatctgaggtcaggagttcaagaccagcctgaccaacatggtgacacccaatctccacttaagaaatacaaaaattaaccaggcaatggcacgcacctgtaatcccagctacttgggagactgaggcaggagaatcacttgaacccaggaggcagaggttgccgtgagctgagatcatgccactgcacttcaatctgggtgatgaagtgagactgtctcaataaaccccaaaaaaacaaagaaacaaacaaacagaaaaacacattcatccatttagcaagta

SEQ ID NO: 426565 - DNA, 562 bp, Homo sapiens
ttttattttttaaaaatcctctttttaaatttctttgagcattttaaacttacctattaagctcattttctatttccttgtgttcaaattctgtttgttaccatattacagctcctctttataaagctttattccttgaatcttttgtaatccttgtaagtttatcatacttttcatgagaatcccacacactctgtgctaggaaacatagccacagggcaatctccctttcagctctgcatggcagagttcctagagcttcattgatttcatatattcctatatgaatttcttgtcttagggttcccacatttcgtaagtattataaaattggatctcacatccacatacagtacaaacctgagtgtccaactgcttttgagctacacytttttcaccaagagttcctggtggtctgtaatttccttccagctatctgattcctcatctgggggctacacaactcttatgtagactttcaagattttaagagtgaagccctttttgttttacagggtctactgtgtagataggagctcactcctatgcacaatgtttgttt

SEQ ID NO: 426566 - DNA, 607 bp, Homo sapiens
gaaaaacctttccaggttttctttcttcaccctaatgatgtgattgattttggaaggaaacagcattcttctttgtaaatttagataaagtcttcaggttagtatggcagactagagaaagtttactttgcttcatttataggcattcttagcattttaagatatgaamaaattcatgtagaaaactaattatatttttaaaagaaaaatacaaattaagggaaattaattttaaaacctataaaaactaaaataaaattataatgatgacgattcatatcatcactgtataggggatataataagtgacaagggaacaccctggtaactcattcagtatgataagaaaacatccagtttctcctcataaaatatcatttatttaaagtgcaacgtaaagagcttcaacacttgcaaagcagtgtaattttgttttcaaatttatagttgacagaaaaaggtgcatgtacattacaatagttgtgctttgagggagacaattatttttgaccattgctaactatcaacatgtgctatcaaaaatgacatcttataccttgaacatcttgcaaaagtacactggcccaggacctacgtgaagaattgg

SEQ ID NO: 426567 - DNA, 601 bp, Homo sapiens
ataactatgttaacatacagtggtgtgttagacacaggcatatctcttagctatggtatttatcaaagagcagacctaggatgttagcccaggcacacttccttgggtagcctgactgttaacctctgtgccatatggtctttctgctctgaatatttagtagttcagacatttaggcagagttactcagtcttcctgagcctcagtttttaattttttttaaatgggaataatgctgtgatacagtttttttaatttgttctttttaacagctttattgttttttatatataattaacatattatatatcaattcacccatttaaagtgtacattctaatgccttttaatattatagaaagattttcactcctatttgaaaagatcaaccattaaatatttgaactgggattggatttgatgagacctacatgtattggctatatagacatgtgccaaatagaaattcaatttaacattaatgttagacaaaytttaatgactttgacccttaagtctttctaattcctaatgacagggtttttccatatataaaaccttagtctctcttctccacattgtccatcttgagcacgtaatc

SEQ ID NO: 426568 - DNA, 528 bp, Homo sapiens
ggctctgcagaatgaagctagtttgataagaggaattgatgaggaagagcatttcacccagggtgaaacaagaacacagttgtaaaggctctaagtcagcggaagttccagaaatggtcaataatatttttgctggaaggtaagggaaygtatgaggagctgtgggagatgcaagaatctacatgctgttgccctgatgctcagtttcatccattagaaaaatagatgaataagttctttgtcagttggaatttattttactcctattactccttgaactcttataccacatttctattgatgaattatcccttccataggttcatcctactggaatatattttcaagcttcacacatattttaatgtattttaaggtttttattgagcagcctagcatacttgtctgtaatgaaatatacatatgaatagaaattttattttattggaatttctatcattgtgaagctctaagtgtaaacaaacattttttctctgaattagattagttttacaattatacttagca

SEQ ID NO: 426569 - DNA, 391 bp, Homo sapiens
ctgtaacagcacttactaggcatgctgacaggagtgctctcaaacacagaggcagaggcaaatacgggctcaaatttttgttttgttttgttttgagacagagtctcactttgtcgcccaggctggagtgcagtgacacgatctctgctcactgcaacccttcgcttcctggattgaagcgattctcctgccccaccctcccaagtagctgggattataggcacccatcaccacacctggctaatttttgtatttttagtagaaatggggtttctccatgttggccggkctggtctcaaattcctgacctcaagtgatccccccaacttggctggattacaggcgtgagccaccatgcctggccagactaaatttttttttaggaagaatc

SEQ ID NO: 426570 - DNA, 560 bp, Homo sapiens
cagccgggggcacggtggaaggaggtgtatcgggagtggagctcaacacaggtatggggacagccgttggcctcatggccgcaggggccgcaggagcctcaggggccgcaaggaagaggagctctaccatgggaaccctgcgggactacgctgacgcagacatcaacatggctttcttggacagctacttctcggaggtaatgccctcacagtcacacataaaatcgtcttgagattgaataataataatagtaaaatactcacaatggtagtaggcctcttcggaaataygctgttattctcaaccctatcccaaacctgaataaaaagtatttcacgtctccttaaaacacaaaatgctaatttgccacaggatttcatattcaactgccatagcgcatcttagtaccgtgaacaaggccacacccctcatcattctccacttcccttttccatttttctatcttttgtttccttgattcctcaccttgtttcccacagcagtagcaaagcaggaaaatgctcatcaaggggaaaaaaggtgcatttatgacctctgt

SEQ ID NO: 426571 - DNA, 444 bp, Homo sapiens
tgtttcacaggttaaatagaccatcacttcagatctctagaatctcccttggggtcttcactcccattttaacctgaagtaattagcagcattcagmcaaaaaaaaaaaaaaaaaaaaggccaggtatggtagctcatgcctgaaatcccagcactttaagaggccaaggcaggaggaaagcttgagccaaggagtttgagattagcctgggcaacatagcaagaccccatccaaccttatttcaaaaaaaaaaaggaacaagtgggttaatcatatgttatgatgccttctgataacatgcaatatgaagtatttaggatgcattctggacaaaaatatttaattagaatttgacaaatctttaaatataagagtaaacacaagggattagaaatccgaggatagaggaacaagttaaacaacatctcaagaccaatgcaaaa

SEQ ID NO: 426572 - DNA, 406 bp, Homo sapiens
taggagaccgaggcaggcagatcacttgagctcaggagttcgagaccagcctgggcaacatggtgaaaacttgtctttacaaaaaaatagcgaggtgtgakggtgtgcaccagtatttccagttactagagaggctaaggtgggaggatcacctgagccagtgagatcaaggctgcagtgagctgtgatcacaccactgcactccagcctgggtgacagagagagatcttgtcaaaaaaaaagagaagataaagtttgggtcacttctcagttcagaaaatggaggtagggaatatatggaataagtacattttcttcactggggataaggtgatcacaaactgggggcaggtaaagaactgataaggagccagtaagaacacaagggagaaccaagttgaagaag

SEQ ID NO: 426573 - DNA, 603 bp, Homo sapiens
atatttaattcccatggaagacacatctattaaatgaaattacaacataaagaaggagaaaaataattcagttttcaatattggatttatgtgaatgttttcaagaatacatgtagcttgttaagaattttttttaaagtgatatttgccagaaaacttgaacagctggtgaagcaggctttaatagtgaaaagtacaaacatcagcatccatcagatctgaattcaaagtcccattctgccactttctagctgtgtgagttggaaaagtyaatcattcttctctggaccttccttaacttgagttaataaaacccacattacactattcttgtgcaaaatgaatgcttagcatgatgtcttacacatagtagatgttctaaaaagtccatgtattattatttgattatataatggaaatgtgtgaagggcacttcctctaattgtccttttatcaaaaattccaacttgagcattacttgacctttctaaatctctctctcctcagctctataatggaagctctataatgagattgttgtgaacatgaaataagaaattatgtgaaaatgttctttgtgaatttgtgaatctccacatcaac

SEQ ID NO: 426574 - DNA, 603 bp, Homo sapiens
atatttaattcccatggaagacacatctattaaatgaaattacaacataaagaaggagaaaaataattcagttttcaatattggatttatgtgaatgttttcaagaatacatgtagcttgttaagaattttttttaaagtgatatttgccagaaaacttgaacagctggtgaagcaggctttaatagtgaaaagtacaaacatcagcatccatcagatctgaattcaaagtcccattctgccactttctagctgtgtgagttggaaaagtcaatcattcttctctggaccttccttaacttgagttaataaaacccacattacactattcttgtgcaaaatgaatgcttagcatgatgtcttacacatagtagatgttctaaaaagtccatrtattattatttgattatataatggaaatgtgtgaagggcacttcctctaattgtccttttatcaaaaattccaacttgagcattacttgacctttctaaatctctctctcctcagctctataatggaagctctataatgagattgttgtgaacatgaaataagaaattatgtgaaaatgttctttgtgaatttgtgaatctccacatcaac

SEQ ID NO: 426575 - DNA, 615 bp, Homo sapiens
gcttactgatcactttcatatcctttctctcatgtcatcctcatcagatccttgggaaacagaaatggcaagtattgcttcccttttttatttttttgccaataaatggaggaagtagtagcagtttggtcaataaatgctaataagtggtgtcacaagaactagggcccacatcattccaaaattactgctgagccatgcactcactacctccatggtgccttgacaaagccagatgtgctacagggcctctcaggagccctcaggaataagcaaagttgcaggtaacttatgtgtgtggcatggtatgtatgagcaggaatcttggaggtgcacagcagttgggtacacaaaatgcttgatatggttttgctgtgtccccacccaaatctcatcttgaatttccacatgttgtggggaccaagtgggaggtaactgaatcagggggrcaagtcttttcctgtactgttcccgtgatagtgggtaagtctcacgagatgtgattttaaaaaaggagttcccctgcacaagctctctctttttgcctgctgctttccgcataagatgtgacttgctcctccttgccttcccccatgattgtgaggcttccccagc

SEQ ID NO: 426576 - DNA, 640 bp, Homo sapiens
tggcatatgtctgccttcaagggatgccctgtttaagacccccttctaagtccctatttcctgacccaggatccaactcttcccacgatgcctgggagtgaaaacaccctcccttctggggaaatctgacctctcacccacaagagtgtggtctcttgctctgaccccatcagggcaatagcgtcagatcagagtattccagcagcagtaccgttcccaggccttgggggattcagccttaaacaccaccacatgttggacattaccggacggtcccacttgygctttgcgtagcctggcccaattccctttttatagtggcttttcctgcatgaaggaaaggttatgcctgcatagccctcctgcagctttatcattctcagttcccgaggccctgtcagcaactgctcaaacaagaacacacacacacacacacacctccacagaacaagcagtagtattacaggcaccctcaagacttcactattaagtttaggtaacatttatatgatcaatcatcatagtttgtctctcatatatgtgtacagccctgtacatatatacatatgtatctacaaatatacatattcacatatttcaacatgtgcacatacatgcatatgcacacgtactcaagtgg

SEQ ID NO: 426577 - DNA, 640 bp, Homo sapiens
tggcatatgtctgccttcaagggatgccctgtttaagacccccttctaagtccctatttcctgacccaggatccaactcttcccacgatgcctgggagtgaaaacaccctcccttctggggaaatctgacctctcacccacaagagtgtggtctcttgctctgaccccatcagggcaatagcgtcagatcagagtattccagcagcagtaccgttcccaggccttgggggattcagccttaaacaccaccacatgttggacattaccggacggtcccacttgcgctttgcgtagcctggcccaattccctttttatagtggcttttcctgcatgaaggaaaggttatgcctgcatagccctcctgcagctttatcattctcagttcccgaggccctgtcagcaactgctcaaacaagaacacacacacacacrcacacctccacagaacaagcagtagtattacaggcaccctcaagacttcactattaagtttaggtaacatttatatgatcaatcatcatagtttgtctctcatatatgtgtacagccctgtacatatatacatatgtatctacaaatatacatattcacatatttcaacatgtgcacatacatgcatatgcacacgtactcaagtgg

SEQ ID NO: 426578 - DNA, 635 bp, Homo sapiens
actacagatgatggaggaagagcaggcattgagtgccccctgtcactctctccctgagcctgtgaaatgatctttctttcatctgtacaatgctgggaggagttttctatgcctctttgattttagttggaacaagaacacataatgaattaagaagtgcctgaaacattctgtctcattactccaatgcctatttctctttagctgtttctcttgttttcttgctacaaaaatacccattacaawggaactctctgccccaggtggacactgggtacatcagtcagggatcagtaatttgcttaagtgcatgcccaaggtttgccaacttacaagagagatgcctccaaagtgaaagataaagtggttctcacagcataaaaatatttcctgagtaagcaaactgatataaagattagaaactaaaaaaaaaaaaaaacgctttctcattttttgtattaataatatgtcagtaagtagtaatcatttatagaatgctacgtagagtaattggcatttttcttgctactggattttggatccaagacggtaggtaagaaaaaagttttttttggcaactaatgtcttagaattttagaaaaaacgcattggtaatatgactttaaattcaaagc

SEQ ID NO: 426579 - DNA, 554 bp, Homo sapiens
tgcctttgtcctagtaggtgctacagtcaataattacttataaaagtgaactagatttgtgagatgactcaaagggagaagtgttcctctatctgcctcatttcttatttggtctctagaacaaagtgaacttctcaggtgtgccaagcctacacatgacactcagccactccacaagctgcttcctctgccagcactgcttttgtcttctttctctagaaggctgactcctaggtttcccttagactcatcccagcagttccgcccctggaaagcctgcattgattatcacagattgggtgacgtttcccaaggggaacatcatgtcttgttcacccccagttaaaacatactcaccccaattaaaacatgcaaggaaactgaccaagtccaygtaaaaaaacatacttcactagactgggtacccttagattgtggatttttgagggaacatgacttatcttttttgttcttatctttatgttctcaaagcctatcacagttccagcatgcaataggcactcaatgaataattcttaagaaaccctcactct

SEQ ID NO: 426580 - DNA, 561 bp, Homo sapiens
acagacttttcgagaataaagttaagttgaaaaagaaacatgaaaaatgttcaacacttttaatcattaaggaaatgtgaattaaaatcacaaagaaatactactgcactttcgttttttttttttttgagacggagtgtcctctgtcggccaggctggagtgcagtagtgcaatctcggctcactgcaagctccgcctccygggttcacaccattctcctgcctcagcctcctgagtagctgggactacaggcacccgccaccatgcccggctaattttttggattttcagtagagacggggtttcaccgtgttagccaggatggtctccatctcctgacctggtgatccgcctgcctccgcctcctaaagtgctgtgactactgcactttcatcagaatggctaaactaagaagactgaccatgttaagtgctgatagggttgtggaggaactggaattctcatacactgctgctgagaatgcaaaatggcacaatcatattggaaaatagtttgtcagtttcctaaaaaattaaatatatacctatcacaggagccaa

SEQ ID NO: 426581 - DNA, 561 bp, Homo sapiens
acagacttttcgagaataaagttaagttgaaaaagaaacatgaaaaatgttcaacacttttaatcattaaggaaatgtgaattaaaatcacaaagaaatactactgcactttcgttttttttttttttgagacggagtgtcctctgtcggccaggctggagtgcagtagtgcaatctcggctcactgcaagctccgcctcccgggttcacaccattctcctgcctcagcctcctgagtagctgggactacaggcacccgccaccatgcccggctaattttttgkattttcagtagagacggggtttcaccgtgttagccaggatggtctccatctcctgacctggtgatccgcctgcctccgcctcctaaagtgctgtgactactgcactttcatcagaatggctaaactaagaagactgaccatgttaagtgctgatagggttgtggaggaactggaattctcatacactgctgctgagaatgcaaaatggcacaatcatattggaaaatagtttgtcagtttcctaaaaaattaaatatatacctatcacaggagccaa

SEQ ID NO: 426582 - DNA, 381 bp, Homo sapiens
attttcaaaaaagaataaatgagaaagttaagagaatcactttagcccttctttggccttctactcagctactcctgagttttacagtattttgttggttctattttttgcaggtataaatttccaaaaacacttttggaaaccattatggtattaaatacttaaactatagttatttcttatrtaatagaggttactggttttctccttagttgtctcttttaaccagtccttctccttcacttttcactgccatcacccaggggcaggtcttcaaagatccctccttaatttctgaaccctaaggactctccctgggtaaagttatcctgtgcttcctgccagtctgttgttgaaagctgatcacatagtaaccctgcc

SEQ ID NO: 426583 - DNA, 601 bp, Homo sapiens
ttttgttggttctattttttgcaggtataaatttccaaaaacacttttggaaaccattatggtattaaatacttaaactatagttatttcttatataatagaggttactggttttctccttagttgtctcttttaaccagtccttctccttcacttttcactgccatcacccaggggcaggtcttcaaagatccctccttaatttctgaaccctaaggactctccctgggtaaagttatcctgtgcttcctgccagtctgttgttgaaagctgatcacatagtaaccctgccctgaaggctcagtggcttcccaacatccatagaatcagctccatatttagcttggcattcaagaccctycataatgtaggtcccatttacctttccaggtagccccttgctgttcctctatatctgctctctatgtagataagctcagtgatctttgggagaattcttgaggcagaaatgcaaccagcagtaagtgatgtatagaacaagttctaagtggaggcagtaatatcaggagaacctgggccagtttcagtgtttctaacatgtccttggaacacattgtccccatagcaattcctgaaggga

SEQ ID NO: 426584 - DNA, 601 bp, Homo sapiens
ttttgttggttctattttttgcaggtataaatttccaaaaacacttttggaaaccattatggtattaaatacttaaactatagttatttcttatataatagaggttactggttttctccttagttgtctcttttaaccagtccttctccttcacttttcactgccatcacccaggggcaggtcttcaaagatccctccttaatttctgaaccctaaggactctccctgggtaaagttatcctgtgcttcctgccagtctgttgttgaaagctgatcacatagtaaccctgccctgaaggctcagtggcttcccaacatccatagaatcagctccatatttagcttggcattcaagacccttcataatgtaggtcccatttacctttccaggtagccccttgctgttcctctatatctgctctctatgtagataagctcagtgatctttgggagaattcttgaggcagaaatgcaaccagcagtaagtgatgtatagaacaagttctaagtggaggyagtaatatcaggagaacctgggccagtttcagtgtttctaacatgtccttggaacacattgtccccatagcaattcctgaaggga

SEQ ID NO: 426585 - DNA, 551 bp, Homo sapiens
tgtcttttgcataataggagccttactatgtatttattggatcacatcaactttgtttataaaacctatttaaatatttatatattttattaatacaatccaacacattttgagcagtttatttgaaaacaagatgrtatttaaagcaactgagttttcttaccaacaaatatctggcattccaacagtttaataataataatgacaacatttagagagaaagaaacaactccttcattctcaaaataaaactgtggatttatttaatgacaattagttctctgctgccaaattcggaagaacatacttatcatgcaaattaattttctaaggttaagtatcaaatgcaagaaaacattagtgaagttgtcagtcatcaaaggtacattctgaatcaaaatcaaaatgctcaacaatcttctataaagaagctaaaaaatgcactctgggttttatcagaaattaataattgttttattcctgttatttaatatggcttttgaatatgtataaaagcaatagtttgaaataacatagctgacttgcacaag

SEQ ID NO: 426586 - DNA, 651 bp, Homo sapiens
atgacagttaaatggtgtaaatcatggaaacatcacagcttggcaataaaaaaaagggcggttgtgctctgacctggggtaatcagggaaccattttggagaaagtggggtcaaaagaaagttttcccactgtgcagagaggcatgtaagggaagatgagataaatgagatgaggaatgaactatgatacatagactccacgtttcagaatttagaatgtatgcttcatctgagactagaatgttaaaatttaaaaaacttccaaaacacatgcaaaaagatagcaaggaggggattgaggcatgaggtatgtcctatcagggagtttcaccatttgtggcttttggtgatgtaggcagattttttgagggagatattaatgtaataattaatctactttctgtctgatggtctttcataatagcactttgagaatgatacagaagtctccactacatttataatattctgaaacttgaaccacatactgaatcaattgctgtgtgaagttgagtgtgtactcagagcaagggaggggctgtttgtgtctcactatgctaattttgctctatagaggcttcatctcktccttctctctgggatataaaaaaagtctaccttctgcacatataattgtgctttgcatccaac

SEQ ID NO: 426587 - DNA, 559 bp, Homo sapiens
aaaatccagtatgcagtttggatgctttttttttttttttcttacctctagcatagtgacaggcaatggtcagaatggtggctgttctgtcagtctgagttcctgagcaattctgatgaggaacctgcttccccatctaactccagtggatgtggtagcctagcgagaaataaacytttgttcttattactataacagaacctaattcatgctgacataaaaactaaaaatattccagcaactgtacttgaaattggatcagtaagatatgtcctttaacctttaagaactcaccattttgagaaatgatatgaagaaaagttagaaggcaactcttaaaatattaatgaaaaacttcaaaatattttataacttacttgtaatttcttcatctctgatatattttgttaatatttaataatgtataatgtatatatagtcttttttttagttataatatattgaataaacttttggggatgttactttcatatttaagatttttaacaaatccttgccacaggtttacattagtcttcactgttaaaatgcataggca

SEQ ID NO: 426588 - DNA, 599 bp, Homo sapiens
gtttaaatcggctacttgctgacaagaaatcttttatcaagacaagagttttctttctgaaaactgagttttgagtttagatccaaatttaagttggagattctggactggaattgtatttagcattggcaagggagaaaagccataggaaaggacttctaaaggcttcttggacattaaatggctatttcacaacaactttgtgatgagttaagtgtaaatgaatcagaaacatacggaccaagttttcttggaaattcacatgggtttaaaaaattaaggcaaaaaagttcttggcaaagagtattttgggtttgccaaattcaagccgcttgagaatgagttaaagaccctagagtacagctgggctacatgtttgttcctttctcttccccacccatttgaaaggtactgtgcaacctgcaaagcttcaggttggccaaaagtcaagtgcacagaaggtcctctaggactttcctgggctgytggggaagaccaggaccatgctttggagccaaaatgtggaggcctgaacttgatcctggagacagaaggctcatgtgtttggattctttccataagaggggttcccttgtaga

SEQ ID NO: 426589 - DNA, 594 bp, Homo sapiens
atggtttaggatattttcagccaatttagtggttaaactaatygaaaagtccagagaatgtctggcttcaaatgaagctcagagtagggacttgatctatatcaccaggacctggtttttctcaatctctctctctttctgctttaattccattatcagaaaaagtctttctgccatgaaaacaagataactcatatcctctctgctcaaagccctgcaggaaagtatacctgcctgttaactagatgccagagcaaacatcccatcacagcctattacctcagttgcaacacatgactggaccaatcactatggacagtggaatgtgatgttctgagtgggttaggactgggtcgtgtgtgccactccagagtcacagggttgaaaatggaatggggtggtttcccaagaggaataagggtttgattgccaaaagaaggtggtatgaatggctctggggccaaacccagttgtcctttgaactgggaatctattctgtcaaggcaagtggatcctcttccaacttcccaattcataccctctttcttgccatcatcttagaagaatagaatacccctcttcctgtttacagcc

SEQ ID NO: 426590 - DNA, 594 bp, Homo sapiens
atggtttaggatattttcagccaatttagtggttaaactaatcgaaaagtccagagaatgtctggcttcaaatgaagctcagagtagggacttgatctatatcaccaggacctggtttttctcaatctctctctctttctgctttaattccattatcagaaaaagtctttctgccatgaaaacaagataactcatatcctctctgctcaaagccctgcaggraagtatacctgcctgttaactagatgccagagcaaacatcccatcacagcctattacctcagttgcaacacatgactggaccaatcactatggacagtggaatgtgatgttctgagtgggttaggactgggtcgtgtgtgccactccagagtcacagggttgaaaatggaatggggtggtttcccaagaggaataagggtttgattgccaaaagaaggtggtatgaatggctctggggccaaacccagttgtcctttgaactgggaatctattctgtcaaggcaagtggatcctcttccaacttcccaattcataccctctttcttgccatcatcttagaagaatagaatacccctcttcctgtttacagcc

SEQ ID NO: 426591 - DNA, 582 bp, Homo sapiens
atttggttacaacatgctcttttagctcagtgaagtttgttattacccaccttctgaagcctacttctgtcaattcagccatctcagcctcagctcagttctgtgcccttgctggagaagtgctgtggtcatttggaaaagaggtactcactagctttttgagttttcagcatttttgcattgattctttctaatctttgtgggcttatctacttcaatctttgtggttgctgacctttgaatggggtttttgtggggtcttttctgttgatgttgttgttgttgctttctctttgttttttcttttaatagtcacccactcttctgtagggctgcactggtttgctgggggaccactccagaccctagttgcctcgggtttttcccttacctggaggaatcaccagtgaagactgcaaaacagcaaaggtggcaatctgctccttcctctgggagttycatcccagggggattctcacctgttgccagcctggatgctcctataggaggtgtctggagaatcatcttgggaggtctcaccctgtcaggaggaatgagattgaagactcacttaaagaagca

SEQ ID NO: 426592 - DNA, 582 bp, Homo sapiens
atttggttacaacatgctcttttagctcagtgaagtttgttattacccaccttctgaagcctacttctgtcaattcagccatctcagcctcagctcagttctgtgcccttgctggagaagtgctgtggtcatttggaaaagaggtactcactagctttttgagttttcagcatttttgcattgattctttctaatctttgtgggcttatctacttcaatctttgtggttgctgacctttgaatggggtttttgtggggtcttttctgttgatgttgttgttgttgctttctctttgttttttcttttaatagtcacccactcttctgtagggctgcactggtttgctgggggaccactccagaccctagttgcctcgggtttttcccttacctggaggaatcaccagtgaagactgcaaaacagcaaaggtggcaatctgctccttcctctgggagttccatcccagggggattctcacctgttgccagcctggatgctcctataggaggtgtctggaraatcatcttgggaggtctcaccctgtcaggaggaatgagattgaagactcacttaaagaagca

SEQ ID NO: 426593 - DNA, 620 bp, Homo sapiens
gttggtcagtttgaaatcattaggtatttctcccagaagtcaaagaccacattcaaagcaaattatatgcatgcttcctaaaggtgttaatgtgctaatctgctggttccctgatctaggcaaaatgccatagtattccacatgagcaaaataccatggtttttgaagatttcatataaatattacccactgtgttttcacatttccaagtgttatacttcctcattaaagtcaacaagctggaactgacatagggatcagtagaataatttcacttccaattacaaccctaacttcttctaataagaaagactgaactgattcggctaataattctttcactttagtaaacattttgattcttcattataaccatgaaaacattacttgtaagacaaatgttttctgcttctcccttgggaaatatttctggggttcactgatagtgctattgaatgttaaataaaagggataagccatcctttagttcytgagagtgtatttgtgtatttttgatgcagtaggaggagaatgaggcagaaacacagagaacaaggtgaaaagtcactttgattattgggtctagggaaggctccatactcaagaagggctgtgaggca

SEQ ID NO: 426594 - DNA, 613 bp, Homo sapiens
tttccctttctttctcactatggtaatttcagcttrtcttagatccagcctagtgctcacttcttcagggaaggcttttctgacctcctttgctaataataatgaaaataacaataaaaatggcaataataacaggtaacacttattgagaatatactctaggacagggacttacattgattatctcatacagtcccccacaacaaccctctgatgcgggaccatcattaatcacatttaaaaacaaagaaagaaagctcagaaaaactaggcagcttatccaagctcacacagctaaagcatgctaagctacactagtcgtatattctcttcacagctcttatcacaggtgaaatttgacattatttgtatgagtttttgattaataactttgtatcccagaagactgtaagctcaataaggttactatatccctagttccttacatagttattgtgccaggtgtagtttagataatcaataaatatttgttgaatgaatgtatttttttatgtggtttcatttttattggggcagtgttttcatttctctatagcaatcacaaaggaattttataagcacatattagcacgtaatcttttaattagagttt

SEQ ID NO: 426595 - DNA, 613 bp, Homo sapiens
tttccctttctttctcactatggtaatttcagcttgtcttagatccagcctagtgctcacttcttcagggaaggcttttctgacctcctttgctaataataatgaaaataacaataaaaatggcaataataacaggtaacacttattgagaatatactctaggacagggacttacattgattatctcatacagtcccccacaacaaccctctgatgcgggaccatcattaatcacatttaaaaayaaagaaagaaagctcagaaaaactaggcagcttatccaagctcacacagctaaagcatgctaagctacactagtcgtatattctcttcacagctcttatcacaggtgaaatttgacattatttgtatgagtttttgattaataactttgtatcccagaagactgtaagctcaataaggttactatatccctagttccttacatagttattgtgccaggtgtagtttagataatcaataaatatttgttgaatgaatgtatttttttatgtggtttcatttttattggggcagtgttttcatttctctatagcaatcacaaaggaattttataagcacatattagcacgtaatcttttaattagagttt

SEQ ID NO: 426596 - DNA, 617 bp, Homo sapiens
atcacatttaaaaacaaagaaagaaagctcagaaaaactaggcagcttatccaagctcacacagctaaagcatgctaagctacactagtcgtatattctcttcacagctcttatcacaggtgaaatttgacattatttgtatgagtttttgattaataactttgtatcccagaagactgtaagctcaataaggttactatatccctagttccttacatagttattgtgccaggtgtagtttagataatcaataaatatttgttgaatgaatgtatttttttatgtggtttcatttttattggggcagtgttttcatttctctatagcaatcacaaaggaattttataagcacatattagcacgtaatcttttaattagagtttgatttctcactccaccatctataatgatagtaagtttgtgtatgctgatgtcaaaaaaactrgtctcccagagacatgactattaactacgtacacactatggacatgcaggatgttatttcagttcccaaagtcctaatattttgttagtgatacagcacattgctgtatataatcctgaaacaatatattttgttattaaaaaaaaaatcttccacaacatgttttcctttt

SEQ ID NO: 426597 - DNA, 630 bp, Homo sapiens
ttgttacttcttaactattcattgagaaatctttttgaggctgagttcttatctatctactgtatctatgttttgtggccaaccaggtagaggcttgcacagttgtgtaggtggtctaggcacaaatatttwcctgaaaatacacaattgatttgggtgaatgttgtttctcttggcattttactatttatcttttaaaaaatagcgtgtaattatgttcatctaattgtagaagtgtttaaatttaaccatattgtctgaactttgaaccattttctaggaaatagccattgcacacaaattcattgaactagagtactctaggaggtatcatgggcttgacatcagaagatctggagtctattcattaggcgggcaactatttggggcaatcttgggttaatcactttcatttcctatttccaaagtatagtgtataatccctaaactcccttcctacaagtgctgaattgaaacattaagtatcagtggcatccaattttttgccaccatggagttattttattagtacctcccctccccaacctcacaacattgccattgctgctatggaaatattttttttcacactgtatttttatctaacaattatttttcccattttaatga

SEQ ID NO: 426598 - DNA, 681 bp, Homo sapiens
tcttgctcatttccttgtaagtaaataattggttcttggattgtagtcctcctaacaaatggacaatacatagcttgaggtattgggagaactaagggcatcttttgcgttctgctatgtaagtaatctaggcaaaaggcagttttgattctarttctactttccctctgtgggttttacacacagttcctctgaatacagaaggaaattcaatatctgcatgagtgacattcaaccctgtcctgccttattcagttcttttgtttttaatcattaaatggccagcatacaatgacattgcacatctgtttctggtctgggaagatcagtaaggatgggggtgactgagagctacattaggtgaaacaattacaaagaaatgttaaaaagtataagtgtaccatttccccacttaacctaatacatccagcatttgcgaaatgataatgtgaggctcggttgatgtggtgacttttggtgatgcattaatgtcaaacaaatggcacactttgcaataacctagctggaaagactgcctgctgggagaggtgtccatgagtgatggcaaaagccattggcatttgatggctgaatttgcccctgtgtgactttgaatgtgtgagtgcttctttatgttttgtctttaaaaacaacctggtattttaattagcatttggcata

SEQ ID NO: 426599 - DNA, 681 bp, Homo sapiens
tcttgctcatttccttgtaagtaaataattggttcttggattgtagtcctcctaacaaatggacaatacatagcttgaggtattgggagaactaagggcatcttttgcgttctgctatgtaagtaatctaggcaaaaggcagttttgattctaattctactttccctctgtgggttttacacacagttcctctgaatacagaaggaaattcaatatctgcatgagtgacattcaaccctgtcctgccttattcagttmttttgtttttaatcattaaatggccagcatacaatgacattgcacatctgtttctggtctgggaagatcagtaaggatgggggtgactgagagctacattaggtgaaacaattacaaagaaatgttaaaaagtataagtgtaccatttccccacttaacctaatacatccagcatttgcgaaatgataatgtgaggctcggttgatgtggtgacttttggtgatgcattaatgtcaaacaaatggcacactttgcaataacctagctggaaagactgcctgctgggagaggtgtccatgagtgatggcaaaagccattggcatttgatggctgaatttgcccctgtgtgactttgaatgtgtgagtgcttctttatgttttgtctttaaaaacaacctggtattttaattagcatttggcata

SEQ ID NO: 426600 - DNA, 630 bp, Homo sapiens
agaataaatgcattacattttgaggaccatgctaagattttcagttccatgttgtaacagtgctgtaatctcagggaagtatgtgcaaaagcctgctcagagcatgaattttgagcttaaagtaagcatttctaaagattccaaatagttgagagagcccaattctgcattataaaataagactttatctttatctctgtcttatttcattgtttagaagtayaggctatcactttccacccaaattctttcactaaatcactggtgtaaaatacatggcttctaccttgtaataagaatgacagtatgcatactttctccttttcccccccctttcacttttatagagcttttttttcctaaaaaaaaaaaaaaaaaaaaaaaaaaaaaaaaaaaaaacttgccacaatggactgaatgtttgtgtcccccaaaaaatcttgtgttaaaatcctaacccccaatatattaggaggtatagctttcacaagggtggggcctccagaaatagaactagcgcctttataaaagggcactaatagagagccttcttaactttctttccaccatgtaaagatacaagaagttatcagtatgcaactcagaagagggccctcactgttacccaac

SEQ ID NO: 426601 - DNA, 614 bp, Homo sapiens
ctttcaattagtgtgtggccactgcacctgtgaactgtaatcatccaaggaaacatatctgtgagtgtcagtaagaacaattcaggaattcatctactctgccttcttctattgccatgttcacacagatgttaatcccgggggtgcacacactgaaagggccacccgcctgtatcccaggagcatgagaaacctgagtgcagatcaggaaaattattaatttccaactgtctgccatcagtatcatttctctttgtttctagggccactatgttttgttattgttgttgtttcccagggagcataagcatgcagtagatttattgttctatgtttycccatataaagaaaaagcaagttttgctgttaaacatatttgtattctatttgctgcttcatttccagtatttttaatagttctctagaatttttttcctttctttttttctaaactcttttcagttacaaattgttaagagagtaagacagcttttttgtttttttaaactatgatacataattcattcataataactatgatacataatttattcatattaactaatgaacagaaatgtattgtgaaccaatacatttctgttccttatatatta

SEQ ID NO: 426602 - DNA, 611 bp, Homo sapiens
ttcagagagtgacaacgatccagaagtagcatggaagacatattaaggtccaagcacaactgtcaaaaggtcccttatgctgtgtttaattggtcaaagcaagtcataaggtcattccagattacagaggcagggaaatagactccaccttttaataggaggagctggaaaatcacattgttaagaacataggtgaagtatagggcagagtgaagaattgaggctatttttgcaatcacatttaaaatattttaaaatcatgatctagaaattaaaatgtcayatatttgcaccttactgaatttgggaaaccttgcccatgaatcagttattccctgaaaatcacctggttctacctcaatacatcataacctctaaggcaacattgtggattaggaaaaaattgtgttataaaaaggggggctaggccgggcatggtgactcacacctgtaattccagcactttgggaggccaaggtgggaggatcacttgaagccagaaatttgagaccagcctgggcaacacagcaagaccctatctctaaaataaaatttaaaaactcagctgggcatggtggtgtgcacctgtagtccagctttttaaacaatgt

SEQ ID NO: 426603 - DNA, 564 bp, Homo sapiens
cttctgagtaaggttttatgcaggggagtggtatgatctaatttacattttaaatgtattaatctctctattgtgtagcacatagattatagggaacaagaatagaaacaaggagatcagttcctgggctattgcagtggtttaggtgagaaacggtggtggcttgccacagggtggtggtggcagggatgcagagaagtgaacgtatttgagagatgcattggaagtagagttgagatgatgtggtgatggtgcattaaatgtggggcrtgcaagaaagagaggaagcaagaataattcctaggtttggagtttgtagcaattgggcagatgtggttttatttattcaaggaaatgagtgaattagaaatagagttctgttttagccatattaggggtgtatggcaggttgtatattccaaagtggccagaatgctcctctgcaatgtgaccttgctgttcacccatcaagaggtgtagtcgcatccctttcctataaatctgcattggccttagagacttgcttatatccagtagaaggctgtggcagtgatgctgcctaac

SEQ ID NO: 426604 - DNA, 505 bp, Homo sapiens
gtttaataattagtctattcaaatttataagctgtctgcacttagtcaaactttaaagtacctgcaggacccagaaagaaccatctatactaattctaaatacgcctctgtggtaattcatatatttagaaaatttcagactgaattaatagtaaaagtcaaagccttgtttatgaggagttaatcacgtaagtcttaaataaccttcagttaccagaaaagaaaatagctattgtctgtgtctccaggtaccaaaaagcctgtctttcaagagtcaagaaaataacctagcaaatcagaaaagccggactggctgccatttctcctgtaggcgctaaagagaactcagagaaatgttattcaaacctcttatgaaggaagtyctatcccacctacattagaggacccattaaagaccccaagccatgtatagcacactcaaagtttatgagtgtataggaatttataccctcagccaaataagtctagagacttggttgccaga

SEQ ID NO: 426605 - DNA, 591 bp, Homo sapiens
atccttctttgggacaggaggattcttgcttgaatcagcagctaattttgcagtattgtcaagcttagctaatttggsttgtcacccggaaatccaagtggtcttattgcccaccagattcagcttctcccaccagtgggggctcattcctatttgtgcaaagtacacattgtatgctccaaatgcactggttgttctgacacatgaattgaatccacatagaagctggcactagggaatattgcattggtgagcagtgctaccagttatgtagttgctcacctaaaagccctaaattaccaaggaagtaataagaattatattgaagtgtttcctaatatgaaaaatgtgtgtatgtaaactacactcttttagctatatgttatgatcatgtgttatgatcccacacctatcatctagattgcctgagcctctcagaaaataaggacactgtaccattaaaaataggtgcagacactgctttgatctgagcttaaggaatatgggtttccattgcaaagcaggatgtttccaagtttgaagtatcacatgtgagactctgtttgcctctgctggtgccatagaagacag

SEQ ID NO: 426606 - DNA, 591 bp, Homo sapiens
atccttctttgggacaggaggattcttgcttgaatcagcagctaattttgcagtattgtcaagcttagctaatttggcttgtcacccggaaatccaagtggtcttattgcccaccagattcagcttctcccaccagtgggggctcattcctatttgtgcaaagtacacattgtatgctccaaatgcactggttgttctgacacatgaattgaatccacatagaagctggcactagggaatattgcattggtgagcagtgctaccagttatgtagttgctcacctaaaagccctaaattaccaaggaagtaataagaattatattgaagtgtttcctaatatgaaaaatgtgtgtatgtaaactacactcttttagctatatgttatgatcatgygttatgatcccacacctatcatctagattgcctgagcctctcagaaaataaggacactgtaccattaaaaataggtgcagacactgctttgatctgagcttaaggaatatgggtttccattgcaaagcaggatgtttccaagtttgaagtatcacatgtgagactctgtttgcctctgctggtgccatagaagacag

SEQ ID NO: 426607 - DNA, 496 bp, Homo sapiens
cattctcatttgtgacttaaagaatgtaccattagcaaacatcaccatcatcctgacccagaggttaaaggactctaaagtatagcaatatggtgcccttgttgccctggccaaaacctgacatatgaagtaaatgggaaaatgtcctacttgtgaaggtttcttctagctcagaaagtttttagggaatttttccaagattcaaagaagaacaaaagtgatgaacttctgttttcagagtagggctatatagtactatactatctgtagttstcagtgttgtataatcagattagtggttttagcctttactaaaaacaaacaagaagggatctggcttgaaccagataatagtaaaaatattatattgacaatgttacatttggtagtgtaccccttagaggaagtatctttatttaactaagaatcaagatattataagtaaggaagtttatgattcccatgcaagccattgtccagcttattaccacagttg

SEQ ID NO: 426608 - DNA, 574 bp, Homo sapiens
gaaacactgctgaaagaaatcatagacaacacaaatggaaatacatcccatgttcatggatgggtaaaatcaattttgtgaaaatgagcatattgccaaaagcaatctacaaattcagtgcaatttccatcaaaataccatcatcattattcacagaactagaaaaaagaatcttaaaattcctgtggaaccaaaaaagagcccacatagtcaaagcaagactaagcaaaaagaacaaatctggargcatcacattacctgactttaaattatactacaaggctatatttaccaaaacagcatagtattggtataaaaataagcacatagaccaatggaacagaatagagaacccagaaataaagccggatagttgtagccaactgaatgagtgagatgaagtattgtttacatgttgctcacaacgtccaggttatgtttatgttgttgtcatttccccagagttacatgtaagggtgacactaatgaagattgagtttaattgctttttaaagtgtcttcaaaaagattataccatgaatcagcattggaattttattatgcacatagaaag

SEQ ID NO: 426609 - DNA, 560 bp, Homo sapiens
gggatgtctttcaaaaaagtgccaattttaagattgtatctgatttttcttagcttctgcatttctacagctttctccttgcatgattctttaatgaaatggctgaacaagtttttttgttcaaacttgrctcatttttttttcctgaaagtctcccctaagccagatttctttttagccagtcccagaaagttcagtgtacaactgataaatcctgttctctgaacttcttataatttagttgatagttagtactcactttgtagggtcacgtgttgatatgtttgtttgatgaatacatcttatttccttggctaaaactgggagcaaactaaaagcaataccctgtccccaagtatgtcagggtaatttcttccaatactaatttagttttttcctccctgtatttttccttctccacttctgggaaccagcttctgtgcttccttgcccaagaggaggaaacaaatatatatatatacatgcaaatatatgtatgtacttacatgcaaatacacacacacacacacacacacacacacacacacacacatacacat

SEQ ID NO: 426610 - DNA, 585 bp, Homo sapiens
cctaacatcaaaatctattatgactatgataaactggaaaaaggatgctatgtcttagaaattaactggacatggatgtgaataagtataaaagagagaaaaaagaacagatagaaactgaaataaggttcttgatgagagtacagattatgtaagtagaaaatgggcaacacttcattccagtgtaattaaggagaaagcaatctgtcattayaaggcaatgtaatataatactatgaacaatttattcaaggatggcctgttcatgccttcatgtatttactcactcagagagagaccaggtagagggtgatcaagaacacagggagcacctagagtcacactgccagggtttaaatcctggctcaggtacttattacctttacctatatcaactttgggtagttttcagaattctctgtgccttgatttcctcatctgtgaaatggggttgaaaataatactttaaaatttagtcgagttaatatttttaaacacacagaatggcttccacctctagtgagctctgtaaaagaatgtgttgaataaaatatatttgctcaacattgatttattactattgag

SEQ ID NO: 426611 - DNA, 585 bp, Homo sapiens
cctaacatcaaaatctattatgactatgataaactggaaaaaggatgctatgtcttagaaattaactggacatggatgtgaataagtataaaagagagaaaaaagaacagatagaaactgaaataaggttcttgatgagagtacagattatgtaagtagaaaatgggcaacacttcattccagtgtaattaaggagaaagcaatctgtcattataaggcaatgtaatataatactatgaacaatttattcaaggatggcctgttcatgccttcatgtatttactcactcagagagagaccaggtagagggtgatcaagaacacagggagcacctagagtcacactgccagggtttaaatcctggctcaggtacttattacctttacctatatcaactttgggtagttttcasaattctctgtgccttgatttcctcatctgtgaaatggggttgaaaataatactttaaaatttagtcgagttaatatttttaaacacacagaatggcttccacctctagtgagctctgtaaaagaatgtgttgaataaaatatatttgctcaacattgatttattactattgag

SEQ ID NO: 426612 - DNA, 654 bp, Homo sapiens
tatacaagaccatgagagcaagaggaaggagcccagtgtgtggcctgggagggtcaagggaaactggattcaggaaatgccattttggctaagaactatagagtcaatacacatttgcaaggttttaaagtgaaaatggaggccaggcatggtggctcacgcttgtagtcccagcaatttttgaggccgaggcgggcggatcacctgaggtcaggagttcgagaccagcctggccaacatagtgaaaccctgtctctactaaaaatacaaaaattagccggacgtggtggcacgcatctgtaatcccagctactcagtaggctgaggcaggagaatcacttggacccaggaggtggaggttgcagtgagccgagattgcaccactgcctgggcgacagagcgagactctgtcttaaaaaaamacacacacacaaaaaactaaaattgttcatatgattgggctggatgctagattgtttgggagatgaagttgtacgctctgggggtgttttggaaactcatgcaatactttctttggtcacagtgattggaaggcgcttctggcattgaatgagcaaagcccaggcagcaggtacgatgcaatgtacaagatagttctgcacatgaagaattgtcctgtgtttaacacgatta

SEQ ID NO: 426613 - DNA, 437 bp, Homo sapiens
tcaccagctgtctggccttaggcattaacctctctctcagtgcctcgggtgctgggcgcttagtctgtaaaacaggtatcatcatagcatctacctcctgggttctcaggggttttggaggagttaatatatctaaagcattcaaaacccgccaggcacacagtgggtactttactagtgttagtttttgttgttattgttaacrgctcctttccccacccacgcccaaggaaaaactctcaaatagctggcatgagtatggtcatccacctcagtagcctgcctgtctgtgagggcctcctccctcagtgagcggcttggtcctactcccctgggctcctttctgctccctttcctcccactgttgagtctctcttccctgggattaatccaccaaccatttcgccctcttctgtgttttagcttcatccctaccc

SEQ ID NO: 426614 - DNA, 570 bp, Homo sapiens
agaaacaaatggcctatggatgatgttgattagcagataaaaaagcctgttacatggatgttttatgaaacttaaaactatattgatggcaggaaacaatgattttggaggaaatcctggaaaattaaggatatttaaagtttgaaaacaattgtaattgtgaaagtttagacacggaagtcataaaaaaatttcagttcagtagtttgcagatctgttacttaatctttttagttaacttyagatcagtagaataagatttagttttagactgtatgtatatacatacggcaattttatacatacatacatttacgtaaatacaatatacaaggaaaagtgaaggacagagtaaacggagaagaaaatgaattaaaagattataaagtgttgaatgacaggctttatgtaagtaaggcaaaaatgtaacacaggaatatcctagataacaagttaagtatgagctaagactgtatcgctaggtttttcattttttaaaggcgttataccaggatgtggatttaggaggcctgcagtttagaattgagaaagagctcactgtttatatta

SEQ ID NO: 426615 - DNA, 594 bp, Homo sapiens
attaactggtacatcatcaaaacatgatgctgctaatagaatggacaaatacatcgtagggcatcacaaattcacccgttttctagtagtgactataataataagtttttgcaacccgtaaagaacatttattctgttctagcattgataggatgactgatattgattataaatttatattcaaatagtggaaccagttgtttgatagacataacctctgagascagcagtaatgattttagtttttaatggtttgacaaaatatacaaggcatttgatgaatacacaagttggttatttcaagcatcttggagcttcagtcttcccatattcaatagtgatgtagaccatgcagtctgttccccctttacaggtataatttgtctttcaaaataaaaattgtgattgtgattgttactaacacattgtgtctcttaatattctttaaatacttcaatcttttcaagcaacgtttggcataacctgaattccactcaaaatccctcaggagagaatagaaactgtcatatgaaattggttataataggatttaacctatagagttctgattctttcttcccttcaatttttatc

SEQ ID NO: 426616 - DNA, 532 bp, Homo sapiens
aagttttttagcagtccttttaactgtaatgtttggatcatttgcatttaatgcaattatccagatggttgggtttgaaatccattattttattatttcctttctttttgagaagtgctgggattacaggtgtgagccaccatgcttagcctattttattatttcttttctcttttctttctcccacacactcctcctcctcctgttgcatttaatacttcatacacagaagcagaactccagtacatttacatgttagcagtgttttgtcctgtggacaaggagaggattccttcctatattggaattgccagctgtgtagtagataactggaataaagtgtttctgatggaatgkgtttggatatcactcatgtaggaaaagcataggagcgtgcgtttgtaattctgaacacattcagtgggtggctttgtttgctaataaggtggttcttgaaatgccacagaagtggacaaatatgttagaaagtctgaaatacttgaacatgatacctacctttgaggactaagtg

SEQ ID NO: 426617 - DNA, 532 bp, Homo sapiens
aagttttttagcagtccttttaactgtaatgtttggatcatttgcatttaatgcaattatccagatggttgggtttgaaatccattattttattatttcctttctttttgagaagtgctgggattacaggtgtgagccaccatgcttagcctattttattatttcttttctcttttctttctcccacacactcctcctcctcctgttgcatttaatacttcatacacagaagcagaactccagtacatttacatgttagcagtgttttgtcctgtggacaaggagaggattccttcctatattggaattgccagctgtgtagtagataactggaataaagtgtttctgatggaatgtgtttggatatcactcatgtaggaaaagcataggagcrtgcgtttgtaattctgaacacattcagtgggtggctttgtttgctaataaggtggttcttgaaatgccacagaagtggacaaatatgttagaaagtctgaaatacttgaacatgatacctacctttgaggactaagtg

SEQ ID NO: 426618 - DNA, 594 bp, Homo sapiens
aaggcgataggggaacatctgtggtagctcactgggcctatgatcrcattcttctcaggtcagaagtcccatgcgagagacccaaagccacagctcgcttcattcctctgacgaaggcaagcttgctgctcagctctcctacgttaatctgccaataagttctgcaaaactcacttggttttttaaaaaactaattgaactcacacgaaagctttatcagtcaacccttaagtcttgctgccttaaacagatcagtgtaaaaggagtttttgtaatgtttatagaatgaggttgtgtgaggtcactgaaatggtgtttgtttttcttgcagctatttcagtggcagttatacaaagcttgatatgctttgtttgggaatgtgtgatactgtaagcatgccatttttggtctgtgctaactgaagcaacattttaccctgtgtgtagatagtgtggtgtataatcattcctgtgattttaataacagaattataatatgtgagacctcaaatgggtgttagacatcatccaacttcctcaccacagaaaaatatataggcaggaagaaattttaaaaactcgtttcatcatgcca

SEQ ID NO: 426619 - DNA, 564 bp, Homo sapiens
tcaacaaataacgtttgttcaaacaccagtggtttcgttatgaattatttaacttctctttcaacatggaaaataattcagatgtgattgcatctttttctaatgtcaaatgtgctgtacctctacggatgggaaccgggagttgctggataaacatggaccggccaatgccacgtgggtgtgcaggtcgggtggcccttccagtctcaggagcgctccaggaagtccctgagtgagagrggcatagagtggagtgagaaggtgacactgccccaaatctggatacttggaagcaccagatgattatctactgaagggggacagtgtctccacgatcgttggaagcagtgagtgccatggaagatgttaaggagaagggaccactctcaggggctcctgggatggccgaggagccgggagtccaggcagccttgacaggctgtggcgatgggacccaatcgctcacagtacagagggagcttcacggggattacataatcccagtagccccccgtgaggtgctaccattgtccccattttacaaactggtgaggtaagtcttag

SEQ ID NO: 426620 - DNA, 622 bp, Homo sapiens
tactgcttggatttgtctccccgtccagaattttgtgggctcatgtctgaattttttattattattatttttttttgaggtggagtctcgctctgtcgcgcaggctggagtgcagtggcgcgatctcggctcactgcaacctccgcctccagtgtttaygccattctcctgcctcagcctcccgagtagctgggagtacaggcgctcgccaccacgcccaggtaatttttttgtatttttagtagagacggggtttcaccatgttagccaggatggtctcgatctcctgacctcgtgatccgccctcctcggcctcccaaagtgctgggattacaggtgtgaacgactgcgcccggcctcatgtctggtttttaagagagagagagagagtcagagaaaaggaggggggtggagagagagagagagagagagagagaatagaaagaatgcttacatgaacacacaagagaatgaagtaaaaataaaaacgccagttggtagattgcaaaactcttctcagttttgagactttattgttcttcccacagaaaccaccctcagggcccccttgaatccgagcgaaccttgtgaagatatgcttccaccaacaagacgtggagag

SEQ ID NO: 426621 - DNA, 622 bp, Homo sapiens
tactgcttggatttgtctccccgtccagaattttgtgggctcatgtctgaattttttattattattatttttttttgaggtggagtctcgctctgtcgcgcaggctggagtgcagtggcgcgatctcggctcactgcaacctccgcctccagtgtttatgccattctcctgcctcagcctcccgagtagctgggagtacaggcgcycgccaccacgcccaggtaatttttttgtatttttagtagagacggggtttcaccatgttagccaggatggtctcgatctcctgacctcgtgatccgccctcctcggcctcccaaagtgctgggattacaggtgtgaacgactgcgcccggcctcatgtctggtttttaagagagagagagagagtcagagaaaaggaggggggtggagagagagagagagagagagagagaatagaaagaatgcttacatgaacacacaagagaatgaagtaaaaataaaaacgccagttggtagattgcaaaactcttctcagttttgagactttattgttcttcccacagaaaccaccctcagggcccccttgaatccgagcgaaccttgtgaagatatgcttccaccaacaagacgtggagag

SEQ ID NO: 426622 - DNA, 597 bp, Homo sapiens
ttaaaacccaggagatttcacataaaaatttggatttttccacttttcttgaaaagtcagaggctctggcaatacctagctaacattctcaaayggcagtgatgggctggagttgagcatactggcttcctcccgtggacagtctccaccactgccttaccatggggccacattagttacttgctggcctttacagagtttgaattttcaactctgatattatacatatgtatgcttttgttattaatacagtggcttacaacatataaaataatatctacattaaaataaataagagctagctatatatttagtatctaggtcagctaattaagcttaacaacgtgcaccagactacattgggaacagatggttggacatctcccagcaacagccataaatgagaggtgaggattctacttttcaagggggactaacgggaagaccctcaattattgggcatttttcgctctgggtccttggcctcagggtacatctgtgttggcctgagccagacatcataagcctttgacccattggagagaatcaaaccttactcaaaccttgggaagctgagaaacccatttagaggtcatc

SEQ ID NO: 426623 - DNA, 581 bp, Homo sapiens
agcgggaatactttctcagataccctgttgcctttaatggctccacacatgataccattctctgttaagcagcaggtgagcaggaggggcgctgtacaagtcatcaaggtctctcctccaaaaggcaagattctcttgtaaccatctaatatatggtcttgacagttcaaagataagagttccctggggcctgagacaagcctcttcctttggggaggagccaagttttaggaaatctgccttcacattaaaacacagtttctcctagcagctctgactcgttggtctgtgggtccttgtagaatgtctcatccctctttatgtggtacctgtttgaatgtttgaaggcagtgaccctcgtcctctgagttattttcttcacgccttttttgagcatggggttgtggtcttyctgcagccttagtagtattccactggggaccaaagggagcccatgctttgaatacaatttttgaatcattctattcgtcctgtttagccctgaacatttcaattttggtggcagtgccagaatatgcgaataaaggactataatacactccttgatactggattttgtt

SEQ ID NO: 426624 - DNA, 560 bp, Homo sapiens
atggtgaatttactttttgatgtgctgctggattttgttttctggtattttgttgaggatttttacatctatgttcatcaaggatattggcctgtagttttcttttttcgctgtgtctttaccaggttttggtatcagggtgatactggcttcacagaatgaatttggtaggagtccatctgccttgattattggtattattttagtrtaattggtatccactctttttagtatgtctgataggatttggctgtgaatctatcttgcctggagcttttttgatttggtatgttttttgttactgattcaatttcagcaatcaatattcgtctgttcaggattccaatttctttctgattaaatatttggaggttgtatgtttccaggaatttattcattttctgtagagtttctagtttgtgtgcatagaagtgtttataacagtctctggagatattttgtatttctgtgggttgcttatgtcactgttgtttctaaatgtggttgttttgatcttgttttctttaatttagctatcagtctattgatattatcattta

SEQ ID NO: 426625 - DNA, 575 bp, Homo sapiens
tgggttttagcactgtggaaataaagactagtcaaatgagaaaaacaaagattatttattctatagcagccagacaccatcacttgcattttggcagagattccaaaacaggcagaggagtgaaaaagctttgtactgggaaagaggaaagacttgaagtaaacccygattgaagggtgttggcccagggatgttttaggcaagctaaccagaagtgggatatcttatgtgattaattagggatgcatatttggctttatctgatttgtcttcacttggaactgggaacaaaaaatagtgaagttgttagttattaatcaagtcctggccattttgaactgattgttcaaaactaagaatttcttagtttcctgaattgtcactagaaatggtagtctgccttcaagtctgacttataaggctggtttcctgggttgtttattgtagataaagaggttggtgtccttggaaggttgttgcagattgtaggtcagagttctgcatgatccagacattgtctgtttgtatgttcagtctctcaactttctctgacagttaacactacttcatcacta

SEQ ID NO: 426626 - DNA, 575 bp, Homo sapiens
tgggttttagcactgtggaaataaagactagtcaaatgagaaaaacaaagattatttattctatagcagccagacaccatcacttgcattttggcagagattccaaaacaggcagaggagtgaaaaagctttgtactgggaaagaggaaagacttgaagtaaaccctgattgaagggtgttggcccagggatgttttaggcaagctaaccagaagtgggatrtcttatgtgattaattagggatgcatatttggctttatctgatttgtcttcacttggaactgggaacaaaaaatagtgaagttgttagttattaatcaagtcctggccattttgaactgattgttcaaaactaagaatttcttagtttcctgaattgtcactagaaatggtagtctgccttcaagtctgacttataaggctggtttcctgggttgtttattgtagataaagaggttggtgtccttggaaggttgttgcagattgtaggtcagagttctgcatgatccagacattgtctgtttgtatgttcagtctctcaactttctctgacagttaacactacttcatcacta

SEQ ID NO: 426627 - DNA, 575 bp, Homo sapiens
tgggttttagcactgtggaaataaagactagtcaaatgagaaaaacaaagattatttattctatagcagccagacaccatcacttgcattttggcagagattccaaaacaggcagaggagtgaaaaagctttgtactgggaaagaggaaagacttgaagtaaaccctgattgaagggtgttggcccagggatgttttaggcaagctaaccagaagtgggatatcttatgtgattaattagggatgcatatttggctttatctgatttgtcttcacttggaactgggaacaaaaaatagygaagttgttagttattaatcaagtcctggccattttgaactgattgttcaaaactaagaatttcttagtttcctgaattgtcactagaaatggtagtctgccttcaagtctgacttataaggctggtttcctgggttgtttattgtagataaagaggttggtgtccttggaaggttgttgcagattgtaggtcagagttctgcatgatccagacattgtctgtttgtatgttcagtctctcaactttctctgacagttaacactacttcatcacta

SEQ ID NO: 426628 - DNA, 594 bp, Homo sapiens
aaatatttgcaaagacacatytgtcactcaaaggactgtcactcaaaacatacgacaatcttttaaaactcaacaataagaaaataaaaaacctgattattttcatgtgcataagacctaaatagacaccttacaaaagtgatacactgatggaaaataagcatgtgaagatactccacatcatttgttatcagggactcaaattaagaatgatgagataatactatatatctattatagtggccaaaatctgggacactgttgacatcaaacgctggtgaggatgtggagcaacaggcaaattcactgctgatgtgaatataaaattgtacaaccactttgcagacaatttgtcagtttttcacaaactgaacgtactctgtccacataatccaacaatcactctccaaaggagttgaaagcttatgtctgcacaaaaacctgcacttggatatttatagcaccctcattcattcaattgctgcagcttagaagtaacagagatgtttttcagtaggtaaatggaccaaaaaaccttatacacccagacaatgaaatactatttattcacttccaaaaagaaatgtctatgag

SEQ ID NO: 426629 - DNA, 604 bp, Homo sapiens
ttgaaatcataggaaacaggattggtgaacaatataaataagccaagagaaaatatgtgaactaaagcatagagaagaaaatgaaaattatataaaagaacaagggtcataagggacatggtaaaaagatttcatattcagatggagttttagaagagcaaaagaaaaaagaaggaagagaattcaatggaaagagttgatgaaaaataatagcacatatattcaagatgctctgaaaaccctaaggaaaaaaaaacacacaaaagaaaccaaacctagttacttcagtaaatggctgaacctcaacaccagagaaaatcttaaaagtgtctaaagaataaagctacattatactcaatagaactacaaaagttgaaatatacagataacagcatctcaacagaatcaagacatatgctgaaaaattattaccaacttagaaaataaaaatattttcaaacaaataaaacctggaagaattcatcaccactagatgtgccttaaaaaagatcaaatagtattctttcagtaggttgagaataatttcagatggaaacaaggaaaagaaagaagctmtaaagagcaggagaactggtgagcatgt

SEQ ID NO: 426630 - DNA, 567 bp, Homo sapiens
acttccctgttacacagactcttgagcacatacctcacaaacatttagtgcttgtgcatgtatgtttgccagtcatattactaataataattagtactattgcagaaaatattcattttcttcttactgcaatataaccaaaaatttagaattttagttcaaaagatatttatagtttttgttttctttctttccaaacttgatgagccagagatccaaatctgatgtctgttgcttcagacacatagttcagtgtattccccagtctcttttgcattagttgcrgactcaattacaatgaatagaatctgggttccacggctggtctgtaaaaatctcccatgtgcttctctattctcttttctcttccagtcagctggaatagcagctgttagggtgatcttaacagccatgtatgaagatggtataactgctgacaacctggattctgaaagactgtgtagagaagttgcctcacttttctgaatgaacaggtctataacaagcaagaaataaaagtctgttgttttcagctactgaaatattggggtctattttttttttatt

SEQ ID NO: 426631 - DNA, 567 bp, Homo sapiens
acttccctgttacacagactcttgagcacatacctcacaaacatttagtgcttgtgcatgtatgtttgccagtcatattactaataataattagtactattgcagaaaatattcattttcttcttactgcaatataaccaaaaatttagaattttagttcaaaagatatttatagtttttgttttctttctttccaaacttgatgagccagagatccaaatctgatgtctgttgcttcagacacatagttcagtgtattccccagtctcttttgcattagttgcggactcaattayaatgaatagaatctgggttccacggctggtctgtaaaaatctcccatgtgcttctctattctcttttctcttccagtcagctggaatagcagctgttagggtgatcttaacagccatgtatgaagatggtataactgctgacaacctggattctgaaagactgtgtagagaagttgcctcacttttctgaatgaacaggtctataacaagcaagaaataaaagtctgttgttttcagctactgaaatattggggtctattttttttttatt

SEQ ID NO: 426632 - DNA, 555 bp, Homo sapiens
tgatgactttcaaacttgtctactgagaaaatatttttacatgattatgcatgtattatcttgtgtgaaactttcacaaaatcattctgaaccttaccatctaaaataaaggatatttcctaatatgttctattctactctattctaatctatttatattttggtaamatgctggttgtgactcaccaaactgattccgcaaatcccatgtgttaacacctatagtttgaaaaatactggtttacatattagacctagcttaggaaatatggcctctaataatgttactaccttacatttgtgtaacaaaaatcattttatacatatttttattttcactacacaagagccaatatgtatattatgactcccaattttacagaagaggaaacagatgttacctggaattataatgctactgaaccacatattggaactacatcttattccaaagtacactgatatttctgttacgcatctagttcactagttttggtacaacttttgtcataaataagctttgttacttgtggtgagttatttccgttttccaca

SEQ ID NO: 426633 - DNA, 555 bp, Homo sapiens
tgatgactttcaaacttgtctactgagaaaatatttttacatgattatgcatgtattatcttgtgtgaaactttcacaaaatcattctgaaccttaccatctaaaataaaggatatttcctaatatgttctattctactctattctaatctatttatattttggtaacatgctggttgtgactcaccaractgattccgcaaatcccatgtgttaacacctatagtttgaaaaatactggtttacatattagacctagcttaggaaatatggcctctaataatgttactaccttacatttgtgtaacaaaaatcattttatacatatttttattttcactacacaagagccaatatgtatattatgactcccaattttacagaagaggaaacagatgttacctggaattataatgctactgaaccacatattggaactacatcttattccaaagtacactgatatttctgttacgcatctagttcactagttttggtacaacttttgtcataaataagctttgttacttgtggtgagttatttccgttttccaca

SEQ ID NO: 426634 - DNA, 599 bp, Homo sapiens
ctgttgcattagtgcttaacctccatagtgtaatcattcttgccccagacagattttcttgacctgaaaaccaaatgtctctgtggtaaatgcattacataaaaaaagaccctacactctgctttttcttcttgtaaatcagttttcttatgtttcacttttatgagtttctagctgtgatgttattacaattgattcagcaatggaagaaatatttagttggatttcaaaggaatattctatgcagwtgtggtagaaagacattcacttaaggtattgtcttagtccattcatgttactacaacaaaaatgccataaactgggcagcttatagacaataaacatttatcagagttctagagactcggaagtccaaatcaaggcattgaagggcactaatcccttcatgaggccctacctgatgatgtgatcaccccaaaggccctacctcctaatgccatcaccttggggattaggatttcaatatataaattttggggagtacaagttgtgacaccatagcaggtatcttgaatatatcttgtagtcccagattttctaattcttaagaatcatcaaatctgataaatttcacactt

SEQ ID NO: 426635 - DNA, 554 bp, Homo sapiens
aatatactgagttgggtagagcaatagaaacctcaaattcatttgtattctgacagagagagagatagagagagaacatcaatgttctctgcaatgaattttatacttataaaataaaacattaactgaaataaccaacatcataaaaaaagatatgggtggcagttaccgaagggcatctggatcctctgtaaaagaccttgaaattcccaagcactaagtttaataaggaaaagatgagaagatcatattgaaatayataaaattaacttggcagaatattcacaattcattttatgcatgtatataagacaatcccctgtgcatcacagtgtattaaaaaggacatgtgggttggtattaaggattacattgagacaaaacacaagctaattgttatatggttaaaggcactattaaaagtgatagggtttaataaggagtatcatggcctgctgtccaaatacagtgactgtctatgctgctggcttaaggagatcaggagaatacttcaatgaaactacttaatacttcaatgagtattaagaaattta

SEQ ID NO: 426636 - DNA, 554 bp, Homo sapiens
aatatactgagttgggtagagcaatagaaacctcaaattcatttgtattctgacagagagagagatagagagagaacatcaatgttctctgcaatgaattttatacttataaaataaaacattaactgaaataaccaacatcataaaaaaagatatgggtggcagttaccgaagggcatctggatcctctgtaaaagaccttgaaattcccaagcactaagtttaataaggaaaagatgagaagatcatattgaaatatataaaattaacttggcagaatattcacaattcattttatgcatgtatataagacaatcccctgtgcatcacagtgtattaaaaaggacatgtgggttggtattaaggattacattgagacaaaacacaagctaattgttatatggttaaaggcactattaaaagtgatagggtttaataaggagtatcatggcctgctgtccaaatacagtgactgtctatgctgcyggcttaaggagatcaggagaatacttcaatgaaactacttaatacttcaatgagtattaagaaattta

SEQ ID NO: 426637 - DNA, 551 bp, Homo sapiens
gtctgggtaaaataaggatgagaactaatgggctgcattctcaggaggttaggcattcttagtcacaggaggtctgcacaagataggggtcacaatgattctcctgataaaacagcatgcggtaaagaagccagccaaaatccaccaaacaaaaggtagctatgaaagtgacctctgactgccctcactgctcattatatgccaattataatgcattagcatgctaaaagacattcctgccagcaccgtgacagtttacaaatgccatggcaacatctggaagttaccctatatagtctaaaaagggtagggaaygctcagttccaagaaatcccttcctcttttctaggaaaccatgaataatccaccccttgtttagcatatcatcaagaaataagtataagtatactcaatctagtggctcatgctgctactctgcctatgggtagccattcttttatttttttactttcttaataaacttactttctctttatggattcacctcgaattcttttttgtgtgaggtccaagaaccctttcttgggtct

SEQ ID NO: 426638 - DNA, 473 bp, Homo sapiens
ttattttgttgtttgaacgacttgactcattaaaatctacttatatrggtgatgaatttttttgggtgaaaagttctcaacttttagatagagaaatatgataattctttgaatccatctgtccatgaggtaggagtccgtgaagaagaaattttagcctgagtaatatgtttcatctatgaatattgaaaacgaaccctatgaggcccacatttaatctacattcactgaaaacacttgtaccttttacactctgcttattcatgcaactggattaactaaatacataagctgctgctttcagctctggtcctcctgttttctgctggtaaaggtcacactgactcatacatgaaaccttttgtttatatctcagaggtagctgaccccgttgcacctgcttttgaatatctggcaagagacaggcttgcaaatgaatatggctctttcaagaggttgcttattttaaaatg

SEQ ID NO: 426639 - DNA, 565 bp, Homo sapiens
ttaatttttctaggttgactaaaaatgcacatatccatggctgagacaagaatctgtaactgacaaagcagagaataatagcacccgggaatgtgttggtgggaagttttagttcttacatgttgccataaacccccaggagctgtgttgcagcccctgctttttccctgtgsatagaagcacagctgtgtctagataacagatagaaatctcttgtttttgggaaggtaagcccctcagtcatctctatggcataattcctgatcaagctgggccagtcatggcaattctagcccactttgcttctgattggcctacaggtggatatgacccagttctggtcaatgagacgtaaaaaggaagtattacagggattcttaggacagattttctcctcaattaaaaaaacaaaaaagttaatgcctcaaagaaggttctttccttcctaattgaatactattgtataagattgtgatatttggtgcttcgacagataccttgagaccataagctagcatacctaaggacaaaaatataatactttaaggctgatagagcagatgat

SEQ ID NO: 426640 - DNA, 537 bp, Homo sapiens
tgggaaaccatcattctcagcaaaaatacacaggaacagaaaaacaaatatcgcatgttctcactcataagtgggagttgaaaaacgagaacacatggacacaggcaggggaacatcacacactggggcctgttgtggggtggggagctaaataaatataaatataatttaaatatatacataaatataatataaaatgttatgactaaattctttgttaaataaaaagtgaatgaacaagtaaacaaatgaatcaataaaggtagatcagtaagattggacctgttacgtttctgatacacttctgtcagcatctatgccaagctttgcctaatcaccttaagctcccaatggtcccaatttctttattcttgacaaatgaactcatttctaytttattgaaaccatcagtgaccatctataaagagctcctttatgtacctataaatcatcctagctcacattttcctacatttgaaatcacccattcttgaattttcagtgcccattgtccagactaacttttccactagaact

SEQ ID NO: 426641 - DNA, 398 bp, Homo sapiens
aaggacaggacagtctactaaatgtattgtaatgtaatgaaaataactaagccatgttattctattattttgaaaagtatctctggtttttcattcattaaaaaacatgcctctcttttggggacactccattgtccttttcttctagtcacattgaagtctgtttgcctttgaaggcagccacattaactcactgtctacaggraaaaatcgcacccctttttatgggaggaagtacagatttttgattcctgagtcctgttaatacaagtagcacctcagactttacctagattgatatccctctttctccatttctcagcttgcaaaatggagtgggcaattgtttaaggggaaaagtgtatgtgctttcaaattccagttcacttctcattagt

SEQ ID NO: 426642 - DNA, 569 bp, Homo sapiens
ctctatgtaaatgagtatactaaaaatacatcataatacctatcctgagatccagtctcaaatttccaacttttttctggccattttcatttttyactttgttttatgtataaagaaaacaaacaaaaactagcaaaaacataaaactggctccagctcttatgccaggtgctatgagtaaaggacaaagttcctgactcaagtttctcctatttatgtcaaaggtactattgtcaaactgatcaaaaatttgtggtcacagacattgtcattaccttggtttgcctatgcctactcatatacttaaattctttttttcaatgatttctcaaatttatttctactttctttaccttctgtgacccttacacttaaaaggtgaaagtggaagacagtcttttgattttttttttgaatgcacaaaatacatgttattccctgactctccttttgatggatagcccttttttgagcaatttacaatcattttctttttttgattatttatgaataaagttcaaattctcacatctaatattctaaatccttcataatttgtcccaacattt

SEQ ID NO: 426643 - DNA, 614 bp, Homo sapiens
tatttctactttctttaccttctgtgacccttacacttaaaaggtgaaagtggaagacagtcttttgattttttttttgaatgcacaaaatacatgttattccctgactctccttttgatggatagcccttttttgagcaatttacaatcattttctttttttgattatttatgaataaagttcaaattctcacatctaatattctaaatccttcataatttgtcccaacatttacttctaattgtatattcaaatattctgaaacaatcacattattctgtctaatgtatgcattctatacttctgaatgttttctatgcttatcaccaaatttgcacttgtcttttgaataatccataatgcayttttcctcttccccatattgttgaagagtatcacataataggaagctctattaacctttctttgatcatcatagtccacgatggcatctccctccttagaagatccccaatatatattgcatagcacttttctgaaagttacttttttgtgtttatgtttcttatgttcagacttggatattaagtgacctgaagataaaagatctgtattctacatcttctgttcacacatagcacttactgaggaa

SEQ ID NO: 426644 - DNA, 614 bp, Homo sapiens
tatttctactttctttaccttctgtgacccttacacttaaaaggtgaaagtggaagacagtcttttgattttttttttgaatgcacaaaatacatgttattccctgactctccttttgatggatagcccttttttgagcaatttacaatcattttctttttttgattatttatgaataaagttcaaattctcacatctaatattctaaatccttcataatttgtcccaacatttacttctaattgtatattcaaatattctgaaacaatcacattattctgtctaatgtatgcattctatacttctgaatgttttctatgcttatcaccaaatttgcacttgtcttttgaataatccataatgcacttttcctcttccccatattrttgaagagtatcacataataggaagctctattaacctttctttgatcatcatagtccacgatggcatctccctccttagaagatccccaatatatattgcatagcacttttctgaaagttacttttttgtgtttatgtttcttatgttcagacttggatattaagtgacctgaagataaaagatctgtattctacatcttctgttcacacatagcacttactgaggaa

SEQ ID NO: 426645 - DNA, 601 bp, Homo sapiens
tttgtgtggaaacgatcaaacactacaagtcagttaatgtgttttcaayggtgaggggttaataccaaaagatttatattagaattgtatagcatctatatttctaatccttagttatttgtatgaacaattagaagtctgacctgtttggaacttattttggggtaaataggttcccaagccttcttgcaaaggacatgcaaataatgaaaatatgatattaagaaccactccactgttattaaatgaagatgaaaagaattaaatcaaagtctgccatagaataatttatagataccatattgaacattttctaaatatgcccacattcttggagtggcagataatgtgttaacattataataagcatgagttaataaacattatgcatattctctactacagatgagtatactttttggcccttttaatgaaggatgggaaataagcaactccctgtaagaagaagaacagaaatggatccatttttgacttgaaacttttataaaaatagctgtatttaataatgttttacttatcatgggtacattttttttaacttgtgttcataaggtagattcattcagcaaaagagtaaccg

SEQ ID NO: 426646 - DNA, 449 bp, Homo sapiens
taattttaaaaatttttcatttaggtattgataaccatttcgatgttacagtttttgattcaaaagtcaaacataatttagaaaactcaagaagaaaaatctgttgtacttattcrtatttttgctcttctgttactcttacatttttctgatgatttcaggccccttattcattttatgtttcaagaactttttgcttttctttagggtaggtctgtttgcaaccaattcttaatttttcttcttctgagaatttatttaattctccttcatttctaaaggacatttttgcctaatacagaattctggattgacagttcttgttttgcagtacttgagaaatatatcacttccttttggccaccattatttctgacaggaaatcattgtcattcaaattgtttttcttctggagagatgaagcattgttttacctcactgtttccaag

SEQ ID NO: 426647 - DNA, 657 bp, Homo sapiens
taattctccttcatttctaaaggacatttttgcctaatacagaattctggattgacagttcttgttttgcagtacttgagaaatatatcacttccttttggccaccattatttctgacaggaaatcattgtcattcaaattgtttttcttctggagagatgaagcattgttttacctcactgtttccaagattttttcttctgctgttttctgaaattgmcctgtttctttgttgatttttttgtatctgtcccgttttagattttctcatttcttgaatctgtagttgtatgtcttttgccaaactcgaaaacgttttggacattattttttcaaatatatttttagcccaacccacttttgcctttccttctaggactctgatgacatgaatagtagattttttgctatagtcttataggtccttgaggctctgttctttttttttttttcattttcagtctatactccctctggtctttggattagtaaatttttaatgtcctattttcaagttcacttattcttttctctatttcctccattaccctattgagccatcaagtattttttaaagtttcaattatatttttcggtgccaaaatttctatttgtctcttggcatcttctatttctttgtaaagctttccattgttt

SEQ ID NO: 426648 - DNA, 565 bp, Homo sapiens
tgtctcttggcatcttctatttctttgtaaagctttccattgtttcatttgttycagcatattcgcaattgctcattaaaacatttttatggtggtggctttaaaatccttgtgaataaatctaatttatgtgttatcactgtgttggcatgtgttatctcattcaagatgagattttttttctggtgcttgatatgctgagtaattttcaacgtatctagggtaatttggatattatgctatgaggctctgtattttaactcttggaaataaacctcctgtgacaccacacatggtgaaagtgggggtgccttgttattgctaggtggtgataaaaatttatccctgctcaaccacctttggagagtgggggatttttttcttgtttctgctcccactatggcctacactgaagggaaggcaaacatcaggaggccttggacctttttaccactagatgatggtgaaagttccaacttctcacttagtttactttgacacctaaggaatctggtggagaaggacggggcacattgtaactacctggcagagaagaaagttctag

SEQ ID NO: 426649 - DNA, 565 bp, Homo sapiens
tgtctcttggcatcttctatttctttgtaaagctttccattgtttcatttgttccagcatattcgcaattgctcattaaaacatttttatggtggtggctttaaaatccttgtgaataaatctaatttatgtgttatcactgtgttggcatgtgttatctcattcaagatgagattttttttctggtgcttgatatgctgagtaattttcaaygtatctagggtaatttggatattatgctatgaggctctgtattttaactcttggaaataaacctcctgtgacaccacacatggtgaaagtgggggtgccttgttattgctaggtggtgataaaaatttatccctgctcaaccacctttggagagtgggggatttttttcttgtttctgctcccactatggcctacactgaagggaaggcaaacatcaggaggccttggacctttttaccactagatgatggtgaaagttccaacttctcacttagtttactttgacacctaaggaatctggtggagaaggacggggcacattgtaactacctggcagagaagaaagttctag

SEQ ID NO: 426650 - DNA, 565 bp, Homo sapiens
tgtctcttggcatcttctatttctttgtaaagctttccattgtttcatttgttccagcatattcgcaattgctcattaaaacatttttatggtggtggctttaaaatccttgtgaataaatctaatttatgtgttatcactgtgttggcatgtgttatctcattcaagatgagattttttttctggtgcttgatatgctgagtaattttcaacgtatctagggtaatttggatattatgctatgaggctctgtattttaactcttggaaataaacctcctgtgacaccacacatggtgaaagtgggggtgccttgttattgctaggtggtgataaaaatttatccctgctyaaccacctttggagagtgggggatttttttcttgtttctgctcccactatggcctacactgaagggaaggcaaacatcaggaggccttggacctttttaccactagatgatggtgaaagttccaacttctcacttagtttactttgacacctaaggaatctggtggagaaggacggggcacattgtaactacctggcagagaagaaagttctag

SEQ ID NO: 426651 - DNA, 505 bp, Homo sapiens
aacctcctgtgacaccacacatggtgaaagtgggggtgccttgttattgctaggtggtgataaaaatttatccctgctcaaccacctttggagagtgggggatttttttcttgtttctgctcccactatggcctacactgaagggaaggcaaacatcaggaggccttggacctttttaccactagatgatggtgaaagttccaacttctcacttagtttactttgacacctaaggaatctggtggagaaggacggggcacattgtaactacctggcagagaagaaagttctagattcccacacggccttctctgatatcacccagacattgataggcggcagggcctgttagtttgtgtgtgtgtttaaattacacattaccaatagtatcactttgcataaacctatactaaactaaaagcacggaccccacagaagatatgtaattaaagttaycttgtagtatgcaggtctttttcacagatgcattcagtgtgtggtttaa

SEQ ID NO: 426652 - DNA, 554 bp, Homo sapiens
gtaattaaagttaccttgtagtatgcaggtctttttcacagatgcattcagtgtgtggtttaaaaggaagttaaaagtttagttctagttaccatgctagaagaacttaataggtaaaggatgacatcatcaaaggcagtgaaagtcctctttaatgtctcaaggcttttcattgtgtatcacgaaattttggttatctgtttcttttcagtaaatatttagtctatttttctaagtttaatatattaggattttcattttcattaatccttagtgtttgtactactgatatttgcacatacagtatgagaacatacatttcaattgatcatttttwaaaaatttatttgagatatatcaaaagttctataccatataaaggaaagttattctactattctaaagcagctcataaaatacaatgtacaaataggacaaaatacatgcaagaagcgggagaaatgttcctaagcagctccactgatacagtggagatataatctctcctctctattgaatgaatttgctgagggtcggtgcatatagtagtcaat

SEQ ID NO: 426653 - DNA, 594 bp, Homo sapiens
acctttctccaaggcttcttttaatctttattaaagtttattatagcaaactactatcaaatatttccatgcatttaactggttattgtaacatcaacacaagagagcaaatgaaacttgtgaagcttatactttctattgctctaaggtgtctatgcagatcattatgtattcttcaccacaggtcagttgcttagcgaccagagaagtagagaactactaattgaaagtattctgtattgctggcaaggcttgctgcaggacgttgaacttggaaacagcagagactgtgtcagataaaaatgttgcagaggatgaaagaaaaatwgctgcagcattatcatactaggaatggttattatttactttatggtaaattctgcaaaatgctttgctgtgcttctgttttataagatattaaaattgattttactattaaggatcatttacacaatcagattaaaaatcagagttgtggcatctatttttttaaaaagtaaaacagaacaccaaaggagaaaaagaagaggaggacaaagggaagaaacagaagcaacagcactaagttagatccaggtccctaaagataagtaa

SEQ ID NO: 426654 - DNA, 594 bp, Homo sapiens
acctttctccaaggcttcttttaatctttattaaagtttattatagcaaactactatcaaatatttccatgcatttaactggttattgtaacatcaacacaagagagcaaatgaaacttgtgaagcttatactttctattgctctaaggtgtctatgcagatcattatgtattcttcaccacaggtcagttgcttagcgaccagagaagtagagaactactaattgaaagtattctgtattgctggcaaggcttgctgcaggacgttgaacttggaaacagcagagactgtgtcagataaaaatgttgcagaggatgaaagaaaaattgytgcagcattatcatactaggaatggttattatttactttatggtaaattctgcaaaatgctttgctgtgcttctgttttataagatattaaaattgattttactattaaggatcatttacacaatcagattaaaaatcagagttgtggcatctatttttttaaaaagtaaaacagaacaccaaaggagaaaaagaagaggaggacaaagggaagaaacagaagcaacagcactaagttagatccaggtccctaaagataagtaa

SEQ ID NO: 426655 - DNA, 573 bp, Homo sapiens
tgattgaaaaacaggacatatgttaattaaatgttcagtgactttatagttaaatatacatataatgcacattccaagtttttaaaaaaataacaatcaataaatagctaaatgttttaaatcataactggtcagaatttagttgttaatattcagataccatttcagtatcgtgtagagtcattatgaatatcatttgtctgcagtactctgaagataaaggtggtaaaacatgtgttagtcaatggtctacctgttatacagccttttaaaacaaatccttggcatgagattgtcatttgtctgtttctcataaaagctgagtgtagaacatcctaaaaatccagttcagsttttttattcttgttacatttctgcagaattttaatataactttccttttgtgtatttatgcctactgtttctatttacttacgggtggcctgaattttttatccagagataaagttaatgcaagaaagaatttaaaaatgtatggtagattatcaaaattcttaacttaaaaaaaggtcaaatccacctttgctacagcacacaacctaatcttatatc

SEQ ID NO: 426656 - DNA, 573 bp, Homo sapiens
tgattgaaaaacaggacatatgttaattaaatgttcagtgactttatagttaaatatacatataatgcacattccaagtttttaaaaaaataacaatcaataaatagctaaatgttttaaatcataactggtcagaatttagttgttaatattcagataccatttcagtatcgtgtagagtcattatgaatatcatttgtctgcagtactctgaagataaaggtggtaaaacatgtgttagtcaatggtctacctgttatacagccttttaaaacaaatccttggcatgagattgtcatttgtctgtttctcataaaagctgagtgtagaacatcctaaaaatccagttcagcttttttattcttgttacatttctgcagaattttaatataactttccttttgtgtatttatgcctactgtttctatttacttacrggtggcctgaattttttatccagagataaagttaatgcaagaaagaatttaaaaatgtatggtagattatcaaaattcttaacttaaaaaaaggtcaaatccacctttgctacagcacacaacctaatcttatatc

SEQ ID NO: 426657 - DNA, 572 bp, Homo sapiens
tgttccagctgtctgcacattgtaggcttgttcttctacctactcaaggccccagatccagcaaatgttctcagagatgggctctgctgctaatctgtgatcaccaaggaaggcttgtttttctctgaaatttagttcattgacactttaagacccacaattttttgatggctttaaacaaaaaaaaaataattttttaaagttcatccgatattttctcattatggcaggagcaattgtctttggtaactttattttaattggaagaagaatttctaacattggcattgtaatgaggtttttggtctttgaccctagtggagcaattaaatccacrtctatttcttctgttatgcatgtattgaaggatcaaatgagaaaatatatgtagagtgcacaaagtgtctaatgtacactagtgatatacagttgtattatgactacacaccgaaaacacataatcaaccagattgcttcctgagaactagagccaggcttttccaatgatacttaactgtcaaataattctattcaatttttcatgggacttagggtttggtccatgaagtgct

SEQ ID NO: 426658 - DNA, 519 bp, Homo sapiens
gtattaggtttccagggttgtcataacaaattacaacaaacttgatgacttaaagcaacagaaattgattctctcacaggtctggaggccagaagacaaatgaatgtgttggcagtattggtttccactggagacccagaaaaaacccattccatgctgtcagcaattcttagcggtttttgtctttccagtctctctgactctgtcttcacatgcctccccgctttttctgtgtctttctgttattctatctcttataaggacactcattagatttagaatttattgtaatagaggatgagcacactttattaccttattayatcttcaaagatgcttattacgattgaggtcagactgtgagattctgggtggacaaaccttttgggcaaacaccattcaactcttacgattttctatcaaaatgtataattttctcccatactttttcagtaatctccaccataaagaacttggatttagaacacttggattcagtaatctccatcataaagaact

SEQ ID NO: 426659 - DNA, 611 bp, Homo sapiens
taccttattacatcttcaaagatgcttattacgattgaggtcagactgtgagattctgggtggacaaaccttttgggcaaacaccrttcaactcttacgattttctatcaaaatgtataattttctcccatactttttcagtaatctccaccataaagaacttggatttagaacacttggattcagtaatctccatcataaagaacttggatttagaacactttttttccacatgtatttaagcaatatttctcaaagtatattcctgagaaaagtatttcagttattctatgagtaaaaagtttcttggtcatgcaattttggaaattactgcttactattaacacctcctggatatttgctttgtgcattaatttattaatgagaaatcatataggaaaatatgctaaaattttaggaagcacatgtttttcccaaacaccaataaacactaaatatcaccaattttattcaaatgatacctatcaacaccttacagaaaaagggttatgtgtaccaaaggtcctgatttgacctagtgtgtggactacatgatgacctgttcaaaaattaaacaaaattaccatgagtattactaaacattttagtaa

SEQ ID NO: 426660 - DNA, 519 bp, Homo sapiens
gtattaggtttccagggttgtcataacaaattacaacaaacttgatgacttaaagcaacagaaattgattctctcacaggtctggaggccagaagacaaatgaatgtgttggcagtattggtttccactggagacccagaaaaaacccattccatgctgtcagcaattcttagcggtttttgtctttccagtctctctgactctgtcttcacatgcctccccgctttttctgtgtctttctgttattctatctcttataaggacactcattagatttagaatttattgtaatagaggatgagcacactttattaccttattacatcttcaaagatgcttattacgattgaggtcagactgtgagattctgggtggacaaaccttttgggcaaacaccattcaactcttacgattttctatcaaaatgtrtaattttctcccatactttttcagtaatctccaccataaagaacttggatttagaacacttggattcagtaatctccatcataaagaact

SEQ ID NO: 426661 - DNA, 557 bp, Homo sapiens
actcctactggtcctttagatatgagattagaggttattttccaaagaaagcttttcttcactccccaaagattcagttagttgttcttccagtgatttttatagctctctgttcttggtggtaatatatcactgaaacactctactgtaattaccttggtttttgttctttatttagtgttcaaccatatgcttgctgaagtttargatgttattcgtcattgatttttaagacacaacagatatttaatcaattcttattaaatgaatagatgagaaaatttgacattgggtagaaatcctttaaaatattttgcatggaaatcactttttgctttcaaagtaatgtaattaaagacttttagttcccacagtttgcaacaataatcttaggaacttaactatttgttttgtgaatatctagcactaaacaatgagctagaaatttgataaaacagttcaaataatttttaaatctctttgactcaactagtcatgactgaattcatttataccattaggatattaacacatcttttaaaaaacagtgttaaatg

SEQ ID NO: 426662 - DNA, 557 bp, Homo sapiens
actcctactggtcctttagatatgagattagaggttattttccaaagaaagcttttcttcactccccaaagattcagttagttgttcttccagtgatttttatagctctctgttcttggtggtaatatatcactgaaacactctactgtaattaccttggtttttgttctttatttagtgttcaaccatatgcttgctgaagtttaggatgttattcgtcattgatttttaagacacaacagatatttaatcaattcttattaaatgaatagatgagaaaatttgacattgggtagaaatcctttaaaatattttgcatggaaatcactttttgctttcaaagtaatgtaattaaagacttttagttcccacagtttgcaacaataatcttaggaacttaactatttgttttgtgaatatctagcactaaacaatgagctagaaatttgataaaacagttcaaataatttttaaatctctttgactcaactagtcatgactgaattcatttataccattaggatattaacacrtcttttaaaaaacagtgttaaatg

SEQ ID NO: 426663 - DNA, 345 bp, Homo sapiens
aatatgcctacaaattttgaattttttagaatatactcaatttgcttctacttcttccattggggttcatggctatcttacattgtaagacagttagtagacccagcagaaatgacttcaaaatatttctggtttctgtgaaagtttgaaaatctgttgactccctggttgttctgtttggaagccttttaygcgttgctttccctttcttatttctccttacacacatacaagctcttttcttgcctattgtgtgtacttggctgatcttctgggcacagtgcccagttggtttaatgtgtgcttattattgtctatagcattcctgattctgttttggagata

SEQ ID NO: 426664 - DNA, 538 bp, Homo sapiens
gttattctctccaaaattcatgtcgaaatttaatttcccatgtaaggtgttaggagatcgtgctttgaagaggtgattaggtcattaagacaaattaataactttctggtgaaactgggttatttttcatgataatggattagttctcataagagccggtcattctaaagaaagttgcctcttttataaagcaatgatttgcctgatttccattttgtttctctgccttgctgtgacatagcatgtggctctcatcagaagctcaacagatgccaatgccatagtcttggactttccagccaccagaaccataagctaaataaacctttttttctttataaattacccagtctcaagtgttgttacagcarcacaacacagaccaagacaacactacacctgtaatacgtaatattttgaaattagattttagcttaggaacaatacatacccaataaagtggaactcagaagacatcacttaagaattgttaaataagtgccatctttttgtttttatactgaaaaacaaatgtatc

SEQ ID NO: 426665 - DNA, 538 bp, Homo sapiens
gttattctctccaaaattcatgtcgaaatttaatttcccatgtaaggtgttaggagatcgtgctttgaagaggtgattaggtcattaagacaaattaataactttctggtgaaactgggttatttttcatgataatggattagttctcataagagccggtcattctaaagaaagttgcctcttttataaagcaatgatttgcctgatttccattttgtttctctgccttgctgtgacatagcatgtggctctcatcagaagctcaacagatgccaatgccatagtcttggactttccagccaccagaaccataagctaaataaacctttttttctttataaattacccagtctcaagtgttgttacagcaacacaacacagaccaagacaacaytacacctgtaatacgtaatattttgaaattagattttagcttaggaacaatacatacccaataaagtggaactcagaagacatcacttaagaattgttaaataagtgccatctttttgtttttatactgaaaaacaaatgtatc

SEQ ID NO: 426666 - DNA, 595 bp, Homo sapiens
cccaaacttgtaaaggatatgcattatcagaacacaacacctgcaggatttcacatcacgactatctgttccattacttcctccatgttaatgaattcaagtcttgattttctccaaagaaaatggggcaatgaaaattgcatttcctaaaattctccttgaattatgttttaacatttcaagtgtgttaatgtaatgctttagaagctaaagggaatgattatataggaagctaaagtcatctatgtctatcctcgggattgattaagyttgctatttatacatgtttcccccacaacattgctgtgttggaatttatcaggataggaaccatctaaattgaaaatgccccttcgtatatttttatcacagtgaaagtcaaagcctagaataacagaaaggcacaaaattaatatcatcaggaaacaatttactcagctaattagcataacattctcatataaaaagacagatggattaagggatcaggtcattcatagcctgcagcaaactgcttcagtctttaatcccctgctgttacctatcaaatggtactctttttatggatttggacagatccctgggaagatttaga

SEQ ID NO: 426667 - DNA, 574 bp, Homo sapiens
tacagggagataatttatttccctttgactattgtattagctttctagggctgccataayaaagtatcacaatataggtggcttaaaaaaaaaaaaaaaacatttgttgtctcacagctctgtaagctagaagcctgaaatcaaggtgttggcaagattgtttccttctgaaaagttctgacttaaagtccgttccacatgtgtcttctagtttctggtggttgccagcaatttttggtgttccttgacttgtgcatgcatcaccccactgtctgcctctgtcattacatggccttcttccttatatttctttatgtctctctgtgtccatattttctttctttataaagaaaccagtcattgaattagggcccatcccatttcaatatgaccctgtttcaaaataacatctgcaataacctatttccaaataaggtcacattcacaagtattgggattagtatttcattttggagactcgattcaacacacaatgactataaacaatcagaatgttagtttattaatttataacaagaactatgttatataaaataaaattcttacttcagca

SEQ ID NO: 426668 - DNA, 574 bp, Homo sapiens
tacagggagataatttatttccctttgactattgtattagctttctagggctgccataataaagtatcacaatataggtggcttaaaaaaaaaaaamaaacatttgttgtctcacagctctgtaagctagaagcctgaaatcaaggtgttggcaagattgtttccttctgaaaagttctgacttaaagtccgttccacatgtgtcttctagtttctggtggttgccagcaatttttggtgttccttgacttgtgcatgcatcaccccactgtctgcctctgtcattacatggccttcttccttatatttctttatgtctctctgtgtccatattttctttctttataaagaaaccagtcattgaattagggcccatcccatttcaatatgaccctgtttcaaaataacatctgcaataacctatttccaaataaggtcacattcacaagtattgggattagtatttcattttggagactcgattcaacacacaatgactataaacaatcagaatgttagtttattaatttataacaagaactatgttatataaaataaaattcttacttcagca

SEQ ID NO: 426669 - DNA, 541 bp, Homo sapiens
aaaactctttaaaccatgtggtttgcagagattgtccttgccgttattcctgaaagaagttgactctcacactgatagcctttttaaaagaccagctgataatatttggtctttactaaagaaatttaattccacacaaattctgcaatggccccagaacacaaggaatgtcaaataggatggtatagtcgctktgctaggcatccatagtgtggaaaagctggagtaaactctggagttatgttgacaaacatgacttgaatgagaaggaagtatttcaagaataatatgacaactgtgtgactacaatgaggagatatacttatgacatggcttaaaatatacaagttaaacattacatgggcgatcaagatctgttggatatcctgttttttcataatccagaaagcctttttgtctttccgtgtcaatggaagtgtcgtccagatcactgtctatatggaagcagttgccaagaagcagaagaaggaatctttatttttcacgggaacagaggtgtttaccatgatgataagcaacc

SEQ ID NO: 426670 - DNA, 507 bp, Homo sapiens
catatgttttaataatcaaagttacaatttattttgaacatattatttgccagaatttatatggcatactttgaattcactaacctatttaatctttaatatctaaatgggataattattattatttatttttcaaagatggagtaacaaaggcttctgttacccctcaatgttgcccattctctacagactgtataatagaagttaaaattatttttgcccaacatcaaatatcttgcatcatactgcattcctttcagcaacctgcatwtttcagcatcctgcaatttccctataacctggaaattttgaacctccatgtcttcgtgtgtaatattttctgcatgaaaaatgtgtcatttcaacttatctaactcttgcttactatctaaggtaaggtagaagtgccaactttttcaaggttttagataaaaggtgaaaataatagtctcttggtccacactcacatagccctttgtttatattaaacactatattatattatgc

SEQ ID NO: 426671 - DNA, 571 bp, Homo sapiens
tcccagttcatccttcatatcttttgtaacataaccatcaggcatttcacttacccacatcctgtaattgcccaaaacatttactaatattactttaaacaaacatgtagtttaaaaagatttacaataagaaaaataaaaaattttttttcctttttcaacatacttgctttcttattgtaaatacaggtttctgatctatatcactcttctcctccatgaataacctcttttaacacatttgcaggaaagttttctggcaatatattccgttagtgttttattgtctggtaaattctgatttcccctctgcttttgaagtataattttgctagatgtagaattctaagttggtgcatttattcctaaacatttcccgcaactctcttctttcttgcctggtttcttactggaagtgggctgaaatccttgctcttttttctctacaaggaatgtagttttcattccagattctgtcaagattttctctttgtctatttattgatttattttattttattttattctacatataggwaatgctatgtctggtgctgtatttttgttgttt

SEQ ID NO: 426672 - DNA, 531 bp, Homo sapiens
ttaaacattacatgggcgatcaagatctgttggatatcctgttttttcataatccagaaagcctttttgtctttccgtgtcaatggaagtgtcgtccagatcactgtctatatggaagcagttgccaagaagcagaagaaggaatctttatttttcacgggaacagaggtgtttaccatgatgataagcaaccagcatttagagctgtttatgaagcactgagaaattgttcttttaagatgacaatgttcattcattaataaaacctttagaattggaactacaaaaaatagtgcatacataycgtggaaaaatttactaaatatttatcaaacaattagcaaaaacataagagatcgctatgtcagatcaccaaaggaaaggtgattcttgttgcctgctacatcaaatggatgaaaagaacaaagcattggaggataagtatgaaggaactgtcttgggtgaagcattaaggcaggaattattcatctacagaattttttttttcctgaagaggttaaatgagcagta

SEQ ID NO: 426673 - DNA, 561 bp, Homo sapiens
ctgtttatgaagcactgagaaattgttcttttaagatgacaatgttcattcattaataaaacctttagaattggaactacaaaaaatagtgcatacatatcgtggaaaaatttactaaatatttatcaaacaattagcaaaaacataagagatcgctatgtcagatcaccaaaggaaaggtgattcttgttgcctgctacatcaaatggatgaaaagaacaaagcatyggaggataagtatgaaggaactgtcttgggtgaagcattaaggcaggaattattcatctacagaattttttttttcctgaagaggttaaatgagcagtattttcaggtaatgaagaataagttaaaatcttgggcttcaacaaagaaaaatttttggcctctgatgttgtgtaatgttacttactatcattccagtattgatgaaaatattattgaatggttttagcctgcaaacttctgttgactcatactctcaagagtggtggggctgtgaaaatgaagaaaatgtacctcaaacacagtgcaaacactcagatggtgagtagagcgata

SEQ ID NO: 426674 - DNA, 531 bp, Homo sapiens
tcccaggggaaggggtggttgctatcactgtggcatcagttggctgttttcccctggtggtgctggggagacagggaggtttagaccgggagcacagcagctgtggcagatcatggccagactgcttttttaggtggaacctggatccatccctactcattgggtggggcccccttgtgggaatttcaccaactccagccagaggtttatggacagaactctgatcttcctgggcagaactcctgtggggagggacagccacagtctctgcggttcagcagacttagtctttcctgcctgctggctctraagggtctggacattctggacaagggagattccctccagtgcagtgcaccctctctgccaaggggcagccagagtgctttgttaagtggtccccgatcctgtacatactccctaactgattgagaccaccaacaggggtctccaggcaccttatacaggagtgttcctgctggcatcacatcagtgcccctctgggatggagctcaaaaaagaaggagcagg

SEQ ID NO: 426675 - DNA, 540 bp, Homo sapiens
gaaagaatctcagagctcaaagactatcttgctggaataagacaggcagataagattagagaaaaaactgaaaaggaatgaaaaataatcagagaactatggaattatgtaaaaagaccaaacctacaactgattggggtacctgaaagaaatgaggagaatgaaaccaagttggaaaacatacttcaggaaatcattcaggagaatttccccaacccagcaagacaggccaacattcaaattcaggaaattcagaggacttcagtaagatccatgagaagatcaacccaaaacacataatkgtcagtatctccaaggtcaaaatgaaggaaaattgttaagagccacgtcacctagaaaaggaagtccatcagaataacagtggactcctcagcagaaaccccataagccagaagaaattgggggctaatattcaacagtcttttttttttatactttaagttttagggtacatgtgcacattgttcaggttagttacatatgtatacatgtgccatgctggtgcgctgcacccactaa

SEQ ID NO: 426676 - DNA, 540 bp, Homo sapiens
gaaagaatctcagagctcaaagactatcttgctggaataagacaggcagataagattagagaaaaaactgaaaaggaatgaaaaataatcagagaactatggaattatgtaaaaagaccaaacctacaactgattggggtacctgaaagaaatgaggagaatgaaaccaagttggaaaacatacttcaggaaatcattcaggagaatttccccaacccagcaagacaggccaacattcaaattcaggaaattcagaggacttcagtaagatccatgagaagatcaacccaaaacacataattgkcagtatctccaaggtcaaaatgaaggaaaattgttaagagccacgtcacctagaaaaggaagtccatcagaataacagtggactcctcagcagaaaccccataagccagaagaaattgggggctaatattcaacagtcttttttttttatactttaagttttagggtacatgtgcacattgttcaggttagttacatatgtatacatgtgccatgctggtgcgctgcacccactaa

SEQ ID NO: 426677 - DNA, 540 bp, Homo sapiens
gaaagaatctcagagctcaaagactatcttgctggaataagacaggcagataagattagagaaaaaactgaaaaggaatgaaaaataatcagagaactatggaattatgtaaaaagaccaaacctacaactgattggggtacctgaaagaaatgaggagaatgaaaccaagttggaaaacatacttcaggaaatcattcaggagaatttccccaacccagcaagacaggccaacattcaaattcaggaaattcagaggacttcagtaagatccatgagaagatcaacccaaaacacataattgtcagtatctccaaggtcaaaatgaaggaaaattgttaagagccaygtcacctagaaaaggaagtccatcagaataacagtggactcctcagcagaaaccccataagccagaagaaattgggggctaatattcaacagtcttttttttttatactttaagttttagggtacatgtgcacattgttcaggttagttacatatgtatacatgtgccatgctggtgcgctgcacccactaa

SEQ ID NO: 426678 - DNA, 607 bp, Homo sapiens
aataaaatacctaggaatacagctaagaagggaagtgatagaaagaaccaatatgattaaaatggccatactacccaaagtaatttatagattcaatgctattccccttatactaacattgacatttttcacagaattagaataatctgttttaaaattcatatggacaaaaaagagtctgtagagccaagataatattaagcaaaaatagcaaagctggggggatcatgctaccttacttcaaactacactacaaggctaccaaaccagcatgtaaacaaaacagcatagtggtggtgcaaaaacagactcatagaccaatagaacagaattgagaactcagaaataagaccacacagctacaaccatctgatcttcaacaaacctgacaaacacaagtaatggggaaaggattttctatttaattaatggtgctggaagaactatggaagaaytttagccatatgcagaaaattgaaactggacccccttccttacacgttatacaaaaattagctcaagataggttaaagacttaagtgtaaaatccaaaactataaaaaccctagaagaaaatctaggcaataccattcaggacataggcata

SEQ ID NO: 426679 - DNA, 607 bp, Homo sapiens
aataaaatacctaggaatacagctaagaagggaagtgatagaaagaaccaatatgattaaaatggccatactacccaaagtaatttatagattcaatgctattccccttatactaacattgacatttttcacagaattagaataatctgttttaaaattcatatggacaaaaaagagtctgtagagccaagataatattaagcaaaaatagcaaagctggggggatcatgctaccttacttcaaactacactacaaggctaccaaaccagcatgtaaacaaaacagcatagtggtggtgcaaaaacagactcatagaccaatagaacagaattgagaactcagaaataagaccacacagctacaaccatctgatcttcaacaaacctgacaaacacaagtaatggggaaaggattttctatttaattaatggtgctggaagaactatggaagaactttagccatatgcagaaaaytgaaactggacccccttccttacacgttatacaaaaattagctcaagataggttaaagacttaagtgtaaaatccaaaactataaaaaccctagaagaaaatctaggcaataccattcaggacataggcata

SEQ ID NO: 426680 - DNA, 607 bp, Homo sapiens
aataaaatacctaggaatacagctaagaagggaagtgatagaaagaaccaatatgattaaaatggccatactacccaaagtaatttatagattcaatgctattccccttatactaacattgacatttttcacagaattagaataatctgttttaaaattcatatggacaaaaaagagtctgtagagccaagataatattaagcaaaaatagcaaagctggggggatcatgctaccttacttcaaactacactacaaggctaccaaaccagcatgtaaacaaaacagcatagtggtggtgcaaaaacagactcatagaccaatagaacagaattgagaactcagaaataagaccacacagctacaaccatctgatcttcaacaaacctgacaaacacaagtaatggggaaaggattttctatttaattaatggtgctggaagaactatggaagaactttagccatatgcagaaaattgaaactggacccccttccttacacsttatacaaaaattagctcaagataggttaaagacttaagtgtaaaatccaaaactataaaaaccctagaagaaaatctaggcaataccattcaggacataggcata

SEQ ID NO: 426681 - DNA, 513 bp, Homo sapiens
aaaaccttgaaatatgagctataatgaggggcactagaggtactttgctttaaaaagacataggtgcagtgacatgatgttagttacatagcctttgaagycatgttgtgtgaaagagcagttggatattgatgttggctaccaaaaccaatgggtaggcatttagattttggttcactagaaaacctgaactatctatcgattaagctctcaaaaactaaatagactgctgtctcctaaataaaatatgtctcccactgtggaaatgtcattgattttcaatttgtatagcttttattattattattattgtaaggccaggaatgacaacttctgagcccttcacatgttggtgataaatccaaaagtcctgtaatgtatttgttttctcattttttaaaaccaaatatttgaagctattttattaagggtttccttttcctcaaaaagtaaatgcattaaatataatctagatattctacactcatgagaaaagatatttcattgtatata

SEQ ID NO: 426682 - DNA, 513 bp, Homo sapiens
aaaaccttgaaatatgagctataatgaggggcactagaggtactttgctttaaaaagacataggtgcagtgacatgatgttagttacatagcctttgaagtcatgttgtgtgaaagagcagttggatattgaygttggctaccaaaaccaatgggtaggcatttagattttggttcactagaaaacctgaactatctatcgattaagctctcaaaaactaaatagactgctgtctcctaaataaaatatgtctcccactgtggaaatgtcattgattttcaatttgtatagcttttattattattattattgtaaggccaggaatgacaacttctgagcccttcacatgttggtgataaatccaaaagtcctgtaatgtatttgttttctcattttttaaaaccaaatatttgaagctattttattaagggtttccttttcctcaaaaagtaaatgcattaaatataatctagatattctacactcatgagaaaagatatttcattgtatata

SEQ ID NO: 426683 - DNA, 548 bp, Homo sapiens
aacagaaaaccttgaaatatgagctataatgaggggcactagaggtactttgctttaaaaagacataggtgcagtgacatgatgttagttacatagcctttgaagtcatgttgtgtgaaagagcagttggatattgatgttggctaccaaaaccaatgggtaggcatttagattttggttcactagaaaacctgaactatctatcgattaagctctcaaaaactaaatagackgctgtctcctaaataaaatatgtctcccactgtggaaatgtcattgattttcaatttgtatagcttttattattattattattgtaaggccaggaatgacaacttctgagcccttcacatgttggtgataaatccaaaagtcctgtaatgtatttgttttctcattttttaaaaccaaatatttgaagctattttattaagggtttccttttcctcaaaaagtaaatgcattaaatataatctagatattctacactcatgagaaaagatatttcattgtatataaccagagctataggcctacaaacatttgga

SEQ ID NO: 426684 - DNA, 548 bp, Homo sapiens
aacagaaaaccttgaaatatgagctataatgaggggcactagaggtactttgctttaaaaagacataggtgcagtgacatgatgttagttacatagcctttgaagtcatgttgtgtgaaagagcagttggatattgatgttggctaccaaaaccaatgggtaggcatttagattttggttcactagaaaacctgaactatctatcgattaagctctcaaaaactaaatagactgctgyctcctaaataaaatatgtctcccactgtggaaatgtcattgattttcaatttgtatagcttttattattattattattgtaaggccaggaatgacaacttctgagcccttcacatgttggtgataaatccaaaagtcctgtaatgtatttgttttctcattttttaaaaccaaatatttgaagctattttattaagggtttccttttcctcaaaaagtaaatgcattaaatataatctagatattctacactcatgagaaaagatatttcattgtatataaccagagctataggcctacaaacatttgga

SEQ ID NO: 426685 - DNA, 548 bp, Homo sapiens
aacagaaaaccttgaaatatgagctataatgaggggcactagaggtactttgctttaaaaagacataggtgcagtgacatgatgttagttacatagcctttgaagtcatgttgtgtgaaagagcagttggatattgatgttggctaccaaaaccaatgggtaggcatttagattttggttcactagaaaacctgaactatctatcgattaagctctcaaaaactaaatagactgctgtctcctaaataaaatatgtctcccactgtggaaatgtcattgattttcaatttgtatagcttttattattattattattgtaaggccaggaatgacaacttctgagcccttcacatgttggtgataaatccaaaagtcctgtaatgtatttgttttctcattttttaaaaccaaatatttgaagctattttattaagggtttccttttcctcaaaaagtaaatgcattaaatataatctagataktctacactcatgagaaaagatatttcattgtatataaccagagctataggcctacaaacatttgga

SEQ ID NO: 426686 - DNA, 626 bp, Homo sapiens
gtaaataataagagataatactattcggtaaaattaaaagtataaatttagatcatttgtaattggctattttttaaagctgacataactttaatttacaatgtaaactcaggagtgaaagagcattaagtaactcatgatctgtaaagaaaatttcaaaatttaaggttagtaatgagatttccccatatttctgtgtttaattcatcaatgtttttaaaatacttaaaccagctaagaagtgtgttcaggtttctatttattttaaaagtgacttacgtatttttctcacaagggrggatgattgtagaggagtttagagcctgcatcgtggttccaagttagcatcaccgttcctggtccttccatctttctgcttagtcatatttaacttgtgtttatttcttcatgatcagaatatgtgtctttctcaactatcatatgtatgttctaggtagaaaggagaaaaacaagaatttatgttgttctgtcaaattatagaaagtttatttgataataaatcaactgttaaaaagtaccccttaaaagtatagtaagtatacaatattaaaagaaagcatgggactttgcacaattgtgaaatctattgagaattttgtaagttt

SEQ ID NO: 426687 - DNA, 618 bp, Homo sapiens
atcatttgtaattggctattttttaaagctgacataactttaatttacaatgtaaactcaggagtgaaagagcattaagtaactcatgatctgtaaagaaaatttcaaaatttaaggttagtaatgagatttccccatatttctgtgtttaattcatcaatgtttttaaaatacttaaaccagctaagaagtgtgttcaggtttctatttattttaaaagtgacttacgtatttttctcacaagggaggatgattgtagaggagtttagagcctgcatcgtggttccaagttagcatcaccrttcctggtccttccatctttctgcttagtcatatttaacttgtgtttatttcttcatgatcagaatatgtgtctttctcaactatcatatgtatgttctaggtagaaaggagaaaaacaagaatttatgttgttctgtcaaattatagaaagtttatttgataataaatcaactgttaaaaagtaccccttaaaagtatagtaagtatacaatattaaaagaaagcatgggactttgcacaattgtgaaatctattgagaattttgtaagtttttaaattttgatctgtgctgtcatttattaattcagtcaaaat

SEQ ID NO: 426688 - DNA, 565 bp, Homo sapiens
gataagaattaaaactttgatttttcaactgagatatttagttgagatatttgaaattactggaaagcaaaaggaaattttaatgtactgcggagtagcctcgggtagtatgtgtatgtatttctactaaatgcaaaagaaagtaccagataaaaatgcaataggcttctacttctagttcaggatgggaaaagatggggaagaccaaaaaagatctgcataatgcacaaatccatgtgatttctgaagggagtggacacgatcagtcttgataaactgataactagttagtggatctgcaggtttcatctgwggtattttcttttagatgatttgtgtagtgactaaaaaacagtcaatacatttaaataaactgcacattgtgcacatgtactctaaaacttaaagtataataaaaaaataatacaataaataaataaacttattttctggtttagtaattgaggttggccaatgtctattattaattgttaactatttcctaatcaataatctgtcttatattaaactgtacatacactttacaagaaatttcagttacact

SEQ ID NO: 426689 - DNA, 622 bp, Homo sapiens
gagtggacacgatcagtcttgataaactgataactagttagtggatctgcaggtttcatctgaggtattttcttttagatgatttgtgtagtgactaaaaaacagtcaatacatttaaataaactgcacattgtgcacatgtactctaaaacttaaagtataataaaaaaataatacaataaataaataaacttattttctggtttagtaattgaggttggccaatgtctattattaattgttaactatttcctaatcaataatctgtcttatattaaactgtacatacactttacaagaaatttsagttacactcacacataactgaataacatatttaatgcttatataggcatgcatataatgttaaaatctagatataaaaataagaaaatgaaaccataatttttaagtaatggaacttgttccaaaagatcaaatgtggttatgcattggtatgacaattctgaatcctgcactcaggcagcatctgaacactgttttattagctatcaataaattgtctgcactgcaggccgatgatggtttaaggacagcagtgttaataataatgttcaaagtgtcagtctggaggggaggcaataattgactgtatgagact

SEQ ID NO: 426690 - DNA, 622 bp, Homo sapiens
gagtggacacgatcagtcttgataaactgataactagttagtggatctgcaggtttcatctgaggtattttcttttagatgatttgtgtagtgactaaaaaacagtcaatacatttaaataaactgcacattgtgcacatgtactctaaaacttaaagtataataaaaaaataatacaataaataaataaacttattttctggtttagtaattgaggttggccaatgtctattattaattgttaactatttcctaatcaataatctgtcttatattaaactgtacatacactttacaagaaatttcagttacactcacacataactgaataacatatttaatgcttatataggcatgcatataatgttaaaatctagatataaaaataagaaaatgaaaccataatttttaagtaatggaacttgttccaaaagatcaaatgtggttatgcatwggtatgacaattctgaatcctgcactcaggcagcatctgaacactgttttattagctatcaataaattgtctgcactgcaggccgatgatggtttaaggacagcagtgttaataataatgttcaaagtgtcagtctggaggggaggcaataattgactgtatgagact

SEQ ID NO: 426691 - DNA, 595 bp, Homo sapiens
gcgcatttaaacatttcttctacctcataatggctttgcaagatacttgtaaagaagcaaatgtctagagccttactttaagaaagttaaacaactttggtgaatgatttggattaagattgttacatccagctatagaaatgtggtttcaatagggttgatgtgagtgagtaccttccttttttgaataccacttaaaacagttaactttttaagtcttgaagatgagaaaaatattrcttatctaatataactattttaatagttatctaatttatagttatctactataactatacattctgaatacttagcatgtactgtgctggggcacatatcttattttcccagctgctaaacgattatcttccttttctccctggtattttaatgcccaagtagaaaatggaaaatcatgaaggaaaaatatcacttgtgaaaatcgtggcagttagctttatgaagacacagtggcctctgtggggacatgggatatgcagaaagagatggctagtacagttgttctgtcttctgcagttcagtcagggacatattgagagaggaaagtttaagcaggtacattagaaattgataa

SEQ ID NO: 426692 - DNA, 622 bp, Homo sapiens
gagtggacacgatcagtcttgataaactgataactagttagtggatctgcaggtttcatctgaggtattttcttttagatgatttgtgtagtgactaaaaaacagtcaatacatttaaataaactgcacattgtgcacatgtactctaaaacttaaagtataataaaaaaataatacaataaataaataaacttattttctggtttagtaattgaggttggccaatgtctattattaattgttaactatttcctaatcaataatctgtcttatattaaactgtacatacactttacaagaaatttcagttacactcacacataactgaataacatatttaatgcttatataggcatgcatataatgttaaaatctagatataaaaataagaaaatgaaaccataatttttaagtaatggaacttgttccaaaagatcaaatgtggttatgcattggtatgacaattctgaatcctgcmctcaggcagcatctgaacactgttttattagctatcaataaattgtctgcactgcaggccgatgatggtttaaggacagcagtgttaataataatgttcaaagtgtcagtctggaggggaggcaataattgactgtatgagact

SEQ ID NO: 426693 - DNA, 595 bp, Homo sapiens
gcgcatttaaacatttcttctacctcataatggctttgcaagatacttgtaaagaagcaaatgtctagagccttactttaagaaagttaaacaactttggtgaatgatttggattaagattgttacatccagctatagaaatgtggtttcaatagggttgatgtgagtgagtaccttccttttttgaataccacttaaaacagttaactttttaagtcttgaagatgagaaaaatattgcttatctaatataactattttaatagttatctaatttatagttatctactataactatacattctgaatacttagcatgtactgtgctggggcacatatsttattttcccagctgctaaacgattatcttccttttctccctggtattttaatgcccaagtagaaaatggaaaatcatgaaggaaaaatatcacttgtgaaaatcgtggcagttagctttatgaagacacagtggcctctgtggggacatgggatatgcagaaagagatggctagtacagttgttctgtcttctgcagttcagtcagggacatattgagagaggaaagtttaagcaggtacattagaaattgataa

SEQ ID NO: 426694 - DNA, 558 bp, Homo sapiens
gataataagaatatttatgtcattgaacctgaaaagatactgtttaactttcatgttctacttgtcatttttcttttctgcttttatatgtaatttaggtaatagatacccaggaatcaacttaaattcccatcagtggtagactggaaaaagaaagtacggtacatatacaccatgaattactatgcagccataaaaaagaatgagatctgtcctttgcggcaacatggatggagcttggaggccattatccttagcaaagtaacacaggatcagaaaacccaatactccctattttcacttatcactgggagctaaataatgagaacacattgacwgaaagagcagcacaatagacactagggtgtgcttgagggaggaggatgagagatgggtgaggttcagggaaaaaaaaattgttgggtactatgcttactactcaggtgacaaaataatctgtacatcaaacccctgagtcacgaatttacctaaagaacaaacctccacacgttcccatgaacctaaaagttaaaatatttaaaataataataataattt

SEQ ID NO: 426695 - DNA, 558 bp, Homo sapiens
gataataagaatatttatgtcattgaacctgaaaagatactgtttaactttcatgttctacttgtcatttttcttttctgcttttatatgtaatttaggtaatagatacccaggaatcaacttaaattcccatcagtggtagactggaaaaagaaagtacggtacatatacaccatgaattactatgcagccataaaaaagaatgagatctgtcctttgcggcaacatggatggagcttggaggccattatccttagcaaagtaacacaggatcagaaaacccaatactccctattttcacttatcactgggagctaaataatgagaacacattgactgaaagagcagcacaatagacactaggktgtgcttgagggaggaggatgagagatgggtgaggttcagggaaaaaaaaattgttgggtactatgcttactactcaggtgacaaaataatctgtacatcaaacccctgagtcacgaatttacctaaagaacaaacctccacacgttcccatgaacctaaaagttaaaatatttaaaataataataataattt

SEQ ID NO: 426696 - DNA, 567 bp, Homo sapiens
ttgcttatctaatataactattttaatagttatctaatttatagttatctactataactatacattctgaatacttagcatgtactgtgctggggcacatatcttattttcccagctgctaaacgattatcttccttttctccctggtattttaatgcccargtagaaaatggaaaatcatgaaggaaaaatatcacttgtgaaaatcgtggcagttagctttatgaagacacagtggcctctgtggggacatgggatatgcagaaagagatggctagtacagttgttctgtcttctgcagttcagtcagggacatattgagagaggaaagtttaagcaggtacattagaaattgataaccagcccagcattcttagaacagatgggtttagagaacacgagttgtagttccttggcagaatgccatggtggatatgagaaactgtgaactgtgttgaaattgagcttgagcagaaaatgagaatactaaaaatttgaagttcagagggtatgcattagattatttctaatggtccccatatatgatcattgcctgcctgactatat

SEQ ID NO: 426697 - DNA, 567 bp, Homo sapiens
ttttgccttttagggtaaaatataaaaacaaatgcacgtcacaatatgatgtggcaaacgttacccagaagccttagtgatgttgttgcgatggtattagcatgcacagagtatgcaactcgcagctctgctgtgtgcacttgttcttttgctttctctcatgtgttctgctccatatattttaagagagtttaatgtgggtgttccaattcaatcccattagagtactatgtatattattgttactaaaccttgccttcataatcattcctawgtatgtggtctattgaaaagcaatcatttatatctttaggaggatgaatgggaagtcacagatctagaacaataatcaacttgaactcatgctgctagcacaggtatggatttttaatataatctcaggcagggaagtgcttgcaggcatgttttctcagtcaggagctgagagcatatgcacgatggcagacacaaggtaactaccctttggctggttgaaagatgaagtcattataaagctggattttaaaccaaatgtagtgctggctgctgtctgaacttacctaaaac

SEQ ID NO: 426698 - DNA, 567 bp, Homo sapiens
ttttgccttttagggtaaaatataaaaacaaatgcacgtcacaatatgatgtggcaaacgttacccagaagccttagtgatgttgttgcgatggtattagcatgcacagagtatgcaactcgcagctctgctgtgtgcacttgttcttttgctttctctcatgtgttctgctccatatattttaagagagtttaatgtgggtgttccaattcaatcccattagagtactatgtatattattgttactaaaccttgccttcataatcattcctaagtatgtggtctattgaaaagcaatcatttatatctttaggaggatgaatgggaagtcacagatctagaacaataatcaacttgaactcatgctgctarcacaggtatggatttttaatataatctcaggcagggaagtgcttgcaggcatgttttctcagtcaggagctgagagcatatgcacgatggcagacacaaggtaactaccctttggctggttgaaagatgaagtcattataaagctggattttaaaccaaatgtagtgctggctgctgtctgaacttacctaaaac

SEQ ID NO: 426699 - DNA, 567 bp, Homo sapiens
ttttgccttttagggtaaaatataaaaacaaatgcacgtcacaatatgatgtggcaaacgttacccagaagccttagtgatgttgttgcgatggtattagcatgcacagagtatgcaactcgcagctctgctgtgtgcacttgttcttttgctttctctcatgtgttctgctccatatattttaagagagtttaatgtgggtgttccaattcaatcccattagagtactatgtatattattgttactaaaccttgccttcataatcattcctaagtatgtggtctattgaaaagcaatcatttatatctttaggaggatgaatgggaagtcacagatctagaacaataatcaacttgaactcatgctgctagcacaggtatggatttttaatataatctcaggcagggaagtgcttgyaggcatgttttctcagtcaggagctgagagcatatgcacgatggcagacacaaggtaactaccctttggctggttgaaagatgaagtcattataaagctggattttaaaccaaatgtagtgctggctgctgtctgaacttacctaaaac

SEQ ID NO: 426700 - DNA, 567 bp, Homo sapiens
ttttgccttttagggtaaaatataaaaacaaatgcacgtcacaatatgatgtggcaaacgttacccagaagccttagtgatgttgttgcgatggtattagcatgcacagagtatgcaactcgcagctctgctgtgtgcacttgttcttttgctttctctcatgtgttctgctccatatattttaagagagtttaatgtgggtgttccaattcaatcccattagagtactatgtatattattgttactaaaccttgccttcataatcattcctaagtatgtggtctattgaaaagcaatcatttatatctttaggaggatgaatgggaagtcacagatctagaacaataatcaacttgaactcatgctgctagcacaggtatggatttttaatataatctcaggcagggaagtgcttgcaggcatgttttctcagtcaggagctgagagcatatgcacgatggcagacacaaggtaactaccctttggctggttgaaagatgaagtcattataaagctggattttaaaccaaatgyagtgctggctgctgtctgaacttacctaaaac

SEQ ID NO: 426701 - DNA, 604 bp, Homo sapiens
attgttcccccatttttcaggctagaaatctgaggcccagtgtcccacaatggctgtgtggtgacactaggctttgagcacagatggttgacttccaaagcctatgttcctaaccattatgycactctgtgttgtgacagcgccaaacatactttcattcatatatatcttttaactgatcatgttcttgtgtgatttctttcagaaaggcttttacatcaaatattgataatgataataataatgaacacatgttgagcacttaccatgtctcaagcactgctctagagcttcccatgaaagaacccctctaatcttcagaacaaccctgtgaggtaggtgctgctattactctgttttcacaagtaaagaaactaagcacagcagatccacagtcattctgtaggatgctgtgtagaatggctcccgggacactgggaaagctcttctgcacctcagtatcttctttactggttcattaatgtctgatattcctgcatgagaaagcacaacatagacagaaagcttaatatgtatatacacacactgagagataaggcattgacataacatctcattataggtattagaaatgcagtctcaa

SEQ ID NO: 426702 - DNA, 604 bp, Homo sapiens
attgttcccccatttttcaggctagaaatctgaggcccagtgtcccacaatggctgtgtggtgacactaggctttgagcacagatggttgacttccaaagcctatgttcctaaccattatgtcactctgtgttgtgacagcgccaaacatactttcattcatatatatcttttaactgatcatgttcttgtgtgatttctttcagaaaggcttttacatcaaatattgataatgataataataatgaacacatgttgagcacttaccatgtctcaagcactgctctagagcttcccatgaaagaacccctctaatcttcagaacaaccctgtgaggtaggtgctgctattactctgttttcacaagtaaagaaactaagcacagcagatccacagtcattctgtaggatgctgtgtagaatggctcccgggacactgggaaagctcttctgcacctcagtatcttctttactggttcattaatgtctgatattcctgcatragaaagcacaacatagacagaaagcttaatatgtatatacacacactgagagataaggcattgacataacatctcattataggtattagaaatgcagtctcaa

SEQ ID NO: 426703 - DNA, 551 bp, Homo sapiens
ttcttggcttaccctttacaaaaaggattcccaagcactgctctgtgcctaggcattgtggtgaagttttcattcatgtgcaatgaaccaagtaaaataaggtcattctcatgaggttgctttgttttttwttccccgagtttttaataatgatatttaagactatcatttattgtaatattaagtcttttctcctttcagtgttaaaatgttatttcttttatgaagtaatctggtgacagtatatagcatactggttggtttctgtttctttttaatatgcctactaacaaaatttttacattagcaaacctatagaaattactttaatatttaaccatgtctgaaattcaaaattctggcaccattctgaaaggcagttgtgattctcactcagcaaaattcttatcagtatagaagagtggagatttcaaaaagaaaatggccccaagcccaagtcctccctaagttgataagactctaagatcttccaaatagttttaggctaagtcttatgaaaatttgactaaagatttcattccctttatctc

SEQ ID NO: 426704 - DNA, 551 bp, Homo sapiens
ttcttggcttaccctttacaaaaaggattcccaagcactgctctgtgcctaggcattgtggtgaagttttcattcatgtgcaatgaaccaagtaaaataaggtcattctcatgaggttgctttgttttttattccccgagtttttaataatgatatttaagactatcatttattgtaatattaagtcttttctcctttcagtgttaaaatgttatttcttttatgaagtaatctggtgacagtatatagcatactggttggtttctgtttctttttaatatgcctactracaaaatttttacattagcaaacctatagaaattactttaatatttaaccatgtctgaaattcaaaattctggcaccattctgaaaggcagttgtgattctcactcagcaaaattcttatcagtatagaagagtggagatttcaaaaagaaaatggccccaagcccaagtcctccctaagttgataagactctaagatcttccaaatagttttaggctaagtcttatgaaaatttgactaaagatttcattccctttatctc

SEQ ID NO: 426705 - DNA, 576 bp, Homo sapiens
acaataattgcataatattagatttaatctcacaatcacactcagcttgattactaacccttctcctacaccttgctcacctaaatttatctacattttstatgaattgaaatagcttagaaatgtatgttgtctgtgtattatagtgtaagttattgtaatatagaaatatggactttctttaactcccatttgctgcctaggaaataccaatattttctaagcatggcaagtgtttccaagcattcagaagtggagagtgtaggaaatccactgcagaatgaggtctgctcgtcatcctctcagtctcaactgctctccctccttcatctctctctgtttcattggtgagtatagaagatcaggcatttttatatgaaatgaaaattgatggaactaaggtgttgatttgaatatccaaccgaccttttattgagtgtctattacaagttaaattgtgttgtagagaacagctcaggaaacgaatgcttgacattgatgtacataacagaaatacaaacatgccattaaaaaatcagacctcttatgagcatccagattctcacgtaagttttg

SEQ ID NO: 426706 - DNA, 589 bp, Homo sapiens
cacgttgacccgcctctctcctaacatcatccagtacatttcggaagcgcatgcaaaactctcccaccttctgtttcaacagatatgtcaactgatacaattatacaataattgcataatattagatttaatctcacaatcacactcagcttgattactaacccttctcctacaccttgctcacctaaatttatctacattttctatgaattgaaatagcttagaaatgtatgttgtctgtgtattatagtgtaagttattgyaatatagaaatatggactttctttaactcccatttgctgcctaggaaataccaatattttctaagcatggcaagtgtttccaagcattcagaagtggagagtgtaggaaatccactgcagaatgaggtctgctcgtcatcctctcagtctcaactgctctccctccttcatctctctctgtttcattggtgagtatagaagatcaggcatttttatatgaaatgaaaattgatggaactaaggtgttgatttgaatatccaaccgaccttttattgagtgtctattacaagttaaattgtgttgtagagaacagctcaggaaacga

SEQ ID NO: 426707 - DNA, 576 bp, Homo sapiens
acaataattgcataatattagatttaatctcacaatcacactcagcttgattactaacccttctcctacaccttgctcacctaaatttatctacattttctatgaattgaaatagcttagaaatgtatgttgtctgtgtattatagtgtaagttattgtaatatagaaatatggactttctttaactcccatttgctgcctaggaaataccaatattttctaagcatggcaagtgtttccaagcattcagaagtggagagtgtaggaaatccactgcagaatgaggtctgctygtcatcctctcagtctcaactgctctccctccttcatctctctctgtttcattggtgagtatagaagatcaggcatttttatatgaaatgaaaattgatggaactaaggtgttgatttgaatatccaaccgaccttttattgagtgtctattacaagttaaattgtgttgtagagaacagctcaggaaacgaatgcttgacattgatgtacataacagaaatacaaacatgccattaaaaaatcagacctcttatgagcatccagattctcacgtaagttttg

SEQ ID NO: 426708 - DNA, 589 bp, Homo sapiens
cacgttgacccgcctctctcctaacatcatccagtacatttcggaagcgcatgcaaaactctcccaccttctgtttcaacagatatgtcaactgatacaattatacaataattgcataatattagatttaatctcacaatcacactcagcttgattactaacccttctcctacaccttgctcacctaaatttatctacattttctatgaattgaaatagcttagaaatgtatgttgtctgtgtattatagtgtaagttattgtaatatagaaatatggactttctttaactcccatttgctgcctaggaaataccaatattttctaagcatggcaagtgtttccaagcattcagaagtggagagtgtaggaaatccactgcagaatgaggtctgctcgtcatcctctcagtctcaactgctctccctccttcatckctctctgtttcattggtgagtatagaagatcaggcatttttatatgaaatgaaaattgatggaactaaggtgttgatttgaatatccaaccgaccttttattgagtgtctattacaagttaaattgtgttgtagagaacagctcaggaaacga

SEQ ID NO: 426709 - DNA, 589 bp, Homo sapiens
cacgttgacccgcctctctcctaacatcatccagtacatttcggaagcgcatgcaaaactctcccaccttctgtttcaacagatatgtcaactgatacaattatacaataattgcataatattagatttaatctcacaatcacactcagcttgattactaacccttctcctacaccttgctcacctaaatttatctacattttctatgaattgaaatagcttagaaatgtatgttgtctgtgtattatagtgtaagttattgtaatatagaaatatggactttctttaactcccatttgctgcctaggaaataccaatattttctaagcatggcaagtgtttccaagcattcagaagtggagagtgtaggaaatccactgcagaatgaggtctgctcgtcatcctctcagtctcaactgctctccctccttcatctctctctgtttcattggtgagtatagaagatcaggcatttttatatgaaatgaaaattgatggaactaaggtgttgatttgaatatccaaccgaccwtttattgagtgtctattacaagttaaattgtgttgtagagaacagctcaggaaacga

SEQ ID NO: 426710 - DNA, 565 bp, Homo sapiens
ttaaaaattaagtacagttcaataagtgttttgattaaaaaaattaaaaaatgaacagaattttaacctacacttatgatgtagccatgtggccaaaatactaacaatctgacttaaaatatatcttcatctaattattcyttctgtgcaaaagatgaattggatttgttgggaaggatgctttgaaagcatgaatttaattttccttcttccagggtatctatttcttccatcattgtaagtaggaattgcttgctcacatgcaaaaatgcaaacactggtttttaagtgctatctggaagaaatactagaatacatatattctacatacatataatatttacaatacatattcaagatatctatagatacataaaaataaacatttaatgaaaattgaaaatattagaaaggcctaaggtacttcaggtaggtaatctcatttatttttacaggaaaaggatatttcccaataacattaaagcttatataaaatttgataattggttaagtcaagcttctaataagtggtaaataaagatttacttgttagtatccattatat

SEQ ID NO: 426711 - DNA, 607 bp, Homo sapiens
taaaaacatttttattagagaaatgataaaactttatgataaaattgcattcaatttggatttagaaagggtaaaattatgtgtcttagaccattttgtgcttctaaaacagaataccatagattgagtaatttataaagaacagaaatttacttcttaccattctggtggctaggaagtccaagatcaagataccaggctctgaggtcttcttgatgcatcctcacatggtggaaggtggaaggggcaagagagaaccaactctctctgtcaagaccctttataagatcacctcatcccattcatgagrgaggatctctcatggcctaaacacctcttaaaggcctgacctcttaggactatcacattggcaacacttgaattttggaggagattcattaaagccatgtcagtatccatttcttactaaaggtaaaaaataatttgaagtatgaagggaacacaaaatgaataatacctccaagaaatattcattcatttgtccactcactcactaaataaatattgagagactgacttgtaaaagctaatttactctcttctaagctccatcataccaggctgggaaactcccagtagataatat

SEQ ID NO: 426712 - DNA, 607 bp, Homo sapiens
taaaaacatttttattagagaaatgataaaactttatgataaaattgcattcaatttggatttagaaagggtaaaattatgtgtcttagaccattttgtgcttctaaaacagaataccatagattgagtaatttataaagaacagaaatttacttcttaccattctggtggctaggaagtccaagatcaagataccaggctctgaggtcttcttgatgcatcctcacatggtggaaggtggaaggggcaagagagaaccaactctctctgtcaagaccctttataagatcacctcatcccattcatgagagaggatctctcatggcctaaacacctcttaaaggcctgacctcttaggactatcacattggcaacacttgaawtttggaggagattcattaaagccatgtcagtatccatttcttactaaaggtaaaaaataatttgaagtatgaagggaacacaaaatgaataatacctccaagaaatattcattcatttgtccactcactcactaaataaatattgagagactgacttgtaaaagctaatttactctcttctaagctccatcataccaggctgggaaactcccagtagataatat

SEQ ID NO: 426713 - DNA, 607 bp, Homo sapiens
taaaaacatttttattagagaaatgataaaactttatgataaaattgcattcaatttggatttagaaagggtaaaattatgtgtcttagaccattttgtgcttctaaaacagaataccatagattgagtaatttataaagaacagaaatttacttcttaccattctggtggctaggaagtccaagatcaagataccaggctctgaggtcttcttgatgcatcctcacatggtggaaggtggaaggggcaagagagaaccaactctctctgtcaagaccctttataagatcacctcatcccattcatgagagaggatctctcatggcctaaacacctcttaaaggcctgacctcttaggactatcacattggcaacacttgaattytggaggagattcattaaagccatgtcagtatccatttcttactaaaggtaaaaaataatttgaagtatgaagggaacacaaaatgaataatacctccaagaaatattcattcatttgtccactcactcactaaataaatattgagagactgacttgtaaaagctaatttactctcttctaagctccatcataccaggctgggaaactcccagtagataatat

SEQ ID NO: 426714 - DNA, 617 bp, Homo sapiens
ttgtgcaagtattggtagatagaaaatacaaaatccaaccatttctcatgaatgattaaacaaaaaaaagaatgcaagaagcctgtgtgcatgtgcgtgggtatatatgcatgtgtgtgtgtgtattcaggtttgttaactttattaactttgtttaaaatttaatttaaaaattagattggggagtaaatatcattcttcctctctcatcataaaacttttggctcacgggattctgacattccatcatgcttggaaaagttggatttatgaaaccagttgctggactgagcctgcctatgcagctcttacaygggtgctccctattttgtgcacaagcatcctcaagagaccaaagatagtgattgagagagacgggctctgaagtctttttatttcaacttcttggaatcaccaccttgttaatgaacatcaaaatcttttgtgtcatttatcagattaattactttttccataaaaagagtgagttgagaggataacaagaaactccctgtccctgcttcatcctgaaaacaggagaatcaatatcttaactctgtttttgagagatgaatgggtaggtcaacattgcttggctatttgtccttccatttggg

SEQ ID NO: 426715 - DNA, 617 bp, Homo sapiens
ttgtgcaagtattggtagatagaaaatacaaaatccaaccatttctcatgaatgattaaacaaaaaaaagaatgcaagaagcctgtgtgcatgtgcgtgggtatatatgcatgtgtgtgtgtgtattcaggtttgttaactttattaactttgtttaaaatttaatttaaaaattagattggggagtaaatatcattcttcctctctcatcataaaacttttggctcacgggattctgacattccatcatgcttggaaaagttggatttatgaaaccagttgctggactgagcctgcctatgcagctcttacatgggtgctccctattttgtgcacaagcatcctcaagagaccaaagatagtgattgagagagacrggctctgaagtctttttatttcaacttcttggaatcaccaccttgttaatgaacatcaaaatcttttgtgtcatttatcagattaattactttttccataaaaagagtgagttgagaggataacaagaaactccctgtccctgcttcatcctgaaaacaggagaatcaatatcttaactctgtttttgagagatgaatgggtaggtcaacattgcttggctatttgtccttccatttggg

SEQ ID NO: 426716 - DNA, 617 bp, Homo sapiens
ttgtgcaagtattggtagatagaaaatacaaaatccaaccatttctcatgaatgattaaacaaaaaaaagaatgcaagaagcctgtgtgcatgtgcgtgggtatatatgcatgtgtgtgtgtgtattcaggtttgttaactttattaactttgtttaaaatttaatttaaaaattagattggggagtaaatatcattcttcctctctcatcataaaacttttggctcacgggattctgacattccatcatgcttggaaaagttggatttatgaaaccagttgctggactgagcctgcctatgcagctcttacatgggtgctccctattttgtgcacaagcatcctcaagagaccaaagatagtgattgagagagacgggctctgaagtctttttatttcaacttcttggaatcaccaccttgttaatgaacatcaaaatcttttgtgtcatttatcagattaattactttttccataaaaagagtgagttgagaggataacaagaaactccctgtccctgcttcatcctgaaaacaggagaatcaatatcttaacyctgtttttgagagatgaatgggtaggtcaacattgcttggctatttgtccttccatttggg

SEQ ID NO: 426717 - DNA, 646 bp, Homo sapiens
ctctttattttcctaattgccatgggcaaccatcagttatttacttcatttcctttcaatagttcttgctctcagcaagtcgggatctctcagagagaaagattcatagaggcctgagaaaaacagaagaatctagggacaaatgtaaaaccatcttcmtaattacaatccatttattagatacaccatcctaaattttgtcctaaagaataagcagggctcatattctatttcttatattttttgagggacgatttcagtgtaagcaacaaagcagtggaaataatttcaaatgctagaatagttttttgagtaaaatctggtcctactaatgatttaagagctggaacacaacttcttgcagatctagagctggatcctagtccaagtgttcctggaagggatggggtaagggtgaatggagtgtgggaatgcagtcctgctgagtatgggcagctgttctggagccaagcaattcacagtttcactttgccaaaataaatccacttgaatgatttttttttcagggatgaaactgagaaattggtggtgagtagttctgcttaggaaaatttttgacatttcaggataaatgacaaatattacactttttctgagactatcttaaaaattcatttacatatct

SEQ ID NO: 426718 - DNA, 426 bp, Homo sapiens
taagtcttgacactaagtaatattcaaagagggaagtttgctctttattttcctaattgccatgggcaaccatcagttatttacttcatttcctttcaatagttcttgctctcagcaagtcgggatctctcagagagaaagattcatagaggcctgagaaaaacagaagaatctagggacaaatgtaaaaccatcttcctaattacaatccatttrttagatacaccatcctaaattttgtcctaaagaataagcagggctcatattctatttcttatattttttgagggacgatttcagtgtaagcaacaaagcagtggaaataatttcaaatgctagaatagttttttgagtaaaatctggtcctactaatgatttaagagctggaacacaacttcttgcagatctagagctggatcctagtcc

SEQ ID NO: 426719 - DNA, 646 bp, Homo sapiens
ctctttattttcctaattgccatgggcaaccatcagttatttacttcatttcctttcaatagttcttgctctcagcaagtcgggatctctcagagagaaagattcatagaggcctgagaaaaacagaagaatctagggacaaatgtaaaaccatcttcctaattacaatccatttattagatacaccatcctaaattttgtcctaaagaataagcagggctcatattctatttcttatattttttgagggacratttcagtgtaagcaacaaagcagtggaaataatttcaaatgctagaatagttttttgagtaaaatctggtcctactaatgatttaagagctggaacacaacttcttgcagatctagagctggatcctagtccaagtgttcctggaagggatggggtaagggtgaatggagtgtgggaatgcagtcctgctgagtatgggcagctgttctggagccaagcaattcacagtttcactttgccaaaataaatccacttgaatgatttttttttcagggatgaaactgagaaattggtggtgagtagttctgcttaggaaaatttttgacatttcaggataaatgacaaatattacactttttctgagactatcttaaaaattcatttacatatct

SEQ ID NO: 426720 - DNA, 517 bp, Homo sapiens
ccaccctgtgaagaagttacttgcttctccttcaccttcagctatgattataagttttctgaggcctccccagcaattcagaactatgagtcaattaaatctttttcctttataaattacccagtctcagaagttctttatagcagggtgataacagactaatacacttagcttccttgaattaggtttcgatgttcccctgaatttcaatgatctttgttcctatctatattctgaaatcaatttatgtcatttcagccatctcagcctagttaagaacccttgctggggaacyagtgtgatctttgggaggaaagaagacatgctggtcttttgagttgccagagatcttgcataggttctttctcatctgtgtgtgtgtgtgtgtgtgggtgttcctttaattgcagtgtaaattgagtacagtcagtagacttctttccatgttttcagagtcctaaggctttgtttagggcctttatttgtagctaaattcttgtctttcttttcacagcag

SEQ ID NO: 426721 - DNA, 517 bp, Homo sapiens
ccaccctgtgaagaagttacttgcttctccttcaccttcagctatgattataagttttctgaggcctccccagcaattcagaactatgagtcaattaaatctttttcctttataaattacccagtctcagaagttctttatagcagggtgataacagactaatacacttagcttccttgaattaggtttcgatgttcccctgaatttcaatgatctttgttcctatctatattctgaaatcaatttatgtcatttcagccatctcagcctagttaagaacccttgctggggaactagtgtgatctttgggaggaaagaagacatgctggycttttgagttgccagagatcttgcataggttctttctcatctgtgtgtgtgtgtgtgtgtgggtgttcctttaattgcagtgtaaattgagtacagtcagtagacttctttccatgttttcagagtcctaaggctttgtttagggcctttatttgtagctaaattcttgtctttcttttcacagcag

SEQ ID NO: 426722 - DNA, 375 bp, Homo sapiens
aacagactaatacacttagcttccttgaattaggtttcgatgttcccctgaatttcaatgatctttgttcctatctatattctgaaatcaatttatgtcatttcagccatctcagcctagttaagaacccttgctggggaactagtgtgatctttgggaggaaagaagacatgctggtcttttgagttgccagagatcttgcataggttctttctcatctgtgtgtgtgtgtgtgtgkgggtgttcctttaattgcagtgtaaattgagtacagtcagtagacttctttccatgttttcagagtcctaaggctttgtttagggcctttatttgtagctaaattcttgtctttcttttcacagcagggtatgatag

SEQ ID NO: 426723 - DNA, 602 bp, Homo sapiens
ctctgggacacagctaaagtggtattcagagggatatttgtagtcctaaatgctcacatcaaaatgatagatatcaaactaaaaacccagcattacaactagaagtaccagaggagcaaaagcaaacaaacctcaaaactagcagaagaaaagaaataacaaaaatcagagctgatatsaaggcgttcgagacataaaaaaaaaaaataaaaagatgaacaaatccaagagttggatcattgaaaaaatcaataaatagatatatggatacctagacttttaagaaaaggagaagctccaaataaatactatcagaaatgacaaagaagatgttaccactgatcccacagaaaaaaaaaaataaccaccgtaaactactttaaacacctctatgtacacaaaccagaaaatgtaggaaaaattgataaattcctggacacatacatccacccaagatggaagcaggaagaaattgatccttgaacagaccaataatgagcttcaaaactgaatcagtaataaatagcctaccaaaaaaaaatgccaaggactagatggattcacagctgaattctagtagatattcaaagaatagccggtac

SEQ ID NO: 426724 - DNA, 602 bp, Homo sapiens
ctctgggacacagctaaagtggtattcagagggatatttgtagtcctaaatgctcacatcaaaatgatagatatcaaactaaaaacccagcattacaactagaagtaccagaggagcaaaagcaaacaaacctcaaaactagcagaagaaaagaaataacaaaaatcagagctgatatcaaggcgttcgagacataaaaaaaaaaaataaaaagatgaacaaatccaagagttggatcattgaaaaaatcaataaatagatatatggatacctagacttttaagaaaaggagaagctccaaataaatactatcagaaatgacaaagaagatgttaccactgatcccacagaaaaaaaaaaataaccaccgtaaactactttaaacacctctatgtacacaaacyagaaaatgtaggaaaaattgataaattcctggacacatacatccacccaagatggaagcaggaagaaattgatccttgaacagaccaataatgagcttcaaaactgaatcagtaataaatagcctaccaaaaaaaaatgccaaggactagatggattcacagctgaattctagtagatattcaaagaatagccggtac

SEQ ID NO: 426725 - DNA, 637 bp, Homo sapiens
aatttacagattcaatgctattgctatagaactaccaacaacattcttcacagaactagaaaaaatctatttttaaaattcacctagccctcaaaaaagaccctggatagccaagggaatcttaagcaaaaagaacaaaactgaagccatcacattatatgacttcaaactcttctacagggccacagtaacccaagtagcataacactagtacaaaaacagacacatagaacaatggaacagaatagagagcccagaaataatgccacacatctacagccatctaattttcaacaaaaccaacaaaaacaagcaataaagaaagaagttcccattcaataagtggtgatgggmtatctgattagtcatatgcaagaagattgaaactggactccttctttataccatatataaaaatcaactcatcatgaattaaatacttaaatgtgaaacccaaaactataaaaactctggaagatatcctaggaaatgccattctggatataggaactggcaaagattccatgatgaacgtgctaaaagcaatcgcaacaaaagcaaaaactgacaaatgggatctaatgaaactaaagagtttctgcactgcaaaagaaattgtcagcagagtaaacagaca

SEQ ID NO: 426726 - DNA, 621 bp, Homo sapiens
ggatatctgattagtcatatgcaagaagattgaaactggactccttctttataccatatataaaaatcaactcatcatgaattaaatacttaaatgtgaaacccaaaactataaaaactctggaagatatcctaggaaatgccattctggatataggaactggcaaagattccatgatgaacgtgctaaaagcaatcgcaacaaaagcaaaaactgacaaatgggatctaatgaaactaaagagtttctgcactgcaaaagaaattgtcagcagagtaaacagacaacctaaagaatgggggaaaatttttgcgaagtagccttctgaaaaaagtctagtatctagaatctataaggaacttaaaccaattaacaagccaaaaaataaaaataaaaacaamctaattaaaaagtggataaaggacatgcacagacacttttcaaaagaagacatacatgctgccaacgagcatatgtaaaaaccttaacatccactcattagataaatgcaaatcaaaaccacagcaagataccatttcacacctgtcagaatggctattattaaaaaatcagaaagcaacagattttggcaatgtggtggagaaaagggaacacttacac

SEQ ID NO: 426727 - DNA, 621 bp, Homo sapiens
ggatatctgattagtcatatgcaagaagattgaaactggactccttctttataccatatataaaaatcaactcatcatgaattaaatacttaaatgtgaaacccaaaactataaaaactctggaagatatcctaggaaatgccattctggatataggaactggcaaagattccatgatgaacgtgctaaaagcaatcgcaacaaaagcaaaaactgacaaatgggatctaatgaaactaaagagtttctgcactgcaaaagaaattgtcagcagagtaaacagacaacctaaagaatgggggaaaatttttgcgaagtagccttctgaaaaaagtctagtatctagaatctataaggaacttaaaccaattaacaagccaaaaaataaaaataaaaacaaactaattaaaaagtggataaaggacatgcacagacacttttcaaaagaagacatacatgctgccaacgagcatatgtaaaaaccttaacatccactcattagataaatgcaaatcaaaaccacagcaagataycatttcacacctgtcagaatggctattattaaaaaatcagaaagcaacagattttggcaatgtggtggagaaaagggaacacttacac

SEQ ID NO: 426728 - DNA, 515 bp, Homo sapiens
ttatcaaaactttatactactctaaacttctttttctgtaagcaaaagccaattggtaactataatttgaattttcatgtaaaatgacttgtacaattgttttgtgcaaatgttattttcctttttcgtgttgaacaatgggaccaaaacataaaaacaaccaaatggcaaacatttctttgacatatttactctgtaagtgggctataaagaggtctcataaaattattttttctttaaaaaaatccttcttttctgtatcttccatttgatattaaaatataacattaagctactwttttttttttagatgaaatctcactctgtatccaggctggggtgcagtggcacaatctcggctcactgcaacctcagactccactccctagttcaagtgattctcctgcttcagcctccacagtagtggggattacaggctcgtgccaccgtgcccgactaatttttgtattttgagttgggatggggtttcaccatgttggccaggctggtctcga

SEQ ID NO: 426729 - DNA, 578 bp, Homo sapiens
aaatttttaactatctaaatttggtgaaatgataagatatggatatatatattaaaatattcgcttgagcamtgactcagtacttcagaaacaagtagcaggctttaaaacctgaggaaaaattaggcttgtgtcacaacacaaaccacaagaaatccaaaaacagtaagggtgactgtgcaaggaggacagaaaagaagtactaaaccactttaacactatcttacatttatcagaaataacagaaattatacatatatgctctatagaattttaaacaaagaaacaaaatgtggtgcttttctccagatgttttggccagaggacataatctgaatgatttaaattccttgaaattgactgtgacttgctatacagccagcatatggttgttttattttgtaaaatatcctatatgctcttgaaaataatgtgccttctgtttctaagccaattcggttaagtcaaaacaaaattctaactataagataataataaccgagaataaatagtcacctgcagaggaccaaagcattctatcaaacttttactgcaactggattgcaagaaggtaatgg

SEQ ID NO: 426730 - DNA, 578 bp, Homo sapiens
aaatttttaactatctaaatttggtgaaatgataagatatggatatatatattaaaatattcgcttgagcaatgactcagtacttcagaaacaagtagcaggctttaaaacctgaggaaaaattaggcttgtgtcacaacacaaaccacaagaaatccaaaaacagtaagggtgactgtgcaaggaggacagaaaagaagtactaaaccactttaacactatcttacatttatcagaaataacagaaattatacatatatgctctatagaattttaaacaaagaaacaaaatgtggtgcttttctccagatgttttggccagaggacataatctgaatgatttaaattccttgaaattgactgtgacttgctatacagccagcatatggttgttttattttgtaaaatatcctatatgctcttgaaaataatgtgccttctgtttctaagccaattcggttaagtcaaaacaaaattctaactataagataayaataaccgagaataaatagtcacctgcagaggaccaaagcattctatcaaacttttactgcaactggattgcaagaaggtaatgg

SEQ ID NO: 426731 - DNA, 631 bp, Homo sapiens
cctccatgcatattttatacaattttcataagaagagagttgagtagagagtcagtttatagtttagagaaaagagaaaaacaaggaaaaaaatagaatgcaaattttaaaacaaaagcaattcagaattgaaattatagaaattatctatataatgagaaagatgaaattgaaatctaagaaacacatgactatgacaaagcaaatgtatctttagatacaatatacagatatcaatagtttaagaaagtaatatttattttcttatttaaaatgttaagataattaccacagagataaatttaaatacttgttaaactaatatagtgagctrttctatagacaaacaatagaagaaatggggaaaggaaacaaactaaaaatgtgagtaaatgtataatatgatgtaaattggccgaactaagttaaatgtaacaataatgacaataaatgcaaataagttaaaagcagtaattaaaggatcctgacttttataaattttttaataagagccaaaacatgttgttgacataagttaaaatttaaaagaaaatatatatgtatataactactaacattaaaattattttataacacaccaggcttaaatactaaaaagctagaggggcaa

SEQ ID NO: 426732 - DNA, 631 bp, Homo sapiens
cctccatgcatattttatacaattttcataagaagagagttgagtagagagtcagtttatagtttagagaaaagagaaaaacaaggaaaaaaatagaatgcaaattttaaaacaaaagcaattcagaattgaaattatagaaattatctatataatgagaaagatgaaattgaaatctaagaaacacatgactatgacaaagcaaatgtatctttagatacaatatacagatatcaatagtttaagaaagtaatatttattttcttatttaaaatgttaagataattaccacagagataaatttaaatacttgttaaactaatatagtgagctgttctatagacaaacaatagaagaaatggggaaaggaaacaaactaaaaatgtgagtaaatgtataatatgatgtaaattggccgaactaagttaaatgtaacaataatgacaataaatgcaaataagttaaaagcagtaattaaaggatcctgacttttataaattttttaataagagccaaaacatgttgttgacataagttaaaatttaaaagaaaatatatrtgtatataactactaacattaaaattattttataacacaccaggcttaaatactaaaaagctagaggggcaa

SEQ ID NO: 426733 - DNA, 584 bp, Homo sapiens
ttattaaagtttagctgatttcttatatgattatatggtgacttcctcttcattttttgattggtcaaagatgaaactcattttgtgtcctttccatccttgagggcttgtccctctctggaaccagtttacttggttgccatgcaacttcatctctgrtgggctgaaaacaacttatgactttgtagataattcaaatatttctcaccttaagggtgggagcatcattcttttcacctttctacatcctaatcagaagctgaaaatcacactgagtttttagaaattactcttccaagctgcaaaatattaagaatttccattttaaatcttagcagaaaaaaattactctagttggagtttcaccaaataatcttgtaaaatttgaagttttcttgagagacacctgccttcatctggtgtgaattatgaaaaccttagttacacttggaagagtaaatccttacaaatcaatatatttaacattggtaaacagacaagcaataaaaataaattataaagaaacaacaaaaataaatcatttagatatctaacatgatatatatgaggatttatcaaatttt

SEQ ID NO: 426734 - DNA, 584 bp, Homo sapiens
ttattaaagtttagctgatttcttatatgattatatggtgacttcctcttcattttttgattggtcaaagatgaaactcattttgtgtcctttccatccttgagggcttgtccctctctggaaccagtttacttggttgccatgcaacttcatctctgatgggctgaaaacaacttatgactttgtagataattcaaatatttctcaccttaagggtgggagcatcattcttttcacctttctacatcctaatcagaagctgaaaatcacactgagkttttagaaattactcttccaagctgcaaaatattaagaatttccattttaaatcttagcagaaaaaaattactctagttggagtttcaccaaataatcttgtaaaatttgaagttttcttgagagacacctgccttcatctggtgtgaattatgaaaaccttagttacacttggaagagtaaatccttacaaatcaatatatttaacattggtaaacagacaagcaataaaaataaattataaagaaacaacaaaaataaatcatttagatatctaacatgatatatatgaggatttatcaaatttt

SEQ ID NO: 426735 - DNA, 547 bp, Homo sapiens
aaaactgatgaaagaaaaaagctagttatttgaaaacatcaataatattgataaacttctatcaagattaactaaaacaaatagagatgacataaattattaataccagaaatgaaagagaggacatcattagtgatcccatgtacattaaaggatagtaaaggaatattatgaacaactttatgcacaaaaatttaatgacgagggtgaaatgtaccaattccttgaaggacacaatcaaccaaaactcacatgaggagaaatagataatctgaacaggcctttatctattaaagaaactgaattaataattaataccctgctaaayagaaagcaccagggctagataagttcactgctaaatcttaccaaacatttaatcaggaaattatatcgattctgcacaatcacttccaataataaaagtaaaaacaagttattctggaaagagggaccatggcacaagaaatgtttggcacagcacaaccagtccccagagaccaaagctaggccatatcttcaaagcccagagtgtgcatagcctgag

SEQ ID NO: 426736 - DNA, 416 bp, Homo sapiens
tgaattaataattaataccctgctaaatagaaagcaccagggctagataagttcactgctaaatcttaccaaacatttaatcaggaaattatatcgattctgcacaatcacttccaataataaaagtaaaaacaagttattctggaaagagggaccatggcacaagaaatgtttggcacagcacaaccagtccccagagaccaaagctaggccatrtcttcaaagcccagagtgtgcatagcctgagtcaagctgaaggaaggaataaaaaaaaatgaggagaaagtcagggaatatatgatgaagcaaaatctttatgtctgatgttctcagaatgaataaaattataaaatgcaaagtgcatatatcacagtttcagaagcaatattggtccaactgctgattttctaaaatgg

SEQ ID NO: 426737 - DNA, 416 bp, Homo sapiens
tgaattaataattaataccctgctaaatagaaagcaccagggctagataagttcactgctaaatcttaccaaacatttaatcaggaaattatatcgattctgcacaatcacttccaataataaaagtaaaaacaagttattctggaaagagggaccatggcacaagaaatgtttggcacagcacaaccagtccccagagaccaaagctaggccatatcttcaaagcccagagtgtgcatagcctgagtcaagctgaaggaaggaataaaaaaaaatgrggagaaagtcagggaatatatgatgaagcaaaatctttatgtctgatgttctcagaatgaataaaattataaaatgcaaagtgcatatatcacagtttcagaagcaatattggtccaactgctgattttctaaaatgg

SEQ ID NO: 426738 - DNA, 416 bp, Homo sapiens
tgaattaataattaataccctgctaaatagaaagcaccagggctagataagttcactgctaaatcttaccaaacatttaatcaggaaattatatcgattctgcacaatcacttccaataataaaagtaaaaacaagttattctggaaagagggaccatggcacaagaaatgtttggcacagcacaaccagtccccagagaccaaagctaggccatatcttcaaagcccagagtgtgcatagcctgagtcaagctgaaggaaggaataaaaaaaaatgaggagaaagtcagggratatatgatgaagcaaaatctttatgtctgatgttctcagaatgaataaaattataaaatgcaaagtgcatatatcacagtttcagaagcaatattggtccaactgctgattttctaaaatgg

SEQ ID NO: 426739 - DNA, 525 bp, Homo sapiens
tagtaatgtgttttatgggataaaggacttattaaaggaattagatatgtagagctgtacaagtagctgggaaactcaaggtctgaaagggaagttcaagaatcagaggacctctcactaacaagtcaatatgaaataccaaacatatctctttatgtaagggttgctcctgggatgccctttgagaggctgtgattttgtgtagctacaacctctgttgattcacatctaagaatcttttggtgagtcttgggctgctgttgatggacagaggcaacagtaggcaaaggtgttgaacgtggaatagagcagatttaggacaggttgcaagccggctggaacctctgcattgatccgatactgcatttgattatgatgaccttcagagaataagggccaccaccttacttcctttttcctagttacgtacaagttcctcttttggataatacagagaaggacatcttgaaaaaaaaygtacttttttgcctactcaagatgacacaatgcaaaacaccacaaata

SEQ ID NO: 426740 - DNA, 583 bp, Homo sapiens
gcaatgtttctccactcaggtgaggggagagtatttataaagctcgatgaatatctccaaaatttaggagtggcacaggagtctgatgtttaattaattattttccagaattagagtaaaagacaaaggctgataagctgttttgctggtaaattaaagaacagckgctaatacatttagattgtcaatttcatgggtttgtgaccactgtagttgtataagaacccacattcagtggatccttcaaaactttactgttactgtcttgaaatccttaataattttatctttgaatttgtgttttgtaagtgaactctgatgggacaatggagcatgagccaggagcatggggcctcagctcacatgtgatctcaccttttgccatcttgctcccccactgatacctagagaccactacaccacctcttacccagcaggggtctgaggccaaatacaaggagactcagggtcatatcctgagtaattttgagcgctctgtgagcatccctgtttccaaggcagagtgaaattaagagcaaagaaaaaacatcatgacaggtcaagaaagaaaccataggaaaaa

SEQ ID NO: 426741 - DNA, 560 bp, Homo sapiens
ccactgtagttgtataagaacccacattcagtggatccttcaaaactttactgttactgtcttgaaatccttaataattttatctttgaatttgtgttttgtaagtgaactctgatgggacaatggagcatgagccaggagcatggggcctcagctcacatgtgatctcaccttttgccatcttgctcccccactgatacctagagaccactacaccacctcttacccagcaggggtctgagkccaaatacaaggagactcagggtcatatcctgagtaattttgagcgctctgtgagcatccctgtttccaaggcagagtgaaattaagagcaaagaaaaaacatcatgacaggtcaagaaagaaaccataggaaaaaaaattctattatattttcttttgtttgtaaaagggatcctgcaaattaagtagctgacctggggtttcactttctggatttcagggcccacgaatgcattaccttttaacccagatcggaaatgatccacatgagcaatgaaagatggcagatggcttgaagccaagtgtgctttaagaac

SEQ ID NO: 426742 - DNA, 560 bp, Homo sapiens
ccactgtagttgtataagaacccacattcagtggatccttcaaaactttactgttactgtcttgaaatccttaataattttatctttgaatttgtgttttgtaagtgaactctgatgggacaatggagcatgagccaggagcatggggcctcagctcacatgtgatctcaccttttgccatcttgctcccccactgatacctagagaccactacaccacctcttacccagcaggggtctgaggccaaatacaaggagactcagggtcatatcctgagtaattttgagcgctctgtgagcatccctgtttccaaggcagagtgaaattaagagcaaagaaaaaacatcatgacaggtcaagaaagaaaccataggaaraaaaattctattatattttcttttgtttgtaaaagggatcctgcaaattaagtagctgacctggggtttcactttctggatttcagggcccacgaatgcattaccttttaacccagatcggaaatgatccacatgagcaatgaaagatggcagatggcttgaagccaagtgtgctttaagaac

SEQ ID NO: 426743 - DNA, 538 bp, Homo sapiens
gctcacatgtgatctcaccttttgccatcttgctcccccactgatacctagagaccactacaccacctcttacccagcaggggtctgaggccaaatacaaggagactcagggtcatatcctgagtaattttgagcgctctgtgagcatccctgtttccaaggcagagtgaaattaagagcaaagaaaaaacatcatgacaggtcaagaaagaaaccataggaaaaaaaattctattatawtttcttttgtttgtaaaagggatcctgcaaattaagtagctgacctggggtttcactttctggatttcagggcccacgaatgcattaccttttaacccagatcggaaatgatccacatgagcaatgaaagatggcagatggcttgaagccaagtgtgctttaagaacacttgggtgggattccattgcatggaatgaacttctagaacaggggtgttcaatcgtttagcttctctgggccacactgcaagaagacgaattgtcttgggccacatataaaatgcactaacactaacgat

SEQ ID NO: 426744 - DNA, 560 bp, Homo sapiens
ccactgtagttgtataagaacccacattcagtggatccttcaaaactttactgttactgtcttgaaatccttaataattttatctttgaatttgtgttttgtaagtgaactctgatgggacaatggagcatgagccaggagcatggggcctcagctcacatgtgatctcaccttttgccatcttgctcccccactgatacctagagaccactacaccacctcttacccagcaggggtctgaggccaaatacaaggagactcagggtcatatcctgagtaattttgagcgctctgtgagcatccctgtttccaaggcagagtgaaattaagagcaaagaaaaaacatcatgacaggtcaagaaagaaaccataggaaaaaaaattctattatattttcttttgtttgtaaaagggatcctgcaaattaagtagctgaccyggggtttcactttctggatttcagggcccacgaatgcattaccttttaacccagatcggaaatgatccacatgagcaatgaaagatggcagatggcttgaagccaagtgtgctttaagaac

SEQ ID NO: 426745 - DNA, 560 bp, Homo sapiens
ccactgtagttgtataagaacccacattcagtggatccttcaaaactttactgttactgtcttgaaatccttaataattttatctttgaatttgtgttttgtaagtgaactctgatgggacaatggagcatgagccaggagcatggggcctcagctcacatgtgatctcaccttttgccatcttgctcccccactgatacctagagaccactacaccacctcttacccagcaggggtctgaggccaaatacaaggagactcagggtcatatcctgagtaattttgagcgctctgtgagcatccctgtttccaaggcagagtgaaattaagagcaaagaaaaaacatcatgacaggtcaagaaagaaaccataggaaaaaaaattctattatattttcttttgtttgtaaaagggatcctgcaaattaagtagctgacctggggtttcactttctggatttcagggcccacgaatgcattaccttttarcccagatcggaaatgatccacatgagcaatgaaagatggcagatggcttgaagccaagtgtgctttaagaac

SEQ ID NO: 426746 - DNA, 507 bp, Homo sapiens
aaaaaattctattatattttcttttgtttgtaaaagggatcctgcaaattaagtagctgacctggggtttcactttctggatttcagggcccacgaatgcattaccttttaacccagatcggaaatgatccacatgagcaatgaaagatggcagatggcttgaagccaagtgtgytttaagaacacttgggtgggattccattgcatggaatgaacttctagaacaggggtgttcaatcgtttagcttctctgggccacactgcaagaagacgaattgtcttgggccacatataaaatgcactaacactaacgatagctgacaagctaaagaaaaaaaaatcaccaaaaaaaatcccataatgtttttaaaagtttaccaatttctattgggcctcattcaaagctgtcctggactgtgtgtggcctttgggctgtgggttggacaagcttattctagaaagtgaaaagtttcatgggaattgacagttgtagattaaatgatcact

SEQ ID NO: 426747 - DNA, 507 bp, Homo sapiens
aaaaaattctattatattttcttttgtttgtaaaagggatcctgcaaattaagtagctgacctggggtttcactttctggatttcagggcccacgaatgcattaccttttaacccagatcggaaatgatccacatgagcaatgaaagatggcagatggcttgaagccaagtgtgctttaagaacacttgggtgggattccattgcatggaatgaacttctagaacaggggtgttcaatcrtttagcttctctgggccacactgcaagaagacgaattgtcttgggccacatataaaatgcactaacactaacgatagctgacaagctaaagaaaaaaaaatcaccaaaaaaaatcccataatgtttttaaaagtttaccaatttctattgggcctcattcaaagctgtcctggactgtgtgtggcctttgggctgtgggttggacaagcttattctagaaagtgaaaagtttcatgggaattgacagttgtagattaaatgatcact

SEQ ID NO: 426748 - DNA, 507 bp, Homo sapiens
aaaaaattctattatattttcttttgtttgtaaaagggatcctgcaaattaagtagctgacctggggtttcactttctggatttcagggcccacgaatgcattaccttttaacccagatcggaaatgatccacatgagcaatgaaagatggcagatggcttgaagccaagtgtgctttaagaacacttgggtgggattccattgcatggaatgaacttctagaacaggggtgttcaatcgtttagcttctctgggccacactgcaagaagacgaattgtcttgggccacatataaaatgcactaacactaacgatagctgacaagctaaagaaaaaaaaatcaccaaaaaaaatcccataatgtttttaaaagtttaccaatttctattgggcctcattcaaagctgtcctggactgtgygtggcctttgggctgtgggttggacaagcttattctagaaagtgaaaagtttcatgggaattgacagttgtagattaaatgatcact

SEQ ID NO: 426749 - DNA, 638 bp, Homo sapiens
gtcagcactaaaataaaaatgtagggggaaatgcaactaataaaatgtaggaaaaaaaatgtgaacagaaaatataataaacctacatggtggtgcttacgtagataaaactgaaagaggattgtaaatagaactgtaagaatggatttgtctaccatttattatattttgttaaaaataaagaaattcaatttacaatattgaattttactagactttctggtttgaaaagctagagtttctttttcctttcagaaggcttgtattcaggtaatactgatgaagagaatcctcaagacctttacactctgggtcagttccaagatggctgagagctgtttmaaacaaccaaaaaacaacttgataggattgacaatttcatgttttttaataagtgttgaatgagactgctaactacaatcagcagatatacatatgtggtgtcatagatgttaggttttcaaaaataaagaatgtgttagaaaaatgcctgcaaatcattcgaatgttacaaccttttaaaaaaaatctggctgttgagtgcagactgtgctgtttcaccttttattacaaagactcagtgaatgaaacatatttgatagcttggtaatagaagaaaaatttgtatttaaatgagg

SEQ ID NO: 426750 - DNA, 519 bp, Homo sapiens
taaaattaggaatttgtcagcaatagctcctcctgcctttatcatatgttttaaatgatttaacagtgacattttattgtattttcttttttattgagattcatttcctatcttgtctaatattctcctattctcctgatagtttacacacaattatcacaaaacactagcagttccattaattttgtcttcactatcctcagagactttctgaggaaataataatattgtttcttttatctttatctctgragcttagtagggtaccttgcccattgtagttgagaaatgataaataggaatgactgaaaaaaaatacatttgaaagcagcttgaacataagaagaagcttgagatatttataatatggacacttgtttttttcctaaagcaaagctattactattagttagagattatgtagattttaatttctttatagaagacaaaataaaactagtagattaaaaaagttagttcctgccactattcttcccccaacaagatatctggggactg

SEQ ID NO: 426751 - DNA, 519 bp, Homo sapiens
taaaattaggaatttgtcagcaatagctcctcctgcctttatcatatgttttaaatgatttaacagtgacattttattgtattttcttttttattgagattcatttcctatcttgtctaatattctcctattctcctgatagtttacacacaattatcacaaaacactagcagttccattaattttgtcttcactatcctcagagactttctgaggaaataataatattgtttcttttatctttatctctggagcttagtagggtaccttgcccattgtagttgagaaatgataaataggaatgactgaaaaaaaatacatttgaaarcagcttgaacataagaagaagcttgagatatttataatatggacacttgtttttttcctaaagcaaagctattactattagttagagattatgtagattttaatttctttatagaagacaaaataaaactagtagattaaaaaagttagttcctgccactattcttcccccaacaagatatctggggactg

SEQ ID NO: 426752 - DNA, 618 bp, Homo sapiens
cttaggcttgaagcataacactgttgtcacatcacttgacaatgcatttacrgaataagattcagtgagaaagaacaaacaagaagtgattatatcctttaaagagctttctcagaggcatcggctagtatcttgtttgcttctcatttgccagagttgcatcaagtagcttctcccaactgctcaggaaattgggaagtatagttttctcaacattttcataccaccacaaacactcccaagaatgttcataagcagtctgtaatacacaggacacgtcccaatgaccaagaattatctggtctgaaatatcaatagtggtgaggttgagaaaacttcctctgaagcacccggcattgggataaggtctcaaaggaaacgttaaaagacaatgcaaaatgaagaagaatatggggtaccaaaattatagttatcaatcaaccacagaacttagttttccccaaatatctgaaaggttgtttgacttgtcaaaatggaaacaatgtattcagtactgcttcagaaggcaaacctaaaccaaagtttgaaatctgtgatgatgaacatattaaaattatagaatcatttgaaggttattattatccagcagtaacacag

SEQ ID NO: 426753 - DNA, 525 bp, Homo sapiens
gactggtggaatcctctcactccagtattcttagagtcttgcttaggcttgaagcataacactgttgtcacatcacttgacaatgcatttacggaataagattcagtgagaaagaacaaacaagragtgattatatcctttaaagagctttctcagaggcatcggctagtatcttgtttgcttctcatttgccagagttgcatcaagtagcttctcccaactgctcaggaaattgggaagtatagttttctcaacattttcataccaccacaaacactcccaagaatgttcataagcagtctgtaatacacaggacacgtcccaatgaccaagaattatctggtctgaaatatcaatagtggtgaggttgagaaaacttcctctgaagcacccggcattgggataaggtctcaaaggaaacgttaaaagacaatgcaaaatgaagaagaatatggggtaccaaaattatagttatcaatcaaccacagaacttagttttccccaaatatctgaaaggttgtttga

SEQ ID NO: 426754 - DNA, 618 bp, Homo sapiens
cttaggcttgaagcataacactgttgtcacatcacttgacaatgcatttacggaataagattcagtgagaaagaacaaacaagaagtgattatatcctttaaagagctttctcagagrcatcggctagtatcttgtttgcttctcatttgccagagttgcatcaagtagcttctcccaactgctcaggaaattgggaagtatagttttctcaacattttcataccaccacaaacactcccaagaatgttcataagcagtctgtaatacacaggacacgtcccaatgaccaagaattatctggtctgaaatatcaatagtggtgaggttgagaaaacttcctctgaagcacccggcattgggataaggtctcaaaggaaacgttaaaagacaatgcaaaatgaagaagaatatggggtaccaaaattatagttatcaatcaaccacagaacttagttttccccaaatatctgaaaggttgtttgacttgtcaaaatggaaacaatgtattcagtactgcttcagaaggcaaacctaaaccaaagtttgaaatctgtgatgatgaacatattaaaattatagaatcatttgaaggttattattatccagcagtaacacag

SEQ ID NO: 426755 - DNA, 525 bp, Homo sapiens
gactggtggaatcctctcactccagtattcttagagtcttgcttaggcttgaagcataacactgttgtcacatcacttgacaatgcatttacggaataagattcagtgagaaagaacaaacaagaagtgattatatcctttaaagagctttctcagaggcatcggctagtatcttgtttgcttctcatttgccagagttgcatcaagtagcttctcccaactgctcaggaaattgggaagtatagttttctcaacattttcataccaccacaaacactcccaagaatgttcataagcagtctgtaatacacaggacacgtcccaatgaccaagaattatctggtctgaaatatcaatagtggtgaggttgagaaaacttcctctgaagcacccggcattgggataaggtctcaaaggaaaygttaaaagacaatgcaaaatgaagaagaatatggggtaccaaaattatagttatcaatcaaccacagaacttagttttccccaaatatctgaaaggttgtttga

SEQ ID NO: 426756 - DNA, 576 bp, Homo sapiens
cctttacagaactgaatgtaatgagagactagtattgtgtccctttgtgaagtctttaaattataacagtttcaaaatatatgaagattttgaccaaatcagaacaaaggccattcatgatataaaccactttgagacagtaagagctattggttgggtctatagggccactagtctaggcctccgataatttatgcaccaggagaaatgtctttgaggaacagataattgcctgcatgcctctcctagacatgttggtggaagctgcaacaggaktggttattattaatcccttttagaggacaatactagtctcacctctgaaccacccatcaatattgtgctcaattagcactttgtttcaattgacaatgaaattatatactgaaaacagcatgaatccatgacctgaccagaagcattctctagccagtgaatgatttttctatccttgcctccttttcaatttaacaaaagaggataacactgaattcagactacaggtgtgcagatcctcattgttttaagtcatcagaaagaacacaattaaaaattaatttaaaaactaggaatatt

SEQ ID NO: 426757 - DNA, 492 bp, Homo sapiens
ttgtgctcaattagcactttgtttcaattgacaatgaaattatatactgaaaacagcatgaatccatgacctgaccagaagcattctctagccagtgaaygatttttctatccttgcctccttttcaatttaacaaaagaggataacactgaattcagactacaggtgtgcagatcctcattgttttaagtcatcagaaagaacacaattaaaaattaatttaaaaactaggaatatttatatcgtctttcctcatagttttcctcttctggtcttttgccttaatagttatttactatttctcattcatatttggtagaaagtgtcattatacaatgtataacaaaggtcttgagaatacaaatgtataactctttcatataattataatccaaagaaatctttaatatattcatgttaaacatcggtttatatgatatttgcaatccatgtgaaaaaaccattttacaaaaacattaaaataaagcccaa

SEQ ID NO: 426758 - DNA, 633 bp, Homo sapiens
aggagtggttattattaatcccttttagaggacaatactagtctcacctctgaaccacccatcaatattgtgctcaattagcactttgtttcaattgacaatgaaattatatactgaaaacagcatgaatccatgacctgaccagaagcattctctagccagtgaatgatttttctatccttgcctccttttcaatttaacaaaagasgataacactgaattcagactacaggtgtgcagatcctcattgttttaagtcatcagaaagaacacaattaaaaattaatttaaaaactaggaatatttatatcgtctttcctcatagttttcctcttctggtcttttgccttaatagttatttactatttctcattcatatttggtagaaagtgtcattatacaatgtataacaaaggtcttgagaatacaaatgtataactctttcatataattataatccaaagaaatctttaatatattcatgttaaacatcggtttatatgatatttgcaatccatgtgaaaaaaccattttacaaaaacattaaaataaagcccaagtttttgtatttgagtgattcagcttaagaagacttatataatttatgaaataaatacatatcatttgagcata

SEQ ID NO: 426759 - DNA, 633 bp, Homo sapiens
aggagtggttattattaatcccttttagaggacaatactagtctcacctctgaaccacccatcaatattgtgctcaattagcactttgtttcaattgacaatgaaattatatactgaaaacagcatgaatccatgacctgaccagaagcattctctagccagtgaatgatttttctatccttgcctccttttcaatttaacaaaagaggataacactgaattcagactacaggtgtgcagatcctcattgttttaagtcatcagaaagaacasaattaaaaattaatttaaaaactaggaatatttatatcgtctttcctcatagttttcctcttctggtcttttgccttaatagttatttactatttctcattcatatttggtagaaagtgtcattatacaatgtataacaaaggtcttgagaatacaaatgtataactctttcatataattataatccaaagaaatctttaatatattcatgttaaacatcggtttatatgatatttgcaatccatgtgaaaaaaccattttacaaaaacattaaaataaagcccaagtttttgtatttgagtgattcagcttaagaagacttatataatttatgaaataaatacatatcatttgagcata

SEQ ID NO: 426760 - DNA, 628 bp, Homo sapiens
ttttgtatttgagtgattcagcttaagaagacttatataatttaygaaataaatacatatcatttgagcataatgcaacacacctttaaaaaccacttgtttgaaaagaagcaaggcatatccactgattatatacaactactgctttcaaaattttcacttttaaccagtagacttttcatcagtgttttatattgtcagggtgttttttgtttttgtttttatgatttaatgtatttaacttgtttctctattagaacagaaaaaacacatacttctttatttcttctgcattcctttccatttgttggccatgacagcagttagattatacccctttctactgaagcgttgtgctaagttttgggagggcaggagaaaatatcttcagcttgaaaaaaaaaatacttgaataaacaggtaatttttgtattaagatatacaatggtcactttctttagtgagttatgacaatctacctctgaagtacaacatgttagagtcatttgctctggacaaagtcactttcaggaatggttttattacaatgaaaaggaataggtatactggctcttaagtgccactattgccctttatgagaatgagaactagattagctggcacgctt

SEQ ID NO: 426761 - DNA, 587 bp, Homo sapiens
gttttaagtcatcagaaagaacacaattaaaaattaatttaaaaactaggaatatttatatcgtctttcctcatagttttcctcttctggtcttttgccttaatagttatttactatttctcattcatatttggtagaaagtgtcattatacaatgtataacaaaggtcttgagaatacaaatgtataactctttcatataattataatccaaagaaatctttaatatattcatgttaaacatcggtttatatgatatttgcaatccatgtgaaaaaaccattttacaaaaacattaaaataaagcccaagtttttgtatttgagtgattcagcttaagaagacttatataatttatgaaataaatacatatcatttgagmataatgcaacacacctttaaaaaccacttgtttgaaaagaagcaaggcatatccactgattatatacaactactgctttcaaaattttcacttttaaccagtagacttttcatcagtgttttatattgtcagggtgttttttgtttttgtttttatgatttaatgtatttaacttgtttctctattagaacagaaaaaacacatac

SEQ ID NO: 426762 - DNA, 628 bp, Homo sapiens
ttttgtatttgagtgattcagcttaagaagacttatataatttatgaaataaatacatatcatttgagcataatgcaacacacctttaaaaaccacttgtttgaaaagaagcaaggcatatccactgattatatacaactactgctttcaaaattttcacttttaaccagtagacttttcatcagtgttttatattgtcagggtgttttttgtttttgtttttatgatttaatgtwtttaacttgtttctctattagaacagaaaaaacacatacttctttatttcttctgcattcctttccatttgttggccatgacagcagttagattatacccctttctactgaagcgttgtgctaagttttgggagggcaggagaaaatatcttcagcttgaaaaaaaaaatacttgaataaacaggtaatttttgtattaagatatacaatggtcactttctttagtgagttatgacaatctacctctgaagtacaacatgttagagtcatttgctctggacaaagtcactttcaggaatggttttattacaatgaaaaggaataggtatactggctcttaagtgccactattgccctttatgagaatgagaactagattagctggcacgctt

SEQ ID NO: 426763 - DNA, 628 bp, Homo sapiens
ttttgtatttgagtgattcagcttaagaagacttatataatttatgaaataaatacatatcatttgagcataatgcaacacacctttaaaaaccacttgtttgaaaagaagcaaggcatatccactgattatatacaactactgctttcaaaattttcacttttaaccagtagacttttcatcagtgttttatattgtcagggtgttttttgtttttgtttttatgatttaatgtatttaacttgtttctctattagaacaraaaaaacacatacttctttatttcttctgcattcctttccatttgttggccatgacagcagttagattatacccctttctactgaagcgttgtgctaagttttgggagggcaggagaaaatatcttcagcttgaaaaaaaaaatacttgaataaacaggtaatttttgtattaagatatacaatggtcactttctttagtgagttatgacaatctacctctgaagtacaacatgttagagtcatttgctctggacaaagtcactttcaggaatggttttattacaatgaaaaggaataggtatactggctcttaagtgccactattgccctttatgagaatgagaactagattagctggcacgctt

SEQ ID NO: 426764 - DNA, 488 bp, Homo sapiens
tgttggccatgacagcagttagattatacccctttctactgaarcgttgtgctaagttttgggagggcaggagaaaatatcttcagcttgaaaaaaaaaatacttgaataaacaggtaatttttgtattaagatatacaatggtcactttctttagtgagttatgacaatctacctctgaagtacaacatgttagagtcatttgctctggacaaagtcactttcaggaatggttttattacaatgaaaaggaataggtatactggctcttaagtgccactattgccctttatgagaatgagaactagattagctggcacgcttatatcccacactctttatgagccttatatgttttggggtattttcatcattttaatctggatgatgttattttcagaaacatcctaaaacaattttcaaagaagcaaggaaaaggttaacactgaacttgcataatattcagtcatgaaaatgcatttgaataca

SEQ ID NO: 426765 - DNA, 488 bp, Homo sapiens
tgttggccatgacagcagttagattatacccctttctactgaagcgttgtgctaagttttgggagggcaggagaaaatatcttcagcttgaaaaaaaaaatacttgaataaacaggtaatttttktattaagatatacaatggtcactttctttagtgagttatgacaatctacctctgaagtacaacatgttagagtcatttgctctggacaaagtcactttcaggaatggttttattacaatgaaaaggaataggtatactggctcttaagtgccactattgccctttatgagaatgagaactagattagctggcacgcttatatcccacactctttatgagccttatatgttttggggtattttcatcattttaatctggatgatgttattttcagaaacatcctaaaacaattttcaaagaagcaaggaaaaggttaacactgaacttgcataatattcagtcatgaaaatgcatttgaataca

SEQ ID NO: 426766 - DNA, 488 bp, Homo sapiens
tgttggccatgacagcagttagattatacccctttctactgaagcgttgtgctaagttttgggagggcaggagaaaatatcttcagcttgaaaaaaaaaatacttgaataaacaggtaatttttgtattaagatatacaatggtcactttctttagtgagttatgacaatctacctctgaagtacaacatgttagagtcatttgctctggacaaagtcactttcaggaatggttttattacaatgaaaaggaataggtatactggctcttaagtgccactawtgccctttatgagaatgagaactagattagctggcacgcttatatcccacactctttatgagccttatatgttttggggtattttcatcattttaatctggatgatgttattttcagaaacatcctaaaacaattttcaaagaagcaaggaaaaggttaacactgaacttgcataatattcagtcatgaaaatgcatttgaataca

SEQ ID NO: 426767 - DNA, 488 bp, Homo sapiens
tgttggccatgacagcagttagattatacccctttctactgaagcgttgtgctaagttttgggagggcaggagaaaatatcttcagcttgaaaaaaaaaatacttgaataaacaggtaatttttgtattaagatatacaatggtcactttctttagtgagttatgacaatctacctctgaagtacaacatgttagagtcatttgctctggacaaagtcactttcaggaatggttttattacaatgaaaaggaataggtatactggctcttaagtgccactattgccctttatgagaatgagaactagattagctggcacgcttatatcccacactctttatgagccttatatgttttggggtattttcatcattttaatctggatgatgttattttcagaaacatcctaaaacaattttcaaagaagcaaggaaaaggttaacactgaacttgcataatattcastcatgaaaatgcatttgaataca

SEQ ID NO: 426768 - DNA, 591 bp, Homo sapiens
tatacaatctaatttaaggcataagagataagtgtgttcaaggggagtagcgaaaaaagtgctcttaatttttctttttgattttttgctgtggttagtgttaatacatgtatattgaatggatatcttatttttaaacaacaaaaccttatttcaacaacaycaatctacatatacctgatattttatataatgcactaatgaaagcattgtgatgttaaaattagcattgtagaaaggaaattgataaatgtaactagcaaacattaattttgggggatgaatattttctaatctatttctgaaaaactattacttggttatactaatttatttgagggtaccttcccctgtatcatttttacctccacttttgaaagaagcaaacaatactccttctgaaaaataaattttaattctacagctttctatgacaacttttttgttattcataccaaagatgaagctatgcccataccttattgattatatatgcaaagagttctctatcaggaaagtttcaacatgaaagatttcttcccactgaggagtctctccattacagaaggtcaactggtaaatgttattctg

SEQ ID NO: 426769 - DNA, 553 bp, Homo sapiens
tacttggttatactaatttatttgagggtaccttcccctgtatcatttttacctccacttttgaaagaagcaaacaatactccttctgaaaaataaattttaattctacagctttctatgacaacttttttgttattcataccaaagatgaagctatgcccataccttattgattatatatgcaaagagttctctatcaggaaagtttcaacatgaaagatttcttcccactgaggagtctctccattacagaaggtcaactggtaaatgttattctgtttcyactaataaccatttgatcctcttttagattttcattcactctagtgttaaatgaatctttgctgaaaattattaaatcaaaactataataccttaatagagaaaaatgaatgttatgaggcagtatctcaccatcaaagttgcagggacatgtcttttcaaagtgaaatatatagcttatctagttaacaaaagggcagcaaattcctttgcaggtctaaaattgagccagcaaagtggtggtttacaaacagatgccagtttcaatttt

SEQ ID NO: 426770 - DNA, 553 bp, Homo sapiens
tacttggttatactaatttatttgagggtaccttcccctgtatcatttttacctccacttttgaaagaagcaaacaatactccttctgaaaaataaattttaattctacagctttctatgacaacttttttgttattcataccaaagatgaagctatgcccataccttattgattatatatgcaaagagttctctatcaggaaagtttcaacatgaaagatttcttcccactgaggagtctctccattacagaaggtcaactggtaaatgttattctgtttccactaataaccatttgatcctcttttagattttcattcactctagtgttaaatgaatctttgctgaaaattattaaatcaaaactataataccttaatagagaaaaatgaatgttatgaggcagtatctcaccatcaaagttgcagggacatgtcttttcaaagtgaaatatatagcttatctagttaacmaaagggcagcaaattcctttgcaggtctaaaattgagccagcaaagtggtggtttacaaacagatgccagtttcaatttt

SEQ ID NO: 426771 - DNA, 593 bp, Homo sapiens
acttttttgttattcataccaaagatgaagctatgcccataccttattgattatatatgcaaagagttctctatcaggaaagtttcaacatgaaagatttcttcccactgaggagtctctccattacagaaggtcaactggtaaatgttattctgtttccactaataaccatttgatcctcttttagattttcattcactctagtgttaaatgaatctttgctgaaaattattaaatcaaaactataataccttaatagagaaaaatgaatgttatgaggcagtatctcaccatcaaagttgcagggacatgtcttttcaaagtgaaatatatagcttatctagttaacaaaagggcagcaaattcctttgcaggtctaaaattgagccagcaaagtggtggtttacaaacagatgccagtttcaattttcatgttagatgatcaaatatatattgagtctgcataggaaatgctgttatcacaggattcaacacacaatgtcgaattcctgcatagagaaatttcattttttcattacrttctgtacatgcaaacttcctagctagtgtggagaaaacctaggaaaaaaaaa

SEQ ID NO: 426772 - DNA, 327 bp, Homo sapiens
aaaaatagataagactttttcctatcttaaaatagaactaaggtgacattttttttccacagccatattaatggatagcaaccttttcaatactgtttcctcataagtgtatggataaacggattccaaatatatttggttaaaagcaaggcaaacaaatatattgaattcagataaggactctaggtcagagatcaatcgaargtgggtcctgatttcaagactacattattttgtgctgagtgaaacaaatgaaagctaactaaagtaagtataaatgaaataagatttgtaatataggtaaagcaaagtgccctaggagagcag

SEQ ID NO: 426773 - DNA, 327 bp, Homo sapiens
aaaaatagataagactttttcctatcttaaaatagaactaaggtgacattttttttccacagccatattaatggatagcaaccttttcaatactgtttcctcataagtgtatggataaacggattccaaatatatttggttaaaagcaaggcaaacaaatatattgaattcagataaggactctaggtcagagatcaatcgaaagtgggtcctgatttcaagactacattatttwgtgctgagtgaaacaaatgaaagctaactaaagtaagtataaatgaaataagatttgtaatataggtaaagcaaagtgccctaggagagcag

SEQ ID NO: 426774 - DNA, 510 bp, Homo sapiens
tcaggctagtattttagaaggtatgcaaagtaaaggctatctttctgggccattgcaaagttgggaggtgattactgaataaaccaagcatcttcgggagaggagacaaaaacagtctgtgccatttcatttcgaggcctggaataaagastgatgacactaagagaaggtttggttctaaaatacttctttattttcctgatttttaggttttttgtttcaattggaaaattcctagtatttttgtgatgtcagtgaagaaactgatgattaaagagaaagaacatgagttaaacagaatgtacaattcagaaactaggttttcaattatagttatatttttaggaaaaaaaggtaatgcaaatctaattttaaaattcagtcaatacgaaagtgtgtaacacaaaataaaaagcaaaattaacctcacacctacctgttaaaagagtttccactgttagtaatttgcagtatttactttcataactttttctacatatgtataaacat

SEQ ID NO: 426775 - DNA, 510 bp, Homo sapiens
tcaggctagtattttagaaggtatgcaaagtaaaggctatctttctgggccattgcaaagttgggaggtgattactgaataaaccaagcatcttcgggagaggagacaaaaacagtctgtgccatttcatttcgaggcctggaataaagagtgatgacactaagagaaggtttggttctaaaatacttctttattttcctgatttttaggttttttgtttcaattggaaaattcctagtatttttgtgatgtcagtgaagaaactgatgattaaagagaaagaacatgagttaaacagaatgtacaattcagaaactaggttttcaattatagttatatttttaggaaaaaaaggtaatgcaaatctaattttaaaattcagtcaatacgaaagtgtgtaacacaaaataaaaagcaaaattaacctcacasctacctgttaaaagagtttccactgttagtaatttgcagtatttactttcataactttttctacatatgtataaacat

SEQ ID NO: 426776 - DNA, 594 bp, Homo sapiens
gtaaacaaattagacattaattaaatttaatgctgggcgggaaagaagtattcaaggccaggtaaaatgaagaaatataaccaaatgaatgaaatttttagattgattcatagaatgagacaggaatattttttaaaatttgtagtttctaatgaataacagcatataaaataagaatcatatggctgtcaattgactaaaaactgtacataagatttgagctagtgaaacaaccatatatgatcttctaattccacttttctatctcaagaatgacttgtkaaaatgattttttttttgaaattttacattctcatcttgaaagagcttcacaaaacttacatgagaatctggattgtcataagaggtctgattttttaatggtatgtttgtatttttgttatgtacatcaatgtcaagcattcgtttcctgagctgttctctacaacacaatttaacttgtaatggacactcagtaaatggtcggttggatattcaaatcaacaccttagttccatcaattttcacttcatataaaaatgcctgatcttctatactcatcaatgaaacagagagagatgaaggagggagagc

SEQ ID NO: 426777 - DNA, 642 bp, Homo sapiens
actaattacaaacgtttgggaacacttatcaataaaatgtataaaaccaattcattttctgccaataacatgatcatgtatgtctcaaatcacaaaagacgatgaattatgcaattatttttctcttgagatccttaaagattggagtaagaataaggaagttatattatttttccatagggactaaaacgtaatycacatgctttaatataatgggctgcttgtttgcctttctgtgagacaaggcaagcatatccaccatacacatggcattgatcagtcaataaatcttgctatgccaaaaccacaaatttaattggttcagcattagggatcccatatattagtttttctcacgaccaatcccatttgggaagattctaatacatcttcaaatgcaacttctctattgtaaaactgataggtctagaaaatgtggagaaatacagtgggaggagaggaaaaggggagaaaagagagatgagagaggggagagggaagaatggggagagagacaatatatgtttttaaacatttggaaaccatttgcttccttttttcttttacataaggcaaataagacaatatgcatagaagtactttatgtttcaattttgagaggaataagttaagaaatgtgat

SEQ ID NO: 426778 - DNA, 642 bp, Homo sapiens
actaattacaaacgtttgggaacacttatcaataaaatgtataaaaccaattcattttctgccaataacatgatcatgtatgtctcaaatcacaaaagacgatgaattatgcaattatttttctcttgagatccttaaagattggagtaagaataaggaagttatattatttttccatagggactaaaacgtaatccacatgctttaatataatgggctgcttgtttgcctttctgtgagacaaggcaagcatatccaccatacacatggcattgatcagtcaataaatcttgctatgccaaaaccacaaatttaattggktcagcattagggatcccatatattagtttttctcacgaccaatcccatttgggaagattctaatacatcttcaaatgcaacttctctattgtaaaactgataggtctagaaaatgtggagaaatacagtgggaggagaggaaaaggggagaaaagagagatgagagaggggagagggaagaatggggagagagacaatatatgtttttaaacatttggaaaccatttgcttccttttttcttttacataaggcaaataagacaatatgcatagaagtactttatgtttcaattttgagaggaataagttaagaaatgtgat

SEQ ID NO: 426779 - DNA, 642 bp, Homo sapiens
actaattacaaacgtttgggaacacttatcaataaaatgtataaaaccaattcattttctgccaataacatgatcatgtatgtctcaaatcacaaaagacgatgaattatgcaattatttttctcttgagatccttaaagattggagtaagaataaggaagttatattatttttccatagggactaaaacgtaatccacatgctttaatataatgggctgcttgtttgcctttctgtgagacaaggcaagcatatccaccatacacatggcattgatcagtcaataaatcttgctatgccaaaaccacaaatttaattggttcagcattagggatcccatatattagtttttctcaygaccaatcccatttgggaagattctaatacatcttcaaatgcaacttctctattgtaaaactgataggtctagaaaatgtggagaaatacagtgggaggagaggaaaaggggagaaaagagagatgagagaggggagagggaagaatggggagagagacaatatatgtttttaaacatttggaaaccatttgcttccttttttcttttacataaggcaaataagacaatatgcatagaagtactttatgtttcaattttgagaggaataagttaagaaatgtgat

SEQ ID NO: 426780 - DNA, 541 bp, Homo sapiens
tagaaattcagagttgctttgagttactgttattccatgagaaaaacagtattttatggatatttctaaacttaaaaagatagatctaaccaaagatggcttctcccagtgatttttgatctttctaggggcagtatatmatccattgcaggaagctgtggtgctatcagaagctgaaacatcaagaacccagattattcacattcccctgcctcctatctcctctctctctccttcccccactgccccactcattgatcatttactatttcttttcacagtgaattatgcttttatcatgaatagtatctaggtttataagtgtacagtaatataaattctaaattcttcggtttaaatgtattaattttctctcatactttacatcctagaatgattatcttggattatggtgttcctagacattcttggagtattctttatcccaaactatttcaaatttagagcttcaatatctaaaagactgttagtaaaattaatttattattttacctgctcacctctttgctacactgggtct

SEQ ID NO: 426781 - DNA, 541 bp, Homo sapiens
tagaaattcagagttgctttgagttactgttattccatgagaaaaacagtattttatggatatttctaaacttaaaaagatagatctaaccaaagatggcttctcccagtgatttttgatctttctaggggcagtatataatccattgcaggaagctgtggtgctatcagaagctgaaacatcaagaacccagattattcacattcccctgcctcctatctcctctctctctccttcccccactgccccactcattgatcatttactatttcttttcacagtgaattatgcttttatcatgaatagtatctaggtttataagtgtacagtaatataaattctaaattcttcggtttaaatgtattaattttctctcatactttacatcctagaaygattatcttggattatggtgttcctagacattcttggagtattctttatcccaaactatttcaaatttagagcttcaatatctaaaagactgttagtaaaattaatttattattttacctgctcacctctttgctacactgggtct

SEQ ID NO: 426782 - DNA, 460 bp, Homo sapiens
ccccccatagtttttctttcatctaaacaaatgatggaccatttaaaacagaaatttcatgcccacattcttagtgtttaaatctcttcatttatgttctaccttccatgatgatcacaagtactggatcactgtaccaattttttttctctttctgtatcttgatatcagaatgacattagaggaaaccacgtatttgtgtagattatgacactctaaacctcatctggtctatatgaactagttaaacatgatctttatcagtcaccttttccatttcccacataagttattccaaatggatacaaagcacctcaagtccctcatatttccaccgctacaaatgcaaagggtgaatataatcatatgggaaattgtggttattagtaagattccttcaatgtcctgtctgtatctctttatataacamataaaaagaaaagcagccgaattagaattt

SEQ ID NO: 426783 - DNA, 564 bp, Homo sapiens
cagcactccagcctgggcaacagaggaagaaagagactctgtctcataaaataaaaataaaattctgagtctgactttcagaaatgttgatgtaattgatctggggtacctagacattgagattttaaaaatatttcaggtgcccctaaaaggttcaggcaatctgaaagttaggaagcacaagaatgaattttagtatcagggtattcaaaggtggtttcatattagaatyaccaggagagcaatttttaaatactattgtagacccaaacccatttcaactgaataagaatctctgaggttggatttcaggaattcgtatttttttaaagttccgcaggtgatgcttatgtgtaggcaaggttgaaaaccattgctttagtagtttcatctcaatgaatggcactgttttccacacaattgctcatccaggactgggagtcatgttaaacccagactttatcctcacctttctcttattccacactcaaataaaatccacatcccatgaatcctacatttataaaatattccttttaaacatcttcttttgaatgtctaatg

SEQ ID NO: 426784 - DNA, 559 bp, Homo sapiens
cgtttcttgtctttttaaaaataatttaaatttagagcaataatctgttatattatcctctgtttttaatattgattcatataatttcttagtgtgctgcttcttttgttctttcaagaaaaatgaaactacccagagatggatttscaatctaggttttcactaccttttgtgcccctgagagccagtaaatccagtctgttttgataatattttagccatgacacaggccagtcatggcaaggaaaaaaaatgaattcataagaaaaaaatctgtatatttgtgaaaaaatcaggatctatcatatcccaagtttatttggtggcattaacatataatagtccatttgcttactccccataaatatgtaaaaaggcaaagagaaagtaaaaaataaaattattcttccactcacacaagtggctgaataggcctaatcaatattaacttcattgttcccccataattctatatgtttagcttttaaacctctatcttttaaatatgctatttttattaatttgaagttaatcaactaaaataggttcattcctttca

SEQ ID NO: 426785 - DNA, 559 bp, Homo sapiens
cgtttcttgtctttttaaaaataatttaaatttagagcaataatctgttatattatcctctgtttttaatattgattcatataatttcttagtgtgctgcttcttttgttctttcaagaaaaatgaaactacccagagatggatttgcaatctargttttcactaccttttgtgcccctgagagccagtaaatccagtctgttttgataatattttagccatgacacaggccagtcatggcaaggaaaaaaaatgaattcataagaaaaaaatctgtatatttgtgaaaaaatcaggatctatcatatcccaagtttatttggtggcattaacatataatagtccatttgcttactccccataaatatgtaaaaaggcaaagagaaagtaaaaaataaaattattcttccactcacacaagtggctgaataggcctaatcaatattaacttcattgttcccccataattctatatgtttagcttttaaacctctatcttttaaatatgctatttttattaatttgaagttaatcaactaaaataggttcattcctttca

SEQ ID NO: 426786 - DNA, 559 bp, Homo sapiens
cgtttcttgtctttttaaaaataatttaaatttagagcaataatctgttatattatcctctgtttttaatattgattcatataatttcttagtgtgctgcttcttttgttctttcaagaaaaatgaaactacccagagatggatttgcaatctaggttttcactaccttttgtgcycctgagagccagtaaatccagtctgttttgataatattttagccatgacacaggccagtcatggcaaggaaaaaaaatgaattcataagaaaaaaatctgtatatttgtgaaaaaatcaggatctatcatatcccaagtttatttggtggcattaacatataatagtccatttgcttactccccataaatatgtaaaaaggcaaagagaaagtaaaaaataaaattattcttccactcacacaagtggctgaataggcctaatcaatattaacttcattgttcccccataattctatatgtttagcttttaaacctctatcttttaaatatgctatttttattaatttgaagttaatcaactaaaataggttcattcctttca

SEQ ID NO: 426787 - DNA, 571 bp, Homo sapiens
aaaaaatcaggatctatcatatcccaagtttatttggtggcattaacatataatagtccatttgcttactccccataaatatgtaaaaaggcaaagagaaagtaaaaaataaaattattcttccactcacacaagtggctgaataggcctaatcaatattmacttcattgttcccccataattctatatgtttagcttttaaacctctatcttttaaatatgctatttttattaatttgaagttaatcaactaaaataggttcattcctttcactttaccagtattacaagtgactgtctaggagcctgagttctaatgaggcagccattccaaacatgtacagacaaagcagtggtttccctggcaacgagaaccatgaaaaagctcttagaatagttattcccacccttacacacaactccttttcatttcagtaaagcttcctgtcagaacacattcatcaatgtaatttgccaacaaagtttaagagattaaatccccctccccacaagaatgtaaaaataaaaaaaacaaaataaaacctacaatcaaaaatcaacagctatgctg

SEQ ID NO: 426788 - DNA, 571 bp, Homo sapiens
aaaaaatcaggatctatcatatcccaagtttatttggtggcattaacatataatagtccatttgcttactccccataaatatgtaaaaaggcaaagagaaagtaaaaaataaaattattcttccactcacacaagtggctgaataggcctaatcaatattaacttcattgttcccccataattctatatgtttagcttttaaacmtctatcttttaaatatgctatttttattaatttgaagttaatcaactaaaataggttcattcctttcactttaccagtattacaagtgactgtctaggagcctgagttctaatgaggcagccattccaaacatgtacagacaaagcagtggtttccctggcaacgagaaccatgaaaaagctcttagaatagttattcccacccttacacacaactccttttcatttcagtaaagcttcctgtcagaacacattcatcaatgtaatttgccaacaaagtttaagagattaaatccccctccccacaagaatgtaaaaataaaaaaaacaaaataaaacctacaatcaaaaatcaacagctatgctg

SEQ ID NO: 426789 - DNA, 535 bp, Homo sapiens
ggatctatcatatcccaagtttatttggtggcattaacatataatagtccatttgcttactccccataaatatgtaaaaaggcaaagagaaagtaaaaaataaaattattcttccactcacacaagtggctgaataggcctaatcaatattaacttcattgttcccccataattctatatgtttagcttttaaacctctatcttttaaatatgctatttttattaatttgaagttaatcaactaaaatasgttcattcctttcactttaccagtattacaagtgactgtctaggagcctgagttctaatgaggcagccattccaaacatgtacagacaaagcagtggtttccctggcaacgagaaccatgaaaaagctcttagaatagttattcccacccttacacacaactccttttcatttcagtaaagcttcctgtcagaacacattcatcaatgtaatttgccaacaaagtttaagagattaaatccccctccccacaagaatgtaaaaataaaaaaaacaaaataaaacc

SEQ ID NO: 426790 - DNA, 571 bp, Homo sapiens
aaaaaatcaggatctatcatatcccaagtttatttggtggcattaacatataatagtccatttgcttactccccataaatatgtaaaaaggcaaagagaaagtaaaaaataaaattattcttccactcacacaagtggctgaataggcctaatcaatattaacttcattgttcccccataattctatatgtttagcttttaaacctctatcttttaaatatgctatttttattaatttgaagttaatcaactaaaataggttcattcctttcactttaccastattacaagtgactgtctaggagcctgagttctaatgaggcagccattccaaacatgtacagacaaagcagtggtttccctggcaacgagaaccatgaaaaagctcttagaatagttattcccacccttacacacaactccttttcatttcagtaaagcttcctgtcagaacacattcatcaatgtaatttgccaacaaagtttaagagattaaatccccctccccacaagaatgtaaaaataaaaaaaacaaaataaaacctacaatcaaaaatcaacagctatgctg

SEQ ID NO: 426791 - DNA, 571 bp, Homo sapiens
aaaaaatcaggatctatcatatcccaagtttatttggtggcattaacatataatagtccatttgcttactccccataaatatgtaaaaaggcaaagagaaagtaaaaaataaaattattcttccactcacacaagtggctgaataggcctaatcaatattaacttcattgttcccccataattctatatgtttagcttttaaacctctatcttttaaatatgctatttttattaatttgaagttaatcaactaaaataggttcattcctttcactttaccagtattacaagtgactgtctaggagcctgagttctaatgaggcagccattccaaacatgtacagacaaagcagtggtttccctggcaacgagaaccatgaaaaagctcwtagaatagttattcccacccttacacacaactccttttcatttcagtaaagcttcctgtcagaacacattcatcaatgtaatttgccaacaaagtttaagagattaaatccccctccccacaagaatgtaaaaataaaaaaaacaaaataaaacctacaatcaaaaatcaacagctatgctg

SEQ ID NO: 426792 - DNA, 535 bp, Homo sapiens
ggatctatcatatcccaagtttatttggtggcattaacatataatagtccatttgcttactccccataaatatgtaaaaaggcaaagagaaagtaaaaaataaaattattcttccactcacacaagtggctgaataggcctaatcaatattaacttcattgttcccccataattctatatgtttagcttttaaacctctatcttttaaatatgctatttttattaatttgaagttaatcaactaaaataggttcattcctttcactttaccagtattacaagtgactgtctaggagcctgagttctaatgaggcagccattccaaacatgtacagacaaagcagtggtttccctggcaacgagaaccatgaaaaagctcttagaatagttattcccacccttacacacaactccttytcatttcagtaaagcttcctgtcagaacacattcatcaatgtaatttgccaacaaagtttaagagattaaatccccctccccacaagaatgtaaaaataaaaaaaacaaaataaaacc

SEQ ID NO: 426793 - DNA, 589 bp, Homo sapiens
taacaccactttgaacctgagattaattttcatttgatttttatcagaggatacagaaggtagatgcatcaggaggaggggcaggtgcctttaatcattacctctagcattatcacttacaacctcaaagcagcttttatttaatttagtaaaagtttataaaaatttaaattattgtatgcatcaaattaagatttaagatgtccttcataaacattaaccttttgttggtgatgtttaccaagaaaggtaaactctgaaaacatgatgtcatcgtttcaattggtggaattaagtaaaagattttcaaatgaarcacttgaacctattttctatctatgcatgcagtagaaaaaagcacacaaaacaggcagcattttgtgtcatgtggcatttcaaacaagagggaaaacacatctggaaataaaaggtgtttagttgaaagaattgaccttaaataaaacaattgcaacacttgatttgggcttcttactggaaatcaaattctttgagtttaaaatacacctactaaatgtaatacaaaaccaaaataacacactttcagcatttctcaaaatgttagcaccca

SEQ ID NO: 426794 - DNA, 608 bp, Homo sapiens
atgtggttagcatttcttctcttctctggtgagataattcrttacttaggacagctgtggtataaaaactcaaacattgtcttttgcagaatggatttgaaaagtgggcccccattctatttttgttagaaaataataaaatcacaaattttatcatgtatcaaaaatgaaaagtgaaatataaatgtgaaaggtctgatatttacttaatgaatatttaccaaatacttagcatttgcatattaagtacaagcctcagggaaaaaaatgtagccgtgtttaaatctcaactttatttcttccccttgctttattttttgaaaaataagaaatattcacattaaagaaaaaagagaacatatttaaaaatattttcatctatattctagtctaaccagagtatctataatttatattagttaccaaatgtattagacaaattaaaacacaagagtttttattattataatgcttttttaaaatatggacattcacaattttatgcttacaagagaatatataattcaagtactcccatgaaataaagtaccagttctctacaatcaaacctacagtgctaaacgtcagctgaaaattacttataaaac

SEQ ID NO: 426795 - DNA, 542 bp, Homo sapiens
tctcattaactgactaaaaaactgtaccatctccagaggtatagatattaaaaagcgrgggagggggatgattccttttaaagctccagaaatgaatgtaagtgttcatattctggtacattaacagtttgttccagtacattgatattttatgtggaagccctactctgcaattaatatgcctgatgcaaattgaaaaacccataatccatccttctctgttggaatgtaagagtatattattattgagaagctacaggataccagaaccattttttaaacttgactgctcactaccttaaatctgcatataaaacagttttgcattcagacgaggtaatacataccggaatatattgtggcgcatattaaaaaaagtgctccaaataaaaacgacctgtgggcttcctttgtagaagaaatttatgcagttccaggcattagggattaatgatagctaagagcaaaagagaaggaatgagcattaaaacattgtgcctaactttcctgactaccccaaggctaaaagacaaagtgaattg

SEQ ID NO: 426796 - DNA, 542 bp, Homo sapiens
tctcattaactgactaaaaaactgtaccatctccagaggtatagatattaaaaagcgggggagggggatgattccttttaaagctccagaaatgaatgtaagtgttcatattctggtacattaacagtttgttccagtacattgatattttatgtggaagccctactctgcaattaatatgcctgatgcaaattgaaaaacccataatccatccttctctgttggaatgtaagagtatattattattgagaagctacaggataccagaaccrttttttaaacttgactgctcactaccttaaatctgcatataaaacagttttgcattcagacgaggtaatacataccggaatatattgtggcgcatattaaaaaaagtgctccaaataaaaacgacctgtgggcttcctttgtagaagaaatttatgcagttccaggcattagggattaatgatagctaagagcaaaagagaaggaatgagcattaaaacattgtgcctaactttcctgactaccccaaggctaaaagacaaagtgaattg

SEQ ID NO: 426797 - DNA, 474 bp, Homo sapiens
gcacttaatctaattagggatttttggagaaatggtggttacatagttctcattaactgactaaaaaactgtaccatctccagaggtatagatattaaaaagcgggggagggggatgattccttttaaagctccagaaatgaatgtaagtgttcatattctggtacattaacagtttgttccagtacattgatattttatgtggaagccctactctgcaattaatatgcctgatgcaaattgaaaaacccataatccatccttctctgttggaatgtaagagtatattattattgagaagctacaggataccagaaccattttttaaacttgastgctcactaccttaaatctgcatataaaacagttttgcattcagacgaggtaatacataccggaatatattgtggcgcatattaaaaaaagtgctccaaataaaaacgacctgtgggcttcctttgtagaagaaatttat

SEQ ID NO: 426798 - DNA, 542 bp, Homo sapiens
tctcattaactgactaaaaaactgtaccatctccagaggtatagatattaaaaagcgggggagggggatgattccttttaaagctccagaaatgaatgtaagtgttcatattctggtacattaacagtttgttccagtacattgatattttatgtggaagccctactctgcaattaatatgcctgatgcaaattgaaaaacccataatccatccttctctgttggaatgtaagagtatattattattgagaagctacaggataccagaaccattttttaaacttgactgctcaytaccttaaatctgcatataaaacagttttgcattcagacgaggtaatacataccggaatatattgtggcgcatattaaaaaaagtgctccaaataaaaacgacctgtgggcttcctttgtagaagaaatttatgcagttccaggcattagggattaatgatagctaagagcaaaagagaaggaatgagcattaaaacattgtgcctaactttcctgactaccccaaggctaaaagacaaagtgaattg

SEQ ID NO: 426799 - DNA, 474 bp, Homo sapiens
gcacttaatctaattagggatttttggagaaatggtggttacatagttctcattaactgactaaaaaactgtaccatctccagaggtatagatattaaaaagcgggggagggggatgattccttttaaagctccagaaatgaatgtaagtgttcatattctggtacattaacagtttgttccagtacattgatattttatgtggaagccctactctgcaattaatatgcctgatgcaaattgaaaaacccataatccatccttctctgttggaatgtaagagtatattattattgagaagctacaggataccagaaccattttttaaacttgactgctcactaccttaaatctgcatataaaacagttttgcattcagacgaggtaatacatamcggaatatattgtggcgcatattaaaaaaagtgctccaaataaaaacgacctgtgggcttcctttgtagaagaaatttat

SEQ ID NO: 426800 - DNA, 542 bp, Homo sapiens
tctcattaactgactaaaaaactgtaccatctccagaggtatagatattaaaaagcgggggagggggatgattccttttaaagctccagaaatgaatgtaagtgttcatattctggtacattaacagtttgttccagtacattgatattttatgtggaagccctactctgcaattaatatgcctgatgcaaattgaaaaacccataatccatccttctctgttggaatgtaagagtatattattattgagaagctacaggataccagaaccattttttaaacttgactgctcactaccttaaatctgcatataaaacagttttgcattcagacgaggtaatacataccrgaatatattgtggcgcatattaaaaaaagtgctccaaataaaaacgacctgtgggcttcctttgtagaagaaatttatgcagttccaggcattagggattaatgatagctaagagcaaaagagaaggaatgagcattaaaacattgtgcctaactttcctgactaccccaaggctaaaagacaaagtgaattg

SEQ ID NO: 426801 - DNA, 595 bp, Homo sapiens
aaaacccataatccatccttctctgttggaatgtaagagtatattattattgagaagctacaggataccagaaccattttttaaacttgactgctcactaccttaaatctgcatataaaacagttttgcattcagacgaggtaatacataccggaatatattgtggcgcmtattaaaaaaagtgctccaaataaaaacgacctgtgggcttcctttgtagaagaaatttatgcagttccaggcattagggattaatgatagctaagagcaaaagagaaggaatgagcattaaaacattgtgcctaactttcctgactaccccaaggctaaaagacaaagtgaattgtcaaatctccttaaaggtaaggactatgaatttatattaagtaaatatgatatttggggattgcatctggttctgtcacattagtattcagaatatttcttatagctttaaaggagaaaagacaaccttaatggaggtatgagagaagaaagattttaaaaatcctttgtttctaacagcttagagagcctctttcctttgtcttgtttccaaaattatgcatacaattcttcacaggacataaaatgc

SEQ ID NO: 426802 - DNA, 474 bp, Homo sapiens
gcacttaatctaattagggatttttggagaaatggtggttacatagttctcattaactgactaaaaaactgtaccatctccagaggtatagatattaaaaagcgggggagggggatgattccttttaaagctccagaaatgaatgtaagtgttcatattctggtacattaacagtttgttccagtacattgatattttatgtggaagccctactctgcaattaatatgcctgatgcaaattgaaaaacccataatccatccttctctgttggaatgtaagagtatattattattgagaagctacaggataccagaaccattttttaaacttgactgctcactaccttaaatctgcatataaaacagttttgcattcagacgaggtaatacataccggaatatattgtggcgcatatwaaaaaaagtgctccaaataaaaacgacctgtgggcttcctttgtagaagaaatttat

SEQ ID NO: 426803 - DNA, 595 bp, Homo sapiens
aaaacccataatccatccttctctgttggaatgtaagagtatattattattgagaagctacaggataccagaaccattttttaaacttgactgctcactaccttaaatctgcatataaaacagttttgcattcagacgaggtaatacataccggaatatattgtggcgcatattaaaaaaagtgctccaaataaaaacgacctgtgggcttcctttgtagaagaaatttatgcagttccaggcattagggattaatgatagctaagagcaaaagagaaggaatgagcattaaaacattgtgcctaactttcctgactaccccaaggctaaaagacaaagtgaattgtcaaatctccttaaaggtaaggactatgaatttatattaagtaaatatgatatttggggattgyatctggttctgtcacattagtattcagaatatttcttatagctttaaaggagaaaagacaaccttaatggaggtatgagagaagaaagattttaaaaatcctttgtttctaacagcttagagagcctctttcctttgtcttgtttccaaaattatgcatacaattcttcacaggacataaaatgc

SEQ ID NO: 426804 - DNA, 628 bp, Homo sapiens
aagcctgttcaattcatttgatcatcaccgcctgtgatctgggttttattaacatttyagcatttgattggacccttcttacctctctgtctatccatcacttaagacatttagtgctgcctactggcagttatctgtgtaattgttttatttcactcactaagtgataagatccttgaggcaagacgctatgccatatggcctgtatcttccacaacaagtaatcacattgattcaaaagattccctcacaatacatttttattgcaaaaatgattttgtatttatccattttggaaaagaaattttatctcttgagcccctaaaaatggaattgtacacattaagacccttacacatatcacataataatcttcagggtcaaacattatagttttcacctgctgctattcctttgcagtagactagaatagagaattatataaaacttctatgactgtcaaaaaaatgatatattttttgaaatcatgtaaaatcaaccttctttattttacagatatagaaatttagatctgtaaggaccatcagtgtggtgaaggtcacatggtaagttaattacagaatcaaatttttccctttcatttcaatctgtttttaagttttacatg

SEQ ID NO: 426805 - DNA, 573 bp, Homo sapiens
cctctctgtctatccatcacttaagacatttagtgctgcctactggcagttatctgtgtaattgttttatttcactcactaagtgataagatccttgaggcaagacgctatgcsatatggcctgtatcttccacaacaagtaatcacattgattcaaaagattccctcacaatacatttttattgcaaaaatgattttgtatttatccattttggaaaagaaattttatctcttgagcccctaaaaatggaattgtacacattaagacccttacacatatcacataataatcttcagggtcaaacattatagttttcacctgctgctattcctttgcagtagactagaatagagaattatataaaacttctatgactgtcaaaaaaatgatatattttttgaaatcatgtaaaatcaaccttctttattttacagatatagaaatttagatctgtaaggaccatcagtgtggtgaaggtcacatggtaagttaattacagaatcaaatttttccctttcatttcaatctgtttttaagttttacatgattccactttcaggaaaaagcaatta

SEQ ID NO: 426806 - DNA, 628 bp, Homo sapiens
aagcctgttcaattcatttgatcatcaccgcctgtgatctgggttttattaacatttcagcatttgattggacccttcttacctctctgtctatccatcacttaagacatttagtgctgcctactggcagttatctgtgtaattgttttatttcactcactaagtgataagatccttgaggcaagacgctatgccatatggcctgtatcttccacaayaagtaatcacattgattcaaaagattccctcacaatacatttttattgcaaaaatgattttgtatttatccattttggaaaagaaattttatctcttgagcccctaaaaatggaattgtacacattaagacccttacacatatcacataataatcttcagggtcaaacattatagttttcacctgctgctattcctttgcagtagactagaatagagaattatataaaacttctatgactgtcaaaaaaatgatatattttttgaaatcatgtaaaatcaaccttctttattttacagatatagaaatttagatctgtaaggaccatcagtgtggtgaaggtcacatggtaagttaattacagaatcaaatttttccctttcatttcaatctgtttttaagttttacatg

SEQ ID NO: 426807 - DNA, 573 bp, Homo sapiens
cctctctgtctatccatcacttaagacatttagtgctgcctactggcagttatctgtgtaattgttttatttcactcactaagtgataagatccttgaggcaagacgctatgccatatggcctgtatcttccacaacaagtaatcacattgattcaaaagattcyctcacaatacatttttattgcaaaaatgattttgtatttatccattttggaaaagaaattttatctcttgagcccctaaaaatggaattgtacacattaagacccttacacatatcacataataatcttcagggtcaaacattatagttttcacctgctgctattcctttgcagtagactagaatagagaattatataaaacttctatgactgtcaaaaaaatgatatattttttgaaatcatgtaaaatcaaccttctttattttacagatatagaaatttagatctgtaaggaccatcagtgtggtgaaggtcacatggtaagttaattacagaatcaaatttttccctttcatttcaatctgtttttaagttttacatgattccactttcaggaaaaagcaatta

SEQ ID NO: 426808 - DNA, 575 bp, Homo sapiens
ttccacaacaagtaatcacattgattcaaaagattccctcacaatacatttttattgcaaaaatgattttgtatttatccattttggaaaagaaattttatctcttgagcccctaaaaatggaattgtacacattaagacccttacacatatcacataataatcttcagggtcaaacattatagttttcacctgctgctattcctttgcagtagactagaatagagaattatataaaacttctatgactgtcaaaaaaatgatatattttttgaaatcatgtaaaatcaaccttctttattttacagatatagaaatttagatctgtaaggaccatcagtgtggtgaaggtcacatggtaagttaattacagaatcaaatttttccctttcatttcaatctgtttttaagttttacatgattccactttcaggaaaaagcaattaaaatacagactgrctttggtaagagtgatatatatttttatgtttcagaccagcatgttgtttcatgctgatgttaaaagataatggttgatatcagataaatacccacacatacacacaaacacaaact

SEQ ID NO: 426809 - DNA, 511 bp, Homo sapiens
atataccaactttgcagggtattgcaggaagttcagagagggaaagaaagaggaactataaatagttatcataaattacagctaaatattttagtttagcataaagagggtatgatgartgtaaacaacatcacatatagttcaaagtagagttgtggaattacttttccatgacaatgtttaagaattgtacagctttgctgttatctagtgatgtgtccccacccaaatctcaccatgaattcccatgtgttgtcagagggacctggtgggaggtaattaaatcatgggagcaggtctttcccatgctgttctcatgatagtaaatttcatgtgatctgataattttataaagggaagtttccctgcacaagctctcttctcttgtctgctgccatgtgagacatgcctctcaccttctgcaatgattatgaggcctccccagccacatggaactgtaagatcattaaacctctttcttttgtaaattgcccagtcttgggtatgtctt

SEQ ID NO: 426810 - DNA, 511 bp, Homo sapiens
atataccaactttgcagggtattgcaggaagttcagagagggaaagaaagaggaactataaatagttatcataaattacagctaaatattttagtttagcataaagagggtatgatgaatgtaaacaacatcacatatagttcaaagtagagttgtggaattacttttccatgacaatgtttaagaattgtacagctttgctgttatctagtgatgtgtccccacccaaatctcaccatgaattcccatgtgttgtcagagggacctggtgggaggtaattaaatcatgggagcaggtctttcccatgctgttctcatgatagtaartttcatgtgatctgataattttataaagggaagtttccctgcacaagctctcttctcttgtctgctgccatgtgagacatgcctctcaccttctgcaatgattatgaggcctccccagccacatggaactgtaagatcattaaacctctttcttttgtaaattgcccagtcttgggtatgtctt

SEQ ID NO: 426811 - DNA, 569 bp, Homo sapiens
tgacatttttgttcacaaaaatagtaaaagtaaaggaaaaaggtagataatataccaactttgcagggtattgcaggaagttcagagagggaaagaaagaggaactataaatagttatcataaattacagctaaatattttagtttagcataaagagggtatgatgaatgtaaacaacatcacatatagttcaaagtagagttgtggaattacttttccatgacaatgtttaagaattgtacagctttgctgttatctagtgatgtgtccccacccaaatctcaccatgaattcccatgtgttgtcagagggacctggtgggaggtaattaaatcatgggagcaggtctttcccatgctgttctcatgatagtaaatttcatgtgatctgataattttataaagggaagtttccctgcacaagctctcttctcttgtctgctgccatgtgagacatgyctctcaccttctgcaatgattatgaggcctccccagccacatggaactgtaagatcattaaacctctttcttttgtaaattgcccagtcttgggtatgtctttatcagcag

SEQ ID NO: 426812 - DNA, 569 bp, Homo sapiens
tgacatttttgttcacaaaaatagtaaaagtaaaggaaaaaggtagataatataccaactttgcagggtattgcaggaagttcagagagggaaagaaagaggaactataaatagttatcataaattacagctaaatattttagtttagcataaagagggtatgatgaatgtaaacaacatcacatatagttcaaagtagagttgtggaattacttttccatgacaatgtttaagaattgtacagctttgctgttatctagtgatgtgtccccacccaaatctcaccatgaattcccatgtgttgtcagagggacctggtgggaggtaattaaatcatgggagcaggtctttcccatgctgttctcatgatagtaaatttcatgtgatctgataattttataaagggaagtttccctgcacaagctctcttctcttgtctgctgccatgtgagacatgcctctcaccttctgcaatgattrtgaggcctccccagccacatggaactgtaagatcattaaacctctttcttttgtaaattgcccagtcttgggtatgtctttatcagcag

SEQ ID NO: 426813 - DNA, 482 bp, Homo sapiens
ctgctctggtgacagtgaataagtctcatgagacctgatggttttataaaggagactttccctgaacaagctctcttctcttatttgctgccatgtgagatttgcctttaaacttccaacacaattgtgaggcatccccagccacctggaactgtaagtccattaaacctkcttcttttgtaaattgcctagtcttgggtatatttttatcagcagcgtgaaaacagactaatacagctagggtggttaagatagagatatgggcaagatagaaatccttaacaataaatacatacattacattgtttcttccatctaggatggttcttttaacctacaggtaatcactttgtgtgtttcattaaggtattttcaaaatctctttgaacagcataacttttaaaagcaagtactaatactttataaaagtatttcataaagtagtttacagtaactgaggttgatttgtgccgttaaggaaa

SEQ ID NO: 426814 - DNA, 482 bp, Homo sapiens
ctgctctggtgacagtgaataagtctcatgagacctgatggttttataaaggagactttccctgaacaagctctcttctcttatttgctgccatgtgagatttgcctttaaacttccaacacaattgtgaggcatccccagccacctggaactgtaagtccattaaaccttcttcytttgtaaattgcctagtcttgggtatatttttatcagcagcgtgaaaacagactaatacagctagggtggttaagatagagatatgggcaagatagaaatccttaacaataaatacatacattacattgtttcttccatctaggatggttcttttaacctacaggtaatcactttgtgtgtttcattaaggtattttcaaaatctctttgaacagcataacttttaaaagcaagtactaatactttataaaagtatttcataaagtagtttacagtaactgaggttgatttgtgccgttaaggaaa

SEQ ID NO: 426815 - DNA, 482 bp, Homo sapiens
ctgctctggtgacagtgaataagtctcatgagacctgatggttttataaaggagactttccctgaacaagctctcttctcttatttgctgccatgtgagatttgcctttaaacttccaacacaattgtgaggcatccccagccacctggaactgtaagtccattaaaccttcttcttttgtaaattgcctagtcttgggtatatttttatcagcagcgtgaaaacagactaatacagctagggtggttaagatagagatatgggcaagatagaaatccttaacaayaaatacatacattacattgtttcttccatctaggatggttcttttaacctacaggtaatcactttgtgtgtttcattaaggtattttcaaaatctctttgaacagcataacttttaaaagcaagtactaatactttataaaagtatttcataaagtagtttacagtaactgaggttgatttgtgccgttaaggaaa

SEQ ID NO: 426816 - DNA, 583 bp, Homo sapiens
aaacaaccaagtacatgctgctaaaaacaccttgcagataaaaaccctcccactagctaacgtaactagcttgtttgcaaaaagtctgcttttagcatgtttacaaatgyattagtctgctagggctattataacaaagtatcatcaaccaggtggcttaagagtgggaatttattttctcacagttctggaggctagaagtctaagatcaaggtgtcaacaggtttggttcctcctgcgacctctctcctttgcttgcacatggctgcctccttactgtgttctcacattgccttttcttgatgcaagcacttcactggtgtcttttcctcttcttaaaaggacaccagtcctattggactagggtcccattcatatgaccttaattaaccttaattacctctttaaaggccatatctccaaatgcagtcactttgcgggttagagactcaacatataggttataggggaacttgatttatttcataacaacagggatatgacttttatttccttgtcctctatataaaggaagagcctagatagcagatctgcttcccatcctttttttctcaacgaagaa

SEQ ID NO: 426817 - DNA, 648 bp, Homo sapiens
tttctcacagttctggaggctagaagtctaagatcaaggtgtcaacaggtttggttcctcctgcgrcctctctcctttgcttgcacatggctgcctccttactgtgttctcacattgccttttcttgatgcaagcacttcactggtgtcttttcctcttcttaaaaggacaccagtcctattggactagggtcccattcatatgaccttaattaaccttaattacctctttaaaggccatatctccaaatgcagtcactttgcgggttagagactcaacatataggttataggggaacttgatttatttcataacaacagggatatgacttttatttccttgtcctctatataaaggaagagcctagatagcagatctgcttcccatcctttttttctcaacgaagaaggatttatgttttccaaaaacaaaaaaaaacaaaaaactcttgaattttatctcacgagagcaaataaattcaatcattcagcccctaaatgcctcaaaagtctgtagaatagagcagcttcaaaagaacaagtgggaagtaatgaggaagagtaagagacaaagcttcacaaaggctgtgttaaagaagaactcttactcctagtgaattctgagatgatatcacagactcaatttata

SEQ ID NO: 426818 - DNA, 583 bp, Homo sapiens
aaacaaccaagtacatgctgctaaaaacaccttgcagataaaaaccctcccactagctaacgtaactagcttgtttgcaaaaagtctgcttttagcatgtttacaaatgtattagtctgctagggctattataacaaagtatcatcaaccaggtggcttaagagtgggaatttattttctcacagttctggaggctagaagtctaagatcaaggtgtcaacaggtttggttcctcctgcgacctctctcctttgcttgcacatggcygcctccttactgtgttctcacattgccttttcttgatgcaagcacttcactggtgtcttttcctcttcttaaaaggacaccagtcctattggactagggtcccattcatatgaccttaattaaccttaattacctctttaaaggccatatctccaaatgcagtcactttgcgggttagagactcaacatataggttataggggaacttgatttatttcataacaacagggatatgacttttatttccttgtcctctatataaaggaagagcctagatagcagatctgcttcccatcctttttttctcaacgaagaa

SEQ ID NO: 426819 - DNA, 435 bp, Homo sapiens
catatatccatagattctagggttgctttttttttttttttaacacaggagatgctaaacaaccaagtacatgctgctaaaaacaccttgcagataaaaaccctcccactagctaacgtaactagcttgtttgcaaaaagtctgcttttagcatgtttacaaatgtattagtctgctagggctattataacaaagtatcatcaaccaggtggcttaagagtgggaatttattttctcacagttctggaggctagaagtctaagatcaaggtgtcaacaggtttggttcctcctgcgacctctctcctttgcttgcacatggctgcctccttactgtgttctcacattgccttttcttgatgmaagcacttcactggtgtcttttcctcttcttaaaaggacaccagtcctattggactagggtcccattcatatg

SEQ ID NO: 426820 - DNA, 648 bp, Homo sapiens
tttctcacagttctggaggctagaagtctaagatcaaggtgtcaacaggtttggttcctcctgcgacctctctcctttgcttgcacatggctgcctccttactgtgttctcacattgccttttcttgatgcaagcacttcactggtgtcttttcctcttcttaaaaggacaccagtcctattggactagggtcccattcatatgaccttaattaaccttaattacctctttaaaggccrtatctccaaatgcagtcactttgcgggttagagactcaacatataggttataggggaacttgatttatttcataacaacagggatatgacttttatttccttgtcctctatataaaggaagagcctagatagcagatctgcttcccatcctttttttctcaacgaagaaggatttatgttttccaaaaacaaaaaaaaacaaaaaactcttgaattttatctcacgagagcaaataaattcaatcattcagcccctaaatgcctcaaaagtctgtagaatagagcagcttcaaaagaacaagtgggaagtaatgaggaagagtaagagacaaagcttcacaaaggctgtgttaaagaagaactcttactcctagtgaattctgagatgatatcacagactcaatttata

SEQ ID NO: 426821 - DNA, 648 bp, Homo sapiens
tttctcacagttctggaggctagaagtctaagatcaaggtgtcaacaggtttggttcctcctgcgacctctctcctttgcttgcacatggctgcctccttactgtgttctcacattgccttttcttgatgcaagcacttcactggtgtcttttcctcttcttaaaaggacaccagtcctattggactagggtcccattcatatgaccttaattaaccttaattacctctttaaaggccatatctccaaatgcagtcactttgcgggttagagactcaacatataggttataggggaacttgatttatttcataacaacagggatatgacttttatttccttgtcctctatataaaggaagagcctagatagcagatctgcttcccatcctttttttctcaacgaagaaggatttatgttttccaaaaacaaaaaaaaacaaaaaactcttgaattttatctcacgagagcaaatraattcaatcattcagcccctaaatgcctcaaaagtctgtagaatagagcagcttcaaaagaacaagtgggaagtaatgaggaagagtaagagacaaagcttcacaaaggctgtgttaaagaagaactcttactcctagtgaattctgagatgatatcacagactcaatttata

SEQ ID NO: 426822 - DNA, 550 bp, Homo sapiens
tttggttcctcctgcgacctctctcctttgcttgcacatggctgcctccttactgtgttctcacattgccttttcttgatgcaagcacttcactggtgtcttttcctcttcttaaaaggacaccagtcctattggactagggtcccattcatatgaccttaattaaccttaattacctctttaaaggccatatctccaaatgcagtcactttgcgggttagagactcaacatataggttataggggaacttgatttatttcataacaacagggatatgacttttatttccttgtcctctatataaaggaagagcctagatagcagatctgcttcccatcctttttttctcaacgaagaaggatttatgttttccaaaaacaaaaaaaaacaaaaaactcttgaattttatctcacgagagcaaataaattcaatcattcagcccctaaatgcctcaaaagtctgtagaatagagcagcttcaaaagaacaagtgggaagtaatgaggaagagtaagagacaaagcttyacaaaggctgtgttaaagaaga

SEQ ID NO: 426823 - DNA, 599 bp, Homo sapiens
ttacatcataatcaagtcattagcttctcatttccgcaattaaaagaaatatgtcttatgagctattcaaaatcttaggttagagaaagttaccaagtaattagctgccattctggacacacagaaattagagtaacaaaaccagttcacacatagatacattctttgagagacagaatagtggattaaccacaaatataaagtagagaaygcagagaatgcccctgatggaattctcaagaaaacaatttctagtgcacacagttggctgcctaaccctcttacattttccttatctttcttttttttaacagaatccatattttattcagatatccattctatctgtaaatcgtccctgtgtttagggaaagatcagctttatccatagaagggatatctgaataaaataaacagaactccccagttccagagttgggcctcagttactcttagacaatgtgggtaattattttcccattgctcctggttgtttcaaaaaatcagacatacatcagtcagtacctgtgtttgtaaattgttatctgggaataagcagacagtgcaaatagtttctattataatataaagaaggaaag

SEQ ID NO: 426824 - DNA, 599 bp, Homo sapiens
ttacatcataatcaagtcattagcttctcatttccgcaattaaaagaaatatgtcttatgagctattcaaaatcttaggttagagaaagttaccaagtaattagctgccattctggacacacagaaattagagtaacaaaaccagttcacacatagatacattctttgagagacagaatagtggattaaccacaaatataaagtagagaatgcagagaatgcccstgatggaattctcaagaaaacaatttctagtgcacacagttggctgcctaaccctcttacattttccttatctttcttttttttaacagaatccatattttattcagatatccattctatctgtaaatcgtccctgtgtttagggaaagatcagctttatccatagaagggatatctgaataaaataaacagaactccccagttccagagttgggcctcagttactcttagacaatgtgggtaattattttcccattgctcctggttgtttcaaaaaatcagacatacatcagtcagtacctgtgtttgtaaattgttatctgggaataagcagacagtgcaaatagtttctattataatataaagaaggaaag

SEQ ID NO: 426825 - DNA, 599 bp, Homo sapiens
ttacatcataatcaagtcattagcttctcatttccgcaattaaaagaaatatgtcttatgagctattcaaaatcttaggttagagaaagttaccaagtaattagctgccattctggacacacagaaattagagtaacaaaaccagttcacacatagatacattctttgagagacagaatagtggattaaccacaaatataaagtagagaatgcagagaatgcccctgatggaattctcaagaaaacaatttctagtgcacacagttggctgcctaaccctcttacattttccttatctttcttttttttaacagaatccatattttattcagatatccattctatctgtaaatcgtccctgtgtttagggaaagatcagctttatccatagaagggatatctgaataaaataaacagaactccccagttccagagttgggcctcwgttactcttagacaatgtgggtaattattttcccattgctcctggttgtttcaaaaaatcagacatacatcagtcagtacctgtgtttgtaaattgttatctgggaataagcagacagtgcaaatagtttctattataatataaagaaggaaag

SEQ ID NO: 426826 - DNA, 599 bp, Homo sapiens
ttacatcataatcaagtcattagcttctcatttccgcaattaaaagaaatatgtcttatgagctattcaaaatcttaggttagagaaagttaccaagtaattagctgccattctggacacacagaaattagagtaacaaaaccagttcacacatagatacattctttgagagacagaatagtggattaaccacaaatataaagtagagaatgcagagaatgcccctgatggaattctcaagaaaacaatttctagtgcacacagttggctgcctaaccctcttacattttccttatctttcttttttttaacagaatccatattttattcagatatccattctatctgtaaatcgtccctgtgtttagggaaagatcagctttatccatagaagggatatctgaataaaataaacagaactccccagttccagagttgggcctcagttactcttagacaatgtgggtaattattttcccattgctcctggttgtttcaaaaaatcagacatacatcartcagtacctgtgtttgtaaattgttatctgggaataagcagacagtgcaaatagtttctattataatataaagaaggaaag

SEQ ID NO: 426827 - DNA, 637 bp, Homo sapiens
catccacatgattggagtataaattagtacatatttatcaaataaaaaatgcatgtgtgcatgtccaatcaattatactcyaggcagattatcctaaataactacttacatataaaacgacatatatgactatattcattgcagaaaaatatataagaacaagattctgaaaacaacaaagtttttaatatagtacgacttaatgatgacacatccctttgatgttctgcaatagtaaaaatactgaaaattttctatatgtattaatgtggaaagtttttcaagataaattgctaacgaataaagcaatgtgccaaaaggatacgtgttatgctgtccaaataaaggaaatcaataatgtattttgttatctcttatatatacataaaatacttaagacaccaagaagctgttgttaagaggtaagaactgggcagacaatagaaaaggatagaatgtggaattttccaattctgtatcatgtaaatgcatcacctgttcaaaaaataatgttcacggttccctacattttctgagaaatatccaactctttagccagtaatttacagcctttcaaaattgttccggtaatatttcatttttcttgctcatgctaaaccaccttctcatcaaacta

SEQ ID NO: 426828 - DNA, 637 bp, Homo sapiens
catccacatgattggagtataaattagtacatatttatcaaataaaaaatgcatgtgtgcatgtccaatcaattatactctaggcagattatcctaaataactacttacatataaaacgacatatatgactatattcattgcagaaaaatatataagaacaagattctgaaaacaacaaagtttttaatatagtacgacttaatgatgacacatccctttgatgttctgcaatagtaaaaatactgaaaattttctatatgtattaaygtggaaagtttttcaagataaattgctaacgaataaagcaatgtgccaaaaggatacgtgttatgctgtccaaataaaggaaatcaataatgtattttgttatctcttatatatacataaaatacttaagacaccaagaagctgttgttaagaggtaagaactgggcagacaatagaaaaggatagaatgtggaattttccaattctgtatcatgtaaatgcatcacctgttcaaaaaataatgttcacggttccctacattttctgagaaatatccaactctttagccagtaatttacagcctttcaaaattgttccggtaatatttcatttttcttgctcatgctaaaccaccttctcatcaaacta

SEQ ID NO: 426829 - DNA, 637 bp, Homo sapiens
catccacatgattggagtataaattagtacatatttatcaaataaaaaatgcatgtgtgcatgtccaatcaattatactctaggcagattatcctaaataactacttacatataaaacgacatatatgactatattcattgcagaaaaatatataagaacaagattctgaaaacaacaaagtttttaatatagtacgacttaatgatgacacatccctttgatgttctgcaatagtaaaaatactgaaaattttctatatgtattaatgtggaaagtttttcaagataaattgctaacgaataaagcaatgtgccaaaaggatacgtgttatgctgtccaaataaaggaaatcaataatgtattttgttatytcttatatatacataaaatacttaagacaccaagaagctgttgttaagaggtaagaactgggcagacaatagaaaaggatagaatgtggaattttccaattctgtatcatgtaaatgcatcacctgttcaaaaaataatgttcacggttccctacattttctgagaaatatccaactctttagccagtaatttacagcctttcaaaattgttccggtaatatttcatttttcttgctcatgctaaaccaccttctcatcaaacta

SEQ ID NO: 426830 - DNA, 632 bp, Homo sapiens
tattaaatgatgaatttgcaaggcatgccccctaggatttcatctgttctccttgagaaaatgtcaataacttctataaagaaagagtggccctagttagagttttttagttycaagtctatgtttaacccattaagaaataattcatacttagtatatatttttaaaaaacactaaaatatagtctaaattttcctgattttttaaactatgtaggaattatataataaaatgtgattacctaagagaatgttctggtttttaggacatatacaataaagtacttaggattaaaataataagatggctccaatttgcaaatagtatagaaaggagagagagagagagagcacactaccaatatattcaaatgtaatttagaaaaaaatctggataaaagggtatataggactttcttctactattcttgcaacttctttctaagtttaaaattatgtcaaaatggctgggcgtggtgactcacacctgtaatcccaccacttcgggaggctgaggcaggtggatcacctgaggtcaggagttcgagaccagcctggctaacatggtgaaaccctgtttctactaaaaatacaaaaaattagcctgaattgatggtgagcacctgtaattcc

SEQ ID NO: 426831 - DNA, 632 bp, Homo sapiens
tattaaatgatgaatttgcaaggcatgccccctaggatttcatctgttctccttgagaaaatgtcaataacttctataaagaaagagtggccctagttagagttttttagttccaagtctatgtttaacccattaagaaataattcatacttagtatatatttttaaaaaacactaaaatatagtctaaattttcctgattttttaaactatgtaggaattatataataaaatgtgattacctaagagaatgttctggtttttaggacatatacaataaagtacttaggattaaaataataaratggctccaatttgcaaatagtatagaaaggagagagagagagagagcacactaccaatatattcaaatgtaatttagaaaaaaatctggataaaagggtatataggactttcttctactattcttgcaacttctttctaagtttaaaattatgtcaaaatggctgggcgtggtgactcacacctgtaatcccaccacttcgggaggctgaggcaggtggatcacctgaggtcaggagttcgagaccagcctggctaacatggtgaaaccctgtttctactaaaaatacaaaaaattagcctgaattgatggtgagcacctgtaattcc

SEQ ID NO: 426832 - DNA, 632 bp, Homo sapiens
tattaaatgatgaatttgcaaggcatgccccctaggatttcatctgttctccttgagaaaatgtcaataacttctataaagaaagagtggccctagttagagttttttagttccaagtctatgtttaacccattaagaaataattcatacttagtatatatttttaaaaaacactaaaatatagtctaaattttcctgattttttaaactatgtaggaattatataataaaatgtgattacctaagagaatgttctggtttttaggacatatacaataaagtacttaggattaaaataataagatggctccaatttgcaaatagtatagaaaggagagagagagagagagcacactaccaatatattcaaatgtaatttagaaaaaaatctggataaaagggtatataggactttcttctactattcttgcaacttctttctaagtttaaaattatgtcaaaatggctgggygtggtgactcacacctgtaatcccaccacttcgggaggctgaggcaggtggatcacctgaggtcaggagttcgagaccagcctggctaacatggtgaaaccctgtttctactaaaaatacaaaaaattagcctgaattgatggtgagcacctgtaattcc

SEQ ID NO: 426833 - DNA, 568 bp, Homo sapiens
gactcaacctagcttggaaaatgaggaaatagtgacaaaygcagaaagaccatctgaaccctaggcattcttctctaacccagctactccatacaatgagtgttaggatggtgattaaaactgagggagaccagtcttggtaaacagcaccacccaggacacgtgaatacaccaacttttatggaggaggaaggcaaacaaagggtggcagaatccagttatttcctaaggagtccttcattctaaacacttctggtgggtcaatcttgagcctgattttagtgccatgtattcttaatcagcataataaatcttactaggaaaaaataggcctcaaaggaattcaatgactctaaaataaaatacatgtatatcaaagacaaccagatttacaaaaattaacaatagtttaaaatatgtgaccatatgtggtggtttacatctgtaatcccagcactttgggagtccaagacaggagcattgcttgaagctaggagtttgagatcagctcgggcaaccaagagagcccctgtctctacaaaataaataataattaaaaaaaatacct

SEQ ID NO: 426834 - DNA, 568 bp, Homo sapiens
gactcaacctagcttggaaaatgaggaaatagtgacaaatgcagaaagaccatctgaaccctaggcattcttctctaaccsagctactccatacaatgagtgttaggatggtgattaaaactgagggagaccagtcttggtaaacagcaccacccaggacacgtgaatacaccaacttttatggaggaggaaggcaaacaaagggtggcagaatccagttatttcctaaggagtccttcattctaaacacttctggtgggtcaatcttgagcctgattttagtgccatgtattcttaatcagcataataaatcttactaggaaaaaataggcctcaaaggaattcaatgactctaaaataaaatacatgtatatcaaagacaaccagatttacaaaaattaacaatagtttaaaatatgtgaccatatgtggtggtttacatctgtaatcccagcactttgggagtccaagacaggagcattgcttgaagctaggagtttgagatcagctcgggcaaccaagagagcccctgtctctacaaaataaataataattaaaaaaaatacct

SEQ ID NO: 426835 - DNA, 568 bp, Homo sapiens
gactcaacctagcttggaaaatgaggaaatagtgacaaatgcagaaagaccatctgaaccctaggcattcttctctaacccagctactccatacaatgagtgttaggatggtgattaaaactgagggagaccagtcttggtaaacagcaccacccaggacacgtgaatacaccaacttttatggaggaggaaggcaaacaaagggtggcagaatccagttatttcctaaggagtccttcattctaaacacttctggtgggtcaatcttgagcctgattttagtgccatgtattcttaatcagcataataaatcttactaggaaaaaataggcctcaaaggaattcaatgactctaaaataaaatacatgtatatcaaagacaaccagatttacaaaaattaacaatagtttaaaatatgtgaccatrtgtggtggtttacatctgtaatcccagcactttgggagtccaagacaggagcattgcttgaagctaggagtttgagatcagctcgggcaaccaagagagcccctgtctctacaaaataaataataattaaaaaaaatacct

SEQ ID NO: 426836 - DNA, 568 bp, Homo sapiens
gactcaacctagcttggaaaatgaggaaatagtgacaaatgcagaaagaccatctgaaccctaggcattcttctctaacccagctactccatacaatgagtgttaggatggtgattaaaactgagggagaccagtcttggtaaacagcaccacccaggacacgtgaatacaccaacttttatggaggaggaaggcaaacaaagggtggcagaatccagttatttcctaaggagtccttcattctaaacacttctggtgggtcaatcttgagcctgattttagtgccatgtattcttaatcagcataataaatcttactaggaaaaaataggcctcaaaggaattcaatgactctaaaataaaatacatgtatatcaaagacaaccagatttacaaaaattaacaatagtttaaaatatgtgaccatatgtggtggtttacrtctgtaatcccagcactttgggagtccaagacaggagcattgcttgaagctaggagtttgagatcagctcgggcaaccaagagagcccctgtctctacaaaataaataataattaaaaaaaatacct

SEQ ID NO: 426837 - DNA, 558 bp, Homo sapiens
ggagttggaaggaggcaaagaatctatcactgtaatacacacacacacaattgtttataaaaatggaatacaggccaggtgtggtggctcatgcctataatcacagtgctttgggaggccgaggcgggcagatcacaaggttaggagtttgagaccagcctgtccaatatggtgaaactccatctctactaaaaatacaaaacttagccaggygtggtgacacgcgcctgtagttccaggtactcgggaggctgaggcagaagaatcgcttgaacacgggaggcagaggttgcaatgagccgagatcacgccactgcactccagcctgggcaacagagcgagactccatctcaaaaaaaaaaaaaaagaagaagaagtaatagtgtgctgtgcagcatgaaaaaaaaatgaggtaaagatacacacgataacaataataggtcttaataatatagtgttggatttacaaaagtaaaaactatatatacaacatataactcaaaaacaaccacaaaattttatagttttcaaaaaatgcatattcaagggtctaccaca

SEQ ID NO: 426838 - DNA, 558 bp, Homo sapiens
ggagttggaaggaggcaaagaatctatcactgtaatacacacacacacaattgtttataaaaatggaatacaggccaggtgtggtggctcatgcctataatcacagtgctttgggaggccgaggcgggcagatcacaaggttaggagtttgagaccagcctgtccaatatggtgaaactccatctctactaaaaatacaaaacttagccaggcgtggtgacacgcgcctgtagttccaggtactcgggaggctgaggcagaagaatcrcttgaacacgggaggcagaggttgcaatgagccgagatcacgccactgcactccagcctgggcaacagagcgagactccatctcaaaaaaaaaaaaaaagaagaagaagtaatagtgtgctgtgcagcatgaaaaaaaaatgaggtaaagatacacacgataacaataataggtcttaataatatagtgttggatttacaaaagtaaaaactatatatacaacatataactcaaaaacaaccacaaaattttatagttttcaaaaaatgcatattcaagggtctaccaca

SEQ ID NO: 426839 - DNA, 558 bp, Homo sapiens
ggagttggaaggaggcaaagaatctatcactgtaatacacacacacacaattgtttataaaaatggaatacaggccaggtgtggtggctcatgcctataatcacagtgctttgggaggccgaggcgggcagatcacaaggttaggagtttgagaccagcctgtccaatatggtgaaactccatctctactaaaaatacaaaacttagccaggcgtggtgacacgcgcctgtagttccaggtactcgggaggctgaggcagaagaatcgcttgaacacgggagkcagaggttgcaatgagccgagatcacgccactgcactccagcctgggcaacagagcgagactccatctcaaaaaaaaaaaaaaagaagaagaagtaatagtgtgctgtgcagcatgaaaaaaaaatgaggtaaagatacacacgataacaataataggtcttaataatatagtgttggatttacaaaagtaaaaactatatatacaacatataactcaaaaacaaccacaaaattttatagttttcaaaaaatgcatattcaagggtctaccaca

SEQ ID NO: 426840 - DNA, 558 bp, Homo sapiens
ggagttggaaggaggcaaagaatctatcactgtaatacacacacacacaattgtttataaaaatggaatacaggccaggtgtggtggctcatgcctataatcacagtgctttgggaggccgaggcgggcagatcacaaggttaggagtttgagaccagcctgtccaatatggtgaaactccatctctactaaaaatacaaaacttagccaggcgtggtgacacgcgcctgtagttccaggtactcgggaggctgaggcagaagaatcgcttgaacacgggaggcagaggttgcaatgagccgagatcacgccactgcactccagcctgggcaacagagcgagactccatctcaaaaaaaaaaaaaaagaagaagaagtaatagtgtgctgtgcagcatgaaaaaaaaatgaggtaaagatacacacgataacaakaataggtcttaataatatagtgttggatttacaaaagtaaaaactatatatacaacatataactcaaaaacaaccacaaaattttatagttttcaaaaaatgcatattcaagggtctaccaca

SEQ ID NO: 426841 - DNA, 582 bp, Homo sapiens
gtaattcttaaggtccatgggtctggatgtttgagaacttttcccaaactcatcaaatctaaatgtgatgctcagtcccctgattaaagcaatatggcatagggcaagttatatacttaacttaatatttaaaatatgcattcagtatacacagttaatatttcattgcctgggataaaatactctatgttaatatcagtaaaaactaaatggtggtcatgggttgcacaggttatggaaaaagtatacattaaaarccagaagatttgagatattattataccacttatcagctatgaaatcctaaggtaattatttaatatctcaaagatctgtttctcaagagtaaacgaacagctgccaactccgctatctacttcatggtgttttggtgaggattcatttagctaagaaaggcagaatctatagtggatgaaatgcattttgataccaggaagactaaagtttgaactttgatactgccactttttaattgaagggccttgtacactttacctctcaaaatgtgtttcatcacctgtaaaatggtcaagaaagagttgagccagactgacttgacta

SEQ ID NO: 426842 - DNA, 582 bp, Homo sapiens
gtaattcttaaggtccatgggtctggatgtttgagaacttttcccaaactcatcaaatctaaatgtgatgctcagtcccctgattaaagcaatatggcatagggcaagttatatacttaacttaatatttaaaatatgcattcagtatacacagttaatatttcattgcctgggataaaatactctatgttaatatcagtaaaaactaaatggtggtcatgggttgcacaggttatggaaaaagtatacattaaaagccagaagatttgagatattattataccacttatcagctatgaaatcctaaggtaattatttaatatctcaaagatctgtttctcaagagtaaacgaacagctgccaactcygctatctacttcatggtgttttggtgaggattcatttagctaagaaaggcagaatctatagtggatgaaatgcattttgataccaggaagactaaagtttgaactttgatactgccactttttaattgaagggccttgtacactttacctctcaaaatgtgtttcatcacctgtaaaatggtcaagaaagagttgagccagactgacttgacta

SEQ ID NO: 426843 - DNA, 448 bp, Homo sapiens
caaacacacacactcattagatatttataaattcatactgaagggaaatcttcaacatttactaaatcttgaattgttcatgtagcttttttttaacagataaactaagctaaaagttactggtttaacaactttcaccatttttgaaacaataatggrtcaattccatataatatacttttttctattgtgtaaagctgaagatttcatactacctagatatttctctgttattgacttgcctcctaagcttccatgtgactattattttttcctttcttatcaatttatttccaccaaaacacacacacacacacacacacacacacacacacagagagagagagagagagaggcatattaagttaatagcttctctgccatctcatcttagtttaaaaaaagttaacagtccatattttagacatgattatcatgattatcagct

SEQ ID NO: 426844 - DNA, 613 bp, Homo sapiens
cttgtttaaatgttctcatagtaacgtcttttggttcaagtggtttgtgtatggtgtataaatttcatttttgtttgctcatcctatcataaacacacgattggtgatttctctagtatactgtcttctagtttccattttctttttagtaatctgccacagaaaacagtaaaaatctgcatcttgacttctgcctttccctctattattaatttattcatttagttagtcttttgtaaatttcctctaacaggtattctacagggataaaacgtatgggtayaagtggaaactggaaaaattatttcttgactacttggtgccttctaacactttcagtagctcctataatctatctgatacctagtaaatttccaatacaagcagagtaatttctgttgtgaatgtcaggtatgaacagggtaatccccatcaacagggtttgctgaagagcaaggaaacagcgttggtacaattctttgacagagaatttagcagtttcaacacctcccttcctgctcccttttaagattcattgttatcatcaaacaaaactctaagactatttcagacttcccaaaacaaggaagttctttcaaactccaaccaggtt

SEQ ID NO: 426845 - DNA, 584 bp, Homo sapiens
agaagggataaagaagaaatatatttctccatcaaagtcactctttaatttaccactttakgtaaggcagaatgtccagaaactgccagtcagaaggtatttttagttttgctaggattctttaattcacccaattccttaaaaatacttaaatgtgtttgtaaagatttagaggctgtaaactaccttagaagtcatcaagtctcacattccctatgttaaaggtgaggaatgtagcctctgacagtagtgactctcttcataacactgatccaccgtgttatgcaaaataaatgaaggaaacattgaaataaatactagtttgctctgtcttacgtacctactaagagccagttaccttctcatttaattcaataattgtacaacccatagaataagtttgactactttcatttctcctcggcaaaaacagactcaaatgttttactaccatggtagtgcctggatttgaacccaagtggctgattccatacctactttttccaactaggtatgtgtccttccaaataatgatggttgtcacttataggttccttcctactgtatggcaagtaatgtgcaaa

SEQ ID NO: 426846 - DNA, 584 bp, Homo sapiens
agaagggataaagaagaaatatatttctccatcaaagtcactctttaatttaccactttatgtaaggcagaatgtccagaaactgccagtcagaaggtatttttagttttgctaggattctttaattcacccaattccttaaaaatacttaaatgtgtttgtaaagatttagaggctgtaaactaccttagaagtcatcaagtctcacattccctatgttaaaggtgaggaatgtagcctctgacagtagtgactctcttcataacactgatccaccgtgttatgcaaaataaatgaaggaaacattgaaataaatactagtttgctctgtcttacgtacctactaagagccagttaccttctcatttaattcaataattgtacaacccatagaataagtttgactactttcatttctcctcggcaaaaacagactcaaatgttttactaccatggtagtgcctggatttgaacccaagtggctgattccatacctactttttccaactaggtatrtgtccttccaaataatgatggttgtcacttataggttccttcctactgtatggcaagtaatgtgcaaa

SEQ ID NO: 426847 - DNA, 518 bp, Homo sapiens
atagtacctttcacccctgaattatctagggaaagccacaatattattcccactttatatagaaagagtgaaacagtaatttatcaaagtgactgaataacttaagttttctgtgaataaaaatatattattggaaagcaagttattaatttagctcagcccttaaaaaacgacttctcaaaggaaaagcaaggatgtacatattcagttcaggaaaaaaaaaatcattacatcttgttctttcctcattagcattcataagccgtgtgtaattcacatggatttcacatctctgctcatgtcattactattatcctcagcctcaaaatcagtatttattcagtctgtatgaatttagagcagttttttaaaatttccacaacctttttgcatttattggttttgttttgacatgtacaatatttgggtctgggattaataattaactgttgctccgaagctataagtagctgyagtcattaataataccactttcaccaacaaatgctgatgcagta

SEQ ID NO: 426848 - DNA, 576 bp, Homo sapiens
ggcttggtccctccagatgagccagaaatcacctttcctagcactgcacaatatcgagtgtcttcactcagcagtctgcccccaggagccacactatgctaaacctgtggagacctgccttgtgtgtgtcaaatcatctgttggcagagaacctgagagggaatcccatgaaaacttttgggggctcccattctgggtagtttcccccttactgatatcttgacccagaaatcccagctgtctcatcatcccagactccaatctctgtttcttttaccagaatggatcactgttctccatctggggtctacgcccctgcactgcagtctggaaagttccttcaagcagaaacctgggttggatatatggttcattatatgtttttctttctttcaaggrtcatagccttgcctttctgttgcccaatttttttttaagtgttgtcttgcatattttattccattttaagatagtattctgtggcaaggtgggcaagtccaataaaagttactccatttctggaagtggaagttgaaacatatatgttgttggatgttatttctaacattgtgagtc

SEQ ID NO: 426849 - DNA, 606 bp, Homo sapiens
attgtagcctttgattcaagaatggtatatcctggtggaggttgctctgtaagcctgggcccagaagtgactaaatatgaagcagaggsaagaccaaaccatactggatatgaaatgtgaatttaaaacaaattattgtttcatgatgctgataattatttgttactgcagcacaatctagcttaagctgattgatgcaacaacctaaatgaagtttcttatttggccaaaaaacagttcaagtactaaaatgagtcacatcagctaaagtctggcatctcctctgtacttctctttctcccttttcacttttcctccctatttctttttatcaatagctctgtagtgataaccattgtgttagtatgtttatagtctttgagtatatctaacagagtgagttcttcatacaaccaaaaaagtcataaaatcatgattagagatcatccaatccatgctttaaatttcacacaggttggaaactgaagcctgaagacacatattggcttgtctgggttcatgcagccagtgagtgacaaagtgaactataatagaaagctattatcaaggttcctggttcagagcaatttccattagagacttcag

SEQ ID NO: 426850 - DNA, 558 bp, Homo sapiens
atgatctaaaatatgcacacagaaatttaatagctgccaaaatttatcttacactataggatactcctttgtgtgtgaagagaaagcagacataaatgggaataaacatttaccaggtgcataaaatgtagctggcactgtgctaaacatgttcatatttacagggaaagcaccaaacacctcttttgtccaaagccaatgacatatgtttaactaggttttgtttctacttttaacaatagacaacaactcaacactggatayctaaaacaatcttggaaaagaagagcaaagttggaggactcacacttcccaattttaaaatgtactacaaagcaacagtaattaaggcagtatggaactggcataaaattagacaggtagatacatggcaattataatacatttataaggtttttaatgcagacaacagtgtcccattttgggaaaaaaaatgccacaaatgtaagagcttattgatgggaggaattataaagtcacattggaaaggccctgacgagagggtaaagacttgtgggcatttcttgatcttcaata

SEQ ID NO: 426851 - DNA, 627 bp, Homo sapiens
tttgttttataatctggatgttctaaagttaattgttctctatggatttttattttacctgtgtgttctttcttgactttgccagttgaaactacagttgacccttgaacaacatgagtctgaacttcataggtctacttataagtggatatttttttcaataactatattagaaaaagctttgaacatttgtgataatttgaaaaaaactcagatgaatgatacagtctggaaatataaaagaataagaaaaatatgggtatgtcatgaatgcrtaaaatatatatagatacttgtttattttataatttactcatcataaagtatacacaaatcaattgcaaaaagttaaaatttattgaaactgctgacacaaacactaactgtacatggtgccatttgcagtggacagaaatgtaaatgaatgtaaagatgtagtattaaatcataactatgttactgactgtggtacatactgtatgagtgtgattttttttagccacctccagttgctattatggtgagctcacgtgtagtgagtatccacttaaaatccaccttgtgacattaatcatctccacaggagcaagttgtctctccaataaattgtgtattgcagtaaaaaat

SEQ ID NO: 426852 - DNA, 627 bp, Homo sapiens
tttgttttataatctggatgttctaaagttaattgttctctatggatttttattttacctgtgtgttctttcttgactttgccagttgaaactacagttgacccttgaacaacatgagtctgaacttcataggtctacttataagtggatatttttttcaataactatattagaaaaagctttgaacatttgtgataatttgaaaaaaactcagatgaatgatacagtctggaaatataaaagaataagaaaaatatgggtatgtcatgaatgcgtaaaatatatatagatacttgtttattttataatttactcatcataaagyatacacaaatcaattgcaaaaagttaaaatttattgaaactgctgacacaaacactaactgtacatggtgccatttgcagtggacagaaatgtaaatgaatgtaaagatgtagtattaaatcataactatgttactgactgtggtacatactgtatgagtgtgattttttttagccacctccagttgctattatggtgagctcacgtgtagtgagtatccacttaaaatccaccttgtgacattaatcatctccacaggagcaagttgtctctccaataaattgtgtattgcagtaaaaaat

SEQ ID NO: 426853 - DNA, 549 bp, Homo sapiens
gtttttaatgtagacaacagtgcctcatttttggaaaaaaaaaaaaaaaagccacaaagactatgtattagttagaaagagaagcaagcaccaagatttaagatagaaaaggtaggcttacccaagatttttgtgcaaatactgtggagtttatgattaggactgccataatctataaagctgctaactctcaaacctggaagagaaaagatgaacaccagctgccagtcttttagttgcacaacaaggaggcctgaataagaaggtttttttttctggagttgttcaatctatatttttccctgaagtcagaatgcactttgccagtaagakactgccttttaaagtacttttgatattgaacaatatccctaaccaaccagaactccatgaattctatgccaaaggtgttgaagtggtctacttgctcttaaactcaatatctctaattcaggctctagatcagagcatcataaggacctttatggctcactacacatagtactctatgaaaaggattatcaattctatggaaaagaaccccaatag

SEQ ID NO: 426854 - DNA, 561 bp, Homo sapiens
aagactgcttttgactttttttatgacaaggctccttctctgatagtggcactgatactaaagcaaatggtggaagaagaattattactgtataraaatatttttagagaaatgaaaaagcaaaaagacagaaattacaatatatttccataaagttacactgagtgtacctgcctcccctgcctcttttcctacctcctcctcttcttccacttctgtcaccctgggacagcaaaaccacccctttctacttctccttagcctactcaacatgaagacaataaggatgaagacttttatgatgacccacttccacttaatgaatagtaaatatagtttctattctttatgattttcttaacgtttccttttctctagcttacggtattgtaagaatagagtatataatacatataacatacaaaaatgtgttaatcaactatatatgatattggtaatgcttctggtcaagagtaggccattagtaattacgtttgtggagagtcaaaagggatacatagatttttgaccatgcatatattggcatctctaacccccaca

SEQ ID NO: 426855 - DNA, 527 bp, Homo sapiens
ctgatagtggcactgatactaaagcaaatggtggaagaagaattattactgtatagaaatatttttagagaaatgaaaaagcaaaaagacagaaattacaatatatttccataaagttacactgagtgtacctgcctcccctgcctcttttcctacctcctcctcttcttccacttctgtcaccctgggacagcaaaaccacccctttctacttctccttagcctactcaacatgaagacaataaggatgaagacttttatgatgacccacttccacttaatgaatagtaaatatagtttctattctttatgattttcttaacrtttccttttctctagcttacggtattgtaagaatagagtatataatacatataacatacaaaaatgtgttaatcaactatatatgatattggtaatgcttctggtcaagagtaggccattagtaattacgtttgtggagagtcaaaagggatacatagatttttgaccatgcatatattggcatctctaacccccacaatgtt

SEQ ID NO: 426856 - DNA, 535 bp, Homo sapiens
gttgcctgttcactctgatgatagtgtatttcactgtgcaggccagatgacactttcaatagtctacctgaagttcttcttaatcaatttcaaaagtgaacacagatttatttgctgttatatagcatgtgtccattttaccagacttatcataattttctcaccatttttgtttaggctttgctaacaatttgcttgccattttgtcatcttctttctgccacctagttccaaaagccaacaccayatattttaggtgttatagtatcacttttcctaggtcctaatttttgtacaaattctttattgctacagtaactcccccaaaacttagtggcctaaagagcaagcatttatttaattcggaattctgctgtttcttgggcttgtctgataactcactcatgtgtctatggtcagcaggcagaccaattatgcactcttgtccaggacagcctcacttatatgtaggactttggctatttttaactgggatgatgagggaaacagggctatctttctgtcattttcagtg

SEQ ID NO: 426857 - DNA, 530 bp, Homo sapiens
tttttttttttttaagcttgggtaaaaacagggtccagagaatcttgaagtttcaattgttttcagttactcagcttttccctaactgcccaccatytttctggcctcccaaaatgacttcattgccatgaattaagagttgacccaagagctggctgaaaggcatcagaaaaaaagaaaatggcattacctaaaatatatgtcctcattaccattcatttcatatatatgatattcattttcacattttctatctcctttacttttcaaagtgaggcacagaaacactgaactacagaaagcaaagggcaaaggatggagctcggatttgaactgaattacaaagccagtgctctttcagtgccttccatgttgactccttttgagagcgaacaactgtagtaatacatgttaactcaggtttaatgatttgttctgggtcctctatttatataaaatttgatttcctgatctctcaatccctgaatccttgacctagcctcagaaccagtttattttttcaattgtta

SEQ ID NO: 426858 - DNA, 648 bp, Homo sapiens
caaatgaaagagactgagtctttgctgccatgcacgttttatccttagttctacctagttttaaaatctgatgagcagcatgtatgcataaatagatttatagtttagtcagttttattttatgtcatgaaagtgaatctattcaaaacaaaagaagtgaaaaatattgcattaaaaaaaatgccattgctgtttcctcctcctccgaaggagataacactatctctgaaacccatcataaataaaatttctgcttaaccagtattttggggtcccaaagtccctttctcatgtctgtctccattttcttagaagatttcttcctctgctcaggatataaaatctyaataaatgcttcagcactggcactattaccttcccagttatgcagttaaagtgcttatcacagaaatgttcttctgggtaattataattgtaattatggggccttctggctgcttcaatagaaaaagcaaaagcacaaaagaggtcagaaactgactaaatgtgatggagaggcaagttgggcacttggacatgtttctccactgagaaagaaggaaaatcagggcgagtcatgccaaagcttggctccaatgaggtatcttttactagcgaaacactagcaccccgcagaagactataatt

SEQ ID NO: 426859 - DNA, 569 bp, Homo sapiens
gggcaacacaaagattccttggctggtgggaggaggaactcagtagccattgggcccaagcaagcacaaatgtaccccaaatcacagagcagggcccttggatgcctgtaagagtctgtactagccccacaagtattcctataccccaagtgccccctcagccaatggataccttggagatcctttcgtcttccttccaatcttccagatcttgcttgagtttgtctcttccaaccagctagaggcaccctcccagcayaagcaatgaaatacaaattgtgtaattttggagattctgcacacaaatgaaatgtcctgatgtttgcatttaaattggcattgcacaatataaagataaacaataaaattcatgctaacaatttaacaatttaactttatttaataagttaatagcaaataaaaatcatcatgactagtcaagagagagaccacaaaataaacagctgtgaattttcatactttaacagcacttttttttctgttttttgcatttctctcatctttcacagcagtgactgggtcttagacatcacatatctcctatcata

SEQ ID NO: 426860 - DNA, 526 bp, Homo sapiens
cagcacaagtacagatcttgaaattcactgactcacttrttcaatgtacaagagttaactcagacaacaaattcagaggtgtttatataaaaccaaagcaatttaaatacctaaaattggatttggtgtttgctatggtttggatgtttgtaccctccaaacttcatgttgaaatttgatcctcaatgtcagagatagagtctagtgggagatgtttgggtcatggaggcagattcctcatgaatatattaatgccccccttgagggtgagtgaattctttattagttcctgaaacaactagttgcttttttgtttgtttgtttgtttgttttgttttgttattttttagagatggggtttcaccatgttggccaagctggtcttgaacacctgacctcaagtgatccactcacctgggcctcccaaagtgctgggattacaggcatgagccagcgcacccagccccaactagttgttaaacagagcctggcaccttgccctctctgtcttggttcctctctcacc

SEQ ID NO: 426861 - DNA, 531 bp, Homo sapiens
taatgaatgtgcaaagcctttcattatttttttccatttgtctttttttttatttctgtttttatttcagatttggaggtacacatgcaggtttgttacaaggatatgttgcatgatgctgaggtttgggcttctattgatcccatcacccagatagtgaaggcagtactcaataagaattttttcatcccttgcctctcttcctccctcccaacttttggagtccccagtgactactgtttctatctttatgtccatrggaacccaaaatttagctcccacatataagtgagaatttgtgatatctgcatttctgtttctatattagtttgcttaggatcacagccttcagctacttccatgttgctgcaaaggacatgacttcattgttatttatggctgtatagtattccatggtgtatatgtaccacgttttctttatccaatccactatttatggacacttgggttgattctatgtctttgctattgtgaatagtgctgtagtaaacgtatgagtgcatgtgtctt

SEQ ID NO: 426862 - DNA, 531 bp, Homo sapiens
taatgaatgtgcaaagcctttcattatttttttccatttgtctttttttttatttctgtttttatttcagatttggaggtacacatgcaggtttgttacaaggatatgttgcatgatgctgaggtttgggcttctattgatcccatcacccagatagtgaaggcagtactcaataagaattttttcatcccttgcctctcttcctccctcccaacttttggagtccccagtgactactgtttctatctttatgtccataggaacccaaaatttagctcccacatataagtgagaatttgtgatatctgcatttctgtttctatattagtttgcttaggatcacagccttcagctacttccatgttgctgcaaaggacatgacttcattgttatttatggytgtatagtattccatggtgtatatgtaccacgttttctttatccaatccactatttatggacacttgggttgattctatgtctttgctattgtgaatagtgctgtagtaaacgtatgagtgcatgtgtctt

SEQ ID NO: 426863 - DNA, 606 bp, Homo sapiens
cctaatctacgggaacaggtgtgccaaatgcctgacgttatatctgggtatagagtggagggagtgycactacaccaagttttttacatgggtcggggatggcagctcaacttcctgttccaggagggcaggtgcaccagaggcctgctatgtgtggaacagagagtgtgctactgcaccaggatttctgcacaggaagagaggggcagctcaggctgctaatcctggtgagagggtgctccaagcacctggagatacacctgggtgtgaaacagagagattgctactgcaccatgatctcaggaaagtaggctggggcacctagcaatgacacacacagactggttccaggatgcaaagctgaccctggctgcagatctcaccatctaggagaaaaaaatggcttcagaaactctcctcccacttcagacctgtgatggaagacagcccaattccagtgcctactgctgggatgctttccacatttgtcactcaattctggctgtggggtcctgtcccactccagagtaagtgcaccaatctctgacctgactggaatgcttgcttggccacactgctgggttgctaaaaaatggcttactttgc

SEQ ID NO: 426864 - DNA, 435 bp, Homo sapiens
ataatgacactcttacctacttgcaaaatttactcagaattacaattgaaagttgaatttcagggggtggttataatcttgtaaagaattactggtaatacttaatgagarttaaattatttccaaaggcaatgttgtaatatgatgacagatcatcttctattcttgaaatctgcaagtttttcttctgagactacagacattaaaatccttcccccgtctttccccatacttatcctcctccaggaatctggaaagttcctaaacacatgtacaagggagtgatagcacttccagtccatgggctaagtggttgatgttgcctcattaggtcagaatgaattgctgtcttaattctgaattgaattacagtccatggtagactattctgctaagggtcagctgattcaaaatatgtttacagtttagtaggac

SEQ ID NO: 426865 - DNA, 556 bp, Homo sapiens
gtgttaatattttaaagtttgataatgacactcttacctacttgcaaaatttactcagaattacaattgaaagttgaatttcagggggtggttataatcttgtaaagaattactggtaatacttaatgagaattaaattatttccaaaggcaatgttgtaatatgatgacagatcatcttctattcttgaaayctgcaagtttttcttctgagactacagacattaaaatccttcccccgtctttccccatacttatcctcctccaggaatctggaaagttcctaaacacatgtacaagggagtgatagcacttccagtccatgggctaagtggttgatgttgcctcattaggtcagaatgaattgctgtcttaattctgaattgaattacagtccatggtagactattctgctaagggtcagctgattcaaaatatgtttacagtttagtaggacataagccatatatcagcttaaatcagtagaggactagctatctaccttcacaggcacagacaatgagctaacaacgtgactagggaacatagaaggcaaa

SEQ ID NO: 426866 - DNA, 527 bp, Homo sapiens
aaatcaagacccattactagaaagaaatgtatatcttaatttgacctgatgataccaatggttgaagaataaatgttctttatcaaaaccttcattgtctacacaataaagtacaaactcctcagctagctccttgatgatgcatctgaagtctatttctataatctcatctctctcatctcccctgcaaattccgtatgatacaaccactgtgaagacctcatctttcccagatgcaccatgccctcctgagcttttgtttgtgtaactccttttgttttgagttacatggwgcacactcctctgattctcctctctcctctacaaacagcagtgtggtcaccagatgtgggaaggcatagagtcctcttctgagggagcccagtgcccaggcttctccccagaacactagggcactgcccaagcactcatcattactctctctccacctttaacccctaaccccagccttggaaagaggttattccacagcctgacttgggagaagcactaatcattcagccacc

SEQ ID NO: 426867 - DNA, 490 bp, Homo sapiens
agtcaatcttgttgtttggtcaaaaggataagacaatttgagtgttgtgctttttttttttttttttttttttttgctaactttctgaacttacttctctggagttacacttttaatttttcttcagcatacctaagcagaaaattgaaattcatctttcttagttataagtcaatgtatacccaagcattctccaggtaacagcctatgggtcaaatctctgatcatatttactctctcccatgtaattttcagccttttgaatacatttcctatctcatggtctaaaatattagccacaaagttcartgccaatctgtctcctctacaaaacaatctagtgcaatggttataccccacataattttctcctgacaattttctgtgtattactcatccttcaactgtttcggaagcttatgccatgactccattaaaccgtcaactccatcaagaaaaagattttgtcttctggacacccttattccca

SEQ ID NO: 426868 - DNA, 490 bp, Homo sapiens
agtcaatcttgttgtttggtcaaaaggataagacaatttgagtgttgtgctttttttttttttttttttttttttgctaactttctgaacttacttctctggagttacacttttaatttttcttcagcatacctaagcagaaaattgaaattcatctttcttagttataagtcaatgtatacccaagcattctccaggtaacagcctatgggtcaaatctctgatcatatttactctctcccatgtaattttcagccttttgaatacatttcctatctcatggtctaaaatattagccacaaagttcagtgccaatctgtctcctctacaaaacaatctagtgcaatggttataccccacataattttctcctgacaattttctgtgtattactcatccttcaactgtttcggaagcttatgccatgactccattaaaccgtcaactccatcaaraaaaagattttgtcttctggacacccttattccca

SEQ ID NO: 426869 - DNA, 583 bp, Homo sapiens
aaaataaagaagattacaaagtaaaagtgttttagtttggttaacataataataattacrtagttaaaacttattgcataattcctatgtactttctgacataggtaccactaatattcccatttcaatgataaggaaaaggagaaaaaaggaagtcaattatcctgagtaaagccaaacagatagttaagataaattgggttcacaaagtcaaactgtttttttagaaaaaacagattttgcaggggcgtccaagggagagaatacagtcatgcgttcttagtttctgtttcttgttgggccagtaaagccctttcctcatccctcttttctgcttatcactagagacagaaactgaaaaccatggcttcagtctgctaaaagcctaaaacaaaacaaaacagaacaacaataacaaaataagtctggttggacaagctcgatagagcctctctaatacatgtgtatatgctttgagaaaggagtagaagaatatgaacaaaaatataacagtacataacaaaagctgggtatgtacttgtgttaggcagaatttcaaaaatgacccctttaatatgcccaa

SEQ ID NO: 426870 - DNA, 486 bp, Homo sapiens
gttatccctctgagttcatgcaagatggtaatgagtaatttcttgctctgagttcatgcaagatctgattcttttaaaaagtgtagcatctcccctcacctttcctgctccctctctcacctgtgacatgcctgctctggcttcaccttctaccataagcaaaagctctctgaggcctccccagacactgagcacagctggcatcacacttcctgtacagcctacagaaccatgagccaattcaacctyttttctttaaaaattacccagtctcaggtatttatttatagcaatataaaaaatgaactaacattgaaaattcataccatgagcggagtgttgatataaagatccctgaagatgtggaagcagctttggaactgtgaaccaggcagaggttggaagagtttggagggctcaaaagaacacaggaagatgagggaaagttagaaacttgttagagactgattaaatggttgtgacgaa

SEQ ID NO: 426871 - DNA, 486 bp, Homo sapiens
gttatccctctgagttcatgcaagatggtaatgagtaatttcttgctctgagttcatgcaagatctgattcttttaaaaagtgtagcatctcccctcacctttcctgctccctctctcacctgtgacatgcctgctctggcttcaccttctaccataagcaaaagctctctgaggcctccccagacactgagcacagctggcatcacacttcctgtacagcctacagaaccatgagccaattcaacctcttttctttaaaaattacccagtctcaggtatttatttatagcaatataaaaaatgaastaacattgaaaattcataccatgagcggagtgttgatataaagatccctgaagatgtggaagcagctttggaactgtgaaccaggcagaggttggaagagtttggagggctcaaaagaacacaggaagatgagggaaagttagaaacttgttagagactgattaaatggttgtgacgaa

SEQ ID NO: 426872 - DNA, 556 bp, Homo sapiens
ttcacacttccgtatctctgggaattatatgcattattttctcattggttcttacagcttacattaattgactttcgattacatttatttccagtaatttttctttgtaaatgatagcccagagaaattttttccttttcataagctgtcacgaataatctcatccacaaacattcataataaaatacctgatattctgttgtaacaaaagatagaatcgttatatttcagtttcctgcatatctcttctctttttatcttataagtactattgtttaaggccatagacattatgaacagttaaattacagtgattattattctagtatctagaacagtgcctgayatatgttagatgcccaataaatgtttgtcaaatcaataaacaaataaccacttatggatcaccaaattagaagtgacaaatccctcttataattcccattattcatttaataattttaacgtgtctttgatcatctcattgacaaaatgattagtgggcaacattattatttaatagtaacagcaacaacaatgagaatagtataataac

SEQ ID NO: 426873 - DNA, 556 bp, Homo sapiens
ttcacacttccgtatctctgggaattatatgcattattttctcattggttcttacagcttacattaattgactttcgattacatttatttccagtaatttttctttgtaaatgatagcccagagaaattttttccttttcataagctgtcacgaataatctcatccacaaacattcataataaaatacctgatattctgttgtaacaaaagatagaatcgttatatttcagtttcctgcatatctcttctctttttatcttataagtactattgtttaaggccatagacattatgaacagttaaattacagtgattattattctagtatctagaacagtgcctgacatatgttagatgcccaataaatgtttgtcaaatcaataaacaaataaccacttatggatcaccaaattagaagtgacaaatccctcttataattcccattattcatttaayaattttaacgtgtctttgatcatctcattgacaaaatgattagtgggcaacattattatttaatagtaacagcaacaacaatgagaatagtataataac

SEQ ID NO: 426874 - DNA, 577 bp, Homo sapiens
taatggctcattatatttgaaattaaaacataaactaataatgtagagtaaagccaccaagcaccatttggaataacagagaaaacatataaacaaatcattgtaatatcataaaataaaataccaagcctagtatgtccawgaaattcctctagatgctgacagaattcctaaattctcattctggattcaaacttcagaaagtccaagattctccaggacattacttccaacttacattcttagggaactcctgaacacagaatttctccctctcagacctctccagctcaaatcacaattcaaagtactacaggtattcccaggggctatcaaccaggtcctgacctcctcagcagagctaattcaaagtggaaatgaggtagtcaacaactgggccctcctttacataagattcatttggcagactcttactgaccccaactatatgccaggcactggtctaggagctgaacacagaacaatcagcaaggcccctccctcaggagcttacgtgctaggggcaaaagcccagcaacaaccagatagacagagaaatatgtattatgttatcaca

SEQ ID NO: 426875 - DNA, 577 bp, Homo sapiens
taatggctcattatatttgaaattaaaacataaactaataatgtagagtaaagccaccaagcaccatttggaataacagagaaaacatataaacaaatcattgtaatatcataaaataaaataccaagcctagtatgtccatgaaattcctctagatgctgacagaattcctaaattctcattctggattcaaacttcagaaagtccaagattctccaggacattacttccaacttacattcttagggaactcctgaacacagaatttctccctctcagacctctccagytcaaatcacaattcaaagtactacaggtattcccaggggctatcaaccaggtcctgacctcctcagcagagctaattcaaagtggaaatgaggtagtcaacaactgggccctcctttacataagattcatttggcagactcttactgaccccaactatatgccaggcactggtctaggagctgaacacagaacaatcagcaaggcccctccctcaggagcttacgtgctaggggcaaaagcccagcaacaaccagatagacagagaaatatgtattatgttatcaca

SEQ ID NO: 426876 - DNA, 543 bp, Homo sapiens
tttaatagcgtcctaagtctaccgttggtgattagggaacagattaaaattaccatttggtttcagagtytgcttggctgttaacctacaaaactcagaatccatatactggtcaatcatttccaatcttttgacattcatactacttaagttacagtcaaccagtcaacaagtatttattgttctgccaaataggtgaactacgcatagcactaataattaattccttttaggcttgcatattctagaaggggagcattaaaaagaatcgttacccatataaaagtagaaacaaaagaatattgagaaaatgtttctcaaaagtgctggtgaatctcttttttctccttcacaatagagacatcaggagaatgtgttcaatatttatgtgttaaggaaaagtgattcatctaggaagaacgcgagacaattttataattgctgtttcactttcaaagatgtttagaattaacttgttgctaaatggaactgtaagataataagcgtcagttgtagtttcctgtatttttcagttagcattac

SEQ ID NO: 426877 - DNA, 543 bp, Homo sapiens
tttaatagcgtcctaagtctaccgttggtgattagggaacagattaaaattaccatttggtttcagagtctgcttggctgttaacctacaaaactcagaatccatatactggtcaatcatttccaatcttttgacattcatactacttaagttacagtcaaccagtcaacaagtatttattgttctgccaaataggtgaackacgcatagcactaataattaattccttttaggcttgcatattctagaaggggagcattaaaaagaatcgttacccatataaaagtagaaacaaaagaatattgagaaaatgtttctcaaaagtgctggtgaatctcttttttctccttcacaatagagacatcaggagaatgtgttcaatatttatgtgttaaggaaaagtgattcatctaggaagaacgcgagacaattttataattgctgtttcactttcaaagatgtttagaattaacttgttgctaaatggaactgtaagataataagcgtcagttgtagtttcctgtatttttcagttagcattac

SEQ ID NO: 426878 - DNA, 432 bp, Homo sapiens
attttcaaattttacaaaatcgctaccaagattagatttaaacccaataagattttttaaatcctaagtctattaaaaaagagagagagaccttttaaagtgtcttctctttcctctggtgggctttgcccccaaactgcagattattcctcagttaaacgacctgcttgtcaggcagacataactatctccaaactttggaaggggaccagcaagttcattgatgttaaatgcagattttctgaatatgtttctaagcataaatcaaataacagcaaaccacacacacgttgaacccatgaaaagcagagtggtgagtctctgggaasgttttctggtctagctgcccctgtgtagaaattctgattcgcgatgaggaagggggcgggccacgctcactgtgcacctcggccaagatcctgtccagttaca

SEQ ID NO: 426879 - DNA, 599 bp, Homo sapiens
cctttataaggccagcaaaaaatgatcaccagtaagaggtgtttcattggtgctctgctggacataatgcacacagtgccttactcaaggtagactgatatcagaccccttcgctcttcatacctatgggcattgttactcagaagacacaatttgactaacagttacgtgtsaagttctatttctttttgttccaactgagtgcctcttaggcatagaccagttctgctgcagagaaacccaggaccaagatagcggattcagacagaaccactcatctcctaggccagctgaattcccccctcccccatctcctttctcccctcccaggtttcctgagacctcatatacctatttattttcttagtgtgaaaaacttaccatctcatccatcattttcttcctgcaccctccaaaacgagaggccctcttcagcgtaggagggtgtggtgaccagaagcagctgctatccatagaggagtagcctagcttgcaattatcattctgctgtcataagagccacaagtgttagaaattaacctctgcaaggttttctgagccagataaaagaggatatttggcagtctttttactattgg

SEQ ID NO: 426880 - DNA, 565 bp, Homo sapiens
atctgcctcatatcaaatccagaacaataccaataaaatagggactcaaagtaaagatgaaatcaaggatactgcttgtgagatctcagaaaagatttagggctctgacccataaattcccttggatagaaaaaggggcttctaggaatcctcacaaattgcctcaaactctctcaccaaaaaaaaagaaagaaaagagaagaaataaagatcttctaaaaatagtaaaggtattatcccatagcaccctgacttgcaggcaaaattaggaagggatcagttttaaagagctttgtgggtataacttttgtctaatgaagttaacccctaataagatacctaagaaacccacaaagttttaaagagaattgtactagcacaaacatygccagattgaactaaaagagacagaagcatttcaaaataaaaagaagcctttgtgctctcaaccttctatgagcaagatgaagactgaaagccactcagttgtaagcatgagccatggagaatcacttccagatatcagaactaggccctaagatctgaaaatatgtacccagctaga

SEQ ID NO: 426881 - DNA, 536 bp, Homo sapiens
gtacatgtcacgaatgggaggaaagtgtgctcattaagagcaagaactgcaaagttagatcctgaggtcatattccagccatcctacttactacctatgtgatcttgggcaacttacttaccctctctgtgcctggctttctttatctgtagaatgtggatgttgtgatgattaaatgagcatttgaaacagtatttgccaccttataagtatcatataactgtcagctattgttataaacttagtaatgaaaattttgtaatagtrgtacagaaaattgtatagaaatgaaaattgtgtagtaatgaaaattgccagaaagtccctggcaattctattaatagagactgatattactaaaggtgtagagtgaatgacccaaagttggaactggtcaacccattaaattcattctacttgtgggagagaagggaggaaagagactgatggtaagtaaattaatgaatataggaataagaataatataaataggaataagagcaatgcagagaatgaaagaggttaatgtgacagag

SEQ ID NO: 426882 - DNA, 546 bp, Homo sapiens
tagacctgtgccacaatttactagctagcataccctctagggctttttcctctctccttcctagatacataaaccttgtaaaaaatcaaatcaaaattctctttctaaaagagaaatttgagctagctttttaaattctctttctcrcggtttttctatgaaactgtttaaaagtatttctaaatcacttaagtgaatatttctatctccagattttatatatatatattacttaagaaaaggttaggaaagcttacctggaactagagagaaaaaaatcctggagattaacataagaaaactttgagcttattctaacagctgtgtcagtgtggcactagtatatgcacacacacacaaacacacacacacacacacctgcagggaggtgagaagaaaacccactgtgccagactactccaaaaaccattgctttgttctctactggtctctgccggcatggtgattctgggcaaagcaggtggctaaagtgttctgaataatttggagcaggagagtctcattaccctcgtcatgacttgccca

SEQ ID NO: 426883 - DNA, 585 bp, Homo sapiens
ttcccttttggttacaaccctcagactataagcagttgaaggctaaaggactacgtcttatttctcttggagcaagactgctttggttcaaatctcagctgtgttacttacagcttgtgtaacctgggtaacttgtttaacctctcaatgcctctattttttggggaaaaacatagagataataatagcatcaacttcatagcattgttctgaggattaagtgagtaataatagctgtaaagtgcttagaacatggtgtgatgtgccataatcattgttaacattacagttattattattctttgtattctcagtatctcacatcatctttagctcatagcaaacattaaaaataaaaaagttggccragcgtggtggctcacatctgtaatttcagcactttgagaggccgaggggagcagaccacctgaggtcaggagttcaagaccagcctggccaacatggtgaagccgtgtctctactaaaacacaaatacaaaaatgagccaggcatggtggtgtgtgcctgtaatcccagctactctggaggctgaggcaggagaatcacttgaacccgggaggcgga

SEQ ID NO: 426884 - DNA, 569 bp, Homo sapiens
cctttaacttgcctcttttatgaggtagatgctctaagcttagagttatttttccttcaagataccattaagggctaatcacatgcacccagccttacccctagttctccctatcactgtatgcycctctccatatccacaaaaatgggcctgttctttttattgtgattaaaaaaactctaaaagtctttgagagcccattcattagaccattcctcaccaagaattcttctactatgcctttcctggaaagtacccactctagatagatccataagcatctgtgaatttgcagaccccactctcagctcacagttccaggtctgcctcaaggccatcttcacacatctccagggaggtcacttctcaactcgagagcccaagtcctctctgccctctacctgggctctctttatcagttctgctctctgatcactctcctgagcaacttcccagaactaatccctcctgcctttacatccagggatgaggagatcatgctcagtgcgtgaatccaacagtcaaattctatcttagtcgagtgcatttatgtaacaagaatgatagac

SEQ ID NO: 426885 - DNA, 569 bp, Homo sapiens
cctttaacttgcctcttttatgaggtagatgctctaagcttagagttatttttccttcaagataccattaagggctaatcacatgcacccagccttacccctagttctccctatcactgtatgcccctctccatatccacaaaaatgggcctgttctttttattgtgattaaaaaaactctaaaagtctttgagagcccattcattagaccattcctcaccaagaattcttctactatgcctttcctggaaagtacccactctagatagatccataagcatctgtgaatttgcagrccccactctcagctcacagttccaggtctgcctcaaggccatcttcacacatctccagggaggtcacttctcaactcgagagcccaagtcctctctgccctctacctgggctctctttatcagttctgctctctgatcactctcctgagcaacttcccagaactaatccctcctgcctttacatccagggatgaggagatcatgctcagtgcgtgaatccaacagtcaaattctatcttagtcgagtgcatttatgtaacaagaatgatagac

SEQ ID NO: 426886 - DNA, 569 bp, Homo sapiens
cctttaacttgcctcttttatgaggtagatgctctaagcttagagttatttttccttcaagataccattaagggctaatcacatgcacccagccttacccctagttctccctatcactgtatgcccctctccatatccacaaaaatgggcctgttctttttattgtgattaaaaaaactctaaaagtctttgagagcccattcattagaccattcctcaccaagaattcttctactatgcctttcctggaaagtacccactctagatagatccataagcatctgtgaatttgcagaccccactctcagctcacagttccaggtctgcctcaaggccatcttcacacatctccagggaggtcacttctcaactcgagagcccaagtcmtctctgccctctacctgggctctctttatcagttctgctctctgatcactctcctgagcaacttcccagaactaatccctcctgcctttacatccagggatgaggagatcatgctcagtgcgtgaatccaacagtcaaattctatcttagtcgagtgcatttatgtaacaagaatgatagac

SEQ ID NO: 426887 - DNA, 597 bp, Homo sapiens
ttctaaacacctctctaaagtagtttccacatcccctggacatctaccacatactcccttaccctgctttttcttcatagcgcttagccctacctgatatattactttttgtctctcactagaatgtagtcttatgaacacaacagatatttgcccattttactcaccactgctatgaatgcctaaaattattgctagcatatagaagggagtagaaggaaggaaagctggtgcattcccccatcacatagggataaaatgcccttctgcagcccgcaggtgttcagttccgaaaatcttgagtcccacaacagaaaaagagcagagtcaactggacaccacctacccagcctcattcagactttcataagccctactggccttctggagtaatctcctaattggtatctctttcacaagtctatgctctayttttttatccacccacatacctcttttcttgtttgttttggttttgtttgcttttaattaattgagatataagtgacacacaatagactgcctgtacttaaagtgtacaatttgatgagtgtgacatatgcatacacctatgaaaacatcattttgatcaagatg

SEQ ID NO: 426888 - DNA, 535 bp, Homo sapiens
cagtggtccctctcagctagaaactaaatatcttacaaaaaagtgtggcaatagggagctggcagaattcttcaagcaggaaagtatatttgagattaactttggcagtagtaatgagaaaggcttggagtgtgtattagtccattttcacgctgctgatgaagacatgccagagactgggcaatttacaaaagaaagaagtttaatggacttacagttccacatggctraggaagcctcataatcatggcggaaggcaaggaggagcatgtcacgtcttacatggatggcagcaggcaaagagagagagcatatgcagggaaactccaatttttaaaaccatcagatctcgtgagacttattcactatcacgagaacagcacaggaaagatccactgccatgattcaattatctcccactagtcccacccacaatgcacagtaattatgggagctacaagatgagatttgggtggggacagagagccaaaccatatcagagtgacaagctgggggccagtagaccagtaagagg

SEQ ID NO: 426889 - DNA, 623 bp, Homo sapiens
gtgggacttcaccttgtaatcctgtgagccaattcttcctaatcaactctcttttatatgtcctatttgttctgtccctctggagaaccctggctaatacagtggaattgaggaggacatcataaaagtctagaggacacttttaagaagtttgctgtgaagaagaggagagagaaaggatggtagctcatagtttctttaagatgggcacaattgcagagtgtcctagctgacaacagaatttcattcagatatttcatatgaagagacttgatgatgaggtggtttttagtgatctggacacagttaataggaccataacaagtggcatggcactgatgccataacaacatcagagaccgatggcagtaggaagcccttattatcccytggtccgaaggggcaatggcaggaaatagtgttaccagtgcccaatgagagatgataacttgaagcaaaaccttcaggcagaagctgtggttgcagagggataaagccattgccagaccatgatgtcaaaacagggagtcagtaggaaagaaaactcctgacctatctcttctaacttctgatctcttgcccatgcctcccattaacagaaccaaactggaaaccaaagggca

SEQ ID NO: 426890 - DNA, 567 bp, Homo sapiens
ggaatatcacataccagggcctgtcgcggggtggggggccaggagaagaatagcattaggagaaatacctaatgtagatgatgagttgatgggtgcggcaaaccaccatggcatgtgtatacctatgtaacgaacctgcacattctgcacatgtattccagaacttaaagtataataaaaaataaaataaaatgaaaaatttttaaaaaatagatattgtaaaatatcaggtaattttggatacgattataggttaaaatgacaatattttaaatatattggattaaaatatactattaaaatttaaaaagaatamaaataatcattaaaaaattggtttttgtgtttctagaatattccaggaactgtgctagtttgtatctcatttaattcttacagtcaccttatgagaaaggcacaaatgtcatagttttatagacgagtaaaggttgcagaatgtgagtatcttgctccaaatcattcagctagtaagcagcagagggggtctttaaacagcaggtctttctcactaatgaaaatgttaggtctatcttactactgtctttt

SEQ ID NO: 426891 - DNA, 572 bp, Homo sapiens
gggaaagaggaaggtcaaggtgaatccctctttcagacacacatggctcaggcaatgtcacccctgggctgaaaggcaatggtgggggcgtttccagccagactgagcaaggagaagtgacatttaagggcttttgaagaaatactgcacttttggcaaagagaccccaagctgcacctgcgtttctgcaggctcttcacttgctttttatatcctcacagtctgtatctggaattgctgaaaggtggaaaatctgcacaccccttaagcattaagacagacmgcaagggcagggcagaatgtgatgaaaactcaggagacctgactctccagtaaccaggtatgtataactccagcccttaccatggtgccttcagccaaggctcataatctttatttctgcaatactaccactaataataactaacaattattgaacaccttctgtactgaatgctttacatgtatattattgcatttaatcctcacaataacctcaaaggaagttattattgtccttattttagagaagaaattaaagttctggcaggttaagtagctggcccaagatc

SEQ ID NO: 426892 - DNA, 607 bp, Homo sapiens
tttatttggcccaagcatcagagtgataccccatgagcaatggaaatgaagagaagtagaaaaactgaagggaaggctcaaaggaattgctaccggcatagtagcttatcgcataaagattacttatcacatacagattacatgaattaaattttgaaattatcatgctttgtaagctactatgcatagaactctattccttagacatgctttgcattagattttaaaattaacatgctttgttagctaatcataggactctattcctcagacaaataaactaaattaaacaataccttgttatcattctgtttatactgcartttaatatatttgaattagtacaggctggttgtcaaaacacctaaacagcagagtgctagggatagcatgaatctcctcctgtcagtgaattaagcgtttagcccttatatttaagcataattttccaagtcatcagtgatatttttagagtcttagaggagatcatttattacctgaaaatccaggtttattcaccttccatggatgaatagtttgtatttagggagtagtatagatcatttatcaaaggatctgaccaatgttaccctcattttgtttgaaa

SEQ ID NO: 426893 - DNA, 605 bp, Homo sapiens
cacatgacagtcactggtccaaagcatttctgaaatctaattgggcttatgttgccagttccttgattagggtttggttctgagagtagttttccatggcttttatttctatcctcaggaatactgttgtctccctcttgtttattaatcccaatcttcctttgccacagaaatggttcatgtttgcagctaagtaamtgtctcagcctgatccttgctgatataagattaggaacccagaggcatcttttcatttcaaactgactctgacccttttagtccaagcttatgatgtttctgtatacacaattcccttaaagattgtataggtttcttatgaatagtagtggggttcacttcactaaacaacaacttcactcagaaatctctctgatacaggccccagttcgcctcgtgctgaaggtgagagtgttgagacataacactcttaagattcttagaaaactttttgtctaattcaaatgctctgtaaggcacactcttaagtcttcctgaaatcttaacaatgtgtcttacagttgcactgtcaccaggctggaatgcagtggcactgcattaataatcatctgaaataatttttatcc

SEQ ID NO: 426894 - DNA, 578 bp, Homo sapiens
atagacaaacctacctatggaagagaacacagacctaagaaacagagcctcacatacatggccacctggttaacaataatggcaaaaccacagttcagtgcataaaagtttatcttcatactaaatggtgttgggtctgttggatatctatatggggaaaaaatgtaacttgagctctgttaaggactacattgtgtcctcccaaaattcatatgttgaagtgtcaaccttcagtgtaaccacatttggaaacagggtccttaaggaggtaattaaggttaaatgagattataaggaagaggccctaatccaataggacygatttccttatgagaaaagaaattgacactaggagtacatgtgcccagggaagagattatatgaggacacagagagaaggtagccacctgcatgccaaggagagaggcctcaggagaaagcaacactactggcaccttgattttggactccacctccagaatgatgagaaaataaatttccattgtttaagcccaggctgtagtatttcattatggcagccttagcagactaaaacagattttggtactgtgctgtac

SEQ ID NO: 426895 - DNA, 645 bp, Homo sapiens
cttcaacatatatattttggtggcacacaaatattcagtccataacaaccctatacagggagaaggcaaaagcttatctgctgtcactctggactggctgcatagagatcagacttttaatacttctaasttgattagatcttaagcataaagagaaaatggagagggaaaaatgaatgaaataagattgtagtatatattttccatttcccaaaacatcccagcccaggtttctacaaaactgaagatgggaggttatctgaatcatcaaggacaaccatctcaaccatcagggacagcagtaaatccatcacctttccaagctgctgtgaacttgggtgtttgatggggagctcactaagcaaggagcagatggctatagaaaagaaccctccttccagacagctgggccccagtctgtccccaagctcagctgtctccttcccttctagacagagcaggtgcttagcaagaaggaaaactctataaaaggggctcacaagtccagctgaatatggacaacctctaaagctggtaggacatgcatgtatgactttttctcctaaggtcatctaagtaactaaaattactaaccttcagtccatgaaaaatgttttttcattgaatctcttctttggtttgctt

SEQ ID NO: 426896 - DNA, 573 bp, Homo sapiens
aatccaaccctgcatgaagtgtcagcaggaaatctgagcctccagcgagacatttattcctcaaagagaaaagccaatcgcaagctctgcactaagactttcaggcttctcaagccctcccgagtgccgagtgctcagtcagaaracacttttccccttagaacatcccatcactaagtcctctctgctatatacttgcttttctctgccccaagcctaagcatgcctcttcagaaccctactgggggagctacatacagaagaatatgcaaataatcatccatttgggccagtccacagtctctgggcctctgggccatgctgtttcactaaaggacccacagaagggcctgaagagctgaccagtggccagggtggtgcaggtggttattaagatctctgcactataaaaacacatcctgcttgcttttccattgtactggcctcgcttcgacaataagagcaggaatccacagccactttactccttcctaagcagactcacatattccccacacagaggcacatttgaccctctttaccattttaagataaacgtatacatgcttagtg

SEQ ID NO: 426897 - DNA, 573 bp, Homo sapiens
aatccaaccctgcatgaagtgtcagcaggaaatctgagcctccagcgagacatttattcctcaaagagaaaagccaatcgcaagctctgcactaagactttcaggcttctcaagccctcccgagtgccgagtgctcagtcagaaaacacttttccccttagaacatcccatcactaagtcctctctgctatatacttgcttttctctgccccaagcctaagcatgcctcttcagaaccctactgggggagctacatacagaagaatatgcaaataatcatccatttgggccagtccacagtctctgggcctctgggccatgctgtttcactaaaggacccacagaagggcctgaagagctgaccagtggccagggtggtgcaggtggttattaagatctctgcactataaaaacacatcctgcttgcttttccattgtactggcctcgcttcgacaataagagcaggaatccacagccactttactccttcctaagcagactcacatattycccacacagaggcacatttgaccctctttaccattttaagataaacgtatacatgcttagtg

SEQ ID NO: 426898 - DNA, 633 bp, Homo sapiens
aactactcaatataggtaagtttccctccctgacctcaaccaccccttccatcactggagatgttcaagcagtgtttctaacaccaggcatgggtcaatgaaacctgaagccagtcatttccaggatatcagccccagatagatacatcagtrtcattcaaatctgttattattgtgaacacatctattttgcccttatgatagatcaatggtctggaattagaagctaatgacaactaataactgaataaacagttcaataatgaagtccgtgtgtgcataaagatgtttccatcaacattctttagaaagggcctttatactaataccttccattttatacagtcttttaagttttttgagagctttcagttctattatctcatttgagcctaacgggactctaggagtgaagattataatccccattttcaaacaaagaagctattttgtgatttgcccaaggtccccacaccactgaggcccaggaccaatcccagaaccccgagctgacttatctcttccgagccctgctgcctctttgaacaagttgtcaactcaattgaatccaacaaatattaataccttcatgaacaagctctgcaaaagaaagaaaaaggcacaaatagagat

SEQ ID NO: 426899 - DNA, 666 bp, Homo sapiens
gctgctggtacactcatgttacattctgttgactctgttagataaaaatctgtctgaatattaaaagcattgtggaaaaaaatttgctttatgttatgtgttttcccatttgccrgcatattgccaaactataattcaaaaaaaaatgtgttttgatctctgttggagtcaaagataaagcaaaacaaacaatagactgaagggggataccataccacaggaagaccaaaatgtgaatgaagcaacaatttgttcctcttagtttggttttaaagggtgaggattttggtgaactccctacagagtttacttttgttcctaaaacaaaagcaacagatatgctagtgttccccgcaaatgtcaagaaatcagatctgaaaaacaggatttatattccaatcatttaaataaaagattttctgtgttattgaacacataacaccaatgtatccacacactagagcacactgtatgtaaagaaacgcaactttcatcaaaaacatgggaaaatattagcaccctaatgaatactgtctgtgcctttgcatatttcccctttcctattacagaaaaccaacaacatatgtttggggaaaaaattaagccataagaaagtttctaatttgcaaatttggctggattattgcatccatgtgtcagagtaag

SEQ ID NO: 426900 - DNA, 543 bp, Homo sapiens
caagttacacaggaccctgaactaatacttccctaggccagaaacagtttagtgccatttagaacaaatcactgtatgtactatactgagacccattttcatttctcaactgaacaaacattctggagacgaatgagcaaaatattatcaagtgcaatgttactgtcttcaagaagtaagttccagaaattgaagctattaagactgtttgaaagaaaacaaatcaacctaacagcttttttaaaattttctttttttaaatcattgcttgaaaaaactgaagtcaatcttcagcagtatgagtctccaaagcagagagaaattgttttaagttatttcataacaagtatcattatctcacattcttgttaccccattgtataatcaatttgttattaggtcttgactatgcrgttatttataacaaaagttgtcagcaaattgctggtctttttcctgtgaaatcatttcagagaaaataactcagccctgaagtcagccaaaacaccctctacaagagtagcatagaaacaaatgatattt

SEQ ID NO: 426901 - DNA, 573 bp, Homo sapiens
agatgaaggataaaaattaaagactgaggggccaggtrcagtggcttatgtctgtaatcccagcactttcggaggccaaggcaggaggattacttaaagccaggagtttaaaaccagcctgggcaacatagcaagaccccctctctacaaaaagtcaaaaaataaaaataaaaataaaaaagccaggtgtggtggtgtgcacttgtagtcctagctactcaagaagctgagggggagaatctcttgagcccaggagttcaaggctgcagagagctatgatcatgccaccgcactccagcctgggcaacagagtgagactctgtctctaaaaaagaataaaaattaaaaattaagactgagaagcaatttttcttctgtgccttattttgtcctcatctcttttcctcttagctgagtccctctattcctactctgcacaaaagctcatgtccaccagcaattagaacactttcaagccctttatcaaaagatgtttaatcacatattggtaatgcaatgaagcaaacagccttgttagaagaaaatacttacacattaaaaaaattaactcac

SEQ ID NO: 426902 - DNA, 613 bp, Homo sapiens
caaatttgtatcccagtccctagttcagtgcctatagcataaaaggggatcattagtatttgtggaacactggtgaagttcccaccatttcatacgatttctgtgaaatacttaccacataacatcatctgaatttgaaaccagaagactgactaaaggatcataggcttagtatgtggaactagtatattatatgaggcttcascaataagtggaatttgctgaataatatttcagagttgccccagccacatgtgataaaattggttttttagaatctttatattttttctatatttaattttttgacctgcagagtttctttgggtataaaaactggtttcttggatcaacttcaaaactgacctatcaggacatgaaagacatttgttgtttttacctgctcagcatctagttttcttttaagaatccatcccttcaccaaattaatcatgcaagtagggtatgatagacccccacccttgctgttaggatggccacatgacccaggcttagccaaactagagcattccatccaactagctgcagtgacttatccagacaggtacatgtgtcccaacccaggtccttcttagccattggggatcacctc

SEQ ID NO: 426903 - DNA, 626 bp, Homo sapiens
gtggttggatttctgtcactgactccctaaacaatcaaaacaaattccaaattgggaaagaaattgtaagtaaaagaccctaacaagagtgattagctgagaggatctaggaggaggttcatggagacctaccaatactaagttgagaggctgatctgcattcttcttaggtgattgcacagctgctggtaagctgctgctcatattttgagacacggattgtgtgtctgttaaagccagagaccaaagagtcaggaattggaagggatcatatatatttataagaaaaatttagtcttctactgaacatagtccctcagaaagcagaaagagaagaaaatataatatcactaaaatagaccctttctgactgaggccaacaaaccaggagagctgaaagtcagcaacctggcaamttttaaggacagaatatgcaaacttttctccatcaaagtaaagttagtgcaagaaaatgaaaggaaaacataatcaaggagataagagtgaagcctcacagagtcttcagccccacgtctcctccaaactctccttaagtctggcatatctaattgaagaaaaatggcagtcaaccttcagcaaaaaccatcccctgagatgcaacctgg

SEQ ID NO: 426904 - DNA, 657 bp, Homo sapiens
tgttgactcattttgtgtctgtaacgtgtctgtcagcctgcagacgaagattccattcagttgactcacccaccctccaaaatcctctttccttctccttttaatccaaggcagacaaggctccccstcatgcctgagaatgtacctcttatctgtttctcttattcctggctgccttattcaggacagctgacagctttacaaaatagcttctgtctcttacagattcctcatcaaaggagcctggggggatttgggagcccttctcagaacgagagagcaaaggagagcctgacccatgcaaaatacagagggacaatatacattgtctgcttgttctatctactcatgaaggacaagattgtgtgggtttttaaatcccgtaggtcagtttaaccatcaaatccctaacagtaaatgcatgataggtgtagaattcggaagtgttctttttgccatcaggattcacttcattctcttttaataacctccataaaattaatacctattaataatagatttgtttggtgatatgaaggctaaaggaaatatgtggagtcatgtcctacccaaaggttatgttctgagtgtatcacaaagcttaagtattttataaattttaaaagtctagtcaacaaaaaaattacatcaccttct

SEQ ID NO: 426905 - DNA, 657 bp, Homo sapiens
tgttgactcattttgtgtctgtaacgtgtctgtcagcctgcagacgaagattccattcagttgactcacccaccctccaaaatcctctttccttctccttttaatccaaggcagacaaggctccccctcatgcctgagaatgtacctcttatctgtttctcttattcctggctgccttattcaggacagctgacagctttacaaaatagcttctgtctcttacagattcctcatcaaaggagcctggggggatttgggagcccttctcagaacsagagagcaaaggagagcctgacccatgcaaaatacagagggacaatatacattgtctgcttgttctatctactcatgaaggacaagattgtgtgggtttttaaatcccgtaggtcagtttaaccatcaaatccctaacagtaaatgcatgataggtgtagaattcggaagtgttctttttgccatcaggattcacttcattctcttttaataacctccataaaattaatacctattaataatagatttgtttggtgatatgaaggctaaaggaaatatgtggagtcatgtcctacccaaaggttatgttctgagtgtatcacaaagcttaagtattttataaattttaaaagtctagtcaacaaaaaaattacatcaccttct

SEQ ID NO: 426906 - DNA, 603 bp, Homo sapiens
gtcacattctcctcaaattttatgatatttttattcaatatttcatattcctcataactgattggagatgaaaaataattccttttttcttcagtaagaggaccattcagtgaggcattcctgaaggctttatttttcttactgctgttttgttatttttattgataaagggtgtttattttttaaccaacttttacatacaataaaatgcatatattttaggtgtacagctctgtgagttttggcaagagtatacacctgtatctattgccaccacggttaagatgtagatagaacacttccatcatcccagaaagttcctttagtgccacttrgtagtcagtcccactccaagcaactcctgatctgaatcctatcactgtgttacttctaccagttttttaatttcatataaatggaatcatacaatatgttctcttttgtgtctttcttctttcactctgtatagtatttctgaaatgcatccatgttgttccatgtattccatttttgtttgcttgttgtttgttttgttgttgagtagcattctattgtatgaatatactacttatgtttattattcacctgtgtagacatttaaat

SEQ ID NO: 426907 - DNA, 535 bp, Homo sapiens
tcaacttgctagcctatatttttagttcaagtgacagttttaaaattacaaaggtaaaaaccttttgctaaatcaggttttaaatgtgccacttgtcaaactagtacatttttacaacttttaaaactacagttttatcacgaaaggtaaaaatacaaagtggtggtattattcttcatttctaccaccaccccacaccacccctctttgcattggagcggcagggaggyggcagggggtgggtgtttttctctgcgggaaaccgggcttttctcagcaaaactcttggaaagacacattttcattcatgtcgcaacactgttagatcactttccaaccccagagctgttatcattgcacaggaaggaggaaaataagccttgcagcaatcacaaaatttcatcgctgagaggaaccccagacgtcatcaggaacagatgagaagagaggagagaaaggtaaacccacctgcccatgttgctgggcccctcggggcagaacctggctgagattccatttctcttcatacctgatg

SEQ ID NO: 426908 - DNA, 501 bp, Homo sapiens
cttgtgggaagtaattagattatggcagcagtctccccatgctgttctaatgatagtgagttctcatgagatctgataattttataaggtgctatttgttcagcacttctccttctggctgccatgtgaagaagaacctgtttgcttccccttccaccatgattgtaagtttcctgaagcctccccaaccatgcagaactgtcagtcaattaaacctctttcctttacaaattrcccagtctcagatatgtctttatcagcagtgtgagaatgaactaatacaggtattcatgagaactctctcctcaggctgggtcagagctccagcatcttccagtgatgttctatctggtatttctgttctaactctcagccccacagtagcatgacctgtatgatcttgccccacacctatacatctcagtcctcagtcaagaactcatgggaactcctataaagatttctttctcgggtaattttttgtatttttagtagagacgg

SEQ ID NO: 426909 - DNA, 558 bp, Homo sapiens
ttctctgcgggaaaccgggcttttctcagcaaaactcttggaaagacacattttcattcatgtcgcaacactgttagatcactttccaaccccagagctgttatcattgcacaggaaggaggaaaataagccttgcagcaatcacaaaatttcatcgctgagaggaaccccagacgtcatcaggaacagatgagaagagaggagagaaaggtaaacccacctgcccatgttgctgggcccctcggggcagaacctggctgagattccatttctcttcatacctgatgagtggttttgcatcatgtcccartgcccttcctaacaccacccccctcacatggccagtgcctcctggttttgcacctcagatctctctccctctaccagccaaagttaatagctttgcttacagaatgaccctcatctgaagacttgtagaatctttgtagagttagccaagagaaaaacacctttcctgcaaggtcaagaaaaggcccaaatcactgttttattagaaatgagatgtggtgcctgggaatgagaggaagtaatgttacc

SEQ ID NO: 426910 - DNA, 549 bp, Homo sapiens
tatttattttttgcattgcttttcattttctccctgtttctggctggatctgtctcaagaacttgctctagtatttactatcatacaagtcagctggataataaaattatctcagtttttgttggcctaaagttatttagtttgctttattttttaaatgattttttaccgggatggaatcctaggttaacagtttattttcttcaaaagtttaaataaataayttgaagcaattttttaactttgaataatttgttagcttccatttttctttagagtagtcgcattagttttattttggcttctgtctgcttttaagattcttttttctttggtttgtggcaattgtactatgatatggctaggtatggtatgttttatatgtatcctagtagagagttgtagtgcttctggactctgggtatctttcgttatttttggagacttcttagccattatcccttcaatcatggcttctctagcagaaattttattgacaggttctaaatgtacatactgtttggcctatccaccatattccatatttgt

SEQ ID NO: 426911 - DNA, 549 bp, Homo sapiens
tatttattttttgcattgcttttcattttctccctgtttctggctggatctgtctcaagaacttgctctagtatttactatcatacaagtcagctggataataaaattatctcagtttttgttggcctaaagttatttagtttgctttattttttaaatgattttttaccgggatggaatcctaggttaacagtttattttcttcaaaagtttaaataaataacttgaagcaattttttaactttgaataatttgttagcttccatttttctttagagtagtcgcattagttttattttggcttctgtctgcttttaagattcttttttctttggtttgtggcaattgtactatgatatggctaggtatggtatgttttataygtatcctagtagagagttgtagtgcttctggactctgggtatctttcgttatttttggagacttcttagccattatcccttcaatcatggcttctctagcagaaattttattgacaggttctaaatgtacatactgtttggcctatccaccatattccatatttgt

SEQ ID NO: 426912 - DNA, 557 bp, Homo sapiens
tttgtttttttgttttggtctggttttatggcttgtccattttaagaaatctaaagggcacttaaaccccaatgactcacaattcaargcatgaaataaaaagcaaatggagaccaatttcaaactagccttgactgaaagtgagcctcttgaagttacacaacccaggataagctctggccagaactgcgggctgcccaaattatttgtctttcctatgggagtagagggtttgtcctttttctgggctgttacatagaggctggagtagctttggggaatataaagcatcattttggccaccaatcttccccctcaccctactgccaaaaaagttctaaaccaagaaatcagtttgtcctagacaaagaaggcagcataataaactcaaggaaggagagagttgctctttgttaggctaggtgtcttatatttttatagtgagtcaagtgcttgattcagaagattttggaagagaatcaggcaaaggagaggagagaaaatggcaagactagaatagtgactgaaaaaggaggaaaaataataaataggtcttg

SEQ ID NO: 426913 - DNA, 614 bp, Homo sapiens
taacataacttaagaaaggttatcagcatgtcctggttcctctaagaaaaaaaaagagagccagaaagggatatttggagctatcaagaatatggtgtgctgtgaaaagaaattaaatttttggaccccaaactcatttatccaaagggaaaagtcaagctgggaactgagtcacacaaacctgcctcccccttttggttcctcgatgagatggctaccagatgaaaggctaccygcctcccccatattttgcccacaaggaaattcctggccagctgttaaaaacttctccatggccatgcaaattgatagcttatctttacaggtgcagtcacccagcctgccagacaaaaatgcatagctgattgttccccttccccattttgtctgttatgtaaaatgcagattcttcacatttttcctctgccccccccttgtttatgtaaaaactgtgtgcttctcaatatcccaccctttcccctttaaatttggagccctcaaaatcatctttggagaaaggcgtagacctgtctcccgggtgcatccttaattttggcaaataaatctcctaaaatgattgaggcttgtcattttcctcggttgacagtgtctac

SEQ ID NO: 426914 - DNA, 494 bp, Homo sapiens
aaggggcattattctgcctaccacaacatcctttgggaaatcgctgagcaaccgttaccatcaattcatgtaacaaggtcatacmataaataataatatttctgggtcagtgattccttcctttattcaacagatacagttggctattgttattcgaagtagtcatgttctatgaagtagctgtgaactatgaattagctaatttactaaaacattgctcctaggggaaacatgtacatatgtacacatatctcacatagattatcaaattaaagcctaaaaaaacttttcctggtagattctattttttttttttactttagaaaagagaaaatggccttcataagttttaagtgacttgcctgaggacacccactaacagatatcagagttgggatttaaatcccattcaagggggtctcagtcagagcttcttgcactacattgcactgtttcctgccatctctatcttctggtcatttctgtattagagc

SEQ ID NO: 426915 - DNA, 494 bp, Homo sapiens
aaggggcattattctgcctaccacaacatcctttgggaaatcgctgagcaaccgttaccatcaattcatgtaacaaggtcatacaataaataataatatttctgggtcagtgattcmttcctttattcaacagatacagttggctattgttattcgaagtagtcatgttctatgaagtagctgtgaactatgaattagctaatttactaaaacattgctcctaggggaaacatgtacatatgtacacatatctcacatagattatcaaattaaagcctaaaaaaacttttcctggtagattctattttttttttttactttagaaaagagaaaatggccttcataagttttaagtgacttgcctgaggacacccactaacagatatcagagttgggatttaaatcccattcaagggggtctcagtcagagcttcttgcactacattgcactgtttcctgccatctctatcttctggtcatttctgtattagagc

SEQ ID NO: 426916 - DNA, 494 bp, Homo sapiens
aaggggcattattctgcctaccacaacatcctttgggaaatcgctgagcaaccgttaccatcaattcatgtaacaaggtcatacaataaataataatatttctgggtcagtgattccttcctttattcaacagatacagttggctattgttattcgaagtagtcatgttctatgaagtagctgtgaactatgaattagctaatttactaaaacattgctcctaggggaaacatgtacatatgtacacatatctcacatagattatcaaattaaagcctaaaaaaacttttcctggtagawtctattttttttttttactttagaaaagagaaaatggccttcataagttttaagtgacttgcctgaggacacccactaacagatatcagagttgggatttaaatcccattcaagggggtctcagtcagagcttcttgcactacattgcactgtttcctgccatctctatcttctggtcatttctgtattagagc

SEQ ID NO: 426917 - DNA, 494 bp, Homo sapiens
aaggggcattattctgcctaccacaacatcctttgggaaatcgctgagcaaccgttaccatcaattcatgtaacaaggtcatacaataaataataatatttctgggtcagtgattccttcctttattcaacagatacagttggctattgttattcgaagtagtcatgttctatgaagtagctgtgaactatgaattagctaatttactaaaacattgctcctaggggaaacatgtacatatgtacacatatctcacatagattatcaaattaaagcctaaaaaaacttttcctggtagattctattttttttttttactttagaaaagagaaaatggccttcataagttttaagtgacttgcctgaggacacccactaacagatatcagagktgggatttaaatcccattcaagggggtctcagtcagagcttcttgcactacattgcactgtttcctgccatctctatcttctggtcatttctgtattagagc

SEQ ID NO: 426918 - DNA, 579 bp, Homo sapiens
gttgttgttctttgcatttaagttatgcatttgctctcagccgtgctttcatctattcttttgagatttcaaatattaaaaccttaagtgtgatctttgcaggtgtattgtcaagataaaattcatgaattctctctaagagaaatgtctttagacttagtaaagggttactactatastgttttctgattgatgcaagtactgtggagcttaaaagtcaaaatggtagatatgaaaatgagttttttggggaatactttatttgcatcaaataatgtgtaagatatattggcacatctgtatgattatgtgtcctcagccctgtcatacccatcatttctttcactgaattacagaagggattcctaaggagaaaaccacataattcctgtttgtaattggcaattataaggaaagacaagctttaaattaaatcttgataaaaactgatcatgctctttctaaaatgacaacatagactttttctctcctcctctgctctaataaatgaattaggcacaactgtagatttcaagacgttcatgatgttttagaagctcagggggatagaaagatcaa

SEQ ID NO: 426919 - DNA, 482 bp, Homo sapiens
gatcatgctctttctaaaatgacaacatagactttttctctcctcctctgctctaataaatgaattaggcacaactgtagatttcaagacgttcatgatgttttagaagctyagggggatagaaagatcaattacacctggtacctgcccttagggagcttgtagtcaaattagtgcagataagaaacaaaggcatataattataaactcaggaaaaaactgattccagaatgaagataaagtctggaccacaggataccagaggaaggagagatctatttagacagaaggattacagtgcaggtggttcttaagcaggttgttgaaagatcaaatttagatatgtgggtcatcaggaaaaaaaggtgtttcagaaataagaacaggactattaaaggcactaacacaggaaatctctggtgtacactgatacaaatcaaatagttcagtttcattgggttaatgtatgaaacagagttgtt

SEQ ID NO: 426920 - DNA, 482 bp, Homo sapiens
gatcatgctctttctaaaatgacaacatagactttttctctcctcctctgctctaataaatgaattaggcacaactgtagatttcaagacgttcatgatgttttagaagctcagggrgatagaaagatcaattacacctggtacctgcccttagggagcttgtagtcaaattagtgcagataagaaacaaaggcatataattataaactcaggaaaaaactgattccagaatgaagataaagtctggaccacaggataccagaggaaggagagatctatttagacagaaggattacagtgcaggtggttcttaagcaggttgttgaaagatcaaatttagatatgtgggtcatcaggaaaaaaaggtgtttcagaaataagaacaggactattaaaggcactaacacaggaaatctctggtgtacactgatacaaatcaaatagttcagtttcattgggttaatgtatgaaacagagttgtt

SEQ ID NO: 426921 - DNA, 597 bp, Homo sapiens
tttaacataaagagaatgatgatatccattcattaaaactgaggacagagaatcttcccaaataatgaccaatctaaatataacaatttgatttcrgaacagtctaatctgtgtagatgttaaatcattattgctcacatagtcatatataattatatgctattagtttcattgaatttataaataaatctctcatggtctcttgaaattagctttatgggagaggaatatctgaaataaaataaaaacccacattctacattcctttaggagaatggggccataactaccataagtaaattattttttatttttttttctttttgagatggagtttcactcttgttgcccaggctggagtgcaatggcacaatcttggctcactgcaacctcctcctcccgggttcaaacgattctcctgtctcagcctcccaagtagctgggattacaggcacatgccaccatgcctggctaatttttgtatttttagtagagacagggtttcatcatattggtcaggctggtctcaaactcctgacctcaggtgatccaccctcctcggcctcccaaagtgctgggattacaggcatgagccat

SEQ ID NO: 426922 - DNA, 597 bp, Homo sapiens
tttaacataaagagaatgatgatatccattcattaaaactgaggacagagaatcttcccaaataatgaccaatctaaatataacaatttgatttcagaacagtctaatctgtgtagatgttaaatcattattgctcacatagtcatatataattatatgctattagtttcattgaatttataaataaatctctcatggtctcttgaaattagctttatgggagrggaatatctgaaataaaataaaaacccacattctacattcctttaggagaatggggccataactaccataagtaaattattttttatttttttttctttttgagatggagtttcactcttgttgcccaggctggagtgcaatggcacaatcttggctcactgcaacctcctcctcccgggttcaaacgattctcctgtctcagcctcccaagtagctgggattacaggcacatgccaccatgcctggctaatttttgtatttttagtagagacagggtttcatcatattggtcaggctggtctcaaactcctgacctcaggtgatccaccctcctcggcctcccaaagtgctgggattacaggcatgagccat

SEQ ID NO: 426923 - DNA, 597 bp, Homo sapiens
tttaacataaagagaatgatgatatccattcattaaaactgaggacagagaatcttcccaaataatgaccaatctaaatataacaatttgatttcagaacagtctaatctgtgtagatgttaaatcattattgctcacatagtcatatataattatatgctattagtttcattgaatttataaataaatctctcatggtctcttgaaattagctttatgggagaggaatatctgaaataaaataaaaacccacattctacattcctttaggagaatggggmcataactaccataagtaaattattttttatttttttttctttttgagatggagtttcactcttgttgcccaggctggagtgcaatggcacaatcttggctcactgcaacctcctcctcccgggttcaaacgattctcctgtctcagcctcccaagtagctgggattacaggcacatgccaccatgcctggctaatttttgtatttttagtagagacagggtttcatcatattggtcaggctggtctcaaactcctgacctcaggtgatccaccctcctcggcctcccaaagtgctgggattacaggcatgagccat

SEQ ID NO: 426924 - DNA, 615 bp, Homo sapiens
attgatgctatcagatacagtgccayctttttattgagggcatgataggctaatgataatgaaatttttaagagttctgcataatagcaagatttttaataactagagcagaatgatagaaatctcttgtaaaagtgggttccaaaagatcttagagttagttgattgtttaaatttataacctcattagtagtatagacagattcctgcatcttagaaactcttaggaaaatgccagtttcgattcatcaatactccaactttaacttcaaatggaattgccctcaattttaaaatgacatgaattttaataaaaaatgaaaactagagaaatagttacgtgaaggaggcatatatgggaaagtggaggctaggccttcaggttttacagaagcaagcatttctaacaaacagagacagacttgaaacaggctagagaacccttaagtaggaaatacgcataacaagttgttttaattgctaatgcatttgtataaacagagcaatctatgacaattgtgctgtcaataatctctgagatatggttaagtaataaagcaacaagaaatgatattgacagacaaatggagatccaataattgtctgcagcatcaa

SEQ ID NO: 426925 - DNA, 615 bp, Homo sapiens
attgatgctatcagatacagtgccacctttttattgagggcatgataggctaatgataatgaaatttttaagagttctgcataatagcaagatttttaataactagagcagaatgatagaaatctcttgtaaaagtgggttccaaaagatcttagagttagttgattgtttaaatttataacctcattagtagtatagacagattcctgcatcttagaaactcttaggaaaatgccagtttygattcatcaatactccaactttaacttcaaatggaattgccctcaattttaaaatgacatgaattttaataaaaaatgaaaactagagaaatagttacgtgaaggaggcatatatgggaaagtggaggctaggccttcaggttttacagaagcaagcatttctaacaaacagagacagacttgaaacaggctagagaacccttaagtaggaaatacgcataacaagttgttttaattgctaatgcatttgtataaacagagcaatctatgacaattgtgctgtcaataatctctgagatatggttaagtaataaagcaacaagaaatgatattgacagacaaatggagatccaataattgtctgcagcatcaa

SEQ ID NO: 426926 - DNA, 615 bp, Homo sapiens
attgatgctatcagatacagtgccacctttttattgagggcatgataggctaatgataatgaaatttttaagagttctgcataatagcaagatttttaataactagagcagaatgatagaaatctcttgtaaaagtgggttccaaaagatcttagagttagttgattgtttaaatttataacctcattagtagtatagacagattcctgcatcttagaaactcttaggaaaatgccagtttcgattcatcaatactccaactttarcttcaaatggaattgccctcaattttaaaatgacatgaattttaataaaaaatgaaaactagagaaatagttacgtgaaggaggcatatatgggaaagtggaggctaggccttcaggttttacagaagcaagcatttctaacaaacagagacagacttgaaacaggctagagaacccttaagtaggaaatacgcataacaagttgttttaattgctaatgcatttgtataaacagagcaatctatgacaattgtgctgtcaataatctctgagatatggttaagtaataaagcaacaagaaatgatattgacagacaaatggagatccaataattgtctgcagcatcaa

SEQ ID NO: 426927 - DNA, 615 bp, Homo sapiens
attgatgctatcagatacagtgccacctttttattgagggcatgataggctaatgataatgaaatttttaagagttctgcataatagcaagatttttaataactagagcagaatgatagaaatctcttgtaaaagtgggttccaaaagatcttagagttagttgattgtttaaatttataacctcattagtagtatagacagattcctgcatcttagaaactcttaggaaaatgccagtttcgattcatcaatactccaactttaacttcaaatggaattgccctcaattttaaaatgacatgaattttaataaaaaatgraaactagagaaatagttacgtgaaggaggcatatatgggaaagtggaggctaggccttcaggttttacagaagcaagcatttctaacaaacagagacagacttgaaacaggctagagaacccttaagtaggaaatacgcataacaagttgttttaattgctaatgcatttgtataaacagagcaatctatgacaattgtgctgtcaataatctctgagatatggttaagtaataaagcaacaagaaatgatattgacagacaaatggagatccaataattgtctgcagcatcaa

SEQ ID NO: 426928 - DNA, 594 bp, Homo sapiens
atgtgtatagctttttagaaacttttactgaaagtctgtatttgcgtggaaatgaaaccaattaagaaatacaaatgacatttctttccagcttgtcagaaactgtgagagagaaattaatgacaaaagtttattgctgtgtcttcttttcagtatgcttccttcaaacttcatggcagtaaatgccaaataacctcatgtatcaaacttaaagcaagctgtgagccaggtgtcttcaactgcaggtcatatgctgagctacattcatcattttaatcttttgaattaaattctctaaaattgaataaacctcagtgagmctgtggttgctaagaaattctttaattctctgactcctgaattctgtaataacttctgcctagaataaaaatggagaaagaataaggtgcaggttttggcccatagaaagcaaacaatacatgttttgagttaatttagtgttagcaacttgagagcagggaccagagccattcttttacacaaaacacaaaaatttagttcaatttttgtatatttcattgctatgtatcctgctgtcattcagtgaaattctgcttgtatttatatgctaaa

SEQ ID NO: 426929 - DNA, 594 bp, Homo sapiens
atgtgtatagctttttagaaacttttactgaaagtctgtatttgcgtggaaatgaaaccaattaagaaatacaaatgacatttctttccagcttgtcagaaactgtgagagagaaattaatgacaaaagtttattgctgtgtcttcttttcagtatgcttccttcaaacttcatggcagtaaatgccaaataacctcatgtatcaaacttaaagcaagctgtgagccaggtgtcttcaactgcaggtcatatgctgagctacattcatcattttaatcttttgaattaaattctctaaaattgaataaacctcagtgagactgtggttgctaagaaattctttaattctctgactcctgaattctgtaataacttctgcctagaataaaaatggagaaagaataaggkgcaggttttggcccatagaaagcaaacaatacatgttttgagttaatttagtgttagcaacttgagagcagggaccagagccattcttttacacaaaacacaaaaatttagttcaatttttgtatatttcattgctatgtatcctgctgtcattcagtgaaattctgcttgtatttatatgctaaa

SEQ ID NO: 426930 - DNA, 594 bp, Homo sapiens
atgtgtatagctttttagaaacttttactgaaagtctgtatttgcgtggaaatgaaaccaattaagaaatacaaatgacatttctttccagcttgtcagaaactgtgagagagaaattaatgacaaaagtttattgctgtgtcttcttttcagtatgcttccttcaaacttcatggcagtaaatgccaaataacctcatgtatcaaacttaaagcaagctgtgagccaggtgtcttcaactgcaggtcatatgctgagctacattcatcattttaatcttttgaattaaattctctaaaattgaataaacctcagtgagactgtggttgctaagaaattctttaattctctgactcctgaattctgtaataacttctgcctagaataaaaatggagaaagaataaggtgcaggttttggcccatagaaagcaaacaatacatgttttgagtyaatttagtgttagcaacttgagagcagggaccagagccattcttttacacaaaacacaaaaatttagttcaatttttgtatatttcattgctatgtatcctgctgtcattcagtgaaattctgcttgtatttatatgctaaa

SEQ ID NO: 426931 - DNA, 594 bp, Homo sapiens
atgtgtatagctttttagaaacttttactgaaagtctgtatttgcgtggaaatgaaaccaattaagaaatacaaatgacatttctttccagcttgtcagaaactgtgagagagaaattaatgacaaaagtttattgctgtgtcttcttttcagtatgcttccttcaaacttcatggcagtaaatgccaaataacctcatgtatcaaacttaaagcaagctgtgagccaggtgtcttcaactgcaggtcatatgctgagctacattcatcattttaatcttttgaattaaattctctaaaattgaataaacctcagtgagactgtggttgctaagaaattctttaattctctgactcctgaattctgtaataacttctgcctagaataaaaatggagaaagaataaggtgcaggttttggcccatagaaagcaaacaatacatgttttgagttaatttagtgttagcaacttgagagcagggaccagagccattcttttacacaaaacacaaaaatttagttcaatttttgtatatttcaytgctatgtatcctgctgtcattcagtgaaattctgcttgtatttatatgctaaa

SEQ ID NO: 426932 - DNA, 607 bp, Homo sapiens
cattgtagttttgatttacatttgtctaacaatcaacgttgagcaacttttcatatacctgtttgctatttatatttctggtttttagaaatatctattgaaatcttttgcccatttttaatcggattattagattttttttcctayagagttgtttaacctcctcatatgttctggttattaatcctttatcagatgtgtagcttttaaatattttctcccattctgtgtgatgtctcttcacttggcaaaatgttttctttgctgcatagaagctttttaacttgatatgatgccatttgtccatttttgctttggttgccttggcttgtagggtatgactcaagaaatttttgcccagaccaatgtcctggagcatatctccaatgttttcttgtgttcatttcataatttcatgtcttagatttaagtctaattcattgtgatttgacttttttgtatatggtgagagacagggatctagtttcattcttctgcacatggatatccagttttcccaacatcagttactgaagcgactgtctttgccccagagtatgttcttggcacctttgttgaaaaggagttcactgtaggtgtatggatt

SEQ ID NO: 426933 - DNA, 607 bp, Homo sapiens
cattgtagttttgatttacatttgtctaacaatcaacgttgagcaacttttcatatacctgtttgctatttatatttctggtttttagaaatatctattgaaatcttttgcccatttttaatcggattattagattttttttcctacagagttgtttaacctcctcatatgttctggttattaatcctttatcagatgtgtagcttttaaatattttctcccattctgtgtgatgtctcttcacttggcaaaatgttttctttgctgcatagaagctttttaacttgatatgatgccatttgtccatttttgctttggttgccttggcttgtagggtatgactcaagaaatttttkcccagaccaatgtcctggagcatatctccaatgttttcttgtgttcatttcataatttcatgtcttagatttaagtctaattcattgtgatttgacttttttgtatatggtgagagacagggatctagtttcattcttctgcacatggatatccagttttcccaacatcagttactgaagcgactgtctttgccccagagtatgttcttggcacctttgttgaaaaggagttcactgtaggtgtatggatt

SEQ ID NO: 426934 - DNA, 604 bp, Homo sapiens
taggtttttccaagtataagatcatatcatcagcaaaccaagataattttacttcttcctttccaatttggatgccctttatttctttctcttgtttaattgccctagctaggactttcagtgctatgttgaataacaatggttaaagtgggtatccttgtcgtgttccagatgttggaggaaaggctttcagtttttttcccattcagtatgatactcaatgtgggcctgttgtatatggcttttattatattgaggtatgtttcttctatcyctagtcttttaagggtttttatcatgaagggatgttgaattttatcaaatacttttctgggatcagttgaaatgatcatgtagttttgtccttcattctgttgctatgatgtaccacatcaattgatttgcatatgttgaataattcttgaatccctatgataaatcccacttgaccatgataaatgatttttttttttttttgaggctaatgcaatgacggctcactgctgtctcaacttcctgggctcatgtgattctcccatctcagcctcccaaagaactgggactacaggtgttcgccaccatgcctggctacatttttgtagct

SEQ ID NO: 426935 - DNA, 604 bp, Homo sapiens
taggtttttccaagtataagatcatatcatcagcaaaccaagataattttacttcttcctttccaatttggatgccctttatttctttctcttgtttaattgccctagctaggactttcagtgctatgttgaataacaatggttaaagtgggtatccttgtcgtgttccagatgttggaggaaaggctttcagtttttttcccattcagtatgatactcaatgtgggcctgttgtatatggcttttattatattgaggtatgtttcttctatccctagtcttttaagggtttttatcatgaagggatgttgaattttatcaaatacttttctgggatcagttgaaatgatcatrtagttttgtccttcattctgttgctatgatgtaccacatcaattgatttgcatatgttgaataattcttgaatccctatgataaatcccacttgaccatgataaatgatttttttttttttttgaggctaatgcaatgacggctcactgctgtctcaacttcctgggctcatgtgattctcccatctcagcctcccaaagaactgggactacaggtgttcgccaccatgcctggctacatttttgtagct

SEQ ID NO: 426936 - DNA, 568 bp, Homo sapiens
tcacgattgctgtgttttctctccttcggtgtccagagaagctctctgcaccatgccraggtgggggagtggtagcatcggtaattctacagggtttatttcttcagtgcaactttaggacatatgaagttaaaactaggtactatgagtgctcgcctgatttttgtttcttatgaaagttttttttttttttcctgtatagatagttgttaacttggtgtccttgctggggggcaactataggtagagctttctattctgtcatcttgccctgtctcccttgtatatttcctgctctttccaaattaatatgttaatttttcttattttatctttcttaatgaaataagttttcattattacttatgagtgacacaaactattgtactgatcaaaagtaaagatacacttactggtgaagggatgccaatatgttttctttagatatcaggtgaacttgagcaaaatgcttgttactccactttataggtaacctttgatgcttaggcactgataaagaaatcggaacaaacaaactcaaaataaaacgagcaaactcatcccacaa

SEQ ID NO: 426937 - DNA, 568 bp, Homo sapiens
tcacgattgctgtgttttctctccttcggtgtccagagaagctctctgcaccatgccgaggtgggggagtggtagcatcggtaattctacagggtttatttcttcagtgcaactttaggacatatgaagttaaaactaggtactatgagtgctcgcctgatttttgtttcttatgaaagttttttttttttttcctgtatagatagttgttaacttggtgtccttgctggggggcaactataggtagagctttctattctgtcatcttgcyctgtctcccttgtatatttcctgctctttccaaattaatatgttaatttttcttattttatctttcttaatgaaataagttttcattattacttatgagtgacacaaactattgtactgatcaaaagtaaagatacacttactggtgaagggatgccaatatgttttctttagatatcaggtgaacttgagcaaaatgcttgttactccactttataggtaacctttgatgcttaggcactgataaagaaatcggaacaaacaaactcaaaataaaacgagcaaactcatcccacaa

SEQ ID NO: 426938 - DNA, 568 bp, Homo sapiens
tcacgattgctgtgttttctctccttcggtgtccagagaagctctctgcaccatgccgaggtgggggagtggtagcatcggtaattctacagggtttatttcttcagtgcaactttaggacatatgaagttaaaactaggtactatgagtgctcgcctgatttttgtttcttatgaaagttttttttttttttcctgtatagatagttgttaacttggtgtccttgctggggggcaactataggtagagctttctattctgtcatcttgccctgtctcccttgtatatttcctgctctttccaaattaatatgttaatttttcttattttatctttcttaatgaaataagttttcattattacttatgagtgacacaaactattgtactgatcaaaagtaaagatacacttactggtgaagggatgccaatatgttttctttagatatcaggtgaacttgagcaaaatgcttgttactccactttatagrtaacctttgatgcttaggcactgataaagaaatcggaacaaacaaactcaaaataaaacgagcaaactcatcccacaa

SEQ ID NO: 426939 - DNA, 568 bp, Homo sapiens
tcacgattgctgtgttttctctccttcggtgtccagagaagctctctgcaccatgccgaggtgggggagtggtagcatcggtaattctacagggtttatttcttcagtgcaactttaggacatatgaagttaaaactaggtactatgagtgctcgcctgatttttgtttcttatgaaagttttttttttttttcctgtatagatagttgttaacttggtgtccttgctggggggcaactataggtagagctttctattctgtcatcttgccctgtctcccttgtatatttcctgctctttccaaattaatatgttaatttttcttattttatctttcttaatgaaataagttttcattattacttatgagtgacacaaactattgtactgatcaaaagtaaagatacacttactggtgaagggatgccaatatgttttctttagatatcaggtgaacttgagcaaaatgcttgttactccactttataggtaacctttgatgcttaggcactgataaagaaatcggaacaaacaaactcaaaataaaaygagcaaactcatcccacaa

SEQ ID NO: 426940 - DNA, 501 bp, Homo sapiens
cttgacttcaaattatactatgaagctataataaccaaaacagcatggtaccagcataaaaagacacacagatcaatggaacagcacagacaactcagaaacaaatccatacacctgcagtgaattcatttttgacaaaggtaccaagaacatacactagagaaaagtcagtttcttcaatggatgatgctggaaaaactggatattcgtagtcagaagaatgaaacttgatctctgtctctcaccttacaaaaatatcaaatcaaaatcaatraaaagacttaaatctaagactatgaaagtactacaagaaaactttggagaaactctctaagacattgttttgggcaaaaatttcttcagtcatatcccagaagcacaggcaaccaaagcaaaatggacaaatggaatcacatcaagttaaaaagcttctgcacagcaaaatatattatcaactaagtgaggagacagcccagagaaagggagaaactatttggaaac

SEQ ID NO: 426941 - DNA, 501 bp, Homo sapiens
cttgacttcaaattatactatgaagctataataaccaaaacagcatggtaccagcataaaaagacacacagatcaatggaacagcacagacaactcagaaacaaatccatacacctgcagtgaattcatttttgacaaaggtaccaagaacatacactagagaaaagtcagtttcttcaatggatgatgctggaaaaactggatattcgtagtcagaagaatgaaacttgatctctgtctctcaccttacaaaaatatcaaatcaaaatcaataaaaagacttaaatctaagactatgaaagtactacaagaaaactttggagaaactctctaagacattgttttgggcaaaaayttcttcagtcatatcccagaagcacaggcaaccaaagcaaaatggacaaatggaatcacatcaagttaaaaagcttctgcacagcaaaatatattatcaactaagtgaggagacagcccagagaaagggagaaactatttggaaac

SEQ ID NO: 426942 - DNA, 567 bp, Homo sapiens
atatataaggagctcaaacaactctagaggaaaaaaaatctaacaatccaattaaaaatgggcaaaagatttgaatagacatttctgaatagaaaacatgaaatggcaaacaggcatataaaaagtgctcaacatcattgatcctcagagaaatttaaatcaaaactacaatgagacatcaccccagtttaagtgggttttatccaaaagtcaggcaataacaaatgctggtaaggatgtggagaaaagaaaacctttgtacattgttggtgggaatgtaaattagtacaactactatgaagaaaagtttggaggttcatcaaaaaactaaaaataaagttaccatamaatccagcaatcttactgttgggtatatatccaaaagggatatataagtatatcaaagtgatatccgcagtataacaaagtgatatccgcactcccatgtttgttgcaacactattcacaatagccaagatttagaagcaacctaagtatccatcaagggatgaatgaataaggaaaatgtgacacttatccacaatggggtactattcagccataaaa

SEQ ID NO: 426943 - DNA, 567 bp, Homo sapiens
atatataaggagctcaaacaactctagaggaaaaaaaatctaacaatccaattaaaaatgggcaaaagatttgaatagacatttctgaatagaaaacatgaaatggcaaacaggcatataaaaagtgctcaacatcattgatcctcagagaaatttaaatcaaaactacaatgagacatcaccccagtttaagtgggttttatccaaaagtcaggcaataacaaatgctggtaaggatgtggagaaaagaaaacctttgtacattgttggtgggaatgtaaattagtacaactactatgaagaaaagtttggaggttcatcaaaaaactaaaaataaagttaccatacaatccagcaatctyactgttgggtatatatccaaaagggatatataagtatatcaaagtgatatccgcagtataacaaagtgatatccgcactcccatgtttgttgcaacactattcacaatagccaagatttagaagcaacctaagtatccatcaagggatgaatgaataaggaaaatgtgacacttatccacaatggggtactattcagccataaaa

SEQ ID NO: 426944 - DNA, 567 bp, Homo sapiens
atatataaggagctcaaacaactctagaggaaaaaaaatctaacaatccaattaaaaatgggcaaaagatttgaatagacatttctgaatagaaaacatgaaatggcaaacaggcatataaaaagtgctcaacatcattgatcctcagagaaatttaaatcaaaactacaatgagacatcaccccagtttaagtgggttttatccaaaagtcaggcaataacaaatgctggtaaggatgtggagaaaagaaaacctttgtacattgttggtgggaatgtaaattagtacaactactatgaagaaaagtttggaggttcatcaaaaaactaaaaataaagttaccatacaatccagcaatcttactrttgggtatatatccaaaagggatatataagtatatcaaagtgatatccgcagtataacaaagtgatatccgcactcccatgtttgttgcaacactattcacaatagccaagatttagaagcaacctaagtatccatcaagggatgaatgaataaggaaaatgtgacacttatccacaatggggtactattcagccataaaa

SEQ ID NO: 426945 - DNA, 567 bp, Homo sapiens
atatataaggagctcaaacaactctagaggaaaaaaaatctaacaatccaattaaaaatgggcaaaagatttgaatagacatttctgaatagaaaacatgaaatggcaaacaggcatataaaaagtgctcaacatcattgatcctcagagaaatttaaatcaaaactacaatgagacatcaccccagtttaagtgggttttatccaaaagtcaggcaataacaaatgctggtaaggatgtggagaaaagaaaacctttgtacattgttggtgggaatgtaaattagtacaactactatgaagaaaagtttggaggttcatcaaaaaactaaaaataaagttaccatacaatccagcaatcttactgttgggtatatatccaaaagggatatataagtrtatcaaagtgatatccgcagtataacaaagtgatatccgcactcccatgtttgttgcaacactattcacaatagccaagatttagaagcaacctaagtatccatcaagggatgaatgaataaggaaaatgtgacacttatccacaatggggtactattcagccataaaa

SEQ ID NO: 426946 - DNA, 610 bp, Homo sapiens
ttttaataacttttaatagctctgtggaagcatcatatcacaagcttcagtttaacttagatgcaaaacctaattcaactctttgggtttttatattttagaaacacttgggaacatrtaatttcctcacctctgcaacaacctgccactgttaatgaccagtgtaaaccattgacaagagaggaatctatgcaccttgaaccacaatatcaaattcaatttcccaccacaatttctgagaatataaatcacagaaaaatacagcattgaaataatatcaatattttgaatctgaatatttattcggttctgtttttttactgtaaatctgaattctgatcagcatttatcaacataaacacacatgcattactgcactggaattatgaaatacaatgtcaatatcaatgactaagtacaatatctctttcttcatccaaaatttttaataatattttatgagcacataactatttgaccatatgtattgtgtaaataccatgacatgtacttgtatatagaaatgaattacacatactatgaggattaaacaaatacatacaagcagatacgtttttacatatatataattgattttattcatagcatt

SEQ ID NO: 426947 - DNA, 610 bp, Homo sapiens
ttttaataacttttaatagctctgtggaagcatcatatcacaagcttcagtttaacttagatgcaaaacctaattcaactctttgggtttttatattttagaaacacttgggaacatataatttcctcacctctgcaacaacctgccactgttaatgaccartgtaaaccattgacaagagaggaatctatgcaccttgaaccacaatatcaaattcaatttcccaccacaatttctgagaatataaatcacagaaaaatacagcattgaaataatatcaatattttgaatctgaatatttattcggttctgtttttttactgtaaatctgaattctgatcagcatttatcaacataaacacacatgcattactgcactggaattatgaaatacaatgtcaatatcaatgactaagtacaatatctctttcttcatccaaaatttttaataatattttatgagcacataactatttgaccatatgtattgtgtaaataccatgacatgtacttgtatatagaaatgaattacacatactatgaggattaaacaaatacatacaagcagatacgtttttacatatatataattgattttattcatagcatt

SEQ ID NO: 426948 - DNA, 610 bp, Homo sapiens
ttttaataacttttaatagctctgtggaagcatcatatcacaagcttcagtttaacttagatgcaaaacctaattcaactctttgggtttttatattttagaaacacttgggaacatataatttcctcacctctgcaacaacctgccactgttaatgaccagtgtaaaccattgacaagagaggaatctatgcaccttgaaccacaatatcaaattcaatttcccaccacaatttctgagaatataaatcacagaaaaatacagcattgaaataatatcaatattttgaatctgaatatttattcggttctgtttttttactgtaaatctgaattctgatcagcatttatcaacataaacacacatgcattactgcactggaattatgaaatacaatgtcaatatcaatgactaagtacaatatctctttcttcatccaaaatttttaataatattttatgagcacataactatttgaccatatgtattgtgtaaataccatgrcatgtacttgtatatagaaatgaattacacatactatgaggattaaacaaatacatacaagcagatacgtttttacatatatataattgattttattcatagcatt

SEQ ID NO: 426949 - DNA, 610 bp, Homo sapiens
ttttaataacttttaatagctctgtggaagcatcatatcacaagcttcagtttaacttagatgcaaaacctaattcaactctttgggtttttatattttagaaacacttgggaacatataatttcctcacctctgcaacaacctgccactgttaatgaccagtgtaaaccattgacaagagaggaatctatgcaccttgaaccacaatatcaaattcaatttcccaccacaatttctgagaatataaatcacagaaaaatacagcattgaaataatatcaatattttgaatctgaatatttattcggttctgtttttttactgtaaatctgaattctgatcagcatttatcaacataaacacacatgcattactgcactggaattatgaaatacaatgtcaatatcaatgactaagtacaatatctctttcttcatccaaaatttttaataatattttatgagcacataactatttgaccatatgtattgtgtaaataccatgacatgtacttgtatatagaaatgaattacacatactatgaggattaaacaaatacatacaagcagatacgtttttacatwtatataattgattttattcatagcatt

SEQ ID NO: 426950 - DNA, 604 bp, Homo sapiens
tcttctttaggttaaatctgcttggtgttctataactttcttgtacttgaatgttgatatcactctctaggtttgagaaatttcctgatattatccatttaaatatactttctacccctatctgtttctctacctccttttgaaggccaataactcttatatgtgccctttcraggttattacctagatagcaatagctttcaagtgtgctttatgctttcatattcttttttcttttatctacgttgacttttcaaatagcctgtctttacgttcactaattatttcttctgcttgattaattctgctgttaaaagagtcgatgcattctttagtatgccaatttcaattttcaactccataatttctgcttgatacttttaaattattgctatctctttgtaagtttatctgatagaattctaaattcatactctgtgctatcttgaatctctttgagttttctcaaagcagatattttgaattatctgtctcaaagggcatatatctctgtttcttcaggattgatctgtgatgttttatttagttcctttggtgagaatatgttttcctggaggttactgatgctcgtagatgtttgttt

SEQ ID NO: 426951 - DNA, 589 bp, Homo sapiens
cttgtggtttctaattacatcagttacagctcagccttcttcttaactagagtgcaggcatgaactggaaaagaatgagctaatccatgatagatcaggtggaataaagatctccattcatatctttaccttttatcccttgttctgagtgccaagaattaatgctatttgaaagtacaaactgaacctgccaagcttcggacagctaagataatcctaattattttaaatgttagtgagaagggcagcagttccactctggaaaagagttctattgtgaaacattaaatatatgctaagtggtattgattgcacatgattttatttccaaacactatggttatcatgaagtggaagaatttgttgtttaagaaattttcatcagcttttcatcagattctttcttatgcctacaaastctaggaaactgaagaggccagcaattttgtttgtctgccttggcagtcagcatctagatgaagagttggtaacaactgaaaaatgccacttgtattttattttaaaatggtttcttaggagtttaatagtgtttaacatatagaggaaggaaaaatgtttttaaagcatg

SEQ ID NO: 426952 - DNA, 517 bp, Homo sapiens
ttttactcctacttagcactcagggatagcctgagccttccgaattgaaaacaagtaattgcaaaggagaataggatttatcacaaggcgaggtccaagtgaggactttgggggaccgaggcatcagggaccaagggctcagtttccagctggtcacccccacccccccataccttgtacattgatgtacacaacttttgttttcttctttcacttgctktgaccccataattcccatttttttaaaaaaaagcaaatcaccactctgatggggagtggggagaaaggtaggaaaataatagatgattgtttaggaagacaggcatacaagtggatccattctacacagtgcttgtagaaataaagtctatttggggtttaagctgaagaaaactgctcactgagactgcctgttgctataggtattataccctttttgcagttgttctaataatgtatttgtgtataacattccatatgtatttagaagcatatcagaactactcctgaataagtg

SEQ ID NO: 426953 - DNA, 517 bp, Homo sapiens
ttttactcctacttagcactcagggatagcctgagccttccgaattgaaaacaagtaattgcaaaggagaataggatttatcacaaggcgaggtccaagtgaggactttgggggaccgaggcatcagggaccaagggctcagtttccagctggtcacccccacccccccataccttgtacattgatgtacacaacttttgttttcttctttcacttgctgtgaccccataattcccatttttttwaaaaaaagcaaatcaccactctgatggggagtggggagaaaggtaggaaaataatagatgattgtttaggaagacaggcatacaagtggatccattctacacagtgcttgtagaaataaagtctatttggggtttaagctgaagaaaactgctcactgagactgcctgttgctataggtattataccctttttgcagttgttctaataatgtatttgtgtataacattccatatgtatttagaagcatatcagaactactcctgaataagtg

SEQ ID NO: 426954 - DNA, 517 bp, Homo sapiens
ttttactcctacttagcactcagggatagcctgagccttccgaattgaaaacaagtaattgcaaaggagaataggatttatcacaaggcgaggtccaagtgaggactttgggggaccgaggcatcagggaccaagggctcagtttccagctggtcacccccacccccccataccttgtacattgatgtacacaacttttgttttcttctttcacttgctgtgaccccataattcccatttttttawaaaaaagcaaatcaccactctgatggggagtggggagaaaggtaggaaaataatagatgattgtttaggaagacaggcatacaagtggatccattctacacagtgcttgtagaaataaagtctatttggggtttaagctgaagaaaactgctcactgagactgcctgttgctataggtattataccctttttgcagttgttctaataatgtatttgtgtataacattccatatgtatttagaagcatatcagaactactcctgaataagtg

SEQ ID NO: 426955 - DNA, 589 bp, Homo sapiens
gctcccagtgcaggaataagtcttaaaaggttcttcggtcctcggagggagaagggcaagttctctcagcctgagatgctccccacccttgaatgggttcccaagagaagggagatatgtaaaagagccttctcatttttaattccaytgggcacttttgacatgaaaaacctttgaggagaaaaaatcccctgtattagttggactactatgtatttaattgacatagttacatactagagtgtttaaatacgggccaggcatggtggctcatgcttataatcccagcactttgggaggccgaggcaggcagatcgcttgaactcatgagtttgagaccagcttttgtatttttgtctctacaaaaaatacaaaaattagccaggtgtggtggcatgtacctgtagtcccagctacttgggaggctgaggtgggaggatggcttgagctggggaagcaaaagttgcagtggacagagattgtaccactgtactctagcctgggccatagagccagaccttgtctcaaaaaaaaaaaaaaaaaaagggaaatatggcttcttgttagggttatatttaaacattaatgt

SEQ ID NO: 426956 - DNA, 589 bp, Homo sapiens
gctcccagtgcaggaataagtcttaaaaggttcttcggtcctcggagggagaagggcaagttctctcagcctgagatgctccccacccttgaatgggttcccaagagaagggagatatgtaaaagagccttctcatttttaattccactgggcacttttgacatgaaaaacctttgaggagaaaaaatcccctgtattagttggactactatgtatttaattgacatagttacatactagagtgtttaaatacgggccaggcatggtggctcatgcttataatcccagcactttgggaggccgaggcaggcagatcgcttgaactcatgagtttgagaccagcttttgtatttttgtctctacaaaaaatacaaaaattagccaggtgtggtggcatgtacctgtagtcccagctacttgggaggctgaggtgggaggatggcttgagctggggaagcaaaagttgcagtggacagagattgtaccactrtactctagcctgggccatagagccagaccttgtctcaaaaaaaaaaaaaaaaaaagggaaatatggcttcttgttagggttatatttaaacattaatgt

SEQ ID NO: 426957 - DNA, 381 bp, Homo sapiens
cctttcttttttaagactgctgcagtactcagtgtgtccttgtgacaacagtgaagttctttaggggcttcagtgtgctccctttagcaattatgtggacttacatttgtgcttacctcttgacttgcagggtgcttcccctcccaccacattttttttttttttagatggagtcttgctgtcttgcccaggctggagtacaccaatgcagtttctcggctcactgcaacctctgcctcccgggttcaagcgattctcctgcctcagcctcctgagtagctgggactacaggcacacgccaccatacccagctaatttttatatttttagtagagacagggtttcgccrtgttggccaggttggtctcgaactcctcacct

SEQ ID NO: 426958 - DNA, 565 bp, Homo sapiens
atacatacattgggattggcagcgttagccagtctatttgtcagatttagcctgttttagttaatataggggattgttgggatctcgtacttccaaggtatatggacratatgttggtaattgtagagcactggttctcaatctcggtgtcatattagaattaactgggatctttgaaaatatccagggcccaggccacatcccagagcagttaaaccagattttcttgagtggagtccaggcatcagtactgagttcccttctcaccttactccagtgagagtgaagtttgagaaggaaccagtgccactgtttacaaataaagttttattggaacacagccatgcccattcattttacaaattgctagagactgtatggcttgcctaaaatatatatactgtttgacatttacaataaaaagtttgctgacacctgctatagactcatgatcaacatttttcaaacattttgaaaggaaggtttgtgtaaactttcatagtaaaaaaaacatccagcattttgcagagcatttaggcccaaatcctatctgttttcttgtacc

SEQ ID NO: 426959 - DNA, 622 bp, Homo sapiens
gaaacatgggaagaggtctgataacttgcgcccgttcaaacaaatttgttagtgttacagcagattgtgttgtcccctctccaccaccctgttctcttttgtactggttaatygagcaccaaatgaacagaaggaatttcaggggtgctttagaggggaccttaagatagaaagggcaccatcatagttctaggcccagtacattggaagagcatattcatggctgaggccacttccaacttagataggctattcccttaatttgctttttttttttgagacagggtctttctctgttgcccaggctggagtgcagtagtgcaagcagccacggctcactacagcctcaaactcctgggttcaagtgatcttcctacctcagcctcctgagtagctgagatctcactcgtgcactatcacacccaaacaattttttgatttttatgtagaaaagaggtttcactgtgttgccctggctggtcttgaactcctgggctcaagcgatcctcccgccctggcctcccaaggtgtcgggaacataggcatgagccactgtgcccagcctgttaccttgttttaaagaactagataattattgtactagttgtgacatgcaatgttg

SEQ ID NO: 426960 - DNA, 633 bp, Homo sapiens
tggtccaatcagttcatttccaaacaaaggtaggaaatggctgcatcctagtatttcattgtggactcatgactcagtgctttggaacttggtatctttgggagtgagtgtctattctccacgtctcttgccacagggggaaaaaggtamagataaacagtaacacaatttcacccaaccgagatataaatctgtgggcttctccacccttctcaaaaataaatgaatgaatgaaggaaattcagttcctgcttttttttcttcccttctctgttttgtttcctaattcccaggactccctggtgtctcctaaacagcataaggtcaactgatggtgaaagtacatcacatgataattattcaaaagctgttatgttatacaatatagtttataataggaaaaggagttacatttgattctgcaagagcagtcggtaatatgcccattacatagggattctaagaaactaaaattaagaaatttgtcctaaagaacaaattgattctcctccatcatttaaccaaaaaggtttgtagtattttgtattcacaatgttacacaggagaacagtaacttaactttgaaaactgttttcacacaatggtcacaaagaaaataacacataaatccca

SEQ ID NO: 426961 - DNA, 501 bp, Homo sapiens
ataggtcagaatggtttttaaatgaccttatagtagaaaacaaagttaaaatatataccatataccagtgcagtcagatatattggagtcactaatacattctgaatctgctgattaaaygagagacattcaaaatgaatgaaacttacccacatactttctcatccatgtaagcaggaaagaattacatttcttctgagctaatgggaatgagtatagtaagctttaccgataactttaatctccacaatctccatagacagatccccaccaaaaaataaaataactgcttagtaactttgcagcatatcaaagttcacaaaccatgcccagttccaatacttattagccgttggccttagacaaattactgacctctctgaatttgaatttgtatatctatttaaacaaagataataggctcaaagtttgaaacaaatgggatatgtagaaaaaacattgagcaaaatgcctggaacacaataagtactaaaaaaatag

SEQ ID NO: 426962 - DNA, 501 bp, Homo sapiens
ataggtcagaatggtttttaaatgaccttatagtagaaaacaaagttaaaatatataccatataccagtgcagtcagatatattggagtcactaatacattctgaatctgctgattaaatgagagacattcaaaatgaatgaaacttacccacatactttctcatccatgtaagcaggaaagaattacatttcttctgagctaatgggaatgagtatagtaagctttaccgataactttaatctccacaatctccatagacagatccccaccaaaaaataaaataactgcttagtaactttgcagcatatcaaagttcacaaaccatgcccagttccaatacttattagccgttggccttagacaaattactgacctctctgaatttgaatttgtatatctatttaaacaaagataataggctcaaagtttgaaacaaatgggatatgtagaaaaaacaytgagcaaaatgcctggaacacaataagtactaaaaaaatag

SEQ ID NO: 426963 - DNA, 585 bp, Homo sapiens
gctctcctgactttcacagaagtcttagcttggttatgttcaacaaacaagaacacctaagatatgccaagcaccatatactctgaatgcaaaccaggacagaacaaaacaaaacagaaaaaaaaaaccaacggcaacaaaaaaaatgcaacccttttgctctcaaggttcttcaagtagtgggagagatacgtaaacacatgattatactataatgtcatacaagcaataataagtacacatggccgggctcagtggctcacgactgtaatcccagcactttgggaggcaaaggcaggtggattacttgagatcaggagttcaagaccaacctggccaacatggcaaaaccccatttctaccaaaaatagaaaaatcagcagggcgttgtaatgcacatctgtaatcccagctacttggsaggctgaggcacgagaatcgcttgaacccgggaggcagacattgcagtgagccgagatcgcaccactgcaccccagcctgggtgacagagcgagactctgtctcgaaaaatgataataataataagtacacataaattataaaagtgggacagaggagggagtg

SEQ ID NO: 426964 - DNA, 581 bp, Homo sapiens
ctaagtcaggaagatcacttgaggatgggaattcaccaccagcctgggcaacatagcaagaccccatctcttcaaaataaaaataaaaatagccaggtgtggtggcgcatacctgtagtcccagtttcttgggaggctaaagttggagaatcacttgagcccaggagttcgaggctgcagtgagctatgatcacaccactgaactccaacaaggatgacaaagtgaaaccctgactcaaaaaaagaaagaaagaaagaaaaaagaaacttggctgaaccatgaggagttaacacttggacattttttgattctgcaactgtaaaagaatcttgctgaatttgttgaacttgtgtctctaacagattactgacatttccttaatgtaagatcacctggggattaaatctcaactgtagcacatatcaatgactgtgagcatctgactttaccttgttttacaattctcatgaaatggatgtmtggtcaatgactgaggggatgataaactttatattaaccaaacatgatataaaaatccagggcatactgatgaccagatatgggctggtaagaattagtt

SEQ ID NO: 426965 - DNA, 563 bp, Homo sapiens
gccccaggactaacaaacacacagtccagggctctggttactatgccttctttctaggatctggcttcatttggaggctcatatcccataccagtgctcctcaaaccacgttctaaggtccatgaaatattaataatagttctatggggagtgggggagtggtataatcaaatttgtggttttgccttaggacaaatctgaatcataagcacataaggctcgtgagaatctctttggtattgagtgaaccctgccaactattcaacattcacatctcattcawtgttacatacaaagctcatgaagtgataacatttctttgttttaaaaataaaagagcactgaaaaaagaagtcaattgcttgtggtggtgatgaaagtgaagagaaagtgaaaaggcctaaggaagtgatggttcttggaagaatacagatgtctaggaaagaaattatactccaaagagctacctgtaaatttagaaactcatcattatctctggacaaatctttcataaatgtcaaagacctgctacatatcaaaatggtctaagttcctaagcatca

SEQ ID NO: 426966 - DNA, 570 bp, Homo sapiens
agctatgatgtaatgtatcatttttgactgatccaaattatggaatgaactccccacaccaggattaaagtgagaagaatcatttctggaagaaggagcgcaatgggattgtggtgggctgaaggctagaaaaaagggttagaattgagacaaggaaaaggagccacaatttatgctggcttataacggctagggttttctgagatgccttctcctttcgtaaattctgttactgttgacaatcctaacttactakagacagaaccgacagcggagaaagaaaagatgttcatacgcgtcaagagtcactggtaaggcagctgtttgttttttgtttatttgtttgtttgttttttgttgttgttcctgctgcaccagaccagtttcaacatgaaactggcaagttttgagatgtagctgtttctctggtcctttttctagtaaaaggctcccattttagaggcagccatttccaaaggaaaaaaaaattcaatgtcgacataaatcccttgaactaaacatctgtttaaactgtttctaggtcaggagtctaaaactgtgaaacactag

SEQ ID NO: 426967 - DNA, 375 bp, Homo sapiens
gaaaacaaaactttgtctccaaagggtaaaaaataataataataatcctaggcagagttcctgttcacactgtacagttactattattatttatcatttcttatttacctgtgtttttagtataaacattcctggaagcttttatactgcttgtggcacatartcagttgcttattgccaagggaaagactttttccccagaaaggcaatctgtgcacatgctaatttgaaagacagggtaggagctgcaagtgttttaatagcccattatcaaaaattatcccttggctataaaatccccagaccattggcttgagatcagctcaaagaaaaatgagattacagaatttaatctagtgaaggggagtgagagat

SEQ ID NO: 426968 - DNA, 375 bp, Homo sapiens
gaaaacaaaactttgtctccaaagggtaaaaaataataataataatcctaggcagagttcctgttcacactgtacagttactattattatttatcatttcttatttacctgtgtttttagtataaacattcctggaagcttttatactgcttgtggcacatagtcagttgcttattgccaagggaaagactttttccccagaaaggcaatctgtgcacaygctaatttgaaagacagggtaggagctgcaagtgttttaatagcccattatcaaaaattatcccttggctataaaatccccagaccattggcttgagatcagctcaaagaaaaatgagattacagaatttaatctagtgaaggggagtgagagat

SEQ ID NO: 426969 - DNA, 562 bp, Homo sapiens
tttcttagggactgtttgccttccatatctgtcttattaatatagcttcatgcagtcacctaaatatcttcaagtattgtaaactgaattcagattatgtgcttttttaaaaagtacatcttttctatatcaagcagaaatcaggccacaaaaaaatacttctgtaaaaagcttaggaaagaataatttttcaattcaggaaatttcttcatggtgctaygaagaacttttcttgtactgaactgctatttgtgatccacctgttaaaaaaagctcaaaacacatttcaaaaacaaatagaatgcttaaactttcttaaaagacagaatgttttacatgttgtattttgaggagattttttttaaataacaagtttttacttactcatctttaaaataaaagagaaagtaactgcccaagaaacagccttatcttttgctttctacaattcagaattttgaaagaaaatcctcaaatcctccaaacaagtgtaatacacatggttttgctggcagaatttattccaagcatctccaggcaatatgcatgtgcacccgcgcac

SEQ ID NO: 426970 - DNA, 605 bp, Homo sapiens
ttaaggcagaaaaaaatgtcatttaaaaacactggaatcactcagttagatgtgccagaggcccaaaatgcttaactagtgttggacagtgctatttttaaaaaatgaataattatttataatttataacaaaagattaatataaaaagatactggaccttaattatattcttagaaaggctttcaaccaagataattttcatttaaaaaggagcatctatttcaaaacacttctcagttttttgcatatttatttacattgcaaaatataaaaaccagaaaagcaggcgacgttgtagattaaaagaccataactatttaccaattaaaaaatttagaagcaacaacacgttgaggtaactaaaaattagcaagaccaatttctctaagacatgcttgaaaatcagtctccctattttataaaccttaggtatcatctaatgataatatgtgtacatatttgaccaacagaagaatgmtggatataggaataagtatcattataagcttcacatgtcaaaagaaacagacatccaaataaaaaaagataatatatgaaagcctgaacatgacacacaatggtacattttatgactaaataaaat

SEQ ID NO: 426971 - DNA, 571 bp, Homo sapiens
tcgagaggggcgccgcgcggcgcaggccgccacacccactcgggcccgctcccgcctcccgggtcccgggcgccctgatgaatatgcatcgcggcgcgcccgcccccggctcctcctttcggtttccttcccgccgccaggcggaagcgaagagccgcgcttcccgcgcgcccaggccggccgtggtagggtggggcggggcgggccgcgagccggagaaagagaaagccagggaggcgactgcaggaggagcgcgggccgggcgcggaagggtgcgctgctgggtggcggttccggggcagccccgccgcgggccaggccaatccgagggcggggaaggggcgatcgcgcgaccccggggccgtgccggctgcatctgaccggcgcagccccactcctggagcagccccgctaaaacaacaataaaacccaccacacacacacayacatgcacacacgcacacgcgggcgcacacacacacaccatcctggacggcgttcaagtcaagcacgagaaacagccttctgcaagggagaggaaagaaagctggaaatccagacagactgaagg

SEQ ID NO: 426972 - DNA, 541 bp, Homo sapiens
gttattatttctgctttaagccagtggaatctctttactatatgccagtgtttaaagttcagtatgatgaatgttagtgcttctatttttatatatttattagattgtatagacaaagtaccagcccaggggaagacagccttggagactggaggggaatatttttaaatgtagaaattctcaaagtccattccatagaatatcagctccttggtgtgttattaggtgctccatagcaaaggagggttccacagacaaatatgtttagaaaatgctcattaaaggaaagtcggttgcatttttaattgmaagacttaacagaacttttaatatcacactgtaaactctgaaattttaagaggagaaaaaatgtaaaatgaaactgaccacagaatgcttttcaaggactagggttccacacagcaaactttgggaaatggtgtgagattctgacagctttggcactaaaaaggtgtatgacttggggttaggtgactaactgttcatcactgtgtgtcagtttaatcaggtaattaagtaa

SEQ ID NO: 426973 - DNA, 541 bp, Homo sapiens
caacaggttgaggctgcagtgagccaagattgcaccactgctctccagcctgggcaacagggcaagaccctgtctcaaaacaacaacaacaacaaaatcacagatgagtaagacacagrtctttccctaaacaaggttacagtctaatgggcagaagggctaggacagggactcagatgaaataatgccaggtagaatgtgatcagtgcccctggaggtgtggcaagccaacactgtgaggaatcagcggcaggaagatcatatcaaatcacgaggctccagaaaaactacgagggtccaggaatggtggctcacgcttgtaatctcaacgctttgggaggcagaggtgggctgattgcttgagcccaggagttcaagaccagcctggacaacatgatgaaaccctgtgtgtacagaaaatacaaaaattagctgggcatagtgagctgtgcctgtagtcccagttactcaggaggctgaggtgagaggatcgttgagctagggaggctgacggaggtcgaggcagcagtgagctgtgatc

SEQ ID NO: 426974 - DNA, 541 bp, Homo sapiens
caacaggttgaggctgcagtgagccaagattgcaccactgctctccagcctgggcaacagggcaagaccctgtctcaaaacaacaacaacaacaaaatcacagatgagtaagacacaggtctttccctaaacaaggttacagtctaatgggcagaagggctaggacagggactcagatgaaataatgccaggtagaatgtgatcagtgcccctggaggtgtggcaagccaayactgtgaggaatcagcggcaggaagatcatatcaaatcacgaggctccagaaaaactacgagggtccaggaatggtggctcacgcttgtaatctcaacgctttgggaggcagaggtgggctgattgcttgagcccaggagttcaagaccagcctggacaacatgatgaaaccctgtgtgtacagaaaatacaaaaattagctgggcatagtgagctgtgcctgtagtcccagttactcaggaggctgaggtgagaggatcgttgagctagggaggctgacggaggtcgaggcagcagtgagctgtgatc

SEQ ID NO: 426975 - DNA, 572 bp, Homo sapiens
tgactgggcagccaagggaaagcgctggcctgtgcgggatgaggcagttgggttctggagagcacaagcaatcattcggtgctgcccatcagacaactgaaaaatctgatcagaggcagtggctaagtccccgcctgggaacacaaaggaagcmtaaggttctggttatcaccctcaggggaccgtgaccttgaaagagtaaggatagtaccagccaaaaccaatgcagccaagaggaaaagtcacagagaacagcgaggggaggtggaagtttcaatacagaaattgtagccatggctgagaaccccagcactggaggccggaatttgtgcgtttgaacgccagaggcttggctagtcatgattagcaaaggaacttcaaagagttttggagcctgctttatatctgtgaaatgggaattatttccatctcaaaggtttgaggggattcgctgagagaaacttcttagcatgggatctccagaaactggaagccacagagaaagcagcggccagagggaggaggaatcggacaggctgatcacttggagtgttcgcctaagcagtttctag

SEQ ID NO: 426976 - DNA, 592 bp, Homo sapiens
cacatgtgtgcatttataaaatagtgcctaggactgatatcaacaaaatttctccttaagaacaaatgcataacctaccaagtttcctctaacacactgaagactgagaatagcgcaatggagtgcaaaatcaggaagctagaaatcagaagacctgggcctggcccaacagcccttattyactccctgtgggatcctaggtcagttagtttccctggatctcagggagttcttttttttgtaaaatgagaaagctggatgaaaggatctctaaggtcccttcacctttgaaatctgataactctaaggtttaatttcctcatctgtcaaatggagatcgtaatgtctgttccactcactgtaaagatcaaacgtgatgtgcaggtgctctggaaaatatgataattatattaactatcattatcattgctcacaaattcagctatttctgcacctggccactcctgggagtgcttttaaagaaaccattgttatatatacagtcatgtgctgcttaacaatagagacatgtcttgagaaatgtgttgttaggcaattttgtcatgcgaacatcatagagtgtacatacaca

SEQ ID NO: 426977 - DNA, 591 bp, Homo sapiens
agctgagatttatcttggtatgtgttgtgagatgcagatctagtatctttttttatagaaagctagttgtctcaagataagtcaatgatgtgctcagcctttcccactcattcatcatgcactgttatctagtattaaattcacagtgattcttaggcctgtttctctgctctttcatttgctttcttgacccttttattcttttttagacatatcagacctgtggatgtaccttactcttcaaatcaattttagaattggtttctgtaattgcaagakaaatcctgttgggatatttattggaattgtcttcaatgagacacttttacacaaatgagctatcctatctacgaacatatcatattctacttatgatatactttatgttttataattttttctattaaagaactaggcatattttatttaatttttttctaggtaccctattgttttattgttattgtgaactgtatctttttttctataacatttcctataggttactgtagttcggcagaaatgctattgctttctgtacatggacactgaatttccaaaagtattacatataataaaagaggtaagcaa

SEQ ID NO: 426978 - DNA, 591 bp, Homo sapiens
agctgagatttatcttggtatgtgttgtgagatgcagatctagtatctttttttatagaaagctagttgtctcaagataagtcaatgatgtgctcagcctttcccactcattcatcatgcactgttatctagtattaaattcacagtgattcttaggcctgtttctctgctctttcatttgctttcttgacccttttattcttttttagacatatcagacctgtggatgtaccttactcttcaaatcaattttagaattggtttctgtaattgcaagataaatcctgttgggatatttattggaattgtcttcaatgagacacttttacacaaatgagctatcctatctacgaacatatcatattctacttatgatatactttatgttttataattttttctattaaagaactaggcatattttatttaatttttttctaggtaccctattgttttattgttattgtgaactgtatctttttttctataacatttcctataggttactgtagttyggcagaaatgctattgctttctgtacatggacactgaatttccaaaagtattacatataataaaagaggtaagcaa

SEQ ID NO: 426979 - DNA, 617 bp, Homo sapiens
atggcttattacaacagaggaatatagattaaaattagccaagggaagagccacatggggtagagttcaggaaagttccatgtgcagagcttccagttgtcttctcccagtagtgtcacagacagtgctcactattctggcaatgctatgtgacaatatgcagagtattgccatccaaggaaccccmtccgattcttggtgtccaaagtttttagtgggccttggtcacatagacctggttggccacccatgtggctggaccttagtctccagccccacaggaggttgagctgataatcttgacccaatacccccaccctaagtcacattattagactatcagtgtggcccaaagctctcaggtaaacaaagactcttaggcattcaaggacttagaactcatctcccaggaaccaagggcaaagcccagacctctctttgggcaaggttaatttctttactatagtcataaaagtgggacttcaccttgtcagagagaaagcctctctgagtaagtgacagttcagctgaaatctaaaggttaagtaggtattaactaggggagagaggttcaggatcattccagattaattacagctttatagcaaaagtgagta

SEQ ID NO: 426980 - DNA, 532 bp, Homo sapiens
ctggaatgtagtggcacgatcttggctcatctccrccttgcctcccaggttcaagctattcttgtgcctcagcctcctgagtagctgggattacaggcatgtgccaccatgccaggctaatttttgtatttttagtagagataggattttgccatgttggccaggttggtctcaaacttgaggccaggttggcctcaagtgatctgcccgccttgggctcccaaagtactgggattacaggcttgagccactgcacctggcctactttatattctttgtagctcttttaaataggatttttttcttaatttctttttcagattcactgttggcatatataatagcagctgatttttgtatgctgattttatattcttcaacttttttgtttttgagacagggtcttgctctgtctggagtgaagtagcacaatcatagctcactataaccttgtgctcctgggctcaagcaatcctcctgcctcagcctcccgagtagctaagactacaagtgtgcactagcacaggtggct

SEQ ID NO: 426981 - DNA, 531 bp, Homo sapiens
ggactctgagtcacatcaccccagttctcccttttgtatcacttttctctcctctctgtcaggcagattatcattgcagatgctctgggcaccagatattttcttcatttaaatatttcaaaacaaatatataatgccaatgcattgtaatacatagaaatacgtatttatatgaatccaaatgtaaaaaacagttctgatatacatacatgtgttccttaaggctggtataattagtaaagtaggagaacgatggstatgcaaatcaaaggtggacctagctccccaaaaccaacctcttgattttggagaaccttatcttactaaaacccctgagattgcctgtgcactggcacagggttctataataatcagaaaatttattgggataaagtcatgtttgttggcctgctttcaccacaggaaagaatgggtaagacacaatatatagctgagtatctcagatcctaggaaaaagaaacatttcacattgttcaatttgtgtgaataaaagtatggtgaagtttatga

SEQ ID NO: 426982 - DNA, 531 bp, Homo sapiens
ggactctgagtcacatcaccccagttctcccttttgtatcacttttctctcctctctgtcaggcagattatcattgcagatgctctgggcaccagatattttcttcatttaaatatttcaaaacaaatatataatgccaatgcattgtaatacatagaaatacgtatttatatgaatccaaatgtaaaaaacagttctgatatacatacatgtgttccttaaggctggtataattagtaaagtaggagaacgatggctatgcaaatcaaaggtggacctagctccccaaaaccaacctcttgattttggagaaccttatcttactaaaacccctgagattgcctgtgcactggcacagggttctataataatcagaaaatttattgggataaagtcatgtttgttggcctgctttcaccacaggaaagaatgggtaagacacaatatatagctgagtatctcagatcctaggaaaaagaaacatttcacattgttcaatttrtgtgaataaaagtatggtgaagtttatga

SEQ ID NO: 426983 - DNA, 605 bp, Homo sapiens
tttcaccccaaacccagtgagccagactatctgggtatgggttagtattctgacagtttttattgtttttaaagaagaaaaagttgccaaggatttgagatkacttgtgctaatattttgtagggaatgatgccaaaaacacaagcatagcataaccaaccccttctgagatttctctttctcttaaagttttcagtaaatacactacccagctactatttattgtttcgtgatttctgatgttccttgtcattgttttcccattcctcagtttcaatttgataatacacaaagactaaaatctaaacaccatcacctcattgttttataagctgactcagccattgtgttgcgattttgggcaagtcttttagcatccagcattactgttttatctataaatgaatggtaattgcagatgaattaaattatatttaaggtataagaattggttatgtttgcctttaatatcattttgcttaaaaatatctattactatcctacctctaactttttaagataacatttttaaatttaatggaataattatttaattaatatatagtgatttttagtaatgtggtttgtttcttggagatgcatag

SEQ ID NO: 426984 - DNA, 513 bp, Homo sapiens
agcaaaaaatcaagaccagacaaaagaatagatgtatagggcaaggtctagaagggtcctaaatttgaaccttccttttgtcctctgctcacggagttcagatgaatcaccctcctggcacatcaatgtacagctatatgcacatgatattgctaaccaggacagctctcctgaacatctatgtccacagtttttactggaatttcattacaaaggcatgattgaatcattggtcttgtgattaaactcaatctatatccccacttccctccccaaaggtcaggcagatatcaccttgctcaaagctctacccctgtaatcacatggttggtctttttgatgtgcccacttcccattctgagttgtgtagttaacataaactcaggcatggccaaagtagcctaccataaataacaaaaaaattcctatcrcttggaaacttttgagagtttttggaaccaaagaaaaagaccagacaaataattatacaacagattaaaaataataatttga

SEQ ID NO: 426985 - DNA, 513 bp, Homo sapiens
agcaaaaaatcaagaccagacaaaagaatagatgtatagggcaaggtctagaagggtcctaaatttgaaccttccttttgtcctctgctcacggagttcagatgaatcaccctcctggcacatcaatgtacagctatatgcacatgatattgctaaccaggacagctctcctgaacatctatgtccacagtttttactggaatttcattacaaaggcatgattgaatcattggtcttgtgattaaactcaatctatatccccacttccctccccaaaggtcaggcagatatcaccttgctcaaagctctacccctgtaatcacatggttggtctttttgatgtgcccacttcccattctgagttgtgtagttaacataaactcaggcatggccaaagtagcctaccataaataacaaaaaaattcctatcgcttggaaamttttgagagtttttggaaccaaagaaaaagaccagacaaataattatacaacagattaaaaataataatttga

SEQ ID NO: 426986 - DNA, 513 bp, Homo sapiens
agcaaaaaatcaagaccagacaaaagaatagatgtatagggcaaggtctagaagggtcctaaatttgaaccttccttttgtcctctgctcacggagttcagatgaatcaccctcctggcacatcaatgtacagctatatgcacatgatattgctaaccaggacagctctcctgaacatctatgtccacagtttttactggaatttcattacaaaggcatgattgaatcattggtcttgtgattaaactcaatctatatccccacttccctccccaaaggtcaggcagatatcaccttgctcaaagctctacccctgtaatcacatggttggtctttttgatgtgcccacttcccattctgagttgtgtagttaacataaactcaggcatggccaaagtagcctaccataaataacaaaaaaattcctatcgcttggaaacttttgagagtttttggaaccaaagraaaagaccagacaaataattatacaacagattaaaaataataatttga

SEQ ID NO: 426987 - DNA, 520 bp, Homo sapiens
taaaacacatttgtcacttcctgtagcacaagtattaagttaccaacttgccatttctaatgtggagttgggaagagatgtactggttcttgccaacttgccagagctatatccagcatatcactgactgaaagcactatataattccagaattgatttattcattatgacatatttcaatgttttaactttaaatgaatgtaagaatagataataattcatatgtgttttaactcagcagtttgcttcccaaataacagttcatgatccagctggattttaaccagttatataagttaatgtttcagatactccttcccaataattgagctggaagacagtatccatacaattgattaagctcctttttcctggaatactaaaaacttattgctgtattacagctctaataacacagagctctctattgtttgtgctgctacataacactgacttttttctrtgccaactatagtatttgcgtttttcttggtattgcagtggaataatgcagtggtgg

SEQ ID NO: 426988 - DNA, 488 bp, Homo sapiens
cattattttctaagtatatttctatttaatggaaatggtataaatatttactgtatctgtataatcattatatgcatagcatgttttgaataaaataataaacaattattggaatgtgcaatatagtaactgcaattgtaaagaataagaacctaagaaccaaaccatattaaaaatcaattcggtgagactttgttatatttccttcatttcttaatggttttaaggtgtatactttaattaatagataggtatgctgagtaataatttcatatgcaacaattattttgttgacaatatgaaaatgtttttatatyattgatggaacagttccataatgaaaccatactgactttcatgagttatgtgaataaaatgaacttttgtgacaaatggctttacaattgctcagcttttaaattacttttacaaatcattggcaaatcttagtaaaatagaagcctttacagcctgcaaaggctaaaatg

SEQ ID NO: 426989 - DNA, 384 bp, Homo sapiens
ttattacacaaaatctttagtgtcattaatgttactcacctttctcagcattgaakatttcttctctttgttctgcatatctaattagtcatgaagtctaatttaatctttgttttgcacttgtgtaaattacactagtaaaattacactcgtgtagccattgtaattttttacatgcccgactaagtttgttattgtgctttcaggctcttcatattttactgttttcctcatgtttttttttttaattttccctgctaaagaaaattttttaaatgggttaaattaaatttttcaactcatcatttatagacttatagaagtctataatcctcatgctagtatgatatatttttctcattgtatttcatatgagccttatac

SEQ ID NO: 426990 - DNA, 556 bp, Homo sapiens
atctgtattttgcaaaaatgattwttgcagagagaaatttgaaaaaagaatatttcagcgatcaaagtctctccggggacaggttaaagaaaccgaagatcataacagatgtttttagctatctagttagctagggctatgatgcaaataattgttactgccattatctttgaaaccagatgtctgatgtccccatgagagacaacaaaataataatgataatggtatagatgattttcaagcctattgctgagttacaacttaatatttatttttgcctgtatgactgctgacaggcatgccaaaatgttgagaccagaaacactttttttcctaaattttgctggaatatcatttacaattaagacctaatttattattagtgatggcttttactgtcacaatatgctaataagattacagaaataggaatagagaaacaagaatctctccagaaagtctctgtcaactgatttgagcatgaaaaactgttaaattaattgcatgacatgtttattcaaaatttcctctgtggaagcagcctagtgcctggcag

SEQ ID NO: 426991 - DNA, 556 bp, Homo sapiens
atctgtattttgcaaaaatgattattgcagagagaaatttgaaaaaagaatatttcagcgatcaaagtctctccggggacaggttaaagaaaccgaagatcataacagatgtttttagctatctagttagctagggctatgatgcaaataattgttactgccattatctttgaaaccagatgtctgatgtccccatgagagacaacaaaataataatgataatggtatagatgattttcaagcctattgctgagttacaacttaatattkatttttgcctgtatgactgctgacaggcatgccaaaatgttgagaccagaaacactttttttcctaaattttgctggaatatcatttacaattaagacctaatttattattagtgatggcttttactgtcacaatatgctaataagattacagaaataggaatagagaaacaagaatctctccagaaagtctctgtcaactgatttgagcatgaaaaactgttaaattaattgcatgacatgtttattcaaaatttcctctgtggaagcagcctagtgcctggcag

SEQ ID NO: 426992 - DNA, 556 bp, Homo sapiens
atctgtattttgcaaaaatgattattgcagagagaaatttgaaaaaagaatatttcagcgatcaaagtctctccggggacaggttaaagaaaccgaagatcataacagatgtttttagctatctagttagctagggctatgatgcaaataattgttactgccattatctttgaaaccagatgtctgatgtccccatgagagacaacaaaataataatgataatggtatagatgattttcaagcctattgctgagttacaacttaatatttatttttgcctgtatgactgctgacaggcatgccaaaatgttgagaccagaaacactttttttcctaaattttgctggaatatcatttacaattaagacctaatttattattagtgatggcttttactgtcacaatatgctaataagattacagaaataggaatagagaaacaagaatctctccagaaagtctctgtcaactgatttgagcatgaaaaamtgttaaattaattgcatgacatgtttattcaaaatttcctctgtggaagcagcctagtgcctggcag

SEQ ID NO: 426993 - DNA, 625 bp, Homo sapiens
ttcactttaaggtgagcaattacagcaaacttcttcatgaatatgtactttttttttgaagggatcaatacgctgtaattgaaactcagtgatagaagaatgctctctgtataccttagagtcaaatttwatataagaatcagattccacagcaagaactcaatgatatttaagaccaaatataactgagtattaagcacgatatggtagtcaaaatagatatgtgaagtcagaacccttgggttattttctcagatctgccagttaccaagcaaattatcttgagtctcttatactcatgtcttaaaaatggaagaaattttaaaatgttgaaaggaaaaatggaaatattcagttcataataatgtgttacctaattatttcaaagaacccaagggaattttgccttttattagaagagccctatctaaataaacttatcttgccagttataaaaataaatattcaccaactaattacagatttatataatacacacaaatccctcatacatatctgaaatgtatatatcttcctctatatattatattattctgctacgttactgtaaaatacatacaaatgctccttcacttacaatgggggtatatcccaataaactcat

SEQ ID NO: 426994 - DNA, 531 bp, Homo sapiens
cttgaatatagtccataacactgagggcacaatgatctgacgttcacacttctctttcttttgatttccttttgrtgttctcaagtgttttactggaatgattaactggagtgatctatgcagattacatatgtgtgtgcatgtatgtattctactaaagttgttttggtttaaatttcttggttctttctagcataggcaagaggtaaagaggcttttaaatattggaaaccatttaacatctagtcaactagattttcagctgtcgtgctccattatacattcatagaaaggattcatttttttctatctgtacttcatcaataatgaccaaaaatactgaggttttttttttttttttgctttgattggggttattaacctttaatacaggtaagtcaaaggtggtgtagcttcacattggtaccccaaaaaagactgcttttagttttatcagaaataacttgttttcttgtgtaaaagctaaatgatcaaaacagagtaacagaggcagctgtgcaagagttctgt

SEQ ID NO: 426995 - DNA, 560 bp, Homo sapiens
tagtaagcattcaataaatattagccattaattataaaatatcactcagaggcacgcactccataggttcttaggcctttttagtaacacrcgtcctatacccatagttatgaatttgcatagtaaccgttcatagaatagtaatcaagtacaaattcttttgcaaatttttttcttgcaaaccatttggaggcattggacctactgaatcttcctcatgaaattcaactgtgccctgaacttatgataatttctccttaataaattgaatggaattaatggcttcaaataagaatgatcaaatgtaaaaatatatccaagtgttagaatgaatattttccaatataaaagaaaaaagtaaaaataatataatttcagaatgttttgtttgtgtgagtaggtagatggctaaagaaaacctagaaaacaagtatacatttattttataaatattattaaatgctcccctttgccaggtattaagtgtgccctgtacaaaacttgcttgctaaaacagactttgttctaattcttatggcacatattccttagcagggact

SEQ ID NO: 426996 - DNA, 568 bp, Homo sapiens
attgtgccctgagaaaggtattagaggtacctaggaagccaacagaactttaatttttgtattatacaacatcttttagcagaaacacagatactaaatatttgctgtggtaaattgaaaaatacctcccctaaaaggtattcatgttctagtccctatagcctgtaaatgttaccttacatgtgcccttctccctgtcaaagatggctctttgtaactttgatttagttaagaatcttgagatgaagttattaccctagattagctgtgtgggccccaaatgcaatcccaggtacccttataagagggaggcagatggagattgtgttacacaaaggaggtagtatggaaacagagcagagggaattgaagatgctggccttgatgattaggttagtctgaccacagtctgttccccacctaagttcctattctaaatcattgtgtaaaattgtcatcaggaaaatgcagttcctttgacatctattgagctcatttgcrctggattgctcttacatagctttcgtaatactctgatatccaaacacaggtcctgctttttagggca

SEQ ID NO: 426997 - DNA, 552 bp, Homo sapiens
catcctttcaaatgttaacaatcatatacatactctgagctcaagatcagggatttccatatttgtagtttacagatataaaatcagaattctatcaagcctggaaatcttgttttctgattgcccaatataaagtttactaaaatcaaagtactgataccaatcatttcaaaactcatgtcaaacttagaaaaaataaattttactactgaaaatgaaaactttagcaattagtataataattattataatagcattcatagtactgaaagtttttacatacatgcactccatactttacttcatattttatgtacagtaatttatctgtatgtaatttataacctgcttcagaaataagcgctaatatgccccattttacacacatagcctcatgtgtgcaaaaattaaatgatttgcccgaggttacacgcactgtatgcagcagagctgagatttacacccagatctgcattccaagactcatgtstagatcctgtgcctccttaaactaccatctcactttctccttcccttaataagcaaagactt

SEQ ID NO: 426998 - DNA, 492 bp, Homo sapiens
taatcataaaaatcatttttatcatcatttccaaaatcataccatgatgagttgtcttatgtttgtttaatatgtcagcttcattatctcctgcctgcatttccctttcacaaacaatcgaaatgtaaaatataaggaattttaattttcgttgttgaaatcaagggaaaaatgtatgttctctagtaaaggcaataaactcaatttcttaaaaagaaaaagcttgtcagcttctgatgttgtttctcctatatgcagayatctacctataactaaaaatgtttcctcctttgagttttttcttagctatattctctatgttccaaagctccctattttggaatatgattatgctactgactgagcaatatgggatttgggttttattaaaagggatctaactacttattttacatgtcaacaaaatcatttttgcatgcaaaaagaagcacaataaactgcaggagccacttcaaaatctatcctatgaga

SEQ ID NO: 426999 - DNA, 515 bp, Homo sapiens
ctaaaaataaaataacagactcaagggttgcataaagtgcatatagataaaaaataaaggaaaacataatttctgaaatagaaaggttctataaataaatctgaaaaatactatatatgaacacttctagaaataaaaaatcattaccatccttgcatcattcaacagctctcattattcaaaagctttaaactcattgctaaaataattagagctgytgaagttcagtttgtttcttctactgtagttctataataataattatgaagacatctttggattaatgtgtgtcatctactcaacctataaatgtttcatgctgagttcatctcttcagtaaattcttagcattttaatactaagtgagtacattaattattctaaattaaaaagctagaaacatagcttttgttcttctcatgtgtaccatctgtgtagtattgagaaatacactgattttatttctttatttccaaagtattttcccattcacatatttcatggtaccttgcctt

SEQ ID NO: 427000 - DNA, 602 bp, Homo sapiens
tctttaatatatcatattttttctactttgcagttcttatcattgttttgttcattctttatttagtggaggcataccatgcacctcagtatggcgataatatatgggtggcagcaaaaagttccagcccagcatggccagtgctatccctctatctttttwaaaaaaattgtgcacttttatttgtcatgctttctaaaaaggtatctatgccattgattttttattgatgcataatacatgtacatattttcaaggtacatatgataagttaatagattcacataatttgtaaagttcagtgtacttgggatagccaacaccttaagtatttgtcttttcattgcactataaacattctaattattctcttccagctgttttgaatgtgcagtagattactgtaaactctactcaccctactgatctatcgaacagtagatcttatttcttctatcaaactatgtatttgtttctgttaatcaacttctcttcatcccccaataggtaagaatgtgagaagtaaaagtgtgggagggaaacagagctaagataactcaagaagtcagtcactgtattttaaacattgcactaaaacaaca

SEQ ID NO: 427001 - DNA, 635 bp, Homo sapiens
ttttaggtctttaatatatcatattttttctactttgcagttcttatcattgttttgttcattctttatttagtggaggcataccatgcacctcagtatggcgataatatatgggtggcagcaaaaagttccagcccagcatggccagtgctatccctctatcttttttaaaaaaattrtgcacttttatttgtcatgctttctaaaaaggtatctatgccattgattttttattgatgcataatacatgtacatattttcaaggtacatatgataagttaatagattcacataatttgtaaagttcagtgtacttgggatagccaacaccttaagtatttgtcttttcattgcactataaacattctaattattctcttccagctgttttgaatgtgcagtagattactgtaaactctactcaccctactgatctatcgaacagtagatcttatttcttctatcaaactatgtatttgtttctgttaatcaacttctcttcatcccccaataggtaagaatgtgagaagtaaaagtgtgggagggaaacagagctaagataactcaagaagtcagtcactgtattttaaacattgcactaaaacaacagacaccatgatggccttttctactac

SEQ ID NO: 427002 - DNA, 570 bp, Homo sapiens
acacaatttatttggtatgtcattacctaccaaccataactctaaagtggggaggggatgacagaggaaattgtggtccaggaagagaaacaggttccagcttctcactgcctcagtcaggatgtgacttgcactgttggcaacagagaaggcgagacagaaccattctgcagcctgcttttgttttttgtttttttttatacagagtttcgctcttgttgcccaggctggagtgcgatggcacgatctcagctcattgcaacctctgcctccctgattcaagagattctcctgctcagcctcctgagtagatggaattacaggcacctgccaccaygcccaactatttttcgtatttttagtagagatggggtttcaccatgttggcgaggctggtcttgaactcctgacctcaggtgatcctcctgtctcggcctcccaaagtgctgggattacaggtgtgagccaccgtgcctggctccctgtgcgttctttaaaatctgtgtctgtctcatgtaggtatggtagaagaagcagcaggaatggcatgaagtagaaaagtctctagaa

SEQ ID NO: 427003 - DNA, 528 bp, Homo sapiens
gagctgtgtgattctcttgtatgacatatatgacttcacacacaaatcctcatcatgatcaaattgaagtgttactgaggtacccaattgcatgactattaagtttaaatttggagaaataaatgaaacaaatattggcagattttaactcattttacaaaaatgaaacacatctaaaatacagttttycagtacttcatccctttgctgatagcaacactagcagtgaatgtctgtatttccattgctcccctttcaaatttaagagcacctttaatgtatcagtctaataatccattttgaatgaaaaaatggtcaccattttgaaatcgtatcacttacgtataaatttgcagatgttattaatgaaataaattgcattgcatgtgttttatttttagtagtgtaattacatgtgtttaacatttttgttttatctatatttgaaaaagcaacaccctatgctaacacaattctcaaatgacaagctacatcttttaaaaaagcattttaatttactgttaacta

SEQ ID NO: 427004 - DNA, 540 bp, Homo sapiens
acaaacattattattaaattgcctatttctcctataaattttgtcaatcttggcttgacgtattgggggcttttttgtctattttatatatgtttggtattatttatcttttgattgaatggatatttttcattattgaatgtccttccctaactctaataacaatttttatcttaaagtctatttagggtcaggcactatggctcatgcctgtaatcccctcactttsggaggatgaggtgggtgtatcacctgaggtcaggagttcgagaccagactggtcaacatggcaaaacctagtgtctaataaaaatacaaaaaattatccaggcgtggtggtacatgcctgtagttctagctatttgggaggctgaggcatgagaatcgcttgaacctgggaggcagagactgcagtcagccaagatcatgccatagaactccagcctgggcaacagagcaagactccatctcaaaaaaagagaaaaaaatttatttcattcattattagtatagacaattcagctctcttttagttactgt

SEQ ID NO: 427005 - DNA, 552 bp, Homo sapiens
tttgcttgtctgaaaaagatcttatttctcctttgcttatgaagcttagtttggctgaatataaaattattaattggaaattcccatctttaagaatgttgaatataggcccctaatatggtttgactctatgtccccacccaaattttatcatgaagcataagtaatcctcacaattcccatgtgtygaaggtgggacttggtgggaggtgattgaatcatgggtgtgtgttttccccatactgttctcatgatggtatgtgagttctcatgagatatgatggttttataaggggttcctcctccttcattcattgttctctttcttgcctgccaccatgtaagacatgcctttgcttctctctcgccttctgccatgattgtatatttcctgaggcctccccagccatgtagaactgtgagtcaattaaacctctttcctttataaattacccaatctcggctatgtctttatagcagtgtgagaacagactagtacagctgccaatctcttctggcttgtaggttttcacctgaaaggtttgctattaa

SEQ ID NO: 427006 - DNA, 552 bp, Homo sapiens
tttgcttgtctgaaaaagatcttatttctcctttgcttatgaagcttagtttggctgaatataaaattattaattggaaattcccatctttaagaatgttgaatataggcccctaatatggtttgactctatgtccccacccaaattttatcatgaagcataagtaatcctcacaattcccatgtgttgaaggtgggacttggtgggaggtgattgaatcatgggtgtgtgttttccccatactgttctcrtgatggtatgtgagttctcatgagatatgatggttttataaggggttcctcctccttcattcattgttctctttcttgcctgccaccatgtaagacatgcctttgcttctctctcgccttctgccatgattgtatatttcctgaggcctccccagccatgtagaactgtgagtcaattaaacctctttcctttataaattacccaatctcggctatgtctttatagcagtgtgagaacagactagtacagctgccaatctcttctggcttgtaggttttcacctgaaaggtttgctattaa

SEQ ID NO: 427007 - DNA, 601 bp, Homo sapiens
ttagttctttcagatatcttcacactgcttaccatagtagctgaactagtttactttccacctacagtgtataagcattctcttttctctgcaacctcatcaagatccgttatttttttgtytgttaaataattgccgttcttgctggtgattagtgatattgagaattttttatgtttgttggctgattatatgtcttcttttgagaagtgcctgttcatgttctttgctcactatttaatggggttattttgttgttgttgttgttgttgatttgtctaagttcattatagattctgttgccccatttttaatggtagatacttatccctgttgctatccctgtttcccagttaacatacagtctgttctgtatgcaatgccaatactcattggttgccatctgggaagaacagcaaacctcctctgctggccacagacttctcctgagatttttctgtgcttttgacctggagaaaatcagccatgtgccccttggtggtattcattctatcacttctgatgcatagttcttgtccctcattaatatgtatctctgaaaggcaaactgattcttgattacagactgcttcacttctgc

SEQ ID NO: 427008 - DNA, 568 bp, Homo sapiens
attgctataaacttccctcttagcactcctttttctgtgtcttacaagttttgaaacgttgtgtttccattttcatttgtttcaagaaaattttaaatgtccatcttattttttaaattgagccaatggtcatttagaaacatgttgtttaacttcagtgtatttgtattttttctgaagttttccktaatgtgaatttctgaatgtgaatttctgattttatgctaatctggtctgagaaaatacttggtataattttaattttaaaatatttttacacttgttttgtggcccaacatatggtctatcttgaagaatttttatatgttgatgagaataatatgtattctgcaattgttggataaaatgttctgtaaatgtttcttaggtctatccagtctagagtcccatttaaatctaatgtttctttgttgatattctgtctagataatctgtataatgctgagagtggggtgttgaggtctctcactattattttattggagtctatctctctctttagatttagtaatctagtaagtctctctctttagatatagtaatattt

SEQ ID NO: 427009 - DNA, 552 bp, Homo sapiens
atgtatgacttcttttgaaaaatgtctgtgtcctttgcccacttgtaaatgaagttgtttttgattggtaatttgtttaagttcttgattggtaatttgtttaagttctttatgaattctggaaattaggcctatatcggatgtatagcttgtgaatattttctcccattctgtaagttgtctgtatactctgttggttattttttcttttcttttcttgctttttttaattgtgcagaagctctctagtttaattaggtgccatttgtcaatttttattttttttgcaattgcttttrgagtcttcgtcatgaagtctttgcctggccaatgtccagaatggtatgttatagattttcttcaagggttttaaagttttaggttttgcctttaagtctttaatccaacttgagttgatttgtatgtatggtaaaaggtagggcccaatttcagtattctgcatatgggtagccagttatcccatcatcatttagtgtatgagcaatcctttcaccattgcttgcctttgctcacttttttgaagattagatg

SEQ ID NO: 427010 - DNA, 606 bp, Homo sapiens
aatcctttttgtagctattgtgaatggtattacattcttgatttggctttcagcttggatgttattggtgtatagaaatgctactaatttttgtacgctgattggagtcctgaaactttgctaaggttgtttatcagctcaagaaaccctttggcagaaattacaggcttttgtaggtatactattatgtcatctgtgaagtaagatrttttgacttcctctcttcctatttagatgccttctattccttccccttgcctaaatgctctggttaggacttccagaaccacgttaaataggagtggtgtgagagtgagcatccctgtcttgtttcaattctcaaggggaatgcttcccagtttgaccattcagtatattgttgactgaaggtttactgtagatggctcttattattttgatgtatgtaccttagatgcctagactcttgactgtttttaacatgaaaggatgttgaattttatcaaaagccttttctgcatctatcgaaatgatcatatgctttttgtttttatttctgtttgtgggctgaatcatatttattaatttacatatgttgaaccaaacttgcattccaggaacaaagcc

SEQ ID NO: 427011 - DNA, 566 bp, Homo sapiens
aatcttacacctcttctgcctccttttctaaactattgggagtgagatgttatccctcttgtgtattgacaccaactcatcttattccttgatgttaatacaatgtctttttatattctccgggtcctgaatttagaaaaagtgcttttctctcatatataataatcccctcactctctaaacctaattttcttattatctttctttatgttttgaatccccacatacctataaactcattttagaaacctaggaagaatcggccaggagcggtggctcacgcctgtaatcccagcattttgggagcctgaggcaggtgaatcacttgaggccaggagctcaagaccascctggccaacatggtgaaaccctgtctctactaaaaatacaaaagttagctaggtatggtggtgcatgcctgtggtcccagctactcaggaggctgaggcaggagaatcaattgaccccaggaggcagaggttgcagtgagccaagatcgcaccactgcactccagcctgggaaacagagcaaaaccctgtttccaaaaagaaaaaaaaaaaaaaag

SEQ ID NO: 427012 - DNA, 566 bp, Homo sapiens
aatcttacacctcttctgcctccttttctaaactattgggagtgagatgttatccctcttgtgtattgacaccaactcatcttattccttgatgttaatacaatgtctttttatattctccgggtcctgaatttagaaaaagtgcttttctctcatatataataatcccctcactctctaaacctaattttcttattatctttctttatgttttgaatccccacatacctataaactcattttagaaacctaggaagaatcggccaggagcggtggctcacgcctgtaatcccagcattttgggagcctgaggcaggtgaatcacttgaggccaggagctcaagaccagcctggccaacatggtgaaaccctgtctctactaaaaatacaaaagttagctaggtatggtggtgcatgcctgtggtcccagctactcaggaggctgaggcaggagaatcaattgaccccaggaggcagaggttgcagtgagccaagatcgcaccactgcactccagcctgggmaacagagcaaaaccctgtttccaaaaagaaaaaaaaaaaaaaag

SEQ ID NO: 427013 - DNA, 461 bp, Homo sapiens
ttcttaactcttatgccttacaccaaaacggtgttccaaactaatattttttagatgtggccagcaggacccaatatggtctgactgttcctgtctttccaggataaatctgtaccactcattcttgaattctctgcattgtagtcacagtgcagcactttccatctgcaaaagccactccaarccttcacgcatgctattccttctgcctggaataccttcacttgactaagtcttactcattctttaagtctcaagttaaaagttatttccttataaaggtcattctggacaactcaatctaagcctttgctgcactttcttttatcaaccataaagatatgcatagaatcctatgcatttattttcacatttgtgtgattatttagtagagggttgtccaatcttttcgcttccctgggccacattggaagaagaagtattgtcttgggtcacacatg

SEQ ID NO: 427014 - DNA, 574 bp, Homo sapiens
ctaggctttttatagcctgctcctccaaattcttccagtttctgtccattacctagttccaaagccacttccacatttttaggtaattattctcagcttctcagtaccaattttctgtctttgttcatttcttgatgttcataacagaatacataaagctatgtaatttatgaagcaaaataacttatttcttacagttatggaggcagagaagtccaaggccaagggaacacatctgataagagccttcttgctgatggagactgcagagccccaaggaggggcaaggtttcatatagtgaggggattgagcatgctggcaaatgtcatttttcctctctttatgaagccaatagtctcacttttataataactcattaatcwattgacctattaatcctagtggatttattcattcatgacgatagagcctcatgacccaatcaccccttgaagaacccacctctcaatacggacatgttggggattaattgtcaacatgagttttggagggaataaatactcaaatcatagcaacatgagagtgagagcgtctaggagatagctcagagat

SEQ ID NO: 427015 - DNA, 563 bp, Homo sapiens
tactcagttttattatggtctttaatccattaatcctgacacatttccttatgcattattccattcttgctagataccttcctctgtatttagctcaggtttcatatgaccaagatagcctcagcttgactacacttcatatgggttccttttttttacatacaggcttctaatctccctttatgttatttcattttttttagttggagttttgctcttgttgcccagcctggaatgcaatgacgtgattttggctcactgcaacctccgcctcccaggttgaagcgattccctgcctcagtctccctagtagctgggattgcaggygccggctgccaagtctggctaatttttattttttaattttctttatttttagtagagatggggtttcaccatgttggtcaggctagtttcaaactcctgacctcaggtgatccacctgccttggcctcccacagttctaggattacaggcatgagccaccatgcccggcctactcccttatttaaaaaatattttcttcactttgttttgtgacaatatattcctgttttacctcc

SEQ ID NO: 427016 - DNA, 616 bp, Homo sapiens
aataagtaactcataagcgatcataaacctaaataataaatgaaaaacttctacaacataacatagaaaaaaaaatcttttcaacctcagattaagcaaatttcttaagacacaaaaaggcaaaataaatattgtaataaaatgaagtgagatatttcataaagcactgttcagcataatagtaacctattgttagggtgtagaaatttctagggccatcttctctaaagcgaaataatgttaattacatgtaatctaagagaatacytgtgttactcttttaacataaatttaaagcttgctatccacttgagaaacaacatgaaaatagaaacctagggttaaatgatatgtaactcccttgaaccttctagaatttagacaaaagtcaccattttcaaacaatgtgttccacagactccttctgttctttgaaaatgtctcaaagataaggagagggatgaagggaaatcagctatgtaggctccacatttgtatcctcgtcaaccaaagtgttttcttttgtctgatttataaactcagaatccctcaagaattcagttaggaaatctttcggaaactatactatattatggtatcttagctttacaaatta

SEQ ID NO: 427017 - DNA, 598 bp, Homo sapiens
ggtttaaaatgtgctcttattaactaccacctctttttttagcttatttatttaaacaacttgacataagtattattagataatctgattgcacattctctggttataacaaacaggaggacagacattatcttttatttgagtacatatttttataattttcaattggatgtgaatatataaagaggctttaaaagctgctgaaacttttggttatttcaggaagattagtggagaattaataagaaaggaaaagttaaaatttaatctggaaaacttgggggcaggtgtatgcgctaaagaattgggggataagggtcactcaacaaatatttattgagcacttactatgtgygagccactatccgagtcttttagatacagagaaccctgctcttgcagagctgacatttaagttgggagaacattcattcaaagagattctagtaataatgactttcaaaaggaaccattggatctccatttcttagcttcctggagcttcttcgccctgttgaaatgtgaacagtccctttctacctataaaccccacagattcagagaaattaaaaaggaaaagcatggtctagcacaaaac

SEQ ID NO: 427018 - DNA, 607 bp, Homo sapiens
ataacacttaaccttgagcaattaacccttttttggtgcgtccttcaaggttaactgattgttgcatatatgcatcagcaatggaagaattaacttgccacatatggttaatcagatgcagtcaaatgttagaggatttctgtcaaaaccagtgacttttgttacagaacaggtgagctacgtctcttttgtaagtctataattatatctataattagataaggagaacaataatcttttaaggctatttctaattcaggacagtaatgccatttaaaaattgttaattgtggtaaaatacatgtaacacaaaatttacaatcttaagcatctttaagtgtatagtttaggagtattaagtacattcacattgttgtgcaatcatcaccctctccagaactctccatcttgcaaaactgaaactctgtgcccattcagcaataactctcaattcccatttctcctacccccggcaactatttttctactttttgtctcygtgaacttgaccataaatacctcatataagttgaagtacctcatataagtggaatcatacagcttttgtctttttgtgactgccttacttcacttagcatgccttcaa

SEQ ID NO: 427019 - DNA, 607 bp, Homo sapiens
ataacacttaaccttgagcaattaacccttttttggtgcgtccttcaaggttaactgattgttgcatatatgcatcagcaatggaagaattaacttgccacatatggttaatcagatgcagtcaaatgttagaggatttctgtcaaaaccagtgacttttgttacagaacaggtgagctacgtctcttttgtaagtctataattatatctataattagataaggagaacaataatcttttaaggctatttctaattcaggacagtaatgccatttaaaaattgttaattgtggtaaaatacatgtaacacaaaatttacaatcttaagcatctttaagtgtatagtttaggagtattaagtacattcacattgttgtgcaatcatcaccctctccagaactctccatcttgcaaaactgaaactctgtgcccattcagcaataactctcaattcccatttctcctacccccggcaactatttttctactttttgtctctgtgaacttgaccataaatacctcatataagttgaagtacctcatataagtggaatcatrcagcttttgtctttttgtgactgccttacttcacttagcatgccttcaa

SEQ ID NO: 427020 - DNA, 607 bp, Homo sapiens
ataacacttaaccttgagcaattaacccttttttggtgcgtccttcaaggttaactgattgttgcatatatgcatcagcaatggaagaattaacttgccacatatggttaatcagatgcagtcaaatgttagaggatttctgtcaaaaccagtgacttttgttacagaacaggtgagctacgtctcttttgtaagtctataattatatctataattagataaggagaacaataatcttttaaggctatttctaattcaggacagtaatgccatttaaaaattgttaattgtggtaaaatacatgtaacacaaaatttacaatcttaagcatctttaagtgtatagtttaggagtattaagtacattcacattgttgtgcaatcatcaccctctccagaactctccatcttgcaaaactgaaactctgtgcccattcagcaataactctcaattcccatttctcctacccccggcaactatttttctactttttgtctctgtgaacttgaccataaatacctcatataagttgaagtacctcatataagtggaatcatacagcttttgtctttttgtgactgycttacttcacttagcatgccttcaa

SEQ ID NO: 427021 - DNA, 536 bp, Homo sapiens
tacaccagggttgtcaagtcatttacaatttttaataaagttctaaacacatccctgtttatcttgcctgacttggattgtgctaatagaatcatcaaaattacattctaacttctcaattctttggtcagtcaaaggtgtgttctgcataagcatcaacaatcggggtcaatatcaagattatataacttttctcatcaccaattcctatccatagagtatacacaggcacacttgattctctcctatggctttcagaggttttttttttggtgggggggggcaatcagaagtctacgataaatgcatttgaaaattcctgcatggcctcttcttgtttctgctttacatgtttcttctctgtcaagcaaggcaccaggagagtaaatcctgtatttgctagagcagcgtgtgaataaaatcattttaaggtaatggcaattcattcagaggagataagaggacaaacctgtcctttgaggcattcaaggtttaaaaggatstttgatagtaacagctcaaatagagctaaaaaa

SEQ ID NO: 427022 - DNA, 540 bp, Homo sapiens
ttgcattatttcattaacattagaaaatcaataaatttatcacattaacagtttaaaggagaaaaactatgtgaatatctcaatagatgtagaaaaagcatttgccaaaattcaaaccgcatttataatgacaacttttagcaaattttaaaaaaagaaaagaattttcttactctgcaaaatgtagcctcaaatatctactgcaatcatctttagtggcaaaatattaaaatttctccctttgatatttaaagcacaacagataagtactaacatcagtattttctrtattgtaacagaagtcctagccatcacaaagagataaaatatacatttggaaaatgaaatatatatcattattcatcaatgacatgattatgtagaacatccaaaataatctacagataaattattagaattaaaaatgagcttatcaagatttctggatacagacaacatacaaaatcaactgtgattttatatactagtatcaaacaaaaaatgactttgaaatagcataaaatgacttctggttccaac

SEQ ID NO: 427023 - DNA, 498 bp, Homo sapiens
aaaggaagggaggtcaggcagaaaaaacagaarccacatgttgatgtccagtctccctgcccagacagggcaagagaacaggcccccgccatgtatttctgaggcccaagctggacatgaggacacgtaggcctggtcttggggtggaaactcccgcacttccagaggggtgagatgttaatacagtcagaactgaaactagaaggcctggaccaaagcaccaggtgtagacagggaaggacacgaggctcaagccaagattcaaggcagtgggtagggggatgacatgcagcagcctgggtgaggggagggtggagaggcagaaggaggttgagacagaaactttccctgagagactcctccagtggaacctggggctggacaggcctgtatcctgagtgggacggagcaggttgtctcactgtcccttcctgttcctgcccccttccctcctcagagcagtccacctgggccagctcaaaagcagagtcacaagtg

SEQ ID NO: 427024 - DNA, 498 bp, Homo sapiens
aaaggaagggaggtcaggcagaaaaaacagaaaccacatgttgatgtccagtctccctgcccagacagggcaagagaacaggcccccgccatgtatytctgaggcccaagctggacatgaggacacgtaggcctggtcttggggtggaaactcccgcacttccagaggggtgagatgttaatacagtcagaactgaaactagaaggcctggaccaaagcaccaggtgtagacagggaaggacacgaggctcaagccaagattcaaggcagtgggtagggggatgacatgcagcagcctgggtgaggggagggtggagaggcagaaggaggttgagacagaaactttccctgagagactcctccagtggaacctggggctggacaggcctgtatcctgagtgggacggagcaggttgtctcactgtcccttcctgttcctgcccccttccctcctcagagcagtccacctgggccagctcaaaagcagagtcacaagtg

SEQ ID NO: 427025 - DNA, 498 bp, Homo sapiens
aaaggaagggaggtcaggcagaaaaaacagaaaccacatgttgatgtccagtctccctgcccagacagggcaagagaacaggcccccgccatgtatttctgaggcccaagctggacatgaggacacgtaggcctggtcttggggtggaaactcccgcasttccagaggggtgagatgttaatacagtcagaactgaaactagaaggcctggaccaaagcaccaggtgtagacagggaaggacacgaggctcaagccaagattcaaggcagtgggtagggggatgacatgcagcagcctgggtgaggggagggtggagaggcagaaggaggttgagacagaaactttccctgagagactcctccagtggaacctggggctggacaggcctgtatcctgagtgggacggagcaggttgtctcactgtcccttcctgttcctgcccccttccctcctcagagcagtccacctgggccagctcaaaagcagagtcacaagtg

SEQ ID NO: 427026 - DNA, 587 bp, Homo sapiens
  misc_feature (1)...(587): n = A,T,C or G
nnnnnnnnnnnnnntaagtatttatttttttaaggctattgtacatgatattgtatttttaattgtagtgttcaagtcttcactgctagtatatagatgtatgactgatttttgtatgtttgtctcgtaccgttacattgctgaattaattgattagttttggatgtttttttgtggatgccatgtcatttctaggcaaataagcatttcatctgaaatagaaacagttttatttattcctttctgatctatatgccttttattctcttttcttgcctgattaaactggccagaacttccagcactatgttgaataagagtgatgagagcacacatccttgttttgttgctgatattaggaacaaagtattcagtctttacaattaggtataatgttagctgcaagtttttsgtggatgctttttatcaagttgaagtttctttctattattgtttttcaaaaaaactttttatcatgaataggcatttaattttgttgaatgctttttcttttacatcagttgatatgatcatctaatttttctccttcttttttagtctgttaacatagtgaattacattgattg

SEQ ID NO: 427027 - DNA, 587 bp, Homo sapiens
  misc_feature (1)...(587): n = A,T,C or G
nnnnnnnnnnnnnntaagtatttatttttttaaggctattgtacatgatattgtatttttaattgtagtgttcaagtcttcactgctagtatatagatgtatgactgatttttgtatgtttgtctcgtaccgttacattgctgaattaattgattagttttggatgtttttttgtggatgccatgtcatttctaggcaaataagcatttcatctgaaatagaaacagttttatttattcctttctgatctatatgccttttattctcttttcttgcctgattaaactggccagaacttccagcactatgttgaataagagtgatgagagcacacatccttgttttgttgctgatattaggaacaaagtattcagtctttacaattaggtataatgttagctgcaagtttttggtrgatgctttttatcaagttgaagtttctttctattattgtttttcaaaaaaactttttatcatgaataggcatttaattttgttgaatgctttttcttttacatcagttgatatgatcatctaatttttctccttcttttttagtctgttaacatagtgaattacattgattg

SEQ ID NO: 427028 - DNA, 534 bp, Homo sapiens
cctccactgacaacctcctggctcggtgaggtagggttgcttcttactgatctccacatggccaccacaggcaccatgggggtgaatggctctttactctgtgtaatgatgaaaagccctgactctctgtgagtcctgacgctaccccartggggagcaggacaggcaacttcttgcagcctgttaaatgtttaggttccacatttgatcattgctggtatggaggttacaagttttttgcttttttgtttttttttttcacaatggttgtcaccagtaaagcagttaatttctaaaatgtttctgtttggtcaagatgccctttccttagttgtctggctagagagaaaagacttttgttggagcttttttttgtctgcattcatcagcatttccagattgccagtttcttgagcacccatttttgggtatataaggcaaacaacaacaacaacataaaacaaaaaaataccacaggaagttcaaccccttgttgttcctcaaatcctaaggtcgctagctggtctgccttct

SEQ ID NO: 427029 - DNA, 566 bp, Homo sapiens
taatgtatatgttaattaagaccaagttataataatagcctttgtgtagtgctttgagaatacttttacatacacaattgtgttggatgatttaataatgtatcgaccaggaaaatgagaaagcacccctcccccttaccttttacattgaaggtagcccagacttggcagcctctagggaaccagcaaggtcagagtccatcacacaactttcctgctaaagtggtatttgccaaatcatgtccagaggtgttgtttctacaatcttcttggcaactcccgaaatgggctgcatttggggcacttccttttgccatccttctggcccttcttgcccgtcaaaagcttttgtctgtgggctttggaaatagtccagtttttaaggtgttttatttttcagagttaatggtttcttractaatcagactatgaaaatgccttctctaggttctttaatagttataccaagtgttattcccattttaggaatgaagaaactaaggctgacaggcaaaggtcatgtagccagcatgtggcaacactagaataaattggcagactcaaca

SEQ ID NO: 427030 - DNA, 499 bp, Homo sapiens
tggcctgtagttttctttttttgttgtacctttgtctggttttggtatcagagtaatgctggtctagcagaatgagtttggaagtaattcttcctcttcaattatttggaagagtttgagaagaattggtgttagtgttttaaatatttggtagaattcagctatatttttaaatatttggtagttttttaactatctggctttttgttgataggagactttttattactgattcagtcgtctccttactcatctacatgaagaaatagatgagtaaggagactgaatcagtaatatttcatccttgatcagttgcatatgtacacagatttatccattctaagttatctaattcgttggcatataattgttcataataatttcttatgatcctttaatttctgtagtatcagttgtaatgtctccttttttatctctgattttgagtcttctctcactttttcttagtctagstgtttattttatgttttcaaatgaa

SEQ ID NO: 427031 - DNA, 561 bp, Homo sapiens
aaaaagaaaaagataaaaccaaaagccagatctttgaaaagattaataaaattaataaatccttaccaagactaatcaaggaaaagagaaaatataagtttaaacttttatgtatgaaagaggataaatcatatacagatattaaaaagtcaattagggactattatgaacgaatttatgtcagtaaccttaacaatttacatacaaaagagcattttttgaaaaacacaaattatttaaattgaaacaaaaagaaaatgaaaatacggatagctctatttccactaaagaaatttaattcataataaaaacctttccaaggagaatactctaggcccagatggttaaagaagaattaayaccagtcttacgcaaaactctttcagaagcagagtgacagagaacactgacacacttgttttataaggccagcataaccctataccaaaatgtgtcaggcattaccaaagaagttacagaccagtattcctcataaaatattctcaaaaaacccccacaaaacaaaacaaaaaaaaaagagtaacaaacttaatacggtaa

SEQ ID NO: 427032 - DNA, 620 bp, Homo sapiens
gagtctgcatctttttcataaacttagctgaactatatagaaaatacagtttttatgatttttaaaaatgtctacttatcagccataagcatagaaactctgatatttaccagcatgttctagaaccagcacagaacatgggagtcaccaaaggactcyatggctttcactttaagtttgggacacctggagtttctggtgctgatgctgatcatatggacgacattaaagaagcaggtggtgctaacagtcccatctctggccatggtgtgaacacagaaatcaggtttgcatccaaaatcaccaaggaaatatttcaatccaaaagctctctagatctctgagttttttaatacagaaaatgactaaggaattggcttgttatgtgattatttatataaactctgcaatgtaagctgcatccatttaaataaaacatattgtgatatgagtaagaaacttcccaagattccagtatcaatggggaagaaaagattattccaaaatttaaatccacagaagcatttagaaatttaaattaaatttgaaaaattaaatataaatgtaaacataaatgtaaatgtttattattgtctaatatattacataaacactaaaaa

SEQ ID NO: 427033 - DNA, 608 bp, Homo sapiens
gatttgcgcctcgcctctgactcagagcccatgaaggttcctgtgtgaggccactggctgcctcggagctgacagcatcctgcacaatggctagatggcttgtcaccccaggccgcagaggaacaactgtttctagggtttggccagacttcacattctccattctttccatccctgttatgtggaatgcacacgatgccatgtaattacttcagtcccttctcaaaggaaaaagaatctggaccygcactccaggacactagcagtttgaaggttcgctcaggaatgttctttgtctgcagacctagcagctgtacagatcgctcttgtgtttttgcactattaattaacttcaagtgcaattttggcaggcaggccaagggtctcaacaggctatttggaatgagttctcttttaaggccttcaacgtagtgagacattttcaaatcaaaaagtacagcaggagccagcctttattttgtctgtgtacacaataaaatattccgcttctataggcagatcagctggtcttagtcacaaataaattgtgcatattattactgtgcttaataggcaaaaccctaaactatagaaatttttgctattcc

SEQ ID NO: 427034 - DNA, 524 bp, Homo sapiens
tcaatattttaaaaatcaactttatgtcttgatatcagggcagagaacccaaaataaatacattgaggaatctacagtatattgaaagaagaatacaatatagccatgacattaaagataggcacctggtgaggataaacatctcagtcaaagcctgccttacagtgaagggtcacaagaggttgggcatgggctctagtttttctttcttcagggttgtgctggcatgcacttcctctcttagatctggaactatcagtgtgtgcacagaacacctcagatccaatcctgtagtgtagacctagcactgagatgaataaatagacctgtggagttaaggagacaacacttatttaaaagacccttgtcttttagatgcttataagtgacagaaattgcatttattattgctcttgttgcctgtgcttttgaggtcatattcagaaaattattgcyctggccattgtgttggagctttctctgcccacccccccctttttttttttttgcttagtcattttata

SEQ ID NO: 427035 - DNA, 485 bp, Homo sapiens
atcttgttgaacatctttgagaccattgttttaattccgtattgtgtaaattacatagtttcctttcactagggttggttataggacatttttgtcttgttccttttttggaacatattttcttgttcctttattttctttgactctctgtgttggtttctgcacattatataaggaaactgctccaccctctcttgtcacactgacatgacagaaaaatttcagcagtttatgtggccagagattctaaggtatctttcatatttgtgcttgtctctatgtttgttggctgccaggagaataagatgtatcacattctatcattacccccaagacagtaatgtttctacaatttatgcagctaaattcacatgacaccttgtgatcctggggagasagttgtagaaaatgagcctgttgtgtggccacctctgctttcttttgcacagggaaactcaagaatgcaaagccaattcactgccaat

SEQ ID NO: 427036 - DNA, 543 bp, Homo sapiens
ttcctgagttcctggcctatgaattttggacatgttcagcctctacaaatgcataaggcacttccttgtgataactctgtcctgccttcagggactccacttacatctatrttgggctgcttgaagttttcccatagctcactgattctcttttcatatttgcagtccttttttctatgctatgtcttcaagttcactaattttttcttctgcagtgttaaactgccatcaatgccattcagtgcatgtgtctgctcagatatcatagttttcatctttggaagtttgatttggtgcttttaaatatctactccttctccacacataacatgctccatctttcctctgccttcttgaacatgtggaagcactagaggcaattttttgatgtgcttgtctattaattttatcatctgtatcatcatgtttgtttctattgcttgattgattttcctcctcgttcatgagtcacatttttcttcttactcacatgcctagtaatttttgattagatgccagacattgtgaattttaccttacttg

SEQ ID NO: 427037 - DNA, 575 bp, Homo sapiens
cagctcactgcagcctccgtctcccaagttcaagcagttctcctgcctcaacctcccgagtagctgagattacaggcgggagccaccatgcccggctaatttttgtttttgttttttttgtagagacgggtttcatcatgttggccaggctggtcttgaactcctgacctcaggtgatccaccygcctcggcctcccaaagtgccgtgattacaagcatgagccactgcacacggccctatctctctgtattatatgacacatttggtcagcttctgattatccaagggtttgctttttggtatttttgaaacttattttttttagaatgttgattttataatgaagtaaataaacttatttaagattgaattggaaagataatggaacttcacaatcagttcattttgttataatttcttagctcccttgtaatgacaagaagaaaaagtaactgaaaagaaacatggatatcttatttctatttacccattaattagacagtatagttgctattgcagtttttgctataccagtccttactgttttcttgaaatgtcttagatatgtctgaat

SEQ ID NO: 427038 - DNA, 566 bp, Homo sapiens
tgcttgctaatccatgattgtgttttaccaccattaatttactgttgactttaaaatccaaagcacatttatatctgatgtatttccgcagattgccttcctttattataacatttattaccatattaaccttatccattttcttctgtytttccacaagattgaggttcttcaggatttatctattatctaaatattccctactgtctgttagacactaaaaattgactgtctggccaaataggtgattgagtgaatgaaataaaatggaatggagtggaatgaaattaaatgaaaagtcatatcatatatgagatagacaagttttttataagggtctataaaatttaaagatttcagaaagagtatatggtgtattccctctgtaatagatacatatctgttgtcacttcttatagttcttttgttgttgttttggtaggcatgggtttattgttgttgttgttgttgttgttgttttgtctgttttttctttttcactgcctggatcttggttgtactttgaatgggtgataagattttactgccttaaaacttgctttaac

SEQ ID NO: 427039 - DNA, 631 bp, Homo sapiens
taaagttattttaaaatgccagttaatttcctcggcaaaggacaatagaggaacttagcttaattgtctggctttaatttaaactgtgttaatacaacattaaaataaaacactaaatacttttgaggtacagtctgctcacttttttggttctcaaatagcaaagaaagtaatgtctaaaataggctcttagcattaaaaactgacagcatttygtaactacacagtgtacagaatttttttttaattgaagtcaatcactaaaaaaattagaaggcagggtctatttacacaattaagctgaagaaagcactaattttttgtagtttaaaatatatatatattttagtcagatttaaaattttaagctttatagagtgtaaatatattttgctattactgtatgtgtatgtgactgctcaagcactttgtaaagaaattaggatattttagaatggtacactatgcattcaaatgaaatgtgcctttcactatgtcattctaagaaaacaagtgttttttgcagtcataaattatcacaaatgcacaaattaaagtctatatagattgaaatttgtaactttggttttaagtattctttccttttagaaacttcctaatgattaaaata

SEQ ID NO: 427040 - DNA, 513 bp, Homo sapiens
gacaaaagacaaatataaaaaataatgagtaggtaattcaaaaaggcagaaatgtgaatgattgatgaatacatgagccaatatgttcactagttactttttaaaatgctgcaggcactgaaggttctattagtgaacaaaacagacgacattcccttcctccatgaagcttacatactggaggggcagacagacaaaaaataagaacaagcagtwaaatacatcaaacacaaaagcagctaggaatgacatgtgggcgaaggcctcctgagaaagagacttttgagtaaaactgataggaagtgtgtctgtttaagggaaaaagacaacagcgggaggcggcctagcaagttaggggaaaacaacaagaaagccagtgaggtagaaatagagaaaaaaggggaagagtggaaggagatgagagtggaagaagaagagaggtaatagaaaatgagatggtataatgccttgtaggtatttacgaaccaagatatctctggggggttctgagca

SEQ ID NO: 427041 - DNA, 454 bp, Homo sapiens
atactatatatatatgttatacatatatattgatatatataactactctatatatatggtgtatatactatatactgtatatatatagtagagacagcatcttgttatgttgcccaggctggtcttgaattaatttcatgctctatagagagaagatggtaacaaacacataagcatcagaggagaaagcccctgtgatatacacagaaactayccccaattccacagctccataacatttggtgatgtaccttacttgtctttgctataatgacgccaagatctattttgtagaggtcaccccatcagccttcaaacactgctaccgtccacacagagatacaagtggtagtagtggcttattcattttgaatgtgaactcccatgaggtagggatttttatctgcttttgttcatggctatatttctagggccttgatagtgcctggagcac

SEQ ID NO: 427042 - DNA, 487 bp, Homo sapiens
gaagtgaaataagcactactcaataaattaatatgacttttaattcagatttttaaaagagttaacaactgaaaagatttttgccctagtattccaaattatttttggtctgcaatttatgaaattagttaatttactaaattratctcaaaagaatgcttcagaaagtataggccaatgacactaaactcacaaaaatcctctatacaaaagaagtttgtatagagtttgtatagagtatagaatgcaacacagtgctgtttacaaataggcaaaaattatcaacaatctaaattctagcaataagaaatctcttaaagaattacagcaaatcagtaacagaattctatatagccattttaaatgagatcatagaagactatttactcatttttgagagtcatacttctgctttagaatgtgaaaaagctatcaattcttttcacccaaaaccacatatatatgtacatataatgcaaaattgtac

SEQ ID NO: 427043 - DNA, 586 bp, Homo sapiens
actatctccaatatcatatagaatattaaagaaaactcctatataaatctagcagtacattaaaagaaaaatgtaccatttccaataggatttattacaagtctgcaaaggaggttcaatgttagaaaatctattaatctattgatatctaccaattagtaggcataaggaagagaatcatatgatcacccttaccttcatatatgctaaaaagatctttgacaaaatttaataaccattcttgatgaaattcttaasaaagtatttattaatggatacatctttgaatgctgaaatatagttatttcacctcccaaatcagtagtacatttcagggagaaacactagggcatccccactcaggaacaaggcaagaatggtcctatcatcactattatttaacactgtaccagaagtgctagccaatgtgattatgcaagataaagaaattagagatgtgagaattaacaaagcaataaaactatcactatatgtaaatcatataacatatctagaaaattcaaggaggtcaaataaaaactactacaaacaaacaaaacatttagaaaattagcaaggtacaaaa

SEQ ID NO: 427044 - DNA, 523 bp, Homo sapiens
gcaataattattaaattgatgtaaatgtcaattttatcatatggtgaaatcccatagatatggctattttgtttttaaactcttctctgttctactgttcctcttttatgtagtcaaaactatattgatagtaatgataaaaatggctttagagttataatgtctagattagaattatattttcattgtttactggctatttaattttttgcaaatgtatcttttctargcctcagtttcttcctctaagtattaggtcttaaaaatgctatctacttcataaggtttggaagataattaaatgacatcaggtatgtaaaacatagcacagtgtccagcacacagtaagccttcaataaatgtcattaaaaacaataatagtaataaagctttatagtgtgttttcatacctagtaggtaagtcctctcatgttatactttttcaaaaaaaaatttatttgcttgtttcacctgttaccaaccccattgcctctgtgttaagtaagagtgactctccaagatc

SEQ ID NO: 427045 - DNA, 523 bp, Homo sapiens
gcaataattattaaattgatgtaaatgtcaattttatcatatggtgaaatcccatagatatggctattttgtttttaaactcttctctgttctactgttcctcttttatgtagtcaaaactatattgatagtaatgataaaaatggctttagagttataatgtctagattagaattatattttcattgtttactggctatttaattttttgcaaatgtatcttttctaggcctcagtttcttcctctaagtattaggtcttaaaaatgctatctacttcataargtttggaagataattaaatgacatcaggtatgtaaaacatagcacagtgtccagcacacagtaagccttcaataaatgtcattaaaaacaataatagtaataaagctttatagtgtgttttcatacctagtaggtaagtcctctcatgttatactttttcaaaaaaaaatttatttgcttgtttcacctgttaccaaccccattgcctctgtgttaagtaagagtgactctccaagatc

SEQ ID NO: 427046 - DNA, 507 bp, Homo sapiens
aacagtgaatccatcaggtctccagtttttctttactggaagactttttattaaggcttcaatctcattacttgttattggtctgttcgggttttggatttcttcctgcttcaatcttggtaggttgtatgcatctagtactttgtctatttcttctagattttccaatttgttggcatatagtttctcatagcagccactaatgatcctttgaatttctgtggtatcatttgtartatctccttttttatttctgattatatttattttgatcgtctttttttttcttagtctggctaaaggtctgtcgattttctttaagttttcaaaaaaccgactttttgtttcattgctttttcatttcaaattcatttatttccacactaatctttactatttcttctactaattttgggtttagtttgctcttgcttttctaattctttaagatgcatcattagactgttcatttgaagtttttcctcttttttggtgtaggcagttata

SEQ ID NO: 427047 - DNA, 507 bp, Homo sapiens
aacagtgaatccatcaggtctccagtttttctttactggaagactttttattaaggcttcaatctcattacttgttattggtctgttcgggttttggatttcttcctgcttcaatcttggtaggttgtatgcatctagtactttgtctatttcttctagattttccaatttgttggcatatagtttctcatagcagccactaatgatcctttgaatttctgtggtatcatttgtagtatctccttttttatttctgattatatttattttgatcgtctttttttttcttagtctggctaaaggtctgtcgattttctttaagttttcaaaaaaccgactttttgtttcaytgctttttcatttcaaattcatttatttccacactaatctttactatttcttctactaattttgggtttagtttgctcttgcttttctaattctttaagatgcatcattagactgttcatttgaagtttttcctcttttttggtgtaggcagttata

SEQ ID NO: 427048 - DNA, 615 bp, Homo sapiens
ctctggggtcccagagtgccctgctgagacctccaatacctcactcagaagtaatttaaagatataagcattctatctcagttatttgatttcattacccgctcaatttctagactgttcattcaataactacttactgaacaaaaatttcattaaacaaatgtccatttaatgaagaaatgtgagctgactgcaagctggcagtgtgaactgactatgtgctgcaaagtgggatagwtgctggagattaaagttaaataaaacttggccccagtccagagctcacagactagagatagcagggaccaagtcttagatatcttcatatccattctgcccctcacatcatcgctgtcatagagtctatgctcaatagaagttctaggtgtgttgaaggcatgtttcccctaaaagaactagaactacaagtcccaagtacagtaattggtggctgtaattaacattttaaacagcagaaaatagtcaagtccaagagagtttatgagctctaaagatacattttctaatttaccaaaatattttacaaaaataggacaaatttaaaaatgtttagtgagatacatggtactcagaatcttacaataatgaacaaag

SEQ ID NO: 427049 - DNA, 615 bp, Homo sapiens
ctctggggtcccagagtgccctgctgagacctccaatacctcactcagaagtaatttaaagatataagcattctatctcagttatttgatttcattacccgctcaatttctagactgttcattcaataactacttactgaacaaaaatttcattaaacaaatgtccatttaatgaagaaatgtgagctgactgcaagctggcagtgtgaactgactatgtgctgcaaagtgggatagatgctggagattaaagttaaataaaacytggccccagtccagagctcacagactagagatagcagggaccaagtcttagatatcttcatatccattctgcccctcacatcatcgctgtcatagagtctatgctcaatagaagttctaggtgtgttgaaggcatgtttcccctaaaagaactagaactacaagtcccaagtacagtaattggtggctgtaattaacattttaaacagcagaaaatagtcaagtccaagagagtttatgagctctaaagatacattttctaatttaccaaaatattttacaaaaataggacaaatttaaaaatgtttagtgagatacatggtactcagaatcttacaataatgaacaaag

SEQ ID NO: 427050 - DNA, 615 bp, Homo sapiens
ctctggggtcccagagtgccctgctgagacctccaatacctcactcagaagtaatttaaagatataagcattctatctcagttatttgatttcattacccgctcaatttctagactgttcattcaataactacttactgaacaaaaatttcattaaacaaatgtccatttaatgaagaaatgtgagctgactgcaagctggcagtgtgaactgactatgtgctgcaaagtgggatagatgctggagattaaagttaaataaaacttggccccagtccagagctcacagactagagrtagcagggaccaagtcttagatatcttcatatccattctgcccctcacatcatcgctgtcatagagtctatgctcaatagaagttctaggtgtgttgaaggcatgtttcccctaaaagaactagaactacaagtcccaagtacagtaattggtggctgtaattaacattttaaacagcagaaaatagtcaagtccaagagagtttatgagctctaaagatacattttctaatttaccaaaatattttacaaaaataggacaaatttaaaaatgtttagtgagatacatggtactcagaatcttacaataatgaacaaag

SEQ ID NO: 427051 - DNA, 566 bp, Homo sapiens
tgaatattctaagagtgatttgcccacccttaatatacctcagccagaaacttgttccctttgaaattaatcccagcttgtgaacattgaaaggtgaagactggaaggaatgtaatttcatattagtggtttctgtgactagataaacattaataatgttttcatactgacctagaaagtgacttaatttattaagtgcagtggacatayggtaccctgtttgcattagctatgcccagtacatgaaaagaaatcactaagtagaattcagttacctgctttttttccctaactcactgtattttatatatgaatttgccactggtaatgaagagctccagctaatatgaacaatggcaagagaagttataccattaaatatataggttcataaatatagcatatgaaaatggatgatttgcaattcaattctacaactattgtgatcatactatgtgacaggacttatagcctgaactggggatggaggagtgaatgagctagatgcagcccctgccccatagaccttagggtaccactctttgccagagccatggtgggggtaa

SEQ ID NO: 427052 - DNA, 529 bp, Homo sapiens
tagtaaccacagagcactaaactccatgcatgggggccctgagagaatgcacagatcacctgctcatgaagctggtgcttagtggaaagaaagcattccattttatgcctgctgattgtggcatcaagggcctcctgttatcagtttcctgccaaaatatcgggaggagaatgtgagatttttggccatgcaaaagctgggtgattttggaaatggggagtttttcttagacgcgcagcctagagcctgctcttttagccactttaatgattttttaaaccacctaatagctggtaataatttccttaatacttagcacaaccagaaggtcttaattgcaaataacagaaaccacagctgataattctctctggagaggcatgaaatagatgtcagaagtaaattgactgtggtggtggccaccattccaaacacaaaagaaagcatttgatattgccaaakgtcattcagtgttagaagaaaaatcatttgtattaaaggagaggcatcatggaaatggaatagcagt

SEQ ID NO: 427053 - DNA, 542 bp, Homo sapiens
gacactgaacgttgggcctgtaatcacacaactcagagtggccccttcagactcttggaactgtacacctgttggagaccttaaggtacagctaatcagagaagtctctccccagaagcagacagcatcctagacatggacaactttcccaagatcatggatcaagaattctctgccatcagaaaacttttacctctcttaattttttaccttttccttgcttatgcctctatgaacaatataattgggaaaggggcctygggtgcaccgatggggtatgcttttatttgtggaggattttgcagccaactttatacctgagcaacttatgccctgatggatagaagatgaagggccaatatgggctagaaattttaatagtacctttgttgctccatcatcagtcagaaacagaacattttttcactcctcttaacctacatcttaggttaaaagaacattttcaggaagtcttcactcttctggatgggcatcatttcttaggtctcttttctcatggcctgaaataaatataaatgagg

SEQ ID NO: 427054 - DNA, 578 bp, Homo sapiens
gttaaacaaaattatgagaggccactgttttgaactgaactcatgcactaggccctaacacactacactaacccarcttggagtcacttatgctatgttccacataatcaaaccaaagccttaaagaagcaaacagatctcaaaacagatgggagctgagaccaaataagaattatgaattctatactgagaccaaataagtctgttcatttacaataatgacagaaagtgacattatgcttaaagtttgtggtataattaagaggttggaggggtcattgttaaattcagtttggcctaaagctgcctccctatgtattttaacttttgcctaaaggtttctccatgcatagtgagctataacctaacttgatatgtaaacagactgtaacctactcttgtaacaagtagccaatcacaggtagcaaactgttcgaaccaggttcaaataaggcaaacacccagctgtaaccaatccaactgtttcagtacctcgcttccattttttgaatgtcacattcctttttctgtccataaaatgatctgaccacgctgcagcaccagaattgctccaaacc

SEQ ID NO: 427055 - DNA, 578 bp, Homo sapiens
gttaaacaaaattatgagaggccactgttttgaactgaactcatgcactaggccctaacacactacactaacccagcttggagtcacttatgctatgttccacataatcaaaccaaagccttaaagaagcaaacagatctcaaaacagatgggagctgagaccaaataagaattatgaattctatactgagaccaaataagtctgttcatttacaataatgacagaaagtgacattatgcttaaagtttgtggtataattaagaggttggaggggtcattgttaaattcagtttggcctaaagctgcctccctatgtattttaacttttgcctaaaggtttctccatgcatagtgagctataacctaacttgatatgtaaacagactgtaacctactcttgtaacaagtagccaatcacaggtagcaaactgttcraaccaggttcaaataaggcaaacacccagctgtaaccaatccaactgtttcagtacctcgcttccattttttgaatgtcacattcctttttctgtccataaaatgatctgaccacgctgcagcaccagaattgctccaaacc

SEQ ID NO: 427056 - DNA, 534 bp, Homo sapiens
aaagtcattttcttaccactcagatggtttctctaaattgctgtgctcctgctatgatttgacctttggctgagatgctttttcaaatgcttttagctaagccctgcatacatctagacactcaagcttcaggatagtacagatttcagccccattactccttttccaagctacagcagaaaaaccaaaacaaatattgcagatttgtccagttctcttaagwatcagctagggaagcaggaaaagtcctctctattatgtggtgattctccatattagaatcacctaggaatcttttaagatatgctgataccctaatatttttaaggagctctctctagatgattctagcgtgcagctaatgtggaaaactaggcatttggagaaagaagagaaaaagttagaaatagcatgtaaagccttgagcatgttattgaacctctttaaactcacttctctcattgttacttacatgaattaatccaaataagtttagtttggtgtttggcttacagtaaacacttaataaatatt

SEQ ID NO: 427057 - DNA, 502 bp, Homo sapiens
acaagctgaacctgcaaactaaagcttcgaagaaaaggagaaaaattaaccctaagaaagagcaaataaacttatccagggcattaatagttaacagaatatgatgcagaattgtggaaaaataatgacatggaaaacacggtaaaagaagggaaacgtttcaaggaaaggtaaatgtcttgaagactgatttgctcattcgtgattagctctcagctccagttccaccctatgmtttccccctattgcagggaagcagaatctgcttacaccagagtcttttccaaaccttcctttcagctgtctctcaaagagaatttggcattctgggaagcaatgggaggcactggaaaaaactggaaatgaggaggatttcttctcttcttgaagtagctctgataaacatggtggcagcagtaacagcagcaggcaagcctgagccctggacatctgctcaggcaacatggttcagacagtagatgcagtagcaggtaccccaaca

SEQ ID NO: 427058 - DNA, 554 bp, Homo sapiens
gtttctcccccgggctaaattatttaaagttaaagaattaggccttctttaaaggttaagcaatatgattaagcaacaatgaatagtgcttaatttggacaatgggatctgggatgagaagcagctgaagtaatattttcacatcatattctttggtattctttgaatttatttttaatttaaaaattactacttttgtaattaaattattaatgataaactgaagttgaaaactttataagatcaaaatccctraagaaacaaaaatataaagcatgaaaaataattgcctttattgaaacttgaaaagtagccttatatgtgatatgaataaataagtttcaaaacagtaagatccaatcctaagattttattaagcccaaattggaaaacttttagattacatattattttttgctgtagattttttagaaaaaaatctatcctaataaatcaggaaaccacaaatccctcttcattaaataccaatgactcttgagtatttggaaggaaatactgccttctttagctctttcacaataattctgaagtaa

SEQ ID NO: 427059 - DNA, 558 bp, Homo sapiens
ctgaaacaaaataacaaagaacaatagaaacaatgaaattggcacaatttatcatacaaatatgaagaaaaaaatatttagaggttgcaaaagtatrtagaataaaaatactagatatataaggaaaaatgggcagaaacacactctctgtaggagaatttacagtattaatctataataggtaaaatagacacaataaagaagatatagaaaattaataatggagtagagaaagatacttaataaattcccaacagcagaaattatgaagaccatatttttactacacaatagtttacccttatcctcaagggatacattttaagacccccagtggatgcccaaaactgaggacagtaccaaactttatatatactgtattagtctgttctcacattgctataaagaaatacctgagactgggtgaagaaaagaggtttaattggcttatggttccacaggttgtgcaagaagcatggcagcatctgccttgtaggaggcctaggggagcttttactcctggcagaaggcaaagcaggagcaggtgtcttacatgtt

SEQ ID NO: 427060 - DNA, 543 bp, Homo sapiens
aatacaggaggaggctgctatagattacaagaaacatatccaccaaatgaaatatgtggatttcattttgatcccaatatgaacaagtcatttgtaaagacattgtaaacattattgatacttaacagtgatacaatattaacaacattgctaattacaaccttaggctgcttattcagaaaaggccaaagaatcaattggaaaactgaaaaaattgattagtaatgtgactaaatacaagataaaacttttacattcatatatactattaattactagaggttaataattcttaatatctacaygaaaatccaaaatactttgaattaattttaccaagaaatgtgtgtaagtggtttgaagaaaactacagaatttatagaatttatactgataattagaaatacttacataaattgtctttatactctctcttccaattgcctcaaaaatcattacacattaagaatgcgcttacccattttgtaatacactctgttcattaccttcttaccagtctattaatgaataacatattatagg

SEQ ID NO: 427061 - DNA, 494 bp, Homo sapiens
taataaaattttatttacaaaaataggtgaccagctagcaggccaattcctgcatagaaaaaagctcagaatttttaatttctttttgagacagggtttcgctctatcacccaggctggagtccagtggcatgatcactgcagctttaacctcctttgctcaatcactcctcccacctcagcctcctgagtagctgggactacaggtacatgccaccacacccagttaatttttgtatttttttgtagaaacagggttttgccatgttgcccaggctggttagctcagaatttattgyatgatgtagaagaataatatagcttagcaaattcagaaaggttgaagatgactgacaagaaatactataatattctgtgaggactattaagagtgcttagtttttgctattacaggaaataatatgatttaaaattatgaaaagtgtggtgaacacattctaaggtggtccctatgattcctgtctcctggtattc

SEQ ID NO: 427062 - DNA, 607 bp, Homo sapiens
ttttttcttaaaaccagaaaagatatttaatacttaagaaataatattagaaaatttaagatcttgcaaatgccagtatcttccacgattttyaaaatcataagacaacgaaagggcttttgttgttatttcaattcatgcagtagtaagacaattacattagtactattaatattttaaaggaacaacattcaatccccatactctccccaatagaaacctctgactaagctatacattttgggtaaatgaggtcaaattaatacactagaatatgaaagcctttcttcaatgttagagaaagtaaaagggaaaagaaatgaaagtcaagaaagataacagtgatttatgccagtcctttccagacctctatataaaggaataattttgcttaaaattacaaaaaagtatttctgggaaaatgcaatgtaaaaaacaagttcatattctttccttggttcatagtaatagccttaactacttaattaatgctggatctcaaatttaattgcagttattttgataacaactctactttttcttccccaagcattataaaacatagtgactactcttcattatgacacaattattagctggacaaaca

SEQ ID NO: 427063 - DNA, 525 bp, Homo sapiens
ttcttttattaagttgtcataccatgactttgctttatcttgaatcacattagagtttatagatatgcctttcttataacaattctgtatctacatgaaaagctgcattttcaattcaagataaaaaggtattttgcaaaaagtccaagattttcatgcctgctggcatagctgcagcagtggcttcatgagtctcctctcctctcctctcctttctttccttttttttttttatcaatggtccttataccggattcatttatcttgaaatgaaaccacagctgcagacctcaatctataatacacaccaagcaatttaactgtttcttgtaatgtcatgacttttttctgcttcttaggagcatttccagcatcactagtggcagtttgtatgggtgtcatgtgttattcaaggtttatgctattgcattaaaacatgttaaaaaaaatacacaggaaacatgagagatcacttttcattgtgacacrtaatttaccagagttatgacctgctcatgcagagat

SEQ ID NO: 427064 - DNA, 546 bp, Homo sapiens
ttaaccaaattttacaattgaagaaacaagcctgggtttatcacattcataatccacttaacaaatattcattgaatgaacttgactgattaagaaaataactgaggcttagttaagtttttcttttataccacataggaagactgccaaggagaaactagtaccatagacaaagtaatgaatgcatattcaacctgctttaactgaatatctttaaataatttgtataatgatttatttgatgttrtaagtttcaaataactcctaaccacctttaaatttaagaataatattttccctatagttagacagcatttcagctgaccaaatcattattcctggctgcttcatcagagcactgaaggccaaatatatattaacatatgttagatacttaaatggttctcatcaaacctccagatgttcaatcaagagaagaaaagtgcatgaactctctgattgtcctatcagcagggtataggaataaaaatgcatcccatacaggaagaccaaaaaggcacatgtttttttctccagctgttttca

SEQ ID NO: 427065 - DNA, 633 bp, Homo sapiens
cctttctgcatctgaaatacatgagcttactcaagaaaagtttgatcaatgaataaatggatgaatatcagtgactgaataatcaaactggatggctgaattgaagggaagaaaggaatgaataatgtgttctaagcatcaatttggtctgctggctgcttttgatttttaaatcagtttatttaacttttagttgtttcttgtctcatatgttttatccattgggaaaataaaagttagttaaaagtctcaatgatttagaattggtgcrtgaaagtcagatgccttaggaaaatgtataaatctcctctccaaagggcccagtggatgtacatatgaaagtagtttgtctctttatcttcaaaaattttttactatgtgttcacaagcagaggatagagaaatgcttccaggcaagttaaacaaacagggatctttatcgctcagctgcctaccatctatcttaaacatttagcatgggactataaacagatcccataccttgcctctttcatagatgtacactgtatcaataataccattgggtgattagtaacaataactaataatttagaattttagatttgttatctcacatgtaaaattacatgtgagatgcatgtaatttacatg

SEQ ID NO: 427066 - DNA, 633 bp, Homo sapiens
cctttctgcatctgaaatacatgagcttactcaagaaaagtttgatcaatgaataaatggatgaatatcagtgactgaataatcaaactggatggctgaattgaagggaagaaaggaatgaataatgtgttctaagcatcaatttggtctgctggctgcttttgatttttaaatcagtttatttaacttttagttgtttcttgtctcatatgttttatccattgggaaaataaaagttagttaaaagtctcaatgatttagaattggtgcatgaaagtcagatgccttaggaaaatgtataaatctcctctccaaagggcccagtggatgtacatatgaaagtagtttgtctctttatcttcaaaaattttttactatgtgttcacaagcagaggatagagaaatgcttccaggcaagttaaacaaacagggatctttatcgctcagctgcctaccatctatcttaaacatttagcatgggactataaamagatcccataccttgcctctttcatagatgtacactgtatcaataataccattgggtgattagtaacaataactaataatttagaattttagatttgttatctcacatgtaaaattacatgtgagatgcatgtaatttacatg

SEQ ID NO: 427067 - DNA, 574 bp, Homo sapiens
tctttaaagctaagtacaaaacagcagtttgcataaaactttaagaagcctccctatgaagtacacaatatactatcaccaggatttttactgaaattcactaacatgaaattatatgcccaattttgtctgaatgggcattttctaaagaaaagatctatagttttcatgagattcttaaaagggtccaagggaccactattccatgaagatggttgttcaagtagctagctgcccacctcactgcactattttaacacattcctctacctctatcatgaaaatgaaaatattgaagcagtctactattttcataaagtaactgtgaattctcctcaaacttcctaaaacccatgagcttcctcccaactcaggaagcagctatggttttctatgtctgctgcccttcagaagggttgccatagcagaatagaaaaaaactaaagactcaagatcccagaattttagtattaaagccwttgaaaatgtaggctgccggactcaaggcctgaagtatatgccttaaccactggatatagatgtctaccaaatcaaagacaagtgcagttccatc

SEQ ID NO: 427068 - DNA, 467 bp, Homo sapiens
aggagtcaacaagaatgcttgcctatctccatgtggactctcagtagtgggggacaggtgggagggaaaaatatcctcccttaaaaatgaataatcatgggtctgccttacacagatttatggttcaactttatactgcatgagcctcatctaccaggacagaaattagcctaasaaaggcccaccagaccatgatacctcagcattccaaagataagctcacaactcaaaattgcagttgggtcgcttatgtactacaagcaaagcaggctccttcacttgtcagtttaaaaattcaaactgcacaaaggctttgagacacgtctacagaatcaaacaagctgattccttctctgtattctcgtaggtagggcaaatcaaaaggttcgatcctgtggcttcacgctgtgattctcatttggccaaaaacacagctgagaaaaaaaaaaagaaaaggaaaaaacaag

SEQ ID NO: 427069 - DNA, 613 bp, Homo sapiens
tatgtatcaacttgactgagctaagggatgcccagatagctggtaaaacattatttctgagtgtgtttgtgggggtgtttctagaagagatgagcatttgaatcagtagactgagcaaagaagatccgccctcaccaatgtgggagggcatcatccaagccattgagggcctaaatagaacaaaatgtcaaaggaagagcaaatttgctctcttccttcttgagctggcacttgcatcttctcctgccctaggatgttggagcttctgcttttcaggccttcagacttggactgaattacaccatcttttagttctccaacttacatatggcagattgtgggacttcttggcctccataatcatgtgagccaatccccataataaatctcttatatrtttacatatatcctattagttctatttctctggagaaccatgactaatacaccctcccactgcttcattccagttccacatttggcaagcaacattccatgactcatctggcttcccagccatgttgctatagggaaggaccccagataatgaaagaaactagccttgcaatataaaggaactaaaatgatacgttggcattctgatctatgcatc

SEQ ID NO: 427070 - DNA, 572 bp, Homo sapiens
catgactcatctggcttcccagccatgttgctatagggaaggaccccagataatgaaagaaactagccttgcaatataaaggaactaaaatgatacgttggcattctgatctatgcatcagactctcaccagtttgttagtgagactgtcatttccccggtggcagattgcctgtaaatcctcagtactaaagctggatccagccatggacatgcagctgaygacatgaaggcattttcccaagaaggccacctggcctctctaaactccccctcattactccctgatagcaactggtcccaccccaggtttcatcctatcctaaggtgagtgcctgagctgaaactggtccctaaaattccagaagtctttggagacagggcaattctaaacccttcagggaagtccctgttgtccaatttaggacatgcaagcagaatgtcactctcaagactgaaatattacttctcaactgtttaaagaccagaatgggatgaggacttggaactgccatatgcacccaggatccatatttattcattcagcacccagaatgtggtagataatagata

SEQ ID NO: 427071 - DNA, 563 bp, Homo sapiens
caagtaacactcagtttacttaataaatggccacaaattacaagagtagtgatgctggcaattcagatatgccaaagagaagccataaaatgctgcctttaagtgaaaaggtgaaagttctcaatttaataagraaaaaaaagttacatcccaaggttgctaagatctatgataagaatgtagacattgtgaaatttctgtgaaattatgaaggaaaaatttgtgctagttttgctgtcacacctccaaacacaaaacgtatggcacagagtgcatgataagtgtgtagttaaaatggaaaaggcattaaacttgtggattgaagacatgaagagaaacatgttccaatggacagcaatcaggttcagtactacctacggtttcagtcacccactgagggtcttggaatgtataccctttgtatgaaaggagactactgtattctgcataccaaagatttaaggaaaggaatgaggaacatgaagagaaatataaagttaaaggggaggaagaactggtgaaatgaagtgagtgcctttgagaattgaatgaatttaatatat

SEQ ID NO: 427072 - DNA, 563 bp, Homo sapiens
caagtaacactcagtttacttaataaatggccacaaattacaagagtagtgatgctggcaattcagatatgccaaagagaagccataaaatgctgcctttaagtgaaaaggtgaaagttctcaatttaataaggaaaaaaaagttacatcccaaggttgctaagatctatgataagaatgtagacattgtgaaatttctgtgaaattatgaaggaaaaatttgtgctagttttgctgtcacacctccaaacacaaaacgtatggcacagagtgcatgataagtgtgtagtkaaaatggaaaaggcattaaacttgtggattgaagacatgaagagaaacatgttccaatggacagcaatcaggttcagtactacctacggtttcagtcacccactgagggtcttggaatgtataccctttgtatgaaaggagactactgtattctgcataccaaagatttaaggaaaggaatgaggaacatgaagagaaatataaagttaaaggggaggaagaactggtgaaatgaagtgagtgcctttgagaattgaatgaatttaatatat

SEQ ID NO: 427073 - DNA, 601 bp, Homo sapiens
ggtgctattacccaagttttagatgagaaactgaggcacagtaaactaattttcccaagatcatacagcaaataggtgctggagctgggatttgaacccaggcagtgtagccttagaatctgtgcttttaaacactgcattttaaatcccctttcctctaggagtgctttacatgtattaagaagtaagttatattattttccccctttacagatgagaaacccaaggcaaagagaagtaaggtaacttgaccaagataacacagctctttatctctgctgggggcagaaatgctactctaaagtctacgtgcttgtgttccgcagtactggtaaccagaaactcaaagtagccacyctgaaagaactagggttaagaaagagtcaagtccttggcccttatttcttctttctgccttcttttttctttccaacctattttaggtttatgggtacctgtgcaggtttgttacacaggtaaattgcacgtcgcaggggtttggtgtacagattatttcatcaccaaagtaataagcatagtacctgataggtagtttttggattctcaccttccatccaacctctaccctcaagtaggctcc

SEQ ID NO: 427074 - DNA, 601 bp, Homo sapiens
ggtgctattacccaagttttagatgagaaactgaggcacagtaaactaattttcccaagatcatacagcaaataggtgctggagctgggatttgaacccaggcagtgtagccttagaatctgtgcttttaaacactgcattttaaatcccctttcctctaggagtgctttacatgtattaagaagtaagttatattattttccccctttacagatgagaaacccaaggcaaagagaagtaaggtaacttgaccaagataacacagctctttatctctgctgggggcagaaatgctactctaaagtctacgtgcttgtgttccgcagtactggtaaccagaaactcaaagtagccactctgaaagaactagggttaagaaagagtcaagtccttggcccttatttcttctttctgccttcttttttcyttccaacctattttaggtttatgggtacctgtgcaggtttgttacacaggtaaattgcacgtcgcaggggtttggtgtacagattatttcatcaccaaagtaataagcatagtacctgataggtagtttttggattctcaccttccatccaacctctaccctcaagtaggctcc

SEQ ID NO: 427075 - DNA, 523 bp, Homo sapiens
tatttgtatttgattacataaacaggatcatatccattaagggaacaaaccccaatcattatttctggatacaatcagtaaccattgtgggttttttctgtttgttttcagagaaattttttctgtttatttggctagtgacctgatttccaattgagaaactctccaccagactccgtctctttctgctgtatactggagctcttatcacagtgaaaaatacagtccacacgtatgtgttttcacacatgccaacatagctgttgtgtattcctaactttagaaaataacttaatgtcatatgacaaaatttgaattagaattcctaaacttgaaaataactttcagcataagttctycaaattcacttctataaattacagtgttgcaatatgttttatcagcaatttaaattcttatcagagtcaggtatacaaagtaaagtacattctaaagaagtttagctactctttactcactgccttttccccttcttccctcacttaaaggtaatttaaaaatt

SEQ ID NO: 427076 - DNA, 614 bp, Homo sapiens
gcaatgaaaaggatttcttcaacaaaataaatgagctgtaccctaccctggaccatgctatttcagcattgtgccttgtgctgcttctcctgccacagtgtgagaggatatcagagttctgtgctccaggtttccaggaaacattttgatgggatgtaagggctggtccttctcayagaattacatttattgcatgtagcaaccacaagaacaaggggctgcaattacaggaaaagcaggagcccttttctatcatctcagagcagcccagttctgccacatccacttgaccgaattctcttgtttgtaggagaaaggggcaattcatgcaggcaaagtcatgtccacacactgaatccagaagcctgtctgacccggctgctttttcatgcttgctttcctatcttccagtgagttttcaggatgcaaacttagtgcaggcatacaatattgtgacagatcacacttcctttgagctcagaggagtattttcttccaaatgaacctggagggcttcccagctttggtgctgatggatttagccctcatcattttctttacaggaagacaaacaaagagttattggtgggaaggaaatcttgaacaacaagtaa

SEQ ID NO: 427077 - DNA, 636 bp, Homo sapiens
aatacatatgcagtgttgagccaaagacaattttgtttttggatgggatgattttgaaattaaaattctagttgcctctattcagatacaagatcaaaactggtttagggtgatttgactgagaaacatctctgctgactaaagtaactactaatactctattaaaagggtgacctttccaaatagagagaccatttttttcttaagagaagataatatactaacacttgtcatttatgaaggtctatggtccaggcactgtttaaattcatttaatccccacaacaatgctgtgtagtaggcattttctttatcctcattttataggttggaaactggaatagaatataaaaataacttgcacaagtttacagagttagtaggaagtaaaattgaacatcarttgcgtagtctgcttcctagcctatgtttctaaccattttcctctactgttgctcattacaatatatcttcagcattggctttggtgatggacaagctggccttcgaccctggatctgacacttcccagctaacttccacaaatctgtttcctcatcgtaaatttaagataatagagtcaacctcactgtgtttagaaaaaatgaatagaatatgctcgggacacttacttgg

SEQ ID NO: 427078 - DNA, 552 bp, Homo sapiens
ttccaagttgtcactcattcaatctcgacttcctcacttcctatcacttttcaacctatttaacctagttttcactttcattgttccatagaaatggctcttgacaagatcactctcgacttttcttctgataaaacaaattgacccagctctttcctcaacctactcattttctctttcttttctttaatttttgtgggtacatagtaggtgtacatacttatggggtacatgagatactttgatagacatgtaatacgtaataatcacatcatagtaaatgatgtgtccattgccacaagcatttatcctttgtgttacaatcaaattatattcttttagttattttaaaatgtacaattaaattattaaccrtagtcaccctgctgtgctatcaaatactagtttttattcattctatgttttgtacccattaaccatctccacttccccctacccaccccctactaaccttcccagcctctggtaatcatccttttattctctattcccatgagttcaatcattgtaattttaagctcccacaaatat

SEQ ID NO: 427079 - DNA, 301 bp, Homo sapiens
gaaaaacgttgacaatgaccttatttattatttactttagaatgtcttattttaaaaataactccctttattgtgtattctgtgtagagtctcaaagatgacatggaagaaacttgttcacacacatgacatttgtggaaaaagatagatcaggtccyacttgaagacaaagttgctctcaacatgccagataattcgtactaggagctggtattaagcagaaacaatgattgctgagaaacagcctgatgagcaaaaacaatactatgtcatctcttgggagaaaccatcctagcccatg

SEQ ID NO: 427080 - DNA, 556 bp, Homo sapiens
taagttttgtaattaacaaataattgytgctatcattcattataatactgctaaggagaaaaggagatgtttgtataggaagcgtaaaagggtaaaagatcatttttttaaaattttattttagtaaatgtgctttatccatgtgctttgccatctgctttttctctctttttttctctctcatacacacacacacacacacacacacacacacacacacacaccatctttttaagccatttgatgctttacccttaaatatctcagtacattttttctaagaataaagaacagattaggtcattctcactttagggagaggcagtccatcatggccaggagtgtccctgcacacccttgctgaccctgacaaattacaaggtctaactgtcctctgactctgatcatttctgtagctggtcacacaggcaattaagaaagcacaggcgagcacagcactgaccatgatgtggctgcttgatcgtaggggaggtttgtttattgctcccccaggtgctgagacttaagctctgggttcctcaactgtgatacgacc

SEQ ID NO: 427081 - DNA, 556 bp, Homo sapiens
agcctctcacttggcaaaataatcacatggtccatcagagacaagcagcagctctgattgccaacccgtaacactgctggatttatcrgctggatttatcatcctcatccgtgtgctgtgggatcagaaaatctcctgttggcctgcttggtccagaattattctactgtgcctggtgtatcaaagtcagctccccaaaattaatcaccctttttacctgcacaatcactcagacagctcatactgattcatgtgcttctcctgacactgagtgcccttgagtcatgctatggagggctgtccaggtgacaagtacttggcgaccctgcccatagagcttaaccaaaccaaggtcatggtgatccaaatcaagttatatgttcatatgtgggagagagtggcccagaggatatccatccactggagcatgtggaggttgctatttggttcatctttgagtccttgcaataattggcaatggcgccactctttggattttatttcctttgttagtcccctaggtaaagagggctgtcctgcctgagggatacatggt

SEQ ID NO: 427082 - DNA, 629 bp, Homo sapiens
acacaactaaaatctcaaatttaccaaggttttcatcaaaaatagaagttgctaagagttaacattatcacatgtaattaaaactactaaagaaacaatcttacatgcaaggtgtgtaaagaaagtaaaatgtgtttttggtgaaaaattataagaagtcataagaatgtgaattttttctgcttaaagtgttaaaggattgttttaagtaagaaaaaaatctaaagatttaaacaagctgtggaaggtttataaggattaattgtaagagattctgtgtgtgaacatattggctaaaagggggtattattccrtttttccataaattaaacattggaataaatcacaatagctttttcctagagcactgatctgctcttacacaaaaaaatgtaaatggttataaaaggtttataagaatcttaccttatggttaaacattaaaattgggtaaatatgtctataaggttttattaaaacttaggtttagcattaatagtaaaaggtgaaatttgacttatttggcataaaaatcatagaggaagtgttatcaaatgtgaaatgatgttttgcttgctttagactatatttgcataaatgtgttactggtatatgttccaaagttatgg

SEQ ID NO: 427083 - DNA, 618 bp, Homo sapiens
aatagctaggcaggaatattattgcccctattcagcctgaagaagttacggaagatggatcttcatctctctgcaactcttaggattaagggttctcttacaaaagggaggggggacatgtcagaggcatgtgaaccagaacaactccatcttgaataagagctgagtaaaatgaggctgaaacctattgggctgcattcctagacagtgaagggattctaagtcacaggctgagataagaggtcagcacaaaatacaggtcataaagaccttgctgataaaacacgttgcagtaaaggagccggccaaaacccatgaaaaccaaartggcaacaagagtgacccctggttgtcctcactgctacactcccaccaacaccatgacaatttacaaatgccatggaaacatcaggaagttaccctgtatggtctaaaaaggggaggcatgaataatacaccccttgttgagcatatcatcaagaaataactgtaaaaatgggccaccagaagccctcagggctgctctatggagtagctattcttttatttctttactttcttaataaacttgctttcactttgaaaaaaaaagtttataaacctacctcattgtactat

SEQ ID NO: 427084 - DNA, 618 bp, Homo sapiens
aatagctaggcaggaatattattgcccctattcagcctgaagaagttacggaagatggatcttcatctctctgcaactcttaggattaagggttctcttacaaaagggaggggggacatgtcagaggcatgtgaaccagaacaactccatcttgaataagagctgagtaaaatgaggctgaaacctattgggctgcattcctagacagtgaagggattctaagtcacaggctgagataagaggtcagcacaaaatacaggtcataaagaccttgctgataaaacacgttgcagtaaaggagccggccaaaacccatgaaaaccaaaatggcaacaagagtgacccctggttgtcctcactgctacactcccaccaacaccatgacaatttacaaatgccatggaaacatcaggaagttaccctgtatggtctaaaaaggggaggcatgaataatmcaccccttgttgagcatatcatcaagaaataactgtaaaaatgggccaccagaagccctcagggctgctctatggagtagctattcttttatttctttactttcttaataaacttgctttcactttgaaaaaaaaagtttataaacctacctcattgtactat

SEQ ID NO: 427085 - DNA, 608 bp, Homo sapiens
atagtaaagcctcaccggatggcttggagtaataatattagccagttgcctgacactttggatggataatcatacatcatgcttacatcaaagctaagtggtagttactacagttattacctttcttacagatgaggaaatgcaagcagagattgttagaaacttgcccaagaacattcagcccatcagtagtatgatctggggccatttacatttttaggattttggctatcctaggattttgggagggcaaggcaggtggatcacttcagcccaggagtttaagaccaggctcgcaacacggcaaaaccctgtctctacaaaaagtacaaaaattagcatggtgtgatggtgtgtgcccatagttttagctactcaggaggctgaggcrggaggatcactggagcctgggaagtagaggctgcagggagctgagctggtgccacggcactccagcttggacagcagagctaaatcctgtctccaaaaaaataaaataaataattttttaggattttatcttgcatctgctgttcttatctaattgtaatgcttccccttaacctgatgaaaattttaaaattaaatttacatatgtttatgtaaaa

SEQ ID NO: 427086 - DNA, 601 bp, Homo sapiens
aagtctatttgtcatattgaacttctgaagcaatcagaaagaaattcagttattayagtatatgcaagtcacactgcaagccttagctgaagcatttaaaaattctatgagagaattgttcctcccatttcccttctatttccaaagagtagctcaaggagagcgtttttaaaagttgatggtttgaatttgaatgagcccatatttaatgatacttcaggaattttgaatataagaacaccttagctaatataatagagaagaatgaagaagagtaagagtgagatattcttcttaagtcgacaaattatgaaatgagttaaatagatgattgtattgtcaaatgtacagtagtcatatctcatcccacatccacctttcactgaattttctggttgtcaacgttttaaaaaatattttgctatttgttgattaagttattcttatttcttaatatcatctttcataggatttgcttttctattacatcttaaaggaatccatttcatcataataaatcatttactttttacacttcaagggacttaggtatagaaaacttgaattttatatatgtgtgtatatatatttatatatataa

SEQ ID NO: 427087 - DNA, 690 bp, Homo sapiens
ctggattatatatacatatatatttatatttataaaatctcctaaatatatattttttaacctttataaatattggataatgtgacaaaagtagaaagaacctaggtagggattgctagattttgtagatatctagtattcttgggatttctggtgtctgtatagaaaacagaatagtagatggtagctgattttacamaaaaaatgtgctctatacattagctctttttccttctttcccaagaaatacttcactttatacagacaaattgctcacattatttttctatatattcattcttaaactgagaggaccaatattcaaattgtgatgaaattttcagcctatatttatttggtatctgataatgatatggagccaatttatcaggctatttatttctttgcatgtgtttctaatatgttcagatgttatagaaagacaagatggttaatttcctttgattcatacacagtaaagcaacaagcactaccttaaattcatacttatctcacaccagttagggttaatatttatgggtgtattcctttagcacacaccactggcaatggggatgactgggcttgcatgagctctgtgactttttgatatatattatgatatatgtcataatatgataatatatattatgatatatgtcataatatgataatatatattacgatatg

SEQ ID NO: 427088 - DNA, 470 bp, Homo sapiens
atatctagtattcttgggatttctggtgtctgtatagaaaacagaatagtagatggtagctgattttacacaaaaaatgtgctctatacattagctctttttccttctttcccaagaaatacttcactttatacagacaaattgctcacattatttttctatatattcattcttaaactgagaggrccaatattcaaattgtgatgaaattttcagcctatatttatttggtatctgataatgatatggagccaatttatcaggctatttatttctttgcatgtgtttctaatatgttcagatgttatagaaagacaagatggttaatttcctttgattcatacacagtaaagcaacaagcactaccttaaattcatacttatctcacaccagttagggttaatatttatgggtgtattcctttagcacacaccactggcaatggggatgactgggcttgcatgagctct

SEQ ID NO: 427089 - DNA, 690 bp, Homo sapiens
ctggattatatatacatatatatttatatttataaaatctcctaaatatatattttttaacctttataaatattggataatgtgacaaaagtagaaagaacctaggtagggattgctagattttgtagatatctagtattcttgggatttctggtgtctgtatagaaaacagaatagtagatggtagctgattttacacaaaaaatgtgctctatacattagctctttttccttctttcccaagaaatacttcactttatacagacaaattgctcacattatttttctatatattcattcttaaactgagaggaccaatattcaaattgtgatgaaattttcagcctatatttatttggtatctgataatgatatggagccaatttatcaggctatttatttctttgcatgtgtttctaatatgttcagatgttayagaaagacaagatggttaatttcctttgattcatacacagtaaagcaacaagcactaccttaaattcatacttatctcacaccagttagggttaatatttatgggtgtattcctttagcacacaccactggcaatggggatgactgggcttgcatgagctctgtgactttttgatatatattatgatatatgtcataatatgataatatatattatgatatatgtcataatatgataatatatattacgatatg

SEQ ID NO: 427090 - DNA, 470 bp, Homo sapiens
atatctagtattcttgggatttctggtgtctgtatagaaaacagaatagtagatggtagctgattttacacaaaaaatgtgctctatacattagctctttttccttctttcccaagaaatacttcactttatacagacaaattgctcacattatttttctatatattcattcttaaactgagaggaccaatattcaaattgtgatgaaattttcagcctatatttatttggtatctgataatgatatggagccaatttatcaggctatttatttctttgcatgtgtttctaatatgttcagatgttatagaaagacaagatggttaatttcctttgattcatacacagtaaagcaacaagcactaccttaaattcatacttatctcacaccagttagggttaatatttatkggtgtattcctttagcacacaccactggcaatggggatgactgggcttgcatgagctct

SEQ ID NO: 427091 - DNA, 541 bp, Homo sapiens
atggtcaatatatgttattatgaatagtctaaaagccaaatttttctagggataaacacatttttaactaaacaacattttctctcacatatcacaataatttatagaaacacatactaatttcttctgctatgcatgaaatattaattttaaacctacatttactctaattccatacatgcaaaaagagacaygcctatatcacacgcacacacacacacacacacacacggaaccattttctttttaaactgtagaactgaaagaatagccattttgatttcattcacaaaataagcattaatgttgtccactgctgtaattttgtgagctattctcatttgagttttttttcccattgaattgaaacaattactttcccaaattaactctccacagatgtcttgtaaaaaaaactgagatcaacttttgagagtgatgtattttattttaaaagtaggcttctgcttttagtttagctggggataatatagttcacagttaaaccaaatacagagcatctcctaacttcttgacccgc

SEQ ID NO: 427092 - DNA, 645 bp, Homo sapiens
caaaaggaagaataacgtgcatcttgtaaaaaacgaaataagccatgagctttgagtattttgtacatgattaagaggaaccaaaaatatgaaaattatggtggatgagccgggattgattaattctccaacaagagggaagaaatcttctggtttaatagagatttacaaaatacgtcagtcttttcatatagatgtagccaagaagctcagatgacatgatagggacccaacaaaataagaaataaaaaargcagagagaagaggaaagcaagcaaaggagattatatatggaacaaaagtggtggtgacaaagacagaagtagtagcaaaagagcccaagaaatatcatcagctctgtggaagcagaaagaatgaggcagacatgaagtgcagagacattatcagcaacccagtggatgtttgggtacaacatcccacaattacatcttcacaggcacaatatttctgggaaaaactacttatgccaactagagttgtttgtttgtttgatgctttacttactcatttgcagttatctgatttctaccagaggtttgcactctctttggcctatgtgctctcagtgaccaaagcctaggtgctatgggtgatgctgtcaaacctaagacctgaaacacagaa

SEQ ID NO: 427093 - DNA, 645 bp, Homo sapiens
caaaaggaagaataacgtgcatcttgtaaaaaacgaaataagccatgagctttgagtattttgtacatgattaagaggaaccaaaaatatgaaaattatggtggatgagccgggattgattaattctccaacaagagggaagaaatcttctggtttaatagagatttacaaaatacgtcagtcttttcatatagatgtagccaagaagctcagatgacatgatagggacccaacaaaataagaaataaaaaaagcagagagaagaggaaagcaagcaaaggagattatatatggaacaaaagtggtggtgacaaagacagaagtagtagcaaaagagcccaagaaatatcatcagctctgtggaagcagaaagaatgaggcagacatgaagtgcmgagacattatcagcaacccagtggatgtttgggtacaacatcccacaattacatcttcacaggcacaatatttctgggaaaaactacttatgccaactagagttgtttgtttgtttgatgctttacttactcatttgcagttatctgatttctaccagaggtttgcactctctttggcctatgtgctctcagtgaccaaagcctaggtgctatgggtgatgctgtcaaacctaagacctgaaacacagaa

SEQ ID NO: 427094 - DNA, 599 bp, Homo sapiens
agtttttttttttaaaaaaaaaagaataactataataatgcgtaaaagtatgctcatcagtgctttatctcaattttctttaagaatacacaaatttgaaaactatctggtataactattactcagatctaaataaagataaaaacaactatcacaaaaattgccttaatgaccaactggatgaatgtgtaaaactgcacattagagaattgtgtcacaaaatcacaaatgatgatattttaatgttcttttatactttacagtgcttagtagtgtttttttttaattggaacaggcgggaagccacttaaacctacacttgtcctagaggtttagatggctttttgtgggttttaaaatgtaaaatggcatgggatagatacatttcccttccagagttctattgtgacaactttaaagaagaytaagagcaaaattatattcttactatctgtttattaaaatggaaataccattgttagcttctagataaataatataaatcattcttcagctattgcaactaactaattaaacacagaattaacatttgctatgggccaggcactgtgtagaagctggaaatataaagagtcata

SEQ ID NO: 427095 - DNA, 592 bp, Homo sapiens
ggttgcagcaaggtgaaggacaagatcagctcaaatatttatctgggtatgttctagagtttaagtaccttggagtctgagaatgtgtcggagtctgagaatgtgtcagagtcatctttgtgctcgttagcacctactagttccctgactatacaactatgtatacaactatacacctgactatacaaggtgacagagctgggattagagrccttccctgatttcccttctactagttccctgactatacaactatgtatacaactacacaactatacacctgactatacacggtgacagagctgggattagaggccttccctgacttcccttctccccctctcttgctttctaagtttcataatactttatctacaattctttatgactcaatattctactttgcatttgttgttatctaggtatgttccagagtttaagtaccttggagtctgagaatgtgtcagagtcatcttcatgctccttagcacctactagttccctgactataaactataaataaaaagaacataatatatgtttattaagtcaataaacatataactaattatacaactaaataccagtagta

SEQ ID NO: 427096 - DNA, 513 bp, Homo sapiens
agatgaaatatattaaatgactcagcactccattttcaattttctactctttaactcatattttataaaatataggacagtttctacagcaacaattggggtctaattggcacaaaaggcctatttttcaagcatatgcatttgttccttttttcctacttgatccacataacctaccttgcataaaatatttgctctttcctatatccttgtatttatgtaaggaaataatggaacgatggtcagcatgggattagtttagatcttgttggaagatattatgatcatctggctgcattaggaagctacaacaggaagggagtggtgcatttggcaaagaatgaacatcaatatgacttttcagctttaccctttccccagtctgactttctctcacctcaatggaaattctatagtcagagtattttggggtttttgtttgttttgtttataagaccacataccacaagattcatggtttttcagsttaacgtttcaaatatttgcagaatc

SEQ ID NO: 427097 - DNA, 577 bp, Homo sapiens
taacgatggttactgaatgttaaactattaagttacttctgactacattttgctgccttacacatcrtaaatggtgtatttaaagttgatttcagtacaattattttccccattcaaaagtaagatatttctaaaggcagtaaataagagacttcatctcttctcctttggatgagccttcagagatctgatttcaatttgtatgcctttgaaggtaatctgacctgcttattcacgattcagcattaaaaccaaagtagggcgccttcagctgtagacagagctgaagtaataaataagtaataaattcataaaacctcaaatcatcatcgaactaacattgcaatctgtaaatgtaagcttcacgtcaatgggtttgtggtaccttttgagggcacacacttctgcttctttaacataagatagtagccttgtaagtaaggcttataagaaagataagccttataagtttggccaagttcttattagaagcagattttgagcatgaaagtaagagtttcgataccatttaattttggaattcagaataagaagatatattctaggatatggtaga

SEQ ID NO: 427098 - DNA, 601 bp, Homo sapiens
actatgcagccttaaaaatgaagaaaatttctgccatatgtgtcaacatgaatgaaccttgaagacattgtgctaagtgaaattagccaatcacagaaagataaatactgcatgattccactcatatgaggtatataaaatggtcaaattccacagcgaggggaacaacacacacttgggcctgtcagggtggggaggscggtgggaggaagagcatcaggataaatagctatgcatggagggcttaatacctaggtgatgggttgataggtgcagcaaaccacatgtttacctatgtaacaaacttgcacatcctgcacatgtatcctggaacttaaaataaaataaaatttaaaaaaattatagtacatttaattatgaaccttcatgaagccatcgcaaatagtggtgaagtcaattgctaatgacttggaaagacatcactaaatgaacaaaataggttccaaaatgccacatgcagtctgatcccatttattaaaaaaaatcgaaatatacacgtatggaaagataatgaaaagatatatgcaaaaactgtctaatgccataatctctagaggttggataacaagtgatacttact

SEQ ID NO: 427099 - DNA, 577 bp, Homo sapiens
tatactgactcttttccaaaatttctcacctgcttgcctttgttgccattcccagaaatgattagatgttagatatagtctgtgcctaagaatcgaataaaagtaattcagtccaatagttatgaggaccattgcctcataaccttgggactttttcctgacctaatcagctgctaagtactcatctctgcttcccacaatagcacagatctgtarctcccgaagaacacagctgtgctttatgaactttgtatttggaaagcctcacatggttcctgggacagagaacattttcaacacattcttattggaacagtgcctgacacatagtaggcccttgatgaatgctgactgatggaatatttgaatggatgagtgaatatatttaaccatttactgcatttttctaatgttatcctttacatttccatctagaatatacatattttaaaatctatttcatagaagatatcataatacaacattgtagttttacaccaaaaatacacccactaaagacaattcagtcacagctaaaaaaataatacacattggatactgatcagtactatttata

SEQ ID NO: 427100 - DNA, 580 bp, Homo sapiens
catgtggacctcagagaagagaactaaatcattcaggacttccccattgcttccatatgcacagtcatttctctgtaactgatacaaatgtctctgggagaaatacaagatgtcagaagtatttctgactgacctacactcaattagcaattactcaaaggtcagtcagaaaagaaagaactacatcaacacctgctacttataaggaagcagttagaaagatgaaaaagataatgaattctttctatatggtatcatatattaagaatttgtgatgttttcttaaatatctaatgttgacatmattttctcaagcatactaggcacaaacacaattatgaatgtaggaaaaaaatccttccattttgtttaaagggctaccacagaaataaagcagtagtgttctcacaaagctttgtgctgcatagtaagtgctgtgattctagaactctcacatttatttttcatataaatttttaatgcctctatacaatacatttatgtaaaatggaagctccctctagtggcaaaagaagctttattttggatttgaatagctgcttccaaaccaccctgatta

SEQ ID NO: 427101 - DNA, 588 bp, Homo sapiens
tccaaactttgtaggcactaagaggaaatttacaactttgattctgaaacctgtatgagattacctagggcaggtttgctaggacatcctcttagtcattactcactttactagtagttcataatataaaaggcatttctctgtccttcatgagaagagcataggatgcyacctttgaagtatgtatagcacaaatatccttactgtttttttttttccatctagtaatctattgaaaattacacagggatttgtgagaactaggataaaacctagttttttttttctttaataagaaatgtctaagaattttattgttgtattgcaatttcatatagaaactaggataaaaattgaattccttgatgtcggtctaaaataagtttctggagaatcatgataaaaaataattttgatattgaagtgtgtataaagtaatgcataacatacgcaattcctattttgacttatctctttgtaaaggtaaggggtggaaagaatttgcatttaaatttaaaaagtagatgaattggcgtttactagtgagatgtgatttgctttcctttaatagataataaaatattgata

SEQ ID NO: 427102 - DNA, 532 bp, Homo sapiens
atgtaaacatgaatggttaggattattttatacctattttagcattatttataagcattttaacagaactgctgcacatattagaacatggcacatctatttgttgtccatcacatttctttttattccgtgcaaatataaaaaagatatattttcagtcttctgcctttgtctgatctgtatcctaaacacatatttaaggggttgttttagtctttcaacaaactactagaaactttgttaaaygtattttaataaaatagaaaaaattgcaaacaatcatagagcttaatgatcaacagatttagtaagcagatttagtatacatattttaatcatttcatctgagaaacaatagcacacatattttattacaaatatgttaaaaggattcttcaaatatgtagtccactgactgatgttttgtgacttagagatgcacagaaaacaatttgattataaaatattatgacccctactaattctttcatgctctgttttatgaaaagattggactttcttttttctgtat

SEQ ID NO: 427103 - DNA, 532 bp, Homo sapiens
atgtaaacatgaatggttaggattattttatacctattttagcattatttataagcattttaacagaactgctgcacatattagaacatggcacatctatttgttgtccatcacatttctttttattccgtgcaaatataaaaaagatatattttcagtcttctgcctttgtctgatctgtatcctaaacacatatttaaggggttgttttagtctttcaacaaactactagaaactttgttaaatktattttaataaaatagaaaaaattgcaaacaatcatagagcttaatgatcaacagatttagtaagcagatttagtatacatattttaatcatttcatctgagaaacaatagcacacatattttattacaaatatgttaaaaggattcttcaaatatgtagtccactgactgatgttttgtgacttagagatgcacagaaaacaatttgattataaaatattatgacccctactaattctttcatgctctgttttatgaaaagattggactttcttttttctgtat

SEQ ID NO: 427104 - DNA, 618 bp, Homo sapiens
atctagctcatttttagacataaatgttaggtgaaatatttgagcacgatgttttctttatgaaaattcaaggtttggcctaaagtcactgtccctgtatctgtaccttcaagctgtgctccaaagttagtagctgcagctgactacttaagcagttgctaattgacaaagacatctctgtttcccttatagttatttttgtggaagaccaaaaaaagaaaaaaatctgttccttaccatctataactgataaggagcttccccaggtagagagaactcaaatgctgggaaactcggccaataaagaagtgaccacttatgagggcttttaaattaaaaggctgaaagatcaccttacayttgcttccattattatcttaagtttacttcaaggaggagacagcagatgtatacccacaatcaaaacagtatttgatctcatgataacatattaccttcagtagtaaaatttgaaaacatacattgttactgtatggaaattgactaggaacttacagaattccagttttaattagcaatacaaccagtgaatcacaaggtggcatctaggttttagatactattcagtgtagaagatctatattgaaaaagcatcag

SEQ ID NO: 427105 - DNA, 465 bp, Homo sapiens
atttagttcagtatgaatgtaccttctaattgctggcaaatttgattacacatagaggagcatcactttgaagtggggagtagtaaccattccttgtataacctttttcactgatattcaaccaggttttctctgggaaaatgtttagatttcagtttaagactttgaaatttgcaaatcaaaagaaattcatggtgtttgcatgtaatattaatttatctaactgattctggtatgaacctaaaactctgtaatagcctacatctgcatgactaaaagcaatgtcaggacaagcataatgcagtctgctttgctccacgggattggcattgggactgccacagaggctggcactgatttctgkgtccaaggggaatagacctttgccctcacctcccctaacttctctaacttctcttgacatttaaaatgaatgtggtggcagtggaaagggaaactggaatc

SEQ ID NO: 427106 - DNA, 573 bp, Homo sapiens
cagacttttaaatctcattaagtggctactaataattggttaaatataagtcctctgctttgtagagaaaaatgaacttaaataatatgattattagatataatttaaaaaatttaaataaaagaaaacctcagaaatgagctcatggactattacagaactttttgaaggtttcttggtctgcaagtagaaaatgaaaataaaaatggcctaattctctatagactattattacagaaatggagacctaaatcatctcttaaaaattattataatcatattgacagatggatgcttacttctaggcagttagaatactagagaaaaataggtagtagggggttagggcaggacaaaggggtggagttttccctgctccaccaggcacattgtccccattttcttatatcgtgccctcactatgcgttttctccatcatctagcacactcgatactgtttgtttcrttgaaagttgggttgcccttgggcttacaagttctttgataacttgtaatataaagactaataaagtaatcatattctcagatccagcacactgcctgacacacagt

SEQ ID NO: 427107 - DNA, 395 bp, Homo sapiens
aaactttaggtcacagacagctagctcaccagatgaggacattccatttgcataaaatgtcagttcccactactgcctacagagtgtgagtgcaactgcagtcatgtactgcataacatcgtttcggccaatgacacaccacataaacaacagtggtctygttagattacactattatgtctttactgtaccttttctatgtttagatacacaaatccttaacattgtattacgactgcttacagtattcagtatagtcacatgctatacaggtttgaagcctagagatgataggctatatcatatatcctaagtgtgtaccaggctataccatccaggtttgtataagtacactttatgatgttcacacaatgacaaaatcagctaacaatgca

SEQ ID NO: 427108 - DNA, 600 bp, Homo sapiens
ttactttttttaaagtaaggtatgtggttttaaaaaagtcatataatagagtcatgtgattttaattattttataaatttgatttgcttaaaaatctgagaagagatggtcccatgtttattaatctaaccataaaatattrtactaaagaatttttatgagcattaaaatgttccatatattctacattgatctttattgtgaaaaggttatatttataagattaactttaccttgaatgatgatatcatacattttaaaataatgaccctatttcagtttcctaggcattatctcaatagattaataatttcaatattaatgactgaaaggtaattaatataaaatactgtattatttttagcaaagagtatctgttacggagccctatggacagccaaggctaaagaaagtattttggccgtgacaaatggacaactgcaataatgccaggaaatctcaatagaatatggaattggctccccctgtcgggccttaaaaagtccacatttttgaccatcacatcacctcacatcacaaaactaaaaaaaaaaaacaaaaaaaggcaaaatgaacaatgccaacaaaattaaagacctg

SEQ ID NO: 427109 - DNA, 469 bp, Homo sapiens
taaaccctgaaaaaatagtaatgctcttcctttcttaagttcacattactacgcgttaagaacttcacttgataatcactagtacctcaaacaaaacgctgagggaaccagctctcaktgctgtttatttaggctttgttaaaaattttagtctagtttcacccaaacccaccatacaatatacaacagctattcattgcaaatatctttttaaatgtccttcctcttttcctaacagtttcatcctgaattatgactttggactatggtattatttttgtaactgatctctaggcttccagtctgtttctttcaattcatagtcataatcttcccagggcatgatcttaatcacatcacccctgcctatcaaataaagtctgaatgaagttcttagtctggcatctcagagtctttaaaacagcttgaatggactttccttccttaacctaatactgcaaacttatga

SEQ ID NO: 427110 - DNA, 609 bp, Homo sapiens
tagcctgccatgtgggcattacatcatctctttgggtgtcagttttctcatccgtaatttggtcctcctccatattattgaaaaacgaatgaagcactattaatataaataaggcacttggaagagcctctggatcatgttctcattttatgagagctacacaactgactccatcctcagcatcaccacttcctccagtcagaaaatagttctctttgtagaatgaagactgtattaggagtaacgcaggttgggcatggtggctcatgcttgtaatcccagcactttgggaggytgaagcaggtagattgcttgagcccaggagtttgagacctgcctgggcaatatggtgaaacaccatctttacaagaaatacaaaaattagctgggcgtggtgatgtgtgcctgtagttccaattacttgggaggtttaggagggaggatcacttgaatcaggaggcataggttgcagtgagctgagatcacaccactgcactccctgcataacagagcaagacatcgtctcagaaaaaataaaaataaaagagtaaagtgcaaaagtttctatgtatttgccctacagcctgcctgctgcaatacatatgaagt

SEQ ID NO: 427111 - DNA, 609 bp, Homo sapiens
tagcctgccatgtgggcattacatcatctctttgggtgtcagttttctcatccgtaatttggtcctcctccatattattgaaaaacgaatgaagcactattaatataaataaggcacttggaagagcctctggatcatgttctcattttatgagagctacacaactgactccatcctcagcatcaccacttcctccagtcagaaaatagttctctttgtagaatgaagactgtattaggagtaacgcaggttgggcatggtggctcatgcttgtaatcccagcactttgggaggttgaagcaggtagattgcttgagcccaggagtttgagacctgcctgggcaayatggtgaaacaccatctttacaagaaatacaaaaattagctgggcgtggtgatgtgtgcctgtagttccaattacttgggaggtttaggagggaggatcacttgaatcaggaggcataggttgcagtgagctgagatcacaccactgcactccctgcataacagagcaagacatcgtctcagaaaaaataaaaataaaagagtaaagtgcaaaagtttctatgtatttgccctacagcctgcctgctgcaatacatatgaagt

SEQ ID NO: 427112 - DNA, 608 bp, Homo sapiens
tcactaacctgatagctctccagacccatttggttaggattttcaaaaactgatacataatttacacattgcttcttttatctgaagatctgtctgtctttgatcagctgtacgttgagactgaagaggctttgtgaatagaaacatcaattccttggctcacagatacgcccctgtccttggcaagccacagagctgtagccgtctacctccccagtttcacaggtcagatgctgtggtgggcgtgtcatggyagtcaccatctgaccatgtggctgtcctctctcattgtctcctccacagcaccgtgattgtgttttatgtacagagcaggccgcctttcaaggttctcaaagctgctgaagtggcccgaaatctgcacatgcggctctcaaaggagaaggccgacttcttgcttttcaaggtcttgagggttgatacagcaggtaggtctcctatggaatattctaaaacaatcagacttgccaatcatggataagtttgacaaacatagaagaggagtgacatgtgaacattttcactttagcatccagggacttgttttacatttatttctccaatagagtttcctgcagcatgcatttgcc

SEQ ID NO: 427113 - DNA, 608 bp, Homo sapiens
tcactaacctgatagctctccagacccatttggttaggattttcaaaaactgatacataatttacacattgcttcttttatctgaagatctgtctgtctttgatcagctgtacgttgagactgaagaggctttgtgaatagaaacatcaattccttggctcacagatacgcccctgtccttggcaagccacagagctgtagccgtctacctccccagtttcacaggtcagatgctgtggtgggcgtgtcatggtagtcaccatctgaccatgtggctgtcctctctcattgtctcctccacagcaccgtgattgtgttttatgtacagagcaggccgcctttcaaggttctcaaagctgctgaagtggcccgaaatctgcacatgcggctctcaaaggagaaggcygacttcttgcttttcaaggtcttgagggttgatacagcaggtaggtctcctatggaatattctaaaacaatcagacttgccaatcatggataagtttgacaaacatagaagaggagtgacatgtgaacattttcactttagcatccagggacttgttttacatttatttctccaatagagtttcctgcagcatgcatttgcc

SEQ ID NO: 427114 - DNA, 585 bp, Homo sapiens
gtaaatttgttgtttggggaaccagatggacataattggcaccaaggatagtaagagctgactgccaaagtatattcccatttaatactatataaaaatcagaaaatagccagcccttggatcattattccaatgaaattatataacatttaataaagttaaaccttttttttttttttttttttttgagatggagtcttgctctgtcacccaggctggagtgcaatagcrcaatctcagctcactgcaacctctgcctcctgggttcaagcaattctcctgcctcagcctcccaagtagctggtattacaggtgtgtgccatcatgtccagctaatttttgtatttttagtagacacagggttttgccatgttggccaggctggtctcaaactcctgacctcaagtcatctgccccgttcggcctcccagagtgttgggattacaggcgtgagccaccgcaccctgcctaatagagttaaactttgctccctagtagatttaaactgggcttctctgtctctgaattactgttgaaagcttttcacgttagatttctgtaaggatgtggaaggaatgagggtca

SEQ ID NO: 427115 - DNA, 501 bp, Homo sapiens
ggaggttgcagtgagctgagatcacacctctgcactacagcttgggctacagactgagactctgtctcaagaaagaaaaagaaaaataaccttcatcaatcctgaggatatgctaatgcgggggtgggggcagaaggcagtgggttcattataaatttaatgaaattttggtgtaatactttgaggcattaatggatgagggatatgaaatgttatcagctgggcacctaccaatgaccacagggcaaagactgctttttaaacagagatgtccccagcacctgcttttttttctactcscgggtggagggtgggggcagttgaagacactcccacagctcagctctgaacgctgttccctttaggtctgctaggacagaaatgcagcaagaggacatttggactttaaagcctaacatttttcagcagctgcgttatctaattagccattgataaagatggacacaaaggctttacagaaaattgactttcttcacaaag

SEQ ID NO: 427116 - DNA, 566 bp, Homo sapiens
gttcaatctatatatgcagttactctttttgaatcttacctatgctgcattaagacattcaagacaatggggtgaaaggacaggaaactagtatttagtaagtgcttaagtgtataccagggactctaattctttgcatctgttcttttaaaatcctattagcaactgtttaaaataggtaatattatgtccatgcatttaaggacatgaatctcacaggcagtaacttgcccaagctcacatggatagtgtgaggcagaactgggatttgagacccactgcctgtcccctgaccacctccaaagcccatgtcgttttcacaacacagcagctattatctatttggtgctacacattgctttaggaactgctgattctacattgaataaaatactctactgtctttgaaagactcacatgccagcaaggaggagattaattattatgatttttagtgataagtgctttaaaaatgtcctatggctaccaggccagggaccattacctgtgcctggcaagagacrcgcttcatggagaggtgtagcttggacttgggaagtgatggg

SEQ ID NO: 427117 - DNA, 312 bp, Homo sapiens
caagtgtggctttgggaccggtagtgtgaacatcatctgggaattgttagaaatgcagactctctggcccagaccagatctgctaaataagaatctggaggggtggggtcctccagttaattctgaggcactaacaactcgttgaaagccagtgctttagctaagatagttataaacatagctgggctttcagcatcctactcagtacaggccagccagattccagacttgtatttcctgctttcctctatcaccagaacctccatttcatrtgtgaacctccaaatctcagacaggtttcagtcaatttaa

SEQ ID NO: 427118 - DNA, 574 bp, Homo sapiens
ttgcagtttgagctattacaaataaagctgstgtaaaaatgtgtgtgcagacttttgcattgacataaattctcattttttgggacaaatatacaagaatgagattactggaatgtatagtcagtgtatatttagtgttattatttaatgaacatgccaaactattttttcgtactggctataccactttaaatttccatgagcaatgtatacatccagtttttacacacccttgccaaactttttattgccactattttttaattttagatgttctactaggtgtgtagtaatatcttgtaatggactagaattgcttttgtgtattcaagcctgtttggaaattgttcaaactattatagaaattaggagacttgaatagcctttttgatgttgcctataactacttctgttacttaatgtaggtccttaacttgtatgaatctcagctttctctactgaaatgtaggaataataattactgccttatatccttattccaatgaagatgaaattataaaatatatatgaaagtatcattaaacattgctcttttgcaacatgaaaccaatgt

SEQ ID NO: 427119 - DNA, 590 bp, Homo sapiens
ttgtttatttctttgtgcatatgtctccttgagggctcacagcatgcttctggttcccatactctcactcataatggccaatatcctttttcccttctggaaatccttcctgtgccctgtgaagagttcttctctcatatatacaccctcatacactcctcacattcttccccatcagtcttatccccttcctccaattactgccaccttcatatctcaatcttccctcttctctatacatagctcccctctctggatcttccttactcctccctcacagctcataacccaaaacccatacttattaatccttaaggacttttccttccccatccctcagtatctgtgtagcaatytttagccctccacagggtttaggaataacgccttttagtttgtcttgttgtgatttcaattatgttttacccttaaagtgtacaaatttaggtgcttggttgtttatctttataattttaaaataattttaaattcacaagaagtcacaaagaaatgtacagggaggtcccatgaactcatcacttagctttctctgatgttaacatcctgcacaacaagcatacaatatccaa

SEQ ID NO: 427120 - DNA, 515 bp, Homo sapiens
acccaaaacccatacttattaatccttaaggacttttccttccccatccctcagtatctgtgtagcaatctttagccctccacagggtttaggaataacgccttttagtttgtcttgttgtgatttcaattatgttttacccttaaagtgtacaaatttaggtgcttggttgtttatctttataattttaaaataattttaaattcacaagaagtcacaaagaaatgtacagggaggtcccatgaactcatcacttagctttctctgatgttaacatcctgcacaacaagcatacaatatccaaaccagaatactgatactggtacaatccacagagttaattcaaatattactagkttacatgaattcatttgcatggtgtgtgtgtgtgtgtgcgtgtgtgtgtagctctgtgcaatttcatcacatgtgtagtttcatgtaaccaccaccacaatcatttatctgtaccatcccacaaggctccctcatgatacccactttcagtcacacct

SEQ ID NO: 427121 - DNA, 515 bp, Homo sapiens
acccaaaacccatacttattaatccttaaggacttttccttccccatccctcagtatctgtgtagcaatctttagccctccacagggtttaggaataacgccttttagtttgtcttgttgtgatttcaattatgttttacccttaaagtgtacaaatttaggtgcttggttgtttatctttataattttaaaataattttaaattcacaagaagtcacaaagaaatgtacagggaggtcccatgaactcatcacttagctttctctgatgttaacatcctgcacaacaagcatacaatatccaaaccagaatactgatactggtacaatccacagagttaattcaaatattactagtttacatgaattcatttgcatggtgtgtgtgtgtgtgtgcgtgtgtgtgtagctctgtgcaatttcatcacatgtgtagtttcatgtaaccaccaccacaatcatttatctgtaycatcccacaaggctccctcatgatacccactttcagtcacacct

SEQ ID NO: 427122 - DNA, 596 bp, Homo sapiens
atccataaagaattaagacctagaagttaatgtttctgaagcctgcaaggccttcaacaaacatcctgcagtaatactaatggaataatacagtaatatgttaaaggacaggagacctggttgtttatgtatgtataaaattccccttatcaactaaaaagttaataacgcaaaaaatagtaagatatgcctctcaagaattaattacagtctttcttttttctgaatgaaatccactgaacatagcttcttatttaaattggcttcaaattttaaaaagatgtttctgtaggcatgttgctatgtatgttagtttctccttggttttacacaaaacagaaagtgatcagagatagaatsaaacttgaacttatgtctgtgaatttcacttatgcaacaatatcaataatattatttataaatatttggaatgcaggatatgttcttggaattaaaatatggaacaacaattctatgtggtgcacaaagttgaacacaaacacctcttgttgctgacaagatattaaagttgtgaaattaaataaattaatgtatcagcaaccatatttaaccacataatttactggtacacacta

SEQ ID NO: 427123 - DNA, 533 bp, Homo sapiens
gtcctattgtttagacacttgccaggggctccggagtcggcagagccaccgagtccccgctctgagtcgtcgccctccctctccccsacctcgctccctggagcgggaggccaggaaagcagcgggagaggggaaggggctagaaggagaaggactacccgggactgcggccgccgcgtcaggtgcagcgccaggagccgggcggcgtcgccacgccggcaggggtaccgccactgtggccttgggggacggaattcaaagcctgggaaaagttgctgcactttgagaaggacgaaccactagtgggagaccgccgggggccggccgtggctctgcgccctccggaacccggctcttgtttcttctacctttgccatcaggtgtctgccgcggagctgcggcttatctgggagacgagcggggttgacacgcgcgcacacactactgccattcagctgccgcctggctctgcctggagtagtggatcccacccgcccacctgccaccgagccattctccagtacgccccagca

SEQ ID NO: 427124 - DNA, 609 bp, Homo sapiens
ctttgtgaacgccgaggccgccgccccgcgccagtccggccgccctaggcacgttccgctctcgcggttgcrtgtgggccgggagtaagcgaagggcgcggggctaggccggcaggggccagcgcgtctggattcgtcccgcggcctctttgctcccggggtgtaagggtttcgggccgtggagaggaggcgctctgacccgcacgtctccacccgcgcagcccattgcacttcaagtcgcccttcttatccaacccatttctctcgcccttagttttaaggcccaagttgagccaccttttgctttgcaaatggctcttctacccccagcctcactaggttacccttactcctttctcacctctccgagctggccaaatcggggctctactaggggtgccttgtcaggattcgatccacatttgtgtagggtggtgggtggagattcgtgttatatcgaatagcccaacaattttaggaacaactgaatggtactctgcttagcatggagaagtgggttgagtagaaaggaagagaagccacgcagaattctgttttagcacttgtcatttcatgctattcagaacagtttaaagtttaagcacgaac

SEQ ID NO: 427125 - DNA, 609 bp, Homo sapiens
ctttgtgaacgccgaggccgccgccccgcgccagtccggccgccctaggcacgttccgctctcgcggttgcgtgtgggccgggagtaagcgaagggcgcggggctaggccggcaggggccagcgcgtctggattcgtcccgcggcctctttgcycccggggtgtaagggtttcgggccgtggagaggaggcgctctgacccgcacgtctccacccgcgcagcccattgcacttcaagtcgcccttcttatccaacccatttctctcgcccttagttttaaggcccaagttgagccaccttttgctttgcaaatggctcttctacccccagcctcactaggttacccttactcctttctcacctctccgagctggccaaatcggggctctactaggggtgccttgtcaggattcgatccacatttgtgtagggtggtgggtggagattcgtgttatatcgaatagcccaacaattttaggaacaactgaatggtactctgcttagcatggagaagtgggttgagtagaaaggaagagaagccacgcagaattctgttttagcacttgtcatttcatgctattcagaacagtttaaagtttaagcacgaac

SEQ ID NO: 427126 - DNA, 665 bp, Homo sapiens
tcagacctaacatgtgcagagtcacatttcctaggatgctctgtattgcyagtggtacctgtttatctgggatgaaaatgaagccttcagtatgtgccttatatagactgtattagcaggtctcctgttgtttaatcaaaaaaattttcaaatgaaatgtactctacctagatgaccagttaattcaatggaaattcggataaaaaagtcacaaataagctgcagtaagaatcaggacacttaggaagtatatttcttttatatacctcaaggaagatacctgtgtatatctgcaataaattctccatgcaaaattattaatttgagttttttttggatgctgcataatgtcctagagggttaaaaaaataacactgggacccagcaatgctgtgggcttgtgtaaaattctcttgttcacacactgtttatgggattagatactacagtcattcacttctattttatggtcttttagggggacccagatcatgtcagggttccactagtgaaaacaatcttcttttgaaatttccttgataatacaaatgcaaaagtatgagaaagtttttgaaattttttagggttgttataggatgttttattatttactccaagactgaaaagtgaaatgcatatatgcctaggttatgttggtaagaatc

SEQ ID NO: 427127 - DNA, 665 bp, Homo sapiens
tcagacctaacatgtgcagagtcacatttcctaggatgctctgtattgctagtggtacctgtttatctgggatgaaaatgaagccttcagtatgtgccttatatagactgtattagcaggtctcctgttgtttaatcaaaaaaattttcaaatgaaatgtactctacctagatgaccagttaattcaatggaaattcggataaaaaagtcacaaataagctgcagtaagaatcaggacacttaggaagtatatttcttttatatacctcaaggaagatacctgtgtatatctgcaataaattctccatgcaaaattattaatttgagttttttttggatrctgcataatgtcctagagggttaaaaaaataacactgggacccagcaatgctgtgggcttgtgtaaaattctcttgttcacacactgtttatgggattagatactacagtcattcacttctattttatggtcttttagggggacccagatcatgtcagggttccactagtgaaaacaatcttcttttgaaatttccttgataatacaaatgcaaaagtatgagaaagtttttgaaattttttagggttgttataggatgttttattatttactccaagactgaaaagtgaaatgcatatatgcctaggttatgttggtaagaatc

SEQ ID NO: 427128 - DNA, 522 bp, Homo sapiens
ctctgggcctcattttctcatttggaaaacgagagaagtagaatagatgatctctatgttagcctctagtttgaaatttctgttataacacaaattagacataggattataaaaatatatacaaattagtctcaacctagacacaagacaaagctatagccacaactcaccgatgaattgataatattcaattgttcattatatattataaactataaatcagactaaccaaaattaacactctgtttttcagaaaacttgtattcatctctaatcctagattaattagaaaagtgcccagttctcagggaatactgaccattaayctttatatgcaaagtgttaagttttctacaggataattaacatactgtatcatacatgaaccaaaaataattcatacattctaggccactcagatacagttgataaagtctatgcagtgatgcggttgataaagtctctgcagtggctaaaaattatagatactgaagtgaaaaaatcatttccactcttatttct

SEQ ID NO: 427129 - DNA, 585 bp, Homo sapiens
acccaccatctcggatgctctgaaaggtaggggaggaaggagccagaacactccactaggaatctgttacgagatgccacacacacccgtgcagcctcgacgagctgcagagcactcagcgggccctccaaagaattccgcaccgtgcgtcaccaaaataccttcccagcgcccccgccgcacgcctgccctccccgacaaagccacagccgcgagataaccagggccctgctgccccagaacccggcgcgccctccattgaaatcgacagcatctacagatgaaactcctctagaaacggaaacactgaacgggatgctttgcgtgcacaaaaccttgctcagctcttaagaaaagcaacattcccctctccctcaaaaaccccaaagaatcaccaaatcccagtatacaaggcaacgctctagcccayctacactattacaagtccaaactgtcctcgcccaggattcttcaccgctccgggcaaggtgcaagctagacgccgtttcccgagttgtctctgggaatgatgggggtaggggaaaggggacagaaaccaggctgacctgaggcggcggcaacagg

SEQ ID NO: 427130 - DNA, 452 bp, Homo sapiens
ttcccccttcaaatcctcacaaccagagtgtctgacaaacccctagtgagtgagcgcgtcccagggatgaaacacccgaccttctcaacgttgcgcccaatcaggcttgcarccacattgccctggtatcactgagccccgaatttgtcgacagctggcgtctgcacccaagctaacccttcactcgcctccccacccaacacacaaagagcagggagcccagtccaaccaggcttgcagaccgcgcgtggactggtggcagcctcaaagaccgagcccgagaacagagaagtccctcaggccgccaagcgggcacccagtagggctgcgcccttggcctgctccgctgcctgaaacggccagggaagcccccggacaacgacaccccgtccagaaagggaaaaggaaaactgctactttgcacgccagcccaagctggctggtgtttgtat

SEQ ID NO: 427131 - DNA, 452 bp, Homo sapiens
ttcccccttcaaatcctcacaaccagagtgtctgacaaacccctagtgagtgagcgcgtcccagggatgaaacacccgaccttctcaacgttgcgcccaatcaggcttgcaaccacattgccctggtatcactgagccccgaatttgtcgacagctggcgtctgcacccaagctarcccttcactcgcctccccacccaacacacaaagagcagggagcccagtccaaccaggcttgcagaccgcgcgtggactggtggcagcctcaaagaccgagcccgagaacagagaagtccctcaggccgccaagcgggcacccagtagggctgcgcccttggcctgctccgctgcctgaaacggccagggaagcccccggacaacgacaccccgtccagaaagggaaaaggaaaactgctactttgcacgccagcccaagctggctggtgtttgtat

SEQ ID NO: 427132 - DNA, 605 bp, Homo sapiens
ttgttttaactaacacacttttttgaaatgaagtcttgtgcctttatgatttttattactactgatgaaaatgaagttgaagtgattcatcttgtactttctagcggtggctaatactcattcagatttttaccctggaactaaagtgagggtctcaacagacaaataatgggtttttccccatatggctgttgtgtgggccctgcagtgcctcartaatactccttccacttttggttcacccacatgtgaggccaccatgtggcttggggtggtgctgacaggtctcaagccagactgcacgaacaaaaatcactaggctagactgagaacatctgaactaatgtctaagggccagcctcagacaattaaatctaactctcagggtggggcctgggcatctgtatattttttaagttggctgggtaatcctgatgctcagtgagggttgacacacattagtctaagccttgtcacccagaagagccagaggagtcatctattaatagaactggcagataagaaggactaatcaatcacttgtaggacatacaggtccccagatcaatggttcaagtgagtgtttatgggtttagcctggccaa

SEQ ID NO: 427133 - DNA, 551 bp, Homo sapiens
ttgtgagtctagataagcgcaaaaagctatttctttctttaagcttaccaggagctttatggaacaggtttgaagctggattagtgacaaaggtgatgctcacatccgaagcattgagtttttcactgggtgaaaactcaagaagaagtgtgataaatgggattttgttttcaggctctctcccttgtggcatcctctcatcccaggcatcacttgctgcatccagccacacagatcccacccatcaatttcatgccccaaggcccagaaatccctgcatcttgggtcctcttccgtgctctctgccagccagtcagatcaaggcataacaggttgaatgttgcctaacacatttccctttgcatttcagtggaagctttttaacaattgtgtccttcattgatatcatccaaagcaatacttctaatttgggaaatttccagctctacagcatatctgggagtatttgggagacagttggcttaaaacaacacagatttattytcttatggttctggaggtcagtagtctgaaatgggtctcactgggtt

SEQ ID NO: 427134 - DNA, 537 bp, Homo sapiens
tcccatacagcctccaggaccatgagccaattaaacctcttttctttatgaattgcccagwcttaggtatttttttatagcaatgcaacagtggcataatatacctacctacgtatctattgaaattaagcaaatgtagcagaatgctagcaattggtgtatctaggtggatgatagatatattgatattccttttgctagtctttccactattgtgtgagtttaaaattttcaaaacacaatgtttggaagaaaaaagccccatgtcattttgatgcttttttttttttttagtgtaatacccctcctcttcctttgtggaagcttttggaatcttccctctttttaaaaagatgttctgatagttcagtgctgtgccttggtatagggccttttatcattcattatgttggaccctttgtgagcactgttaatctgtagactcttgttagactcatgtcattcaaatctgggtaattctcttattgtatttattgataattttctctccactttttcttctatttcagaagctat

SEQ ID NO: 427135 - DNA, 610 bp, Homo sapiens
ttgtccttcttattatgtttaggagacaggttaagtttggctactgtgggatgtgcatgtgagggattgaacttgaaagaccataaaaaacagactcataaccaaaggtacttctattaggaacctctatctatggcttccagaatctgcaatgttctcatattgaccattgtttttcaaataaactatctacctatggaaggaatttttaaataaaaggtaaaatagaggaagcagactgttcctgcaggacctgggagacctccccyccaaaactgtgagtgccccaactgcagaagtgggaaagggagaccctcctcttctgaataacgctcactggagaagctaaaggtctgtttgtgggaaaagtttccgactttacctggagctgagtcaatttagagagctgagcaaaatacagggttagagggagcagcagaaaggccctgggagctcgctgggtcccctagcaggccatccctccctggcaccacagggacccaacaggagaggagcaggggttaaaactacacagggagaagcaaatctctagctgaactttgtcacaatttgaaccaggtgagaagcttcctggccagagctcagggga

SEQ ID NO: 427136 - DNA, 610 bp, Homo sapiens
ttgtccttcttattatgtttaggagacaggttaagtttggctactgtgggatgtgcatgtgagggattgaacttgaaagaccataaaaaacagactcataaccaaaggtacttctattaggaacctctatctatggcttccagaatctgcaatgttctcatattgaccattgtttttcaaataaactatctacctatggaaggaatttttaaataaaaggtaaaatagaggaagcagactgttcctgcaggacctgggagacctccccccmaaaactgtgagtgccccaactgcagaagtgggaaagggagaccctcctcttctgaataacgctcactggagaagctaaaggtctgtttgtgggaaaagtttccgactttacctggagctgagtcaatttagagagctgagcaaaatacagggttagagggagcagcagaaaggccctgggagctcgctgggtcccctagcaggccatccctccctggcaccacagggacccaacaggagaggagcaggggttaaaactacacagggagaagcaaatctctagctgaactttgtcacaatttgaaccaggtgagaagcttcctggccagagctcagggga

SEQ ID NO: 427137 - DNA, 589 bp, Homo sapiens
gctctacatgacatttcccattatatggtttccacttggtaaaagatccatgttgttctcggtctatgcaaatagccctaatgctacctagcatggggctcagtatatgataggtttttaataagtatgtgttgaataagtgaattgagctcttgggtacactagattttgaaagacatgagtagggttttttttttttcatcaaaaccacagagggacagtgaaaataccattgaaagcctaatataagrgacatgacacttgcctggagaaaagttttcaaaatgaaattatttattaccttctcctttcccactcctcctttcaggtcagtcttttctatgaaaagatcgtctctgacccctgtggttcatattgatagccctcttatttggcttctttgcagcatttagtgtatcacttaagctatccttggattatatgtgatgatgcattttttgagtgtctcagatatataaatcatagtctccataatgaaactatattctctttagcacatggactgtgtcttttctttttcctcttctagtttctaccatggccttaatatatagtaagatgttgggat

SEQ ID NO: 427138 - DNA, 487 bp, Homo sapiens
ctctattcccctcttaccatgctggtacctgaagccagtatgtctcagaggttcacccaaggtccttgatgtagtacctgggtatcactgctttctattcaggaaccaagggctattcagtcggctggtgattaatcctgccagggcttggtcatttctttcaaggcagcaggtttctttctgtcctagggtgtgtctagaaatgttatccaggagcaggtgcctggaacaggggcttcacaaccctgaccagtgccctgtcctgctgtagttgagctggtattcaagakgcaagaaaaaaaatgttcctcactattccatctcctcaagtggaaggaaggggccttttatggagctgctagctgggcagtctggggctagggcaggggtgacaccagcactcacttggctgccccagctggtatctcagtaggtcatgtgcacccctccacatacccgccgcaatccactgcctctgggcccaatt

SEQ ID NO: 427139 - DNA, 589 bp, Homo sapiens
aaaggcctttgttctcctcatactacacacctggcatctggagccacctgtcccctcatgcatctgtgcccagtcttctttctggtggttgctctcacactgttctgaggacagctgaagtgccctggaccccatgtgtctgttcattttccaaggctcaggtaaaaagccgtgccttycacgaagccattctggtttccaccaactaaaagtgagagtttgcaccctgagttcctgtgtaacctcctatctctgttccacattggcacttggcactttctgtcttgtgttagagtagctttgcgtcccatctcatcgccactccttgcctgtgagttccttaagtacaggaactatgtacctataatatcttatccctgatatactcagcagtgtcttgtgcttagtaggtgcttcataaatattcattaaataaaataattacagagaaaagctagggaaatttatggggtgtgtgtgtgtgtgcgcgcgcgtgtgtgtgtgttgagggggtgtttgaaatagtctggggtttgatctaatacatagaaatgcttccatgaaatagaaatgccttacagttgtgtgt

SEQ ID NO: 427140 - DNA, 561 bp, Homo sapiens
tcacatttatgtggttgggaggtttaaaatatagtgttatacctctgcagtctgtattattattttacatattatacattttgtgtggatttgtaatcacagcgtgtagggtttrcttgggcaggttctcatttctaacatgtcatcctgccagtgggatggaggctctctggtcttcttcttctttggctcctctgactccaaacacttcaacacctacccttcctcagcgacgtgcagccccttcaagaagagagcccataaactcagtgtttatcatacaaatgtggtgatgtgtttgcatttttatgacccagctaagtggtgagtattcatttgtgccacctcaccccagatgcccatccagaggctgagctgtttatcatgctcatctctttcccaaagcctgaacaaggagcttgggaccactataaacatgttccctttcaataaagaggaaattattatcatatattttggtaataaccaataacatttcaaattacttacatttatggcttataatcaagcttatgcttaacctctaatcctcatgaagct

SEQ ID NO: 427141 - DNA, 601 bp, Homo sapiens
ctgaacattgtcaacctccaagagcagagggcatggcactgtctacgtgggtatgaaatgccccataaccgtaaatggggtctgctcacaccacatttgctatttatactttatactagatagagccctctagctcgatggttcttttcttcccttttttttttttttccttttttaaagagaagagaattgtgggaaatattttgttttccctgggagccagactatgtatttacttcaagttttattaaatgagttataaattttcccagcaatttactcatagctcaagaggtttaayttgcatgtgttgccttttacaatatgcttttcgtaatgttgcagatgcttcttccccagcttcagtaaacaacaggcactccgccaggtttttgactgaacatgtgccaggcctgggaaatatgagttaactccatggtgactgttgggggccacacgtccccctctgtccagggcatctggggagctgagtcgaattcctgaggggcaggagcaaagattttctgaatcttctttttggacatctttttaatatttttttccacacgcaaaataaataaataaacagacatttctgcct

SEQ ID NO: 427142 - DNA, 691 bp, Homo sapiens
aaaaaggtagtgaaagaactacctgttttcccattagggcacagtcccttcccattaggtcccctcaatccagaagaggccatgaggggaggtgactgagaaaggatgtttatttctgcagcttgcatgcatggagaacctggaagaatttataaatccatcatttcaagtcattaggcgatatgttggtcagtccaggagactctgttctcattaattcaggggagatttacttgtgtcaccctcattagtatttatgggatttatccacatcaatcggtagtgcattaacagggaaataactaaacctcctagggtttgttggcgctaataaaatgagctggaagttccagaaatcaccatgatcagaagtattctaaatcagggctgtaattgatcctttcaaagtaccctcaggatgtttttctgttcgcttcacttccartggcatttgcatattagcatggtgtctacagccttagagggcagtccatttcttaccatgaaacgatgtgggagaacccaatggagtgttgaaaattcatcgtcagaccagggcatctatgtaaacaaagggttaattttcttataattctttttgtttggtcctggcttataaaaaaaaaagccctgcatgtaaatatatcttttatgtattctgaacataaagatagctctgtcctaccatatt

SEQ ID NO: 427143 - DNA, 691 bp, Homo sapiens
aaaaaggtagtgaaagaactacctgttttcccattagggcacagtcccttcccattaggtcccctcaatccagaagaggccatgaggggaggtgactgagaaaggatgtttatttctgcagcttgcatgcatggagaacctggaagaatttataaatccatcatttcaagtcattaggcgatatgttggtcagtccaggagactctgttctcattaattcaggggagatttacttgtgtcaccctcattagtatttatgggatttatccacatcaatcggtagtgcattaacagggaaataactaaacctcctagggtttgttggcgctaataaaatgagctggaagttccagaaatcaccatgatcagaagtattctaaatcagggctgtaattgatcctttcaaagtaccctcaggatgtttttctgttcgcttcacttccagtggcatttgcatattagcatggtgtctacagccttagagggcagtccatttcttaccatgaaacgatgtgggagaacccaatggagtgttgaaaattcatcgtcasaccagggcatctatgtaaacaaagggttaattttcttataattctttttgtttggtcctggcttataaaaaaaaaagccctgcatgtaaatatatcttttatgtattctgaacataaagatagctctgtcctaccatatt

SEQ ID NO: 427144 - DNA, 600 bp, Homo sapiens
tacttccctgctgctgacacccaggtaaacttcccctaagggaggcaacgtggctgtgaactccacaaggctttcatattctcttctcatcaacctcagtcaaaaaagagagatttcctctyaccagcagttccacaagatcccagactgggtcttccagtccctgattgggccacatacccaccaacctcagcagtctgtgagagatgacaccctggttggccagtcagtttctgtgcctgcctggagcctaggtggagttggctccacagaactcagagatggagggaggtgggaggagtttccctggggcacatcagggtacttgtacaggaggatgtgaatgcacactgggcaggaaaagacccgccaaaggaagatgcgatgaagcgaaaaggggtcctggagaagagctgttgatgtgatggttcaatgaagatggagaaacaaggaaaatcaaacctgtgcattgctttgggtggccagactggatgataaagccaacatggtagaaaggctcttgtatcaacaggagttggtcaagatgttttctagacagcattttaaattcagagcatcccttttattgtaggctttaga

SEQ ID NO: 427145 - DNA, 600 bp, Homo sapiens
tacttccctgctgctgacacccaggtaaacttcccctaagggaggcaacgtggctgtgaactccacaaggctttcatattctcttctcatcaacctcagtcaaaaaagagagatttcctctcaccagcagttccacaagatcccagactgggtcttccagtccctgattgggccacatacccaccaacctcagcagtctgtgagagatgacaccctggttggccagtcagtttctgtgcctgcctggagcctaggtggagttggctccacagaactcagagatggagggaggtgggaggagtttccctggggcacatcagggtacttgtacaggaggatgtgaatgcacactgggcaggaaaagacccgccaaaggaagatgygatgaagcgaaaaggggtcctggagaagagctgttgatgtgatggttcaatgaagatggagaaacaaggaaaatcaaacctgtgcattgctttgggtggccagactggatgataaagccaacatggtagaaaggctcttgtatcaacaggagttggtcaagatgttttctagacagcattttaaattcagagcatcccttttattgtaggctttaga

SEQ ID NO: 427146 - DNA, 600 bp, Homo sapiens
tacttccctgctgctgacacccaggtaaacttcccctaagggaggcaacgtggctgtgaactccacaaggctttcatattctcttctcatcaacctcagtcaaaaaagagagatttcctctcaccagcagttccacaagatcccagactgggtcttccagtccctgattgggccacatacccaccaacctcagcagtctgtgagagatgacaccctggttggccagtcagtttctgtgcctgcctggagcctaggtggagttggctccacagaactcagagatggagggaggtgggaggagtttccctggggcacatcagggtacttgtacaggaggatgtgaatgcacactgggcaggaaaagacccgccaaaggaagatgcgatgaagcraaaaggggtcctggagaagagctgttgatgtgatggttcaatgaagatggagaaacaaggaaaatcaaacctgtgcattgctttgggtggccagactggatgataaagccaacatggtagaaaggctcttgtatcaacaggagttggtcaagatgttttctagacagcattttaaattcagagcatcccttttattgtaggctttaga

SEQ ID NO: 427147 - DNA, 600 bp, Homo sapiens
tacttccctgctgctgacacccaggtaaacttcccctaagggaggcaacgtggctgtgaactccacaaggctttcatattctcttctcatcaacctcagtcaaaaaagagagatttcctctcaccagcagttccacaagatcccagactgggtcttccagtccctgattgggccacatacccaccaacctcagcagtctgtgagagatgacaccctggttggccagtcagtttctgtgcctgcctggagcctaggtggagttggctccacagaactcagagatggagggaggtgggaggagtttccctggggcacatcagggtacttgtacaggaggatgtgaatgcacactgggcaggaaaagacccgccaaaggaagatgcgatgaagcgaaaaggggtcctggagaagagctgttgatgtgatggttcaatgaagatggagaaacaaggaaaatcaaacctgtgcattgctttgggtggccagactggatgayaaagccaacatggtagaaaggctcttgtatcaacaggagttggtcaagatgttttctagacagcattttaaattcagagcatcccttttattgtaggctttaga

SEQ ID NO: 427148 - DNA, 411 bp, Homo sapiens
agttgaacttccctggacctcagcctcctcctccataaagtgaaggtgatatctcacaaaattgtcaagatggtaaacagtgtagacttagaattgtaataaataatctacagatctctgtatatgaggcctaaagagagaactcgggtatggcaagcatctcagagcaggattggaaaawacatatacatatgtatgtacatatacacacatatagagatacatgtatttttggtgtgtgtgcataattgctggctgtcgagtggaagatagggaatatagaatgggtatgaaatgaccttaatatggacattttaaaaaatacggtctcagaatacaataaaatgcattgagtacctcttacccaccagggctcttctgcccgtggaatctgttattgggttaatgttc

SEQ ID NO: 427149 - DNA, 617 bp, Homo sapiens
tattcctaattttacctgagttaactatagccagataacacaggtcttggactcaggtccaaattcattcatccaccaggcttatcctttgtctgcctattggcttttaaatattcaggttacagggtataatcttaacatttaggttaactgtcaaataaaaataaaaataaaaataaaaatgaaaattaataaggtggaaaaaaagaagagagtgtctttatttacaacttttattggagctggtggaagggctccctctcagcccttgtgattcctgtctagaaaatgggctcttctctgcatggtgcagtcagcaaactactggtctcctcctgggctgggtgtgggttgctgcmctgcctgggtcacatagaaggaagctcaggaaattctttgatccaaagctacttttctgtcctaggaaaggggtcccagaaggatttcacttctccccaagatagcaatgagaattgctctcattgctgctgatgatgatggaggaggaggaggaggatactatgttagcatttgagtagaatcatcataacctggcaggcattgttctaagtaattaacataattcttcaatagacttgaagttgctgttattgtta

SEQ ID NO: 427150 - DNA, 573 bp, Homo sapiens
ataacctggcaggcattgttctaagtaattaacataattcttcaatagacttgaagttgctgttattgttatccccattttgcagttaaacaatagcttggcccgcttggtggctcacatctgtaatcccagcactttgggaggctgaggctggcagatcacttgaggtcagcagttcaagaccagcctggccaatgtggcaaaactccatctctactaaaaatacaaaacttagccaggcgtgatggtgggtgcctgtaatcccagctacttgrgaggctgaggcaggagagtctcttgaacccaggaggcagaggttccagcaagctgagatcatgccactgcactccagcctgggtgacagagcgagacttcatctcaaaaaaaaaaaaagaaaccatgactcatttattccctcagggtcatattattggtacgtggtggagctggcctgagaatagagtctgtgcttggtgactggaagagtgtcttaggagaggaacacttccctttccctgtcagtctccagatgcttactctcctcttcttggagattgttttctttttgatcaa

SEQ ID NO: 427151 - DNA, 537 bp, Homo sapiens
agggcttttctctggcttcatctacctgcctgctccacaggccccaatccctcacctaaacccctaaggcctatctattctttgtctgtcatgaacagttctccaaatctttattcaccctaagttatagatgaatgacagaagatgaatgtgtttcttgtcccagcaatatttgtattttcattgtagtcgaagaagtgaagatggaawttcaggtgcaactgaccaggtgctgcttcccactctatggtctttatatatccaagctaacctgagatgcaaagctaggaattcacttaaactgtctgccattccatctgtttggacttgtctacaagccaatcaggaagacatatgaaaggtgaacagaggcagcattttagctccttctgcaccctaggattgtacagtgccacagtctccagtagcatgctctgaacatgatcactgtatcactcttccagatggaaggtgatcctgcaatcagtgggctttgcttagcacagtgtaggctacagtcagaaacctgactctgcg

SEQ ID NO: 427152 - DNA, 537 bp, Homo sapiens
agggcttttctctggcttcatctacctgcctgctccacaggccccaatccctcacctaaacccctaaggcctatctattctttgtctgtcatgaacagttctccaaatctttattcaccctaagttatagatgaatgacagaagatgaatgtgtttcttgtcccagcaatatttgtattttcattgtagtcgaagaagtgaagatggaatttcaggtgcaactgaccaggtgctgcttcccactctatggtctttatatatccaagctaacctgagatgcaaagctaggaattcacttaaactgtctgccattccatctgtttggacttgtctacaagccaatcaggaagacatatgaaaggtgaacagaggcagcattttagctccttctgcaccctaggattgtacagtgccacagtctccagtagcatgctctgaacatgatcactgtatcrctcttccagatggaaggtgatcctgcaatcagtgggctttgcttagcacagtgtaggctacagtcagaaacctgactctgcg

SEQ ID NO: 427153 - DNA, 629 bp, Homo sapiens
aggtttgaaggcatgaacaatgagagaacatattgtctcatgagaaatgacacagaaatattttaaagttgggtctttctaaaagtaaaataacagctttaaaaaaaattgtttttttaaccccgcctggaagaggatcattttggtggttgttgttgttcaacatgattgaatatgattgggtattattacttgctgatgggacttaattttctcttgtttaaatgtgatccattatcttgtgtctagaacatattaaaatgacttcaaaatgagaaacaagggaaccttggttacttcagcacaaacatccttgtttattgagctgacatgaagggtgctgggatattttaatattacgataatatagatgcttaaatctcagggttaaagaactagattagtcctctgtgatgctgggctactcagaccataaaggtaactcrgtgtttactgttatgtttttctattcttatcctgttgtgtcttgcctcctggcttctctctttttctttttttcctcttctttccttccaactcaaaactcatcaacttgcaatacccctgataaaactcatttatactgcttaccaaattttctggcttcagccagctgttcagtttttttt

SEQ ID NO: 427154 - DNA, 502 bp, Homo sapiens
tgtctctcttcactttgttgattatttcctttgctgtgcagaaggttttagcttgacataattccacttgtcttttacttttttgcattgtttttgtttttgttgtttttgttttgttgtctcagccaagaagtctttacccagaccaatgtgttgaaggattttcaaagtttcaggtgttgcatttacgtcyttaatccattttgagttgatctttgtatgcgataagagatggggtgtagtttcattcttctgcatacggacatttcgttttctgacatcgtttattgaagatgctctcctttcatcatttacggaagatgctctcctttccctgtggtatgttcttgttgcctttgctgaaaactggttggctgtgtatgttcagatttatttctctgttctctgttcattccattgttctatgtgtctgtttttatgccagtatcatgctgttctgactactatagtttatagtagattttgaagtcaggtagcgtga

SEQ ID NO: 427155 - DNA, 599 bp, Homo sapiens
cagcagtgaagctgtcagatcttggacttttctttgatgggagagtttttactgctgattcaatcttgttacttgtattgatgtgttcaggctttctatttcttcatggtttagtcttggtaggttgtacatgttcagaaatttatccgtttctttgagattttccaatttgttggcatgtaattgcttataatagtcttaaataagtttcataattctgtgatataaattgtatctyattcatttttgattttatttaactgggtcttctctctttttttattagtctagttaaaggattgtcaattttgcttatcttattgaaaaacaaacttttcattttattgatctatcttatttgtgttttttaaggtgtaaattttatttgtttctactctgacctttgttgtttctttttttaatactaattttgcattttgtttttgtttttatctagttccttgaggtgcatcattagattctttatttgatgtctttctacttttttattagaaacagtctcattctctcactcaggctggattacagtggaatgatcatagctcattccaccctggaactcctgggattaagtgatt

SEQ ID NO: 427156 - DNA, 599 bp, Homo sapiens
cagcagtgaagctgtcagatcttggacttttctttgatgggagagtttttactgctgattcaatcttgttacttgtattgatgtgttcaggctttctatttcttcatggtttagtcttggtaggttgtacatgttcagaaatttatccgtttctttgagattttccaatttgttggcatgtaattgcttataatagtcttaaataagtttcataattctgtgatataaattgtatctcattcatttttgattttatttaactgggtcttctctctttttttattagtctagttaaaggattgtcrattttgcttatcttattgaaaaacaaacttttcattttattgatctatcttatttgtgttttttaaggtgtaaattttatttgtttctactctgacctttgttgtttctttttttaatactaattttgcattttgtttttgtttttatctagttccttgaggtgcatcattagattctttatttgatgtctttctacttttttattagaaacagtctcattctctcactcaggctggattacagtggaatgatcatagctcattccaccctggaactcctgggattaagtgatt

SEQ ID NO: 427157 - DNA, 599 bp, Homo sapiens
cagcagtgaagctgtcagatcttggacttttctttgatgggagagtttttactgctgattcaatcttgttacttgtattgatgtgttcaggctttctatttcttcatggtttagtcttggtaggttgtacatgttcagaaatttatccgtttctttgagattttccaatttgttggcatgtaattgcttataatagtcttaaataagtttcataattctgtgatataaattgtatctcattcatttttgattttatttaactgggtcttctctctttttttattagtctagttaaaggattgtcaattttgcttatcttattgaaaaacaaacttttcattttattgatctatcttatttgtgttttttaargtgtaaattttatttgtttctactctgacctttgttgtttctttttttaatactaattttgcattttgtttttgtttttatctagttccttgaggtgcatcattagattctttatttgatgtctttctacttttttattagaaacagtctcattctctcactcaggctggattacagtggaatgatcatagctcattccaccctggaactcctgggattaagtgatt

SEQ ID NO: 427158 - DNA, 599 bp, Homo sapiens
cagcagtgaagctgtcagatcttggacttttctttgatgggagagtttttactgctgattcaatcttgttacttgtattgatgtgttcaggctttctatttcttcatggtttagtcttggtaggttgtacatgttcagaaatttatccgtttctttgagattttccaatttgttggcatgtaattgcttataatagtcttaaataagtttcataattctgtgatataaattgtatctcattcatttttgattttatttaactgggtcttctctctttttttattagtctagttaaaggattgtcaattttgcttatcttattgaaaaacaaacttttcattttattgatctatcttatttgtgttttttaaggtstaaattttatttgtttctactctgacctttgttgtttctttttttaatactaattttgcattttgtttttgtttttatctagttccttgaggtgcatcattagattctttatttgatgtctttctacttttttattagaaacagtctcattctctcactcaggctggattacagtggaatgatcatagctcattccaccctggaactcctgggattaagtgatt

SEQ ID NO: 427159 - DNA, 583 bp, Homo sapiens
ccttgtcgttgttttgaggccaggtgaagactctacataagcacctgaattttgtggaaaatccaactaggaattcaagccttttcacagatggtgctctctctgacactrtggcaccagcagggctctttaacatggtgtcctcatggttcagagcactgagtatccaccaagatccatacaccattggctgtgatcagtgcccctctctttgttctcaatttatcccagatgtttcagctcttctggtactcccaatgattcccatgggacagaaccagagtgggcttccagtgaagattcccaagccacttcggaaatcaaatgtcaaccactatttccctcatctcattttggcaactgtgggtcctgggaacttttctgtaagtggtataatgccaccttggggaagggatcacgcagtctgaaatgaacatttcccttactggccatggcttcttttaattctgtgggccacgggccccctggaattctggtatattcagactggtattcttgtctctgaattgtttctagttgtattcttgtaaagggagtgatgctggaggatcttcaattccac

SEQ ID NO: 427160 - DNA, 569 bp, Homo sapiens
gtgcagatctttaactccatcttccttccaattaaatgataaaactaactttatagttgggttagtaacattacaaccttgggaagataaaaatgtaaatayaattgtagaaaggtatataaaatttataatataattatttccatgtaagagtcaggatagtatgtgtgtatttgtgcataatgaggcaaaattaaacacatctggcacattagtccactgagatattagacttgtaattcctgtaaaataggaaaatggttttcttatttgatattaaagaaggtaagaaaatgtgaataattttgtaaataatattagaatatttagactttagtgtgctgtttagtttatttaaaaggcttgcataaatgtttaggtaatatattcttgtaaggatcatatgttagatctgtttagtacttgaaggatttaaaaagaaaatttgaatcattaaattagtcaatgcaatgttaaatactatctactaatttaattattcaaggccaaacattatactacttattaaatctcttcaactttaataaaacattaattaatgatcagcc

SEQ ID NO: 427161 - DNA, 569 bp, Homo sapiens
gtgcagatctttaactccatcttccttccaattaaatgataaaactaactttatagttgggttagtaacattacaaccttgggaagataaaaatgtaaatataattgtagaaaggtatataaaatttataatataattatttccatgtaagagtcaggatartatgtgtgtatttgtgcataatgaggcaaaattaaacacatctggcacattagtccactgagatattagacttgtaattcctgtaaaataggaaaatggttttcttatttgatattaaagaaggtaagaaaatgtgaataattttgtaaataatattagaatatttagactttagtgtgctgtttagtttatttaaaaggcttgcataaatgtttaggtaatatattcttgtaaggatcatatgttagatctgtttagtacttgaaggatttaaaaagaaaatttgaatcattaaattagtcaatgcaatgttaaatactatctactaatttaattattcaaggccaaacattatactacttattaaatctcttcaactttaataaaacattaattaatgatcagcc

SEQ ID NO: 427162 - DNA, 650 bp, Homo sapiens
tatatatatatatatatatatattctttctataaagtctcaaataaaaatcctatgaatgaaaaaaggtagctacaaattagctgcaactaacatattactttattttgaaagcatatatgttttgctcctagtgtctgaaatagaaaagacctgggagctctatgtttgtctgttgggatacttttaagtctgatattgactagttggtgacttataatatgctgtttaaagtttgaaactccttggaggcattcaggactatttggctacatttttgaagaaatgtatgaactgatgacttttacctggtatatcttatcacgtagcctggcttgactattagatagaattaaagagtatagggttattaaaraaattgctggaagtttttgcctgggttttttctaaaacccaactttctctcacacagtcaattattcataatccaaatataaagcacatcctgttcaacaaagaaaggaccctgaggagctgtgcctagatgtgtcaataatcacattaaatgtaaatggtctaaacatcccaattaaaaggtggagactgtcagactgaataaaaattcaacagccatctctatgatgctgtctaattgaagcccatattaaatgtgcaaacataaagatgtta

SEQ ID NO: 427163 - DNA, 672 bp, Homo sapiens
agtgctcaaatgattttaattgtccaatatctccaaagagggcctgaggttggactgaagaatgcaaaaggaaaaacaaatggaccaaaattgtagctgttataatttgttttgaagckcattacatacacccagtgaaaatgcctaaataatagggggtgcactgtatagaagaattttgcactttcattctcagaacctacagatagcaagtaagaacaagagccatagaaatacagtaacagttgactcttgaacaacacagggaatggactgctaataccctgcacaataaaaaatccttgtataaattttgacccccccccaaaaaaaaaagtaattactaataggtcactcttgaccagatgtcttaccgataacatagcattttattaacacacatgttgtatgttatatgtattatatactgtattctcacaataaactacaaaaaaaaaaggtattaagaaaattataagggggcagggcacggtggctcacgcctgtaatcccagcactttgggagggcgaggcgggcggatcgtgaggtcaggagttcgagaccaacctagcctacatggtgaaaacccgtctctactaaaaatacaaaaattagccgggcatggtgtcagatgcctgtaatcccagctactccggaggctcaggcaggag

SEQ ID NO: 427164 - DNA, 672 bp, Homo sapiens
agtgctcaaatgattttaattgtccaatatctccaaagagggcctgaggttggactgaagaatgcaaaaggaaaaacaaatggaccaaaattgtagctgttataatttgttttgaagctcattacatacacccagtgaaaatgcctaaataatagggggtgcactgtatagaagaattttgcactttcattctcagaacctacagatagcaagtaagaacaagagccatagaaatacagtaacagttgactcttgaacaacacagggaatggactgctaataccctgcacaataaaaaatccttgtataaattttgacccccccccaaaaaaaaaagtaattactaataggtcactcttgaccagatgtcttaccgataacatagcattttattaacacacatgttgtatgttatatgtattatatactgtattctcacaataaactacaaaaaaaaaaggtattaagaaaattataagggggcagggcacggtggctcacgcctgtaatcccagcactttgggaggscgaggcgggcggatcgtgaggtcaggagttcgagaccaacctagcctacatggtgaaaacccgtctctactaaaaatacaaaaattagccgggcatggtgtcagatgcctgtaatcccagctactccggaggctcaggcaggag

SEQ ID NO: 427165 - DNA, 452 bp, Homo sapiens
tgcatatttgtttcagtgtctaggtgttaaagagttaggcatttactgtagtctttgcagtctgagctgtttgtacttatccttctttgaaggctttccaggtatttgaagggacttgggtgttgtgatctaaatttttggtcactgcagctgtatagggagcacctaaagcccaataactccatatttctcgcagacttgtagaggtaataccttggtagtcttgaataagatctggaagaattctctggattgccaggcagagactcttgttctcttctcttactatctcccaaacaaatggagtgtctctctctttctctctctctctctctgtctctctgtctctstgtgtgtgtgtgtgtgtgtgtgtgtgtgtgtgtgtgtgtgtgtactgagctgcctggagccagaaaagggatgaaataagtacccctatggccaccaccact

SEQ ID NO: 427166 - DNA, 583 bp, Homo sapiens
ttgcatatttgtttcagtgtctaggtgttaaagagttaggcatttactgtagtctttgcagtctgagctgtttgtacttatccttctttgaaggctttccaggtatttgaagggacttgggtgttgtgatctaaatttttggtcactgcagctgtatagggagcacctaaagcccaataactccatatttctcgcagacttgtagaggtaataccttggtagtcttgaataagatctggaagaattctctggattgccaggcagagactcttgttctcttctcttactatctcccaaacaaatggagtgtctctctctttctctctctctctctctgtctctctgtctctctstgtgtgtgtgtgtgtgtgtgtgtgtgtgtgtgtgtgtgtgtactgagctgcctggagccagaaaagggatgaaataagtacccctatggccaccaccactggaactgcacagggtctgaccggaaatcagcacatcactaggtcttgcccaaggccagctgtaaccagtacctggctaccatctatgtttgctcaaggtcctagggctcaacaatcagcaggtggtgaca

SEQ ID NO: 427167 - DNA, 575 bp, Homo sapiens
ctaagacgatctagtcacatcctttgccatttgatggacatgatgagtccatttacgcaccaaattctcagaattcatgtcattatacaaaaaaaggaaaatagataataagatggtcatatgagtcagggatgcataaatgatgagtttttgttgttttagtaagtgactgaattacccttttgtgagaataaaaaacatcaacaattttgccataattttctttgaaaaatttggwgttttgaaaataataatctttttaatcactgttgaattacaaagacaattttgcacatggtgttgtcatattaaaacggaataaaatgataattatttccaattacttcatgattaacacaataatgtagaaggaactggcaataatatagcaataatttaatttttatttaaattcttataattttttatattaacaccacactttcttcatttaatcttgttttaggttctcatttgagcttggaaatcagtgggctcagtcaaatcattgcatataaatataataatagaaagtattttaatgtaaatatgcacactctgtctgtatgacctat

SEQ ID NO: 427168 - DNA, 575 bp, Homo sapiens
ctaagacgatctagtcacatcctttgccatttgatggacatgatgagtccatttacgcaccaaattctcagaattcatgtcattatacaaaaaaaggaaaatagataataagatggtcatatgagtcagggatgcataaatgatgagtttttgttgttttagtaagtgactgaattacccttttgtgagaataaaaaacatcaacaattttgccataattttctttgaaaaatttggagttttgaaaataataatctttttaatcactgttgaattrcaaagacaattttgcacatggtgttgtcatattaaaacggaataaaatgataattatttccaattacttcatgattaacacaataatgtagaaggaactggcaataatatagcaataatttaatttttatttaaattcttataattttttatattaacaccacactttcttcatttaatcttgttttaggttctcatttgagcttggaaatcagtgggctcagtcaaatcattgcatataaatataataatagaaagtattttaatgtaaatatgcacactctgtctgtatgacctat

SEQ ID NO: 427169 - DNA, 575 bp, Homo sapiens
ctaagacgatctagtcacatcctttgccatttgatggacatgatgagtccatttacgcaccaaattctcagaattcatgtcattatacaaaaaaaggaaaatagataataagatggtcatatgagtcagggatgcataaatgatgagtttttgttgttttagtaagtgactgaattacccttttgtgagaataaaaaacatcaacaattttgccataattttctttgaaaaatttggagttttgaaaataataatctttttaatcactgttgaattacaaagacaattttgcacatggtgttgtcatattaaaacggaataaaatgataattatttccaattacttcatgattaacacaataatgtagaaggaactggcaataatatagcaataatttaatttttatttaaattcttataattttttatattaacaccacactttcttcatttaatcttgttttargttctcatttgagcttggaaatcagtgggctcagtcaaatcattgcatataaatataataatagaaagtattttaatgtaaatatgcacactctgtctgtatgacctat

SEQ ID NO: 427170 - DNA, 626 bp, Homo sapiens
tatattttaagcttttcaaaattattactattgcaatgctctacttatgtgtattcatttctatgtgctgcattttaaaaaatccccaaacttagtggcttaaaacaacaataatgcattatttctcaagatttgagaatgtgtttcctctgttgttcttgcctggagacactcatatggctgcagtcatttgaaggccttgactgggactggaggtgacaggtctctggcctcagctaaaataattggaatgactgtgatagttggacctcatgttccacatggactttcatcacaagcattatccastaaagatgctagcttctgcctctttccatcaaatactatgacttttcagtaaagcatcttgtgttaggcctgtaaccactatttgtcaaaggagtcattagtcagaaaaaagggcagcatgacacagaagagagcaaggacaagcgtgactgggcaggtacctctgcatttgtcccttactacatctgaccacaaacttcagggaacagtaggctctgctccacttttgctttccaagtgacgtgaatgttttcatccagccaactcaaacctggaaccactctgggaagagaactctaggaaacatagatcccagc

SEQ ID NO: 427171 - DNA, 626 bp, Homo sapiens
tatattttaagcttttcaaaattattactattgcaatgctctacttatgtgtattcatttctatgtgctgcattttaaaaaatccccaaacttagtggcttaaaacaacaataatgcattatttctcaagatttgagaatgtgtttcctctgttgttcttgcctggagacactcatatggctgcagtcatttgaaggccttgactgggactggaggtgacaggtctctggcctcagctaaaataattggaatgactgtgatagttggacctcatgttccacatggactttcatcacaagcattatccactaaagatgctagcttctgcctctttccatcaaatactatgacttttcagtaaagcatcttgtgttaggcctgtaaccactatttgtcaaaggagtcattagtcagaaaaaagggcagcatgacacagaagagagcaaggacaagcgtgactgggcagktacctctgcatttgtcccttactacatctgaccacaaacttcagggaacagtaggctctgctccacttttgctttccaagtgacgtgaatgttttcatccagccaactcaaacctggaaccactctgggaagagaactctaggaaacatagatcccagc

SEQ ID NO: 427172 - DNA, 626 bp, Homo sapiens
tatattttaagcttttcaaaattattactattgcaatgctctacttatgtgtattcatttctatgtgctgcattttaaaaaatccccaaacttagtggcttaaaacaacaataatgcattatttctcaagatttgagaatgtgtttcctctgttgttcttgcctggagacactcatatggctgcagtcatttgaaggccttgactgggactggaggtgacaggtctctggcctcagctaaaataattggaatgactgtgatagttggacctcatgttccacatggactttcatcacaagcattatccactaaagatgctagcttctgcctctttccatcaaatactatgacttttcagtaaagcatcttgtgttaggcctgtaaccactatttgtcaaaggagtcattagtcagaaaaaagggcagcatgacacagaagagagcaaggacaagcgtgactgggcaggyacctctgcatttgtcccttactacatctgaccacaaacttcagggaacagtaggctctgctccacttttgctttccaagtgacgtgaatgttttcatccagccaactcaaacctggaaccactctgggaagagaactctaggaaacatagatcccagc

SEQ ID NO: 427173 - DNA, 535 bp, Homo sapiens
tttttcttcaaatttgtttgtatttgccaaactctttcatagatatgtttataattagaaaacaacaaaataaagtcatttcactttggaaataactcagaatagttgttcagagaatcttagtttcctttcccctccttataggagtttaaattgttgattaggatatggtattctggatgtccagaataactttttttaatatttgaagagaatatgataggaaagaagtaaaatggtgttaagyactaagcattcaccattgttttggcaaaatatttcaaaataaccaagtgtggtgtaaacattttgataaaagctaaaagactagtaagtgaaaggaataaaaagcaaaaagaaacataaaaacatgtataatttattgatccattactatgtgcctgaagtttcgttatattagttccatttgacaatactctgaagtctataccatcattattcccatattgtagaagaggaaacttctgacacaaagatatatagtcagtttcctgtaatctagttgttgattaag

SEQ ID NO: 427174 - DNA, 582 bp, Homo sapiens
atattctgttcctgttgacctcatgtgactgataacgttatgcataaaatgcaatattttgtcacaaaataaatgtatttttaaaactttattatttatacaggtaagagaaatttgcaaattaaatgagtaatatttcaatttccaaattcagatacatttaaattctaaacattagatgataaataaataaataagttactttgttttcttgtgactataatttaacttttttacttagctatgtgacctttgaaawtggtaactaaaattacctagaatcaatttttttcatttataatatgacgtatcagtatgccagtcaagggttgttttgaaaattcaatgaataatatatgtaagctacttaactcctgaaatttttcagcaagtggtaattatgattagcagtagtaatagtatcatgtggtcttcctataacaaaagtgctctgaattgacaacaggggactgaggtttacatcaatcatggctctgcttgccccttaccaatattaacttggataagccactttaattggagcgtgaatacctcatgcataaaatagttcagtttgccaag

SEQ ID NO: 427175 - DNA, 544 bp, Homo sapiens
aaaaattaaagacatcttgattcagtctcttcattcactggcaaacttttacatttagtaattcataccrgctacccacatttctcacagtccctgtttcttaatgctctgtaattcaactctcaataatctattctaacagctgctatgaaggctccattgatctcccacttactaaaactaaaagcttttcttccctcattcatcctggcctctatgcagcatttggcacatttagcttttttgaaaatttctcttcgttgggtttccatgggacgaggccactacaatatattacctttcctcgtatatcatcagtcacctccactcttacttcatttgtcccttaccctccttaaatatgaatgtgctacaagtctgttttattcatgtcttagtctacatctcttcttcagggatcaccacaaatttttcagcttcacctttatcttgttcatatgacatattgctgcaaagaaacatacacatatccacatttatacgtgcatgtacatatattcccacattttcctgtagatatgcc

SEQ ID NO: 427176 - DNA, 544 bp, Homo sapiens
aaaaattaaagacatcttgattcagtctcttcattcactggcaaacttttacatttagtaattcataccagctacccacatttctcayagtccctgtttcttaatgctctgtaattcaactctcaataatctattctaacagctgctatgaaggctccattgatctcccacttactaaaactaaaagcttttcttccctcattcatcctggcctctatgcagcatttggcacatttagcttttttgaaaatttctcttcgttgggtttccatgggacgaggccactacaatatattacctttcctcgtatatcatcagtcacctccactcttacttcatttgtcccttaccctccttaaatatgaatgtgctacaagtctgttttattcatgtcttagtctacatctcttcttcagggatcaccacaaatttttcagcttcacctttatcttgttcatatgacatattgctgcaaagaaacatacacatatccacatttatacgtgcatgtacatatattcccacattttcctgtagatatgcc

SEQ ID NO: 427177 - DNA, 643 bp, Homo sapiens
catatatgtgtatatatatacacatatatatgtatatatgtgtatatatgtgcgtatatatatacacacatatatattctctcacatatatcttctgtaatttttaaatagaaattttgggccaggtacagttgctcagacctgtaattccagggaggctgaggtgggcggatcacttgaggccaagaattcgagaccagagtgcccaatatggtgaaatcccatctttactaaaattacaaaaaattaggagggcgtggcaagcacgctggttatctcagctactcgggaggtgaaggcacgagaattgcttgagcctgggaggcggaggttgcagtgagccgaggttacacctctgcactccagcctgggcaacacagcaagactctgtctcaaaaatattaaataaataaataaataaatgaaattcctaagatacactaatrtaacttgtcatatgtatgatttttcttcctgttctcataggacaattttaaggagaatattgtttcctggttggtgtttccaaagatgaatttccactttcataccatgcccaggcttcttctcaatactgtacccactcctcccaaatagcagataattgattttctgactggggagtgagaggctgacacccatt

SEQ ID NO: 427178 - DNA, 560 bp, Homo sapiens
ttcctcacattaaaattctatcaccaggagtcagcacagcttgactcagcaagctaaggggctggttctgggcaagatgcagtgacagcaggcttcatgtgtgacaaccccggtcaatttgacagcaataagacaccctccttagaaccagttgcagctcttgttgacccaagtgggaaggttatccttctgagcgattctctttccttcccatgagaaagaaaggccaggggttacaagacaaaggttatgaatattttatagttaaataamcacaacagtgaagaataattaatacactccagaatctaggtttacatactaattgtgaaggataaccatttgttgacattaagagcaactctttaaaatgacagcccaagaaattatacccacagtgtaggcaataggctattggcaattctgtgtagaatccttgtacgaaaactgattttgaagtccacccagggagtcttcctcaatttataaatgaggttgaaaggtaaagtgttttcccagtggtcgcactattaatcaccaccaaagcaacttgttttccc

SEQ ID NO: 427179 - DNA, 555 bp, Homo sapiens
ctgttaagtctcctatttctatctcaagactgctgagagaaatcaaatattatttatattcaagtgtattaattcaataaaagtatataaaatatgagccattatcactattagcactggaaattgatcttagaatctggaatcctattaataattaatttgtttataaggttaaccttagaaattccaactaatataaaagcagacactattcatttttattgttgttaaaggaataacaaatagcttattcaactttttaaaacaatgttcttktctctcaatattttgattatgtttttgtaccaagttaatggaaagttttaactttatttcagtgtaatttcgaactatttaattgagaataaatatgttaaatgtaaaaccataataatttttggaaggcaaaaatgcactatgatgcatttaataacctgaaaaatatttcagatacctaaaatgcattccaggcatgaaaatatgtgcattaaaattttaaatcagttgccttgatgtccagggttaggtgggtacctcttttcatccttcactagg

SEQ ID NO: 427180 - DNA, 555 bp, Homo sapiens
ctgttaagtctcctatttctatctcaagactgctgagagaaatcaaatattatttatattcaagtgtattaattcaataaaagtatataaaatatgagccattatcactattagcactggaaattgatcttagaatctggaatcctattaataattaatttgtttataaggttaaccttagaaattccaactaatataaaagcagacactattcatttttattgttgttaaaggaataacaaatagcttattcaactttttaaaacaatgttcttgtctctcaatattttgattatgtttttgtaccaagttaatggaaagttttaactttatttcagtgtaattycgaactatttaattgagaataaatatgttaaatgtaaaaccataataatttttggaaggcaaaaatgcactatgatgcatttaataacctgaaaaatatttcagatacctaaaatgcattccaggcatgaaaatatgtgcattaaaattttaaatcagttgccttgatgtccagggttaggtgggtacctcttttcatccttcactagg

SEQ ID NO: 427181 - DNA, 560 bp, Homo sapiens
agcttattcaactttttaaaacaatgttcttgtctctcaatattttgattatgtttttgtaccaagttaatggaaagttttaactttatttcagtgtaatttcgaactatttaattgagaataaatatgttaaatgtaaaaccataataatttttggaaggcaaaaatgcactatgatgcatttaataacctgaaaaatatttcagatacctaaaatgcattccaggcatgaaaatatgtgcattaaaattttaaatcagttgccttgatgtccagggttaggtgggtacctcttttcatccttcactaggttctttggaccctcaaaatgggattacttatactttgtttattccataatgtatctacatggtaaatgttaatagtgcagagaatgttttacatttaacatcatttttctcaattaaatatattgggattacccttgattgtaggaagcacagattgccmtgtgtgttattcagctttctctaggctaaaatgcaggaacaaacaattctcaaatttcagtgagtttcaacaacaaaggcctgtttcta

SEQ ID NO: 427182 - DNA, 636 bp, Homo sapiens
attttttgcatggtattctaacttctccatatccctgccaacacttgttatttttctgttttgttttgttttgtttttatagtagccatccaaatgggtgtgaactgatatctcattgtggttttggtttgcatttatctgatgattagggatatctagcattttcacatatgcttattggacatttgcatatcatctttgaagaaatgtatattcaagtccttcactcatttttagagtaatttgattttttgttgttgttgagttatagtagttctttatatatgttagatattaacccctcagctgatacatgatttgcaaatattttctcctattckgtaggccacctttcactcaattgattgtgtcctttgatgaacaaaaagttttaaatttgacatagtcccttttgtctattttttcttttgttacctgtgcttttggtgttatgtatgaaaatcatgggcaaatctaatatcatgaagatttttttcatatgtcttctgggagttttacatttttggattttacatttaagcctttaatatatttgagttaatttttgtatatggtataaaataaggctccaaattcattattttgcatgtgcatatccagttttctgaataccat

SEQ ID NO: 427183 - DNA, 550 bp, Homo sapiens
aaagtatttggtttgttacaaggctcccttgccccacatttgacctgcattgcagagtctttagtaataaggcagtattttatcctagtttcctccatccctccctcctccttctaactcctgattttttttttctttttttctggagtagcagccacagagcatggggtgaaaagtcgctggaaggacaagttgacagatagcatttgggtcgctgggtcactgaaaggcgtcgtgatctgggctcagacagagcgatttcctcggtgattttaatctttcgtctgttcacacgtcatgccacctggacataatgcagagaaatctggaggcttaacaaacccttcccctagaccctaaagcttasttggacaaaaagaaagagagaaagaaagacagggaaagagagttaaccctctccctgccacccccatcaacagcagaaaaacctaggagtagaaagaccttgctggcaattaataagctcagggctttgtctgagcaacaagggccctgtctttatggagactgtaaataatataacaagtta

SEQ ID NO: 427184 - DNA, 561 bp, Homo sapiens
tggcttcaagaaaactggacaagagtgatgcactgttcatctaaaccatggccactgcttgtgaaacttcccagagcagtttcatcctggcagtggatgaatatggtcattatcaaacacacatatggcaaccacattttctgaacaccaaacagacayattggtctaacaataggacaaaatatttgatattggagaaatggtacccatgttactgatgctttttacaatattaactagtccatctttactatcttctccatgtctttcttaacaaattctggatggagaataactttccttgtatatatataatttttcttatcctgaagctttaacccttactcctctaccattaccctttgtctcactgccttacagacaccactgacctctgtgaaaggtgagtgtaagaaagtctaaatgcttcttcgtcaatactacaccattgctgcaaatataacaccaagtggtacacaatcaaaacaggaaaagagggcaagacacacaccaattccatcaaatttgcttcagcttccttaaaacattagataacaaaac

SEQ ID NO: 427185 - DNA, 561 bp, Homo sapiens
tggcttcaagaaaactggacaagagtgatgcactgttcatctaaaccatggccactgcttgtgaaacttcccagagcagtttcatcctggcagtggatgaatatggtcattatcaaacacacatatggcaaccacattttctgaacaccaaacagacacattggtctaacaataggacaaaatatttgatattggagaaatggtacccatgttactgatgctttttacaatattaactagtccatctttactatcttctccatgtctttcttaacaaattcyggatggagaataactttccttgtatatatataatttttcttatcctgaagctttaacccttactcctctaccattaccctttgtctcactgccttacagacaccactgacctctgtgaaaggtgagtgtaagaaagtctaaatgcttcttcgtcaatactacaccattgctgcaaatataacaccaagtggtacacaatcaaaacaggaaaagagggcaagacacacaccaattccatcaaatttgcttcagcttccttaaaacattagataacaaaac

SEQ ID NO: 427186 - DNA, 561 bp, Homo sapiens
tggcttcaagaaaactggacaagagtgatgcactgttcatctaaaccatggccactgcttgtgaaacttcccagagcagtttcatcctggcagtggatgaatatggtcattatcaaacacacatatggcaaccacattttctgaacaccaaacagacacattggtctaacaataggacaaaatatttgatattggagaaatggtacccatgttactgatgctttttacaatattaactagtccatctttactatcttctccatgtctttcttaacaaattctggatggagaataactttccttgtatatatataatttttcttatcctgaagctttaacccttactcctctaccattaccctttgtctcactgccttacagacaccactgacctctgtgaaaggtgagtgtaagaaagtctaaatgcttcttcgtcaatactacaccattgctgcaaatatracaccaagtggtacacaatcaaaacaggaaaagagggcaagacacacaccaattccatcaaatttgcttcagcttccttaaaacattagataacaaaac

SEQ ID NO: 427187 - DNA, 558 bp, Homo sapiens
aagtttatagcataattggaacaacctgggtatgaaaattattttttcaactgtaaatttcactaattctaaatataagccaagtatttctgataaaaagttagtgtctggatcaaatgtgctataagtgtaaaatatacacagtatttgaaagatagtacaaaaaaagttaaacatatcacaaatgattgtctatattgattaaacattgaaatactattctggatatattgggttaaacaaaatatattattcaaartaacttcatctggtatttttaaatgtggcttctgcaaattttgaaattataaatgtggctcacatattttcacaggataattttttctagataactatgaggtactattatgggctgacttatgctccctgcattcatatgttgaagtcctacccactaatacctcacaaggtgactgtatttggagatagaccttaaagaagtaacctaattacttctttaggttaaatatagagtctttaaaaaaactatgttaaaatgaggttgtataagtgggctccaaatccaccacgactggt

SEQ ID NO: 427188 - DNA, 571 bp, Homo sapiens
ccataatgtagaatcagtaggagccctgagcttgttttcctgcaactggacagtcccatctaggggtgaaggaaaacagtgatagatcatcaggcattaggctctcataaggagcacacaacctggatcccacacatgcgcagttcacaagagggatcacgttcctgtgagaatctamcaccaccactgagtcgacaggaggtggaactcaggcagtaatttgagcaatagggagtgtctgtaaatatagatgaagctttatttacccacctctcacctcctgctgtgtggcctggttcctaacgggccatggaccggtaccagtccctggtctggggcttagggatacctaatttaagccacccaatctgggatacacggttatggcagccctagcaactagcaccaagcaagtaccagaataatagctactaacttcatgttacttgttcaatgtctgtctctcccattataccataaggtctatgaaggaaggaattgtacctttcttaggcactctgtattcccagcacttggcatagctcctgttctgtagtaaatgttcaataaa

SEQ ID NO: 427189 - DNA, 633 bp, Homo sapiens
cataaagagctcaaacaactaaatagcaaaaaacaaataatttaaaaaatgtgcaaaaaatctgaatagacatttttcaaaagaatacatacaaatgccaacaggtacataaaaaattctcaacaccattattcagagaaatgcaaataaaactacattctcaccccagttagaatggcttatataaaaatacaggaaataacacatgctggcgaggatgtggagaaaggggaagtctcatacaatgttggtgggaatgtaaattagtacagccactatgaataatggtatggcatttcctcagaaaaccaaaaatagaactatatatgatctagcagttccactactgagtttatatccagaagaaaggaagtcaatatattgaaaagatatctgtattcccatgtttactgcagcactttttccagtagccaaaatatggaatcaacctaagcgtccattagcagatgaatggataaagaaaatgtgatacatatatacaatggaatgttattcagccataaaaaaatcctattatttgcagcaacatgggtggacttggaggtaattawgttaagtgaaataagacaggcacagaaagacaaatagcatatgttctcactcatatgggga

SEQ ID NO: 427190 - DNA, 676 bp, Homo sapiens
ataaagagctcaaacaactaaatagcaaaaaacaaataatttaaaaaatgtgcaaaaaatctgaatagacatttttcaaaagaatacatacaaatgccaacaggtacataaaaaattctcaacaccattattcagagaaatgcaaataaaactacattctcaccccagttagaatggcttatataaaaatacaggaaataacacatgctggcgaggatgtggagaaaggggaagtctcatacaatgttggtgggaatgtaaattagtacagccactatgaataatggtatggcatttcctcagaaaaccaaaaatagaactatatatgatctagcagttccactactgagtttatatccagaagaaaggaagtcaatatattgaaaagatatctgtattcccatgtttactgcagcactttttccagtagccaaaatatggaatcaacctaagcgtccattagcagatgaatggataaagaaaatgtgatacatatatacaatggaatgttattcagccataaaaaaatcctattatttgcagcaacatgggtggacttggaggtaattatgttaagtgaaataagacaggcacagaaagacaaatagcataygttctcactcatatggggagctaaaaaggtggatctcatgaagatagagagaagactggtagt

SEQ ID NO: 427191 - DNA, 562 bp, Homo sapiens
ttaggattagagagaagagtattattgaggaaaatgacaaatgggttaaaagtcaaaaatcaaatagctgattcttagaaaaaaactggtaagctcctagccagtctgatcaagaaaaggagggaaaacacaaaattacaaaatatcagaaatgaaaaagaagacattacaatagaccctacagagaatacaagcataagaaaattgtatgaaaaactccatgactttaaatacaaccacctagatgaaatggaaaaatttcttgaaagtcacattgtccaagctcacttaaaaaaaaataacctcaagagcgaaatcatgaatgaactcacattcacaattgccacaaaaagaataaaatacctaggaatacagctaacaagtaaagtgaaggacctcttcaagaagaactacaaaccactgctcaaagaaatcagaaatgacacaaacaaatggaaaaacattccacactcatggataggaagaatsaatatcgtggaaatggccaaacagcccaaagtaacttatagattcaatgctattcccatcaaactatcactga

SEQ ID NO: 427192 - DNA, 582 bp, Homo sapiens
tacacagtagataacgatcaatattaggttccttccctaatatttatcctgtctagcaaatgatattataaattttatttagatattattaatccctctctgggattgagcactgattatatggaaaataaattgactttttcgtttctaattaattcttgagtatgtacaagactcagagcaatcaataagagtgcatacacatgattattcaaggatgaaattcactccactccaaacactctgttgaatctcactcactgtaccttttcctgaatggctcacaagattctcagaytcaatatatccaaaactgaatccattcaccttttcataaaatttgctttatttcctaactttctgctttcatgaacagtagaaaatttggttagaatagaagttaccaacttttcttggttcatggcatgtgtcttgattttttcacaataccccagaccaaaagaaatacctaatagctccataagtgcttcgatacagaaaacttagtaagtatgtatgttctaacaacttagacataatacatttaaacacttaaaacataatacacgaccaggtgtggtg

SEQ ID NO: 427193 - DNA, 582 bp, Homo sapiens
tacacagtagataacgatcaatattaggttccttccctaatatttatcctgtctagcaaatgatattataaattttatttagatattattaatccctctctgggattgagcactgattatatggaaaataaattgactttttcgtttctaattaattcttgagtatgtacaagactcagagcaatcaataagagtgcatacacatgattattcaaggatgaaattcactccactccaaacactctgttgaatctcactcactgtaccttttcctgaatggctcacaagattctcagactcaatatatccaaaactgaatccattcaccttttcataaaatttgctttatttcctaactttctkctttcatgaacagtagaaaatttggttagaatagaagttaccaacttttcttggttcatggcatgtgtcttgattttttcacaataccccagaccaaaagaaatacctaatagctccataagtgcttcgatacagaaaacttagtaagtatgtatgttctaacaacttagacataatacatttaaacacttaaaacataatacacgaccaggtgtggtg

SEQ ID NO: 427194 - DNA, 536 bp, Homo sapiens
tctaacaacttagacataatacatttaaacacttaaaacataatacacgaccaggtgtggtggctcatgcctgtaatcccagcacttagggaggccgaggtgggtggatcacttgaggtcaggcgtttaagaccagcctggccaacatggcaaaaccgcatctctactaaaaatacaaaaattagccagatgtgatggcgcatgcctgtaatcccagctactyaggaagctgaggcatgataatcacttgaacccaggaggcaaaggttgcattgagctgagatcgcaccactgcactccagcctgggtgacccagtgagactccgtctcaaaaaaaaaaaaaaatacacaaattttttaagataatattttgtttcactcttaaccacaataatgggatataagaacctgttaggcattaggcactgcataacttctgatatcttgggatcatattggacaccatgaccgttatctgctgttccacattgatttttatgcagtacttgctttttatcacagcaaccacaaaaatc

SEQ ID NO: 427195 - DNA, 544 bp, Homo sapiens
ccctccccctactgcagccttccctgtgccacagccaccccgtcatagctttaccagtgcatgtgtgcatgggtggacctcacctccctttctctgctggtgcgtgggtktgcatgcaccccactgtgtcattgccgctggtatgaatgcacccaccaccctccaccactatgctgcaggattgccgttgccctgccccatgatgacactgctgcaggtgctgatgtgcacacagaccccagcagttcctgcccttcaactcccacctgtgccaacactgccacagctgctaatgtccatacagaggttggcagccccaagcccatcagtgccccaccccagctgacaagcatgcaccctgtttcattgctgttgctgctagcatgagctgccaccactcaaaaaagtgcttggagtgttggggccagcagtccaggaacacctcagcccctccagtgaaacaggttcccagccttgagggggcagagaacaatgccaggggcctgataccagctccccgaggttacagcatgcagcccaggag

SEQ ID NO: 427196 - DNA, 544 bp, Homo sapiens
ccctccccctactgcagccttccctgtgccacagccaccccgtcatagctttaccagtgcatgtgtgcatgggtggacctcacctccctttctctgctggtgcgtgggtttgcatgcaccccactgtgtcattgccgctggtatgaatgcacccaccaccctccaccactatgctgcaggattgccgttgccctgccccatgatgacactgctgcaggtgctgatgtgcacacagaccccagcagttccygcccttcaactcccacctgtgccaacactgccacagctgctaatgtccatacagaggttggcagccccaagcccatcagtgccccaccccagctgacaagcatgcaccctgtttcattgctgttgctgctagcatgagctgccaccactcaaaaaagtgcttggagtgttggggccagcagtccaggaacacctcagcccctccagtgaaacaggttcccagccttgagggggcagagaacaatgccaggggcctgataccagctccccgaggttacagcatgcagcccaggag

SEQ ID NO: 427197 - DNA, 591 bp, Homo sapiens
tatcaatattaactttgaatgtaactgggttaagtgccccaattaaaaggcatacagtgggcaagttgcataaagatgcaagacggaagatcatggcagatgggaggcaggactagattgccgctctggacagagtagtgggaggtggcccacactgtgaagtttagctccagattgactgcaagaagaaaccagcaatcctgagaggatccacagaccctctgtaggaagtagactgatcctgcaggacccaggacacccctcaaaactgcgagtgcccaactgtggatgygggaaagggagactctcctctcccgaacacacacccccactagagaagctgaaggtctgtttgtgggagaagtctccgactttacctggagctgagtcaattcggagagctgagtgaaatacaggggtagaggaagcagcagaaaggccctgggagctggctgggtctcctagcaggccattcttgtctggcaccacagggatccaaccagagaggagcagggggtaaaactacacaggaagaagcaaatctctagctgaactttctaacaatttgaatggggtgagaagcctcctgac

SEQ ID NO: 427198 - DNA, 598 bp, Homo sapiens
agtcaatactattgcatggcacaaacagttcaaawcattaaatattgactcaaaattacctttaagaagttttttcaaatttctcctttctgttactgcttgaaaaatatctatggttatacttaagtcttatgaagactgtatccaactgaattaaagatgtcacattcaattttcacactcctagcagataataaccatgagtcatttcttagaactaggttttcaggtaatagggtagggacaggctgtaccattttgtacacttcacaattttagaaatattttatcaccatgacatgtgtaagaacttgtaattactttatctccttcaatctgtgtcaagaagataataaatgtgcattttatacagggcactaatacttggaactgtgagttgaatagcatctcttgtgtctctattcactaatagcttgggtaaaacacttaactgtccttctaacctagtatctccaccagagtaatggcaatgttattggtatccatatatatttagatatatcacagagcaaaagggccattatatgatcaatcttttacatctttggttgataactgtactctttttagaagaacc

SEQ ID NO: 427199 - DNA, 537 bp, Homo sapiens
tttacaaagatgcttggtcatgccatgctctgctgtattaaatgatctttgttgaaaccattcatttccatttctcttacacctacgaaatgtcaaataagagtgawaagacagtcatttactctcaattttctctataatttagagtgtattagaactctaaaataatagactaatatattttctcaattctcccttcctcctttctttccactggaaggaaatctatttctgatagcatttcttctaaagtttagggaactaaaaagtgctgctgtttaaccaaaaaaaaaaaaaaaaagttctaaagcatagttattttgagtaaatatctttccaaaaactctacaaaaaaatataaaatcttccctggagtgcttataaaaggtaacataaaagtggctatgagtgaaaaaaagaaataatgttttaaggactgaaaaaaaaatcaaatgcaagtagttctaccctacccatctcttttttacccttcttttacacatgcagagacacacacacacagcacagatttcaacc

SEQ ID NO: 427200 - DNA, 588 bp, Homo sapiens
caggatctcacctatgtgatctgcacattcagaacggggagcactaaccggcattaakgtacataggagaaaacatatagcacagcacttacacacacagactctgaagctagctgtctgggttcagttcccacctctgccacttgctagatcaattagaaaaacaatttctcattcaagtaataatacaaacaatttagataaggactcagcacatagtaaggtactctactaagtgttagttattattaagagcctggtttaacggggctctaagccaccacccagagaaatcactgagaacccaaggcctagccttcctcctactgaagagtcattccctccactccccaccagccctgctgacgctgcctgtcttgctagtgatgccaccctaataacatgaatgccttcaccactgccttctccagcctctcaaagttgccctctcagtctcctgagttgatcctgtggctctctcaaacagaagggaggattctctttccatcattgttgtaactttttaccagacctttaagtgtgaccgtgatctctccattttttaataaatctcccataaagggtagc

SEQ ID NO: 427201 - DNA, 616 bp, Homo sapiens
gtggcggggtttttttgtcttgctttgttttgttttgttttgtttgagacagagtctcattctgttgcccaggctgaagtgcagtggtgtgatctcagctcactgcaacctctgcctcccaagtagctgggattacaggcgtgcgccaccatgcccagctaattttttgtatttttttagtagagacggggtttcaccatgttggccaggctggtctccaattcctggactcaagtgatccgcccacctcagcctcctaaagtgctggaattacaggcatgagccatcacgcccagccaagaactgtgttttcaatgatgaagaggagataagcaggagaggacacttcaagtaggatgcaatagataggcaaagtctaagtaaggtcacagagtcatgttagagggatgccagaagtcccatgtagctggagaacacagtgacaaatatgactagatcttgaggagtcctgtgtaccatgaaaaggactttggtctttatkgtgcaggccagggtctccaaacgtttgatggctcatcccaatagtaaaacttttctgaacaaatacccttattgtgtatttttaactttattgtatgtattgcttatcaattac

SEQ ID NO: 427202 - DNA, 591 bp, Homo sapiens
tacacagtggtggagcaggggcaggaggactattgtaaaaactatcttttatttttatttttaagacagggtcttgttctgtagcccaggctgcagtgtagtggcaaaatcgtggctcattgcagcctcgccctcctgggctcaagccatcctcccacttcagcctccctagtagctgggactacaggcatgcaccaccacgctggctaaatttttttctatttttttgtagagatagggtctcactatgttgctaggctggtcttgaattcctgggctcaagcggtcctcctgccttggcctcccaaagtgctgggactctaggtgtgaaccaccatgcccagccaaaactgtcttttagaaaagagaaggaaagacactcagcaattactggttgctggaacatatggaatcctrtcaagcaggcattatgaaggcagtctatcctgtgggtggggaagttccttgaatagattctgattctgctttctgggatggactccctagcccacggcccttggtccatcccctgggagggtcttcatgtcttgtcctccatggccacatctgaagaggctctttgagagtgta

SEQ ID NO: 427203 - DNA, 616 bp, Homo sapiens
aacttatttaaaaaacatctgaaagcctactttgcaccagaccctatatcaggcgcaaaagaaataaggataaggaagttaagagccctgccctcagrgagcccacagtctagttgaggaaggtaagaggtgaacaacaactctgttgcaaatcctttatcatatcttgttcaattcgcagtctctctgctccatttcttgttcttgggattctttttgccttgattcctgtttcagaaactccaactttcttttcagacaaatcttgcaatctcactaccaggacaaaagacctgtctccagatttttcttcagtacaaccagacttcctacaaactactctttatggagtaaggaaaagccaatttcttcacaggattttttatttcaggactctccagcatgtctctgaaatctggaatctaatatgaattacccagtgttctttaactttaacatatataagattctctaaaatcctatttaaaatggatgtcctcagagtctattctcagatattctagtaatctgtatttattacaagccttccaggtgattttgaagcatgtggtccaggaagtttgcaaaacaccatcttaagatccacaggtgcact

SEQ ID NO: 427204 - DNA, 616 bp, Homo sapiens
aacttatttaaaaaacatctgaaagcctactttgcaccagaccctatatcaggcgcaaaagaaataaggataaggaagttaagagccctgccctcagagagcccacagtctagttgaggaaggtaagaggtgaacaacaactctgttgcaaatcctttatcatatcttgttcaattcgcagtctctctgctccatttcttgttcttgggattctttttgccttgattcctgtttcagaaactccaactttcttttcagacaaatcttgcaatctcactaccaggacaaaagacctgtctccagatttttcttcagtacaaccagacttcctacaaactactctttwtggagtaaggaaaagccaatttcttcacaggattttttatttcaggactctccagcatgtctctgaaatctggaatctaatatgaattacccagtgttctttaactttaacatatataagattctctaaaatcctatttaaaatggatgtcctcagagtctattctcagatattctagtaatctgtatttattacaagccttccaggtgattttgaagcatgtggtccaggaagtttgcaaaacaccatcttaagatccacaggtgcact

SEQ ID NO: 427205 - DNA, 616 bp, Homo sapiens
aacttatttaaaaaacatctgaaagcctactttgcaccagaccctatatcaggcgcaaaagaaataaggataaggaagttaagagccctgccctcagagagcccacagtctagttgaggaaggtaagaggtgaacaacaactctgttgcaaatcctttatcatatcttgttcaattcgcagtctctctgctccatttcttgttcttgggattctttttgccttgattcctgtttcagaaactccaactttcttttcagacaaatcttgcaatctcactaccaggacaaaagacctgtctccagatttttcttcagtacaaccagacttcctacaaactactctttatggagtaaggaaaagccaatttcttcacaggattttttatttcaggactctccagcatgtctctgaartctggaatctaatatgaattacccagtgttctttaactttaacatatataagattctctaaaatcctatttaaaatggatgtcctcagagtctattctcagatattctagtaatctgtatttattacaagccttccaggtgattttgaagcatgtggtccaggaagtttgcaaaacaccatcttaagatccacaggtgcact

SEQ ID NO: 427206 - DNA, 566 bp, Homo sapiens
atttccaaagttgatacagccaaaaaatgaaagtgctgagataataactcagcccatgttcttactgcatggtccaaagtaccatggtctttccactacactacaaatcaaggaaacaagtatcaccagctcctcaattttgccagagcttcctcatccctaaaaagttctcatgtcacttggaagtttccaacaagttcaaaaatgtataagaaagaaaaagcattttcctagaaaaattagggaataaaatgcagttaggtgtacaaagcaagaagggaagtttttstgcccaacaacagtgtttattcctctgctcaactttgtggtactaaacacaaagcaaaacaaactctggacattttaatgttgttttcttattggagaatctgacttttacttcataggacaggaaaacagaccactgagcagactgaagcatgggggctccttctaataagactttatggctgagctgagcttctgtcggttctgtatcagcctaaaagatcccttggcccctctcctaattgaagaggctgttcccagcatgaacactggataag

SEQ ID NO: 427207 - DNA, 457 bp, Homo sapiens
tggtgagtgcattgggtttggagtcaaaagctcaattctgggtctatggggactttgcatcttgctaacctttctgagyctaattccttatctgtaaatgagaagaataatccctgcactactcactgaacatggcttaatgaggctcaaatgaggtatttgtatgtgaaagctctataaagactataaatgttcccttgacggctcccatagcaatctctgcttccctaacaagcatttatcatattttacagttattacttttttgtctgtctttatcttctaggctatacataccataaagacagagactagatcaatatttctcaccactgtctcccagtatctacgagagtactgggcacttggttgatgctcagtaaatatttgcaagattaatgaatggatgaatgaatgtagtcctctacaatattcatttcttttgtgaaaatctcat

SEQ ID NO: 427208 - DNA, 378 bp, Homo sapiens
ctaggcttgcctttaactgtgtgatcttgagcaagtcaatcaactccttgttcaatacactttcttcattagtaaaataaaatattatattaaacatggattgtcactttctctgcaactactcaaagtaatttgcagataatagttatatcactaaaatattaattttaaatgtcacaaaatcttaatttcttattgctaacttttcctgcatttacttatgctaatattggttattaaccatgctttttaaaagtaagattagagaatcagtatwaaacttcaatattagttgaagtgtttgcttaggagaaaaccatgtatcatttattaaggccttttaacttacttaaatctcaagcaattcctatgatagag

SEQ ID NO: 427209 - DNA, 595 bp, Homo sapiens
caggtttttctcaagaggtacwagagctttcattttgctttaagaaacactttctttaatatggaatctataaatcagaaaaatatgtttaaattcttaaacccaaatgtaaacagcatagccaacatggggacaccaagtcttaaaataacgaagaaggagataaaccatgaccagggatcaaatttgacatgcagccttcaggtaacagtgagcatcatataaatataaatgcaagttgccattttgtattttgaagagaagttttcagatgtgtgaaataatctaaaaaaccacatctttgggccaggcatggtagctcatacctgtaatcctaacattttgagaggcccaggtgggtggatcacttgagtccaggagtttgaggctagccttggcaacatggcaaaactccatctctacaaaaaatactaaaattatatgggtgtggcggcatgtgcttgtagtcccagctactcgtgtggctgaggtgggaggttcacctgagcctgggaggtggaggctgcagggagctgtgattatgccactgtactacagcctgggtgacagagtaagaccctgtcacacacacaca

SEQ ID NO: 427210 - DNA, 554 bp, Homo sapiens
cacatgcagtccctggctggggtgaagtcagactcagatctgtctgggaaatagagctaagcgctgctttttctcaaaatgacacatttgcatctactgatattcattagggttgaaaggccttggtggggtagtggaaacatttgaatcatgtctctgctcagaattcaagtatagcttgggtaagacagtgagaccctgtctctacaaaataataccaayaaattttaaaaattagccagttgtggtgatgcgtgcctgtagtcacagctacttgggaggaagaagcaggaagatcatttgagctcaagattttgagccatgatcacgccactgcatgccagcctgggtgacatagcaggaggctgtctccggaaaaaaaaaaaaaaaaagaacaagaattcaagcacatacaggcatatctggtagaacttcggaagtaaaaggaatggacactggattcagggaggacagaggggactgcctgtaaaacaaaattatttttaggagcagaagttgtctaacacagcaagccaggggcctgagggcggggg

SEQ ID NO: 427211 - DNA, 656 bp, Homo sapiens
tgaatatattatacttacatataaatatagtagatagatagatagatagatcctattgacacaattattaccaaatgccagggatttggtctaagtcctgctgctcaccacacaaaaagccagtcactgagacaatgagtattgccagggaagaaggctttactctggtgctgcagctgaggagatgggagattagcctcaaatccatctcctcgacaaactaaaattaggggtttatatagcagggaagaaatataaccatgtgtgggaaaacaggaattagagaggggtaagaaagaagagttggtcaaaaggaagctgatggtcagaaaggcaatcatgatgggtgagggttcttgcatctcattgtccggatgtggtgatctcgtaagtttcagttccttcatactatctggraggcctgatgattggtttcctgaaaaaggaactcagataaggcaaatgtggtttctcaagtttttaagactaggagggtcaatttctatgtttattcaatagaaactataaatatcaattctatgggacaactgggccagtttcacaatcaccgtaactacctagctgttctccaacccctttgtagtactggtgagacatgagccataactgcagaccatgtacagctcattgaagca

SEQ ID NO: 427212 - DNA, 512 bp, Homo sapiens
tactggtgagtattataatttattaccttcctagaaaattttggaacgaaggtagggagaccagaattccaatatcggcaatggtgagggctcaaagcttgagaccatgccctcaaattagagaatcacataattaataaatgcagtgtataagtgcaagtgctagtttggtttatatatgcatgtttatgtcattttttaataaagaccctgaaaaaaacaatttgaaatataatgtgttatataaagatgaagagagaacaaaagtgttagaaaatctatttaatgaaataatagatgaaaacttagcaagttataagaggcttttcyggcttttgctcagcgcttctccttgctgccaccatgtgaagaagcacgtgtttgcttccctttccaccatgattgtaagtttcctgaggtgctcccagccatgctgaactgtgagtcaattaaacctctttcccttataaattacccagtctcaggcagttctttatagcagtgtgagaatg

SEQ ID NO: 427213 - DNA, 532 bp, Homo sapiens
agactatgtgacagtgggagaaccacctcagttgsagcagccaagtgaagtgtggaggcagctaatgttcctaaagagaagccaggcaggatcccattcatgaagagtgattgtaattgctaatgtgtcaccatttttaaaataattgaggtatttttaagagggaaaagtcaaatcttttcaaatgtttttttttccacgagaactaaatgtctcttagttgacaagataaaagagcataatcaggtgttggcactgctgcctaatgaggtcattatggaaatgttcttgagtgttcagcagagttggttagtgtggacatgcttagtgaagggtggggaaggtgaaaagaaaatgaaaagtagttgtttttcttaattacttaactgtttcatcttattttatactacacacacaatctttttctctctaccagcagtagaaaattttgcttttagaacttccagaaagaaatgagtaaaagagacagatagacctgtaatgctatataaccatcaccccattatgtttt

SEQ ID NO: 427214 - DNA, 537 bp, Homo sapiens
gatcttggatcttgtgcaagaaagaattcagccaagtccatagagtaaagtgaaagtgagtttattaagaaagtaaaggaacagtctgggcgtggtggctcacgcctgtaattccagcactttgggagaccaaggcaggtggatcacctggggtcaggagttcgaaaccagcctggccaacatggtgaaaccctgtctctactaaaaatgcaaaaattagctgggcgtggtggtgggcacctstaatcccagctactcaggaggctgaggcaggaaaatcacttgaacctgggaggcagaggttgcagtgagccgagatcacaccattgtactctagcctgggcaacaagagtgaaactcagtcaagaaagaaaggaaagtaagaaagaaggaagagagagagacagaagaaagagaaaagaaataaagaattgttgctccatagatagagctgccccaggggatgctggttggctatttttatggttatttcctgttaatatgctaaaaaaggggtggattattcatgagttttcc

SEQ ID NO: 427215 - DNA, 575 bp, Homo sapiens
  misc_feature (1)...(575): n = A,T,C or G
ctgataagcagtccctgctgcacacagatggccaagccccctctggagtgccaagtacagctctgagtggtacaccttgttagggacacagagcaactgaggcatgttcagggaggaaggagtcacagatgaggggactcaatgcaataatrttttgtgagggagacttggtaaacaatccataatgacgtaagatacccacaactgggatgggctatctctagaggtggtaaatccttgttactggaaactttcaagcaaagactagacaaccagctaatggaatgaggtgggagtagaaggcatctggattggaggttgaatcaggccgctcctaagtttcttcccaagcctattagttgatgactttaatgataattttaggtgtcagcttggatggactaagggatgcccagatagtaaaacattatttctgggtgtgtctgtgagggtgtttctggaagagattagtatttgaatcaatagactgagtaaagatttgcccttaacaatgtgagtggacatcgtccaatccactgaggaactgaannnnnnnnnnnnnnnnnnnnnnnnnn

SEQ ID NO: 427216 - DNA, 575 bp, Homo sapiens
  misc_feature (1)...(575): n = A,T,C or G
ctgataagcagtccctgctgcacacagatggccaagccccctctggagtgccaagtacagctctgagtggtacaccttgttagggacacagagcaactgaggcatgttcagggaggaaggagtcacagatgaggggactcaatgcaataatattttgtgagggagacttggtaaacaatccataatgaygtaagatacccacaactgggatgggctatctctagaggtggtaaatccttgttactggaaactttcaagcaaagactagacaaccagctaatggaatgaggtgggagtagaaggcatctggattggaggttgaatcaggccgctcctaagtttcttcccaagcctattagttgatgactttaatgataattttaggtgtcagcttggatggactaagggatgcccagatagtaaaacattatttctgggtgtgtctgtgagggtgtttctggaagagattagtatttgaatcaatagactgagtaaagatttgcccttaacaatgtgagtggacatcgtccaatccactgaggaactgaannnnnnnnnnnnnnnnnnnnnnnnnn

SEQ ID NO: 427217 - DNA, 414 bp, Homo sapiens
ttgtgtaagttattaaattagggatgacctatggcaaaactgtgaaatttagaaacagtgtcttctactctgttctccrtgcccctccttttcctgtttggcaactcatgttctagcagttgcctagccaaaactgtctattccccagtttaaaactttcccttcttttttcctcgcaagtcattccacttccttgatttcctcagcatgactgacttgaagagaaagtccatctgacaaacagtgtgctaagggaaacagtcatagaatcatagagccgggacggatggggcaggccatcctggccagagatgacaaaccctgcgccaaggattttgatttatttttaagttcaaatgtggaggccttcccttgggttatgttttttctatttctccgcagccccatgattcc

SEQ ID NO: 427218 - DNA, 544 bp, Homo sapiens
ttgggtgagcttccctgtttggcagtgtgaacacaaattgacacacatagatgttctaggaggacaaagctttgggtttgagaccctcccagacctcatgtttctctgcctttggctggttctgatttgtgtctttttgctataataaaactataatcataagtgaaggctgggcttggtggctcacacctgaaatgccagcactttgggaggctgaagcagggagataacttaaggccagaagtttgagaccagcctggccaacatggtgaaaccccatccctactgaaaatacaaatattaactgggcgtgttggcatacacctgtaatcccagccacctgggaggctgaggcatgagaactgcttgaaccggggagacggaggttgcagtgagccaakatctcaccattgcactccagtctgggcagcagagtgagactctgtctcttaaaaaaataaataaataagtgaagtgctttcctgaatactgtgggtcatgctagcaaatttttgaacctgagtggtgagtgagaggccttgaa

SEQ ID NO: 427219 - DNA, 441 bp, Homo sapiens
cgacgatgctgggcacacggtatggccagagtcgatgtgggcaggtggagcaatgagctagcccttatttcttggggctctgtctgtaaatgctgaattagtatgctgctgaaatgaaatcttagaagattcaaaattctacaatctgactttgaactgaagcactaaaaatgtaggcaagacacagccaaacattcaaaatgcaaattcgccttcatgtttcaaactggaagcctaaattaatgttgtttgtttttctaaatcctctacytgttattgagaaaagcctccaaatttcctggaaaggtgatcatagtaagaatgtcacggatatactttaaaaacatctgcttcattcttcatttagttctgagggtgaaagcagtttgcctataggagaggaattggggatgaaggaagtgtttttattggctgggtcac

SEQ ID NO: 427220 - DNA, 515 bp, Homo sapiens
actgcactccagcctgggcaacagagtgagatcctgcctcaaagaaaaaagaaaagtaatcatagactgcatcatgatggtctctgcctgacagaatgaatgaaagtttaaaggagaggttttttttggcatgggttttggaagaagaggagtagtattctcagagagtgaaacttacccagaaaaacagaggagagtttaaagggaaaccccattgctaccttttttggcctctttactctgtttttactttcttcatatcacaatgctgtaccaattttaccaagtacacatttgtcccttcatgaagatatcgcactctcctctggagggaaaagtaagtaycatttttgctttttctgaagtttaaattaatgaggaaggacaagtaaatgtttgaagtaccaaagtctaaaacctcaatttaaaaatttcaactttatgaagtttacttaaaatgattgttctcagtgactcctatcatcctatcatgcccccaaacacagtgactgccc

SEQ ID NO: 427221 - DNA, 549 bp, Homo sapiens
cctgtgcttttatcctgcctctgccaccaattatctgtggaagcctaggcaagatattctctgcttcagtccccttatttgcaaaatgtagatggtagtagtaccttccttagagggtcatagtgaaaattcagtggttgagttaatacatgcaatgcaattgaaactgcctggcgtataataattggtgtgtttgcttgctatttctcatcccagctgcctgaccctsagctccgggaaaagaattcatcttcatattttcatagtgccaggtgtagtgccattctgtagttcacatttactcattccacaaatacttaatacatgcctacagtgggccaggcactgactgacagacatgattgctatgaaatgtatggctttgctggagagatcggcaagtattacaatacttctaattggggaagtgtgggatgcaatagagtaagtatcgggggtgcttctcttgaacctatggggggcaggctaggtttcctggaggaaagtgatgcatcagcaaagtctcggatgagcatgtaagggccagag

SEQ ID NO: 427222 - DNA, 549 bp, Homo sapiens
cctgtgcttttatcctgcctctgccaccaattatctgtggaagcctaggcaagatattctctgcttcagtccccttatttgcaaaatgtagatggtagtagtaccttccttagagggtcatagtgaaaattcagtggttgagttaatacatgcaatgcaattgaaactgcctggcgtataataattggtgtgtttgcttgctatttctcatcccagctgcctgaccctcagctccgggaaaagaattcatcttyatattttcatagtgccaggtgtagtgccattctgtagttcacatttactcattccacaaatacttaatacatgcctacagtgggccaggcactgactgacagacatgattgctatgaaatgtatggctttgctggagagatcggcaagtattacaatacttctaattggggaagtgtgggatgcaatagagtaagtatcgggggtgcttctcttgaacctatggggggcaggctaggtttcctggaggaaagtgatgcatcagcaaagtctcggatgagcatgtaagggccagag

SEQ ID NO: 427223 - DNA, 612 bp, Homo sapiens
ctcttgtctgtcaccttgtctggcacatactggacattcattaaatatttgatgattgcgtgaatgactgtacttctgtggagtgttgaacaaatgaatttargctttacgttcttgagtaaaattactttcagatgttaagtatgataatacaaaatctacggtattagtctgttctcacactgctaataaagagatacccaaggctgagtaatttataaaagaaagatatttaatggactcacagttccacatgactggggatgcctcataatcatggcagaaggcaaaggaggagcaaaggcttgtcctacatggtggcaggcaagacagcatatgtaggggaactgccttttataaaccatcagatctcatgagacttactcactatcacgagaacagcaagggaaaacctgcccccatgattcaactaccttccaccagctccctcccatgacctatgggaattatgggggctaaaattcaagatgagatttgggtggggacacagccaaaccatatcatccaccaattttaaatgcaccaatttttttgccattatttttacattttattcttgagttcaccatgtaaatattcatatattcccaa

SEQ ID NO: 427224 - DNA, 612 bp, Homo sapiens
ctcttgtctgtcaccttgtctggcacatactggacattcattaaatatttgatgattgcgtgaatgactgtacttctgtggagtgttgaacaaatgaatttaggctttacgttcttgagtaaaattactttcagatgttaagtatgataatacaaaatctacggtattagtctgttctcacactgctaataaagagatacccaaggctgagtaatttataaaagaaagatatttaatggactcacagttccacatgactggggatgcctcataatcatggcagaaggcaaaggaggagcaaaggcttgtcctacatggtggcaggcaagacagcatatgtaggggaactgccttttataaaccatcagatctcatgagacttactcactatcacgagaacagcaagggaaaacctgcccccatgattcaactaccttccaccagstccctcccatgacctatgggaattatgggggctaaaattcaagatgagatttgggtggggacacagccaaaccatatcatccaccaattttaaatgcaccaatttttttgccattatttttacattttattcttgagttcaccatgtaaatattcatatattcccaa

SEQ ID NO: 427225 - DNA, 594 bp, Homo sapiens
tgctctctctcctttaccttataaacattctgcacagctatatcagaggtagatgccttcccctgatgattttgaagcccttttagaataaaggtgcaatgcaaattctgggcattctcatggataattgaccctgcagtagtacttttgttctcctwttttgtatcaagacacaggtgaattttgatgagcttgtagaagcactgctgctggtacaatggtctactaatgtcatctaaatgagatggatgacttttaaaatatttgtaatatagctagggcccagaatgtgagaaggaaatagcagcccaagagggtagtcacaaggccccagtaatgacccaggggtgggggctgggggctggtggtctccccacagtcctactggctcattgacctctaagtcattcctcttttattaaaatgctcttttcaaatcctatttgccaatgcatttatttacttgctggggaggggttcaggagtgaggaggctagtgtttccaagaacatgtttaggacaccagcatttctaagagacctgtggttagaaatcatctacagtgacaaattaaccattgatgtcttttttttc

SEQ ID NO: 427226 - DNA, 473 bp, Homo sapiens
gaagtaagaaaaaggaaatctttctgataaaggatataaactggagtagttgatctaggtaaattttgtaatttccagaatctcattcatcgtcagtaataaaatcaggaggatagactgacaactcaagttccctgtaccttcttgcctatcttttgatattcagggacccatgtacgtacatgggaatcacagagcacccctgcagtctacacagagatccagcagcctataaaccttagatttggaaagaactcaacatctggtccaactttctatcgaagtaggagtattttctgcaggaatcctgccctgtggccttcaggaatatgctgggaataagtccagtacttggaaaatcattacttttctaggcagcwcatttcatttatgattggctttaattgttagaaaggcaacctagttatttgtgttggagctgcacaaaatatgcttgttattatttttttccc

SEQ ID NO: 427227 - DNA, 594 bp, Homo sapiens
caccacaacctagttgcagacatgagactcatgcaaatgaaatgtaaattcacagttgaggtgtcagataaatgttakggactttgagaagttttcgccatccagagagtttcctgggagttcagagaagagagagagggttaagcaccttatcaatgtcagacacgcttttctctgcaccttcttaaccactcccttggctcccatgacttaagttacttatatatggacaagaatcctaaatcctaaatgtacgtctccagcctagacatttcccataatgttttcccttgactatctcctccttattttccatttcccatttaagtactgtttgctccacaaggcttcatttccttggaccaagttaggtctcctatcacatgttcctgtggtaccctggtttttatcagagtagttaccacacatttttgtaatgttttaatgaactctctcttccacaagcctgcaagatcctcaagggtaggaccatgtatatctacccaactcactgttttttccctaggcttggcattttatcagtgtttggtgaggactttgttatacaaatgaatgatgatctaattcttctag

SEQ ID NO: 427228 - DNA, 590 bp, Homo sapiens
tttgtaatgttttaatgaactctctcttccacaagcctgcaagatcctcaagggtaggaccatgtatatctacccaactcactgttttttccctaggcttggcattttatcagtgtttggtgaggactttgttatacaaatgaatgatgatctaattcttctagagagtacatttacctttctttaacgcatgcatccaggccatttcagcctgtttgggtcattcatcccagagtaaaatgaaacaaaagtggcactgtaccaatatatttccaacagagtgtggygtcttaggcagagtttcctaagaatcagagattgaaacaaggcttgggctgagcacggtggcttacacctataaccccagcacgttgggatgcctaggtgggcagattgctagagcccagcagttcaagaccagcttgggcaacataggaagaccttgtctctacaaaaaccacaaaaaacgagccaggcattgtggtatgtacctgtagtcccagctactcaggaggctgaggtggaatgatagattgagcctgagagttcaaggctgcagtaagccatgattatgccactgcattccagcc

SEQ ID NO: 427229 - DNA, 590 bp, Homo sapiens
tttgtaatgttttaatgaactctctcttccacaagcctgcaagatcctcaagggtaggaccatgtatatctacccaactcactgttttttccctaggcttggcattttatcagtgtttggtgaggactttgttatacaaatgaatgatgatctaattcttctagagagtacatttacctttctttaacgcatgcatccaggccatttcagcctgtttgggtcattcatcccagagtaaaatgaaacaaaagtggcactgtaccaatatatttccaacagagtgtggtgtcttaggcagagtttcctaagaatcagagattgaaacaaggcttgggctgagcacggtggcttacacctataaccccagcacgttgggatgcctaggtgggcagattgctagagcccagcagttcaagaccagcttgggcaacataggaagacctygtctctacaaaaaccacaaaaaacgagccaggcattgtggtatgtacctgtagtcccagctactcaggaggctgaggtggaatgatagattgagcctgagagttcaaggctgcagtaagccatgattatgccactgcattccagcc

SEQ ID NO: 427230 - DNA, 568 bp, Homo sapiens
aataccaccctgcctgaagtctgtagtttaatggcagaggctcatgtagaatccagatcccctggtttccagttagagtcattacaatacagggactagtaattagagctttggagtcaaataactgtgggtttgagtcccagttctgcatttatgctttatgtaaccttgaaaatgttccttaccgtcttggagacttgagtttcttttctttaaaggggatattaacagtaccamcttcatatgttcaagggaaaattaaacaaggtaatgtatgtaaagtggtttgcacaatgcgtggcatgcagtaagtgctcaataaatgttagctattattcttgtattgtgttttggtcctaggaggattatctaaatgaatttaagtgtagaaagctttaaaatccttagggacaagtagagtaaccataacatgcaaagactcaagaagccccagggaagagtcagcattggaagtctgttactgcaaaagttgttaacaaatcttaaaatactaattaggcaagtgcataactcactatcctaaataatgaaatatgtgtggctgttg

SEQ ID NO: 427231 - DNA, 512 bp, Homo sapiens
cacttccaagcctttgcacagctcaggatttgcctctcctaaagtctttcctaacccacctttatttgttcttatggcacatcacttgttagttcattcattcatttattcaagaaatagtcactgagcacatacttgttaccaggtacaaagcactgtgccagatactggggactcaacagtgaataaagcagttgctgctttcagggaactcattgtttagtgggggaaataggtaggttatccagcaattacmgttcattgtgaataagtgctaagatggaagtacaaaggggtgagaaagattatcttcctgagctgagagctggagttagaagtatttatgggctgttgtgaacattcccattttctgcatgttaaatgtgagcttgtgttttcttatttttatttttatatcccttaagcagtatcatttacaatcattggcttctgttaatgcacattctcacctcacagacagcaggattccaattccgaggtgtttccttgca

SEQ ID NO: 427232 - DNA, 637 bp, Homo sapiens
ttcctctctgtactgctttacaattgatgggtggtctcttttctgctataggacacacctcaacagcactcactagccaaggactgaccactgtctgctctactcaaaccgcggtcttcacttctcagagtaacaaaagtcaaaactgtcctacctgggggacagagtggaacttagcaaatactatatctgaatgaatcaaaattatacaggctgtgccctggtggagtatgtaattaaaaggactaaaataatcatatgctcacggggaaagttcttttcatattttcataaattttgtttttaatgacmaactttttctgggtagatggtgcctctgcttagtttcagcaggggctcctgatgcacagtgagatctgaatagcagagttaagatcggaaagagaaattctgctgtgtcactttcaaaccactaaatgtgttccctaatgattctgggctaggagttttgaacatctgaaaaccaaaggagacaccaagtctgctaaaaagaaagaagcacgttggtggttggcagccagtcccacgttgaatccggtgatggccatcttacctatgaggcatcccctgctgtaggtcagatccccaccaacaataacccacttcccactagtgt

SEQ ID NO: 427233 - DNA, 615 bp, Homo sapiens
tcccacagtgcagcggcgggctgaagggctcctcaagcgtggccagagcggacgccgaggcygaggaggtgctgagagtgagcaagggctgccagcacgttttcacctctcactactgctataaagaaatacctgagactgagtaatttgtaaagaaaaacagttttaatggactcacacttccacatggctggggaggcctcacaatcatgatggaaggcaaaggaggagcaaaggcacatcttacatgatggcaggcaagagagtgtgtgcaggggagctgccctttataaaaccatcagatctcctgagacttattcactatcacgagaataacatgggaaaacctgccctggtgattcaattacctcccactgggtccctcccatgacagtggggtttatgggagctacagttcaagatgagatttgtgtggggtcagagctaaaccatatcacagccctaaactgcaaacaactcaaatgtctgcctgcaggtgaatggatgacaaatggtggtatagtcaaacaacagactactactcagcaagaaaaggagtgaactactgatacatgcaaccacatagatgagtcttagaattagtatgcagcacct

SEQ ID NO: 427234 - DNA, 615 bp, Homo sapiens
tcccacagtgcagcggcgggctgaagggctcctcaagcgtggccagagcggacgccgaggccgaggaggtgctgagagtgagcaagggctgccagcacgttttcacctctcactactgctataaagaaatacctgagactgagtaatttgtaaagaaaaacagttttaatggactcacasttccacatggctggggaggcctcacaatcatgatggaaggcaaaggaggagcaaaggcacatcttacatgatggcaggcaagagagtgtgtgcaggggagctgccctttataaaaccatcagatctcctgagacttattcactatcacgagaataacatgggaaaacctgccctggtgattcaattacctcccactgggtccctcccatgacagtggggtttatgggagctacagttcaagatgagatttgtgtggggtcagagctaaaccatatcacagccctaaactgcaaacaactcaaatgtctgcctgcaggtgaatggatgacaaatggtggtatagtcaaacaacagactactactcagcaagaaaaggagtgaactactgatacatgcaaccacatagatgagtcttagaattagtatgcagcacct

SEQ ID NO: 427235 - DNA, 615 bp, Homo sapiens
tcccacagtgcagcggcgggctgaagggctcctcaagcgtggccagagcggacgccgaggccgaggaggtgctgagagtgagcaagggctgccagcacgttttcacctctcactactgctataaagaaatacctgagactgagtaatttgtaaagaaaaacagttttaatggactcacacttccacatggctggggaggcctcacaatcatgatggaaggcaaaggaggagcaaaggcacatcttacatgatggcaggcaagagagtgtgtgcaggggagctgccctttataaaaccatcagatctcctgagacttattcactatcacgagaayaacatgggaaaacctgccctggtgattcaattacctcccactgggtccctcccatgacagtggggtttatgggagctacagttcaagatgagatttgtgtggggtcagagctaaaccatatcacagccctaaactgcaaacaactcaaatgtctgcctgcaggtgaatggatgacaaatggtggtatagtcaaacaacagactactactcagcaagaaaaggagtgaactactgatacatgcaaccacatagatgagtcttagaattagtatgcagcacct

SEQ ID NO: 427236 - DNA, 539 bp, Homo sapiens
gcaagtactcaatacccgttgccatcattagaagtattattgctattattatcagcagagggctgcatcttaaaaagccttggtgagcacctacagagcaggataggcgcgcctgcagagccagccaggacagattaaagggatgtatcagtggcaaacttcccaagatctgtcctaggattacgcccccttctcctagagacagaatttaatatatgactgtgattttgataaatgatatgtaatatgagcttatctgtgaatgaactagaaccaccttcaagctgggtttggcaacaggagagatgaaggctgggaagcagtgatgccatagccataaaggcccttgatgaagaagaaagattcagcaaaggcctgaaggcttaarctgccttggccagctggagtcaagcaggggtggctgggaggaagccagccctgtcttagggagccaaagtcagtctggaggctctcagggaagaagggtcaaatgtttccagttatggaaccaggagaaggccgaacagtccagatgtcac

SEQ ID NO: 427237 - DNA, 393 bp, Homo sapiens
ggctgtgtaggaagcatagcagcatctgcttctggggaggtctcagggagcttccaatcayggtggaaggccaaagaggagcaggcgcatcacatggtgagaaccacagtgagcgggggtggggatgtgccacacacttttaaatgaccagatttcactaaggagatggcccaagtcattcatgaggaatccacccccattgttgcaggactttttcttggtttagctaaggatggggttctttgtcccatggccatgaaaattcaggcccacagacaatttgaatggtgagtaagacagggttttattgggtgaaaaggaaaaaaaacgggggaacagggactcttcaaggccagagtcctgctacagtgcttcctgcctgcagcttgaatg

SEQ ID NO: 427238 - DNA, 655 bp, Homo sapiens
ttcactactggtctacagcaatctgcaagggttcaggatgtgactccactcgttctctctctcttttcctcccttcctccctttctttctcttttatctttagcaaatagaagagtttggcagataggagggttttggcctctgtttcaaatatacttcttcaggtgtttaggagaatccctttcctaccacagtatttagcttcactgttaggcatccttttaatgaataaaacacaaccttttataactgtcagggctatttcacactaaatttacttgtgctcctaaaactacctgagaatccagctgagctctgcttgcaaaaaaaaaggaagccggacagcttatgaataacaggctgaattcgcaccaaacaaggggagcagggcagggcccaggcctctgcatggtctatccagactggtcatscagctgctctggagagaaaagcaggggcaaggagattcatttaattaatttcggctttatctgattcacaaaaaataaaaagactggtactacccaggactgggaaggatgtgggtcagcgggtgttctcaaatttcaacggcgcaatctttgtgaaataggacctggaatgtcctatgaaaataaaaaatgcccaagtccaatcagtcatccctcattgtgag

SEQ ID NO: 427239 - DNA, 655 bp, Homo sapiens
ttcactactggtctacagcaatctgcaagggttcaggatgtgactccactcgttctctctctcttttcctcccttcctccctttctttctcttttatctttagcaaatagaagagtttggcagataggagggttttggcctctgtttcaaatatacttcttcaggtgtttaggagaatccctttcctaccacagtatttagcttcactgttaggcatccttttaatgaataaaacacaaccttttataactgtcagggctatttcacactaaatttacttgtgctcctaaaactacctgagaatccagctgagctctgcttgcaaaaaaaaaggaagccggacagcttatgaataacaggctgaattcgcaccaaacaaggggagcagggcagggcccaggcctctgcatggtctatccagactggtcatccagctgctctggagagaaaagcaggggcaaggagattcatttaattaatttcggctttatctgattcacaaaaaataaaaagactggtactacccaggactgggaaggatgtgggtcagygggtgttctcaaatttcaacggcgcaatctttgtgaaataggacctggaatgtcctatgaaaataaaaaatgcccaagtccaatcagtcatccctcattgtgag

SEQ ID NO: 427240 - DNA, 545 bp, Homo sapiens
tcactatagcctcaaactccaggttcaagcaatcctcccacctcagcctctccagtagctaggactayaggcacacaccaccatgtatggataattttgtaaaacattttttttatagagacagggtcttactatattaacctgggtggtcttgaactcctggcctcaagcgatcttcctgcctcagactcccaaagtgctgggattataggaatgagccaccatacccagccactcccctcttttaatcatactgttccttcttcctgaatgaccttcctcatccttcttcaccacttgaaaacctgctcttccttcaagtcccagatcatacacaaccacctccacgacatcttccttcactccctaagccaggccttgtctctccatcctctgtgctctccccacaaaatgacactttgcacacgtggtctgctctgtgtggcagttcattgtggatagcaagtctccctcaagagcctggaagctgtgatagtgaggaccatgctttagctttccatttaaaccccagcccacacctaatg

SEQ ID NO: 427241 - DNA, 578 bp, Homo sapiens
aatacccatcttcagcccctgccagtttgtactttcaccacaaactgcacccttgacttccctttgcctctgcaattcctttcactccacgcccctccacaaggcttagcatatcatttttgtgctacctctcaaattctctgtctttttatgcctgctgccaaaacactggttcatgctccagttattcccctcctcaacacaatctattgctttttgcctttgcagtttcttttttcatttttgttttgtttccttccctagacgtactccctcttgctgtgctcctgcctctcatgattcctgttsctgctctcctctcttcaccatcgaaatggatctcacagatccacttgccccacccaccacttcttctcatggtggccttgaataagtcaccaatgcattactctcaaaatagtcttctcctaaaaacaaacaaacaaacaaacaaacaaaaaacaccttccaaaggcagggccattgacaggaaagtcttagtccaacaagtccttggctcctcaaccccagctgactggcgtggtccacactggatgcacccctacaacaagaggggc

SEQ ID NO: 427242 - DNA, 578 bp, Homo sapiens
aatacccatcttcagcccctgccagtttgtactttcaccacaaactgcacccttgacttccctttgcctctgcaattcctttcactccacgcccctccacaaggcttagcatatcatttttgtgctacctctcaaattctctgtctttttatgcctgctgccaaaacactggttcatgctccagttattcccctcctcaacacaatctattgctttttgcctttgcagtttcttttttcatttttgttttgtttccttccctagacgtactccctcttgctgtgctcctgcctctcatgattcctgttcctgctctcctctcttcaccatcgaaatggatctcacagatccacttgccccacccaccacttcttctcatggtggccttgaataagtcaccaatgcattacyctcaaaatagtcttctcctaaaaacaaacaaacaaacaaacaaacaaaaaacaccttccaaaggcagggccattgacaggaaagtcttagtccaacaagtccttggctcctcaaccccagctgactggcgtggtccacactggatgcacccctacaacaagaggggc

SEQ ID NO: 427243 - DNA, 578 bp, Homo sapiens
aatacccatcttcagcccctgccagtttgtactttcaccacaaactgcacccttgacttccctttgcctctgcaattcctttcactccacgcccctccacaaggcttagcatatcatttttgtgctacctctcaaattctctgtctttttatgcctgctgccaaaacactggttcatgctccagttattcccctcctcaacacaatctattgctttttgcctttgcagtttcttttttcatttttgttttgtttccttccctagacgtactccctcttgctgtgctcctgcctctcatgattcctgttcctgctctcctctcttcaccatcgaaatggatctcacagatccacttgccccacccaccacttcttctcatggtggccttgaataagtcaccaatgcattactctcaaaatagtcttctcctaaaaacaaacaaacaaacaaacaaacaaaaaacaccttccaaaggcagggccattgacaggaaagtcttagtccaacaagtccttggctcctcaaccccagctgactggcrtggtccacactggatgcacccctacaacaagaggggc

SEQ ID NO: 427244 - DNA, 511 bp, Homo sapiens
ggcctaaaaaagaccaggaagtgctgctggggtgtcctcactgatattttatagcctctttttaaaacccaacttgttcaaagtaaataaaatgttgcttgtgtaagtaattaatcagaaattattcggaaggtttattatgaggccaatagtrggcaatctcctgaggcactcagcaaactctctctctcagtaaataattatttaagttaaaattatttactaaattaagtcgttccttttgtgatatctctgagacttcaagtaattgcctaggtttgctttagtttggtgttttataaagaaaaaacagggctacataatgaattaactgtgcaattaactataaatttagcacttcagaaacacattttaatgactaggaacaggtacaaagagccatgtgtgtgtttgtgtgtgtgtgtgtgtgtgtgtgtgtgtgtgtgtgtgtatttaaacctaggtgtaattttccatcttaatgcagcaaggctgggaaaatgttagcaca

SEQ ID NO: 427245 - DNA, 582 bp, Homo sapiens
aggtagatgtcagaaggccaactgataagttacaataagaagtaattgtcatacaaccagagcactaaaagctgcctgattagtgcattctcttcttgtagtcaaactacataggaagccaaatcataatcagaaggacaagaacagagatgaagcaaaagaaatttagatgatcttataaaaagccactcaactgagacagtttgagggattgttccaggacacaaatagtcttgctaataatgggaatgtgatattggaattacaaacatgttggagtttgggcacataaaaaacatctaattaaatacaactaattagaaagaaagataggatgaagattggggcctaaacaattttgaacataagcagaaacctgattcaagacagataatataaccagccacctcaggaaaaatatatctcagaacaaatcttccctggtctctgcagactgyaaggaataaatgaataaatgcaagaaagccttctcacacatgggaatgttgagttttacctaagacacatgatcctggaaaacagagaaggttaagaaataacccccctcttttgttctgggaa

SEQ ID NO: 427246 - DNA, 582 bp, Homo sapiens
aggtagatgtcagaaggccaactgataagttacaataagaagtaattgtcatacaaccagagcactaaaagctgcctgattagtgcattctcttcttgtagtcaaactacataggaagccaaatcataatcagaaggacaagaacagagatgaagcaaaagaaatttagatgatcttataaaaagccactcaactgagacagtttgagggattgttccaggacacaaatagtcttgctaataatgggaatgtgatattggaattacaaacatgttggagtttgggcacataaaaaacatctaattaaatacaactaattagaaagaaagataggatgaagattggggcctaaacaattttgaacataagcagaaacctgattcaagacagataatataaccagccacctcaggaaaaatatatctcagaacaaatcttccctggtctctgcagactgtaaggaataaatgaataaatgcaagaaagccttctcacacatgggaatgttgagttttacctaagacmcatgatcctggaaaacagagaaggttaagaaataacccccctcttttgttctgggaa

SEQ ID NO: 427247 - DNA, 628 bp, Homo sapiens
ctgccttggcatgcaggcattacagccctcaggagatgtcacatgtctccttgagaaagtgacactgatccttagccctctgcaggcacccacaacctcctggcagctggcgggtgatgctaggtgtgctctgggatccagacatgtgaaagtggccacctctctgaagcagaaatttgaaggcttgggggtctggtgtagcctggtttctccctgttgcaggatgggggcagaggaaacaaaatctcttctctggaaatcaaacaggtggtgttcagagctgaggggatcacggggctcagcacaggcaaggagggctgtgctccttggtggtccccgctggccatgctcccactgtctgggcgttggcatgtagatatttcaggaagcaagtttcatttatctggcatgaggagcataggaaagaagacagagttgagaactgggaaaactgggctctagtgttcccagctactccctgtgtgacttttgctaccaacctcctgtgtggctgactgcatgcagctttgccaccaactccctgtgtggctgtaggacaggcactaagtctcagtttcttggactgtraaatgagaggttgaaaaagataatttcgaagatgccttcc

SEQ ID NO: 427248 - DNA, 585 bp, Homo sapiens
cagccttcagttagtaattgagaagaaagcaactgagagagaaattgaaataaaccgtatatgttttctaatgagctttgtgtatttatacatatgtcttatttatatttgtgtcttaaaatactagttacctattgtggtagattcaatgctgggccccagaagatatgtctatgttttaaccctcagaacttgtgaatgtgaccttgtttagaaaagggtstttgcagatgtaattaagttaaggatcttgagatgaaatcatgcaggattatccaggtgaagcctcaatctaatgacaagtgataaaaggcagaagagaagaaaaacacagaggtgaaggccatgacagaagttaagattgcagtgatgtcaccacaagccaaggaatgcctggagcccccagaagctggaagagcaagaaaagatttttcccctagatccttcagaggaacctagatcctgttatcaccttgattttggacttctggcctccagaactctgagaacataaaattgtcttgttttaagccacaaagtaatttgctgtgccaaccccaccaaactcatacacttgttaatcta

SEQ ID NO: 427249 - DNA, 585 bp, Homo sapiens
cagccttcagttagtaattgagaagaaagcaactgagagagaaattgaaataaaccgtatatgttttctaatgagctttgtgtatttatacatatgtcttatttatatttgtgtcttaaaatactagttacctattgtggtagattcaatgctgggccccagaagatatgtctatgttttaaccctcagaacttgtgaatgtgaccttgtttagaaaagggtctttgcagatgtaattaagttaaggatcttgagatgaaatcatgcaggattatccaggtgaagcctcaatcyaatgacaagtgataaaaggcagaagagaagaaaaacacagaggtgaaggccatgacagaagttaagattgcagtgatgtcaccacaagccaaggaatgcctggagcccccagaagctggaagagcaagaaaagatttttcccctagatccttcagaggaacctagatcctgttatcaccttgattttggacttctggcctccagaactctgagaacataaaattgtcttgttttaagccacaaagtaatttgctgtgccaaccccaccaaactcatacacttgttaatcta

SEQ ID NO: 427250 - DNA, 585 bp, Homo sapiens
cagccttcagttagtaattgagaagaaagcaactgagagagaaattgaaataaaccgtatatgttttctaatgagctttgtgtatttatacatatgtcttatttatatttgtgtcttaaaatactagttacctattgtggtagattcaatgctgggccccagaagatatgtctatgttttaaccctcagaacttgtgaatgtgaccttgtttagaaaagggtctttgcagatgtaattaagttaaggatcttgagatgaaatcatgcaggattatccaggtgaagcctcaatctaatgacaagtgataaaaggcagaagagaagaaaaacacagaggtgaaggccatgacagaagttaagattgcagtgatgtcaccacaagccaaggaatgcctggagcccccagaagctggaagagcaagaaaagatttttcccctagatccttcagaggaacctagatcctgttatcaccttgattttggacttctggcctccagaactctgagaacataaaattgtcttgttttaagccacaaagtaatttgctgtgccaaycccaccaaactcatacacttgttaatcta

SEQ ID NO: 427251 - DNA, 464 bp, Homo sapiens
gttctaggcactgaggagatagcagtgaattaaacatagctgctggcctcatggatcttaaattttatttggggtagctaataaataaacraataaatatatgtcaggaaatgatcaccattgtgaagagaaacagaaaatgaaataaataaacagtaagacaggaaaggcttttctgaaaaggtaagaacaaatctgaaggaggtaaaggaacaaatcagtaatgtgggggaagaatattctaggaagagcaagtagaaaggccctaaagcaggacacactggacattttcaaggaccagcaaggaggcaagtgagactctagcggagtaaatgagaggctgagtggtaggagatgaggtcagagagatagcaggagacacagatgatgtagggtgtgatatactacagcgggacttttattttactcagggaacacaggaaggttttgaatagaggagtgac

SEQ ID NO: 427252 - DNA, 355 bp, Homo sapiens
gctgtttgtttgtgcaaataagataagggactgaaaattgaccactggatttggaagcctagagattatttatatacatgtatatataataaactagtgtttataaataatactattgagaaaatgaaagttgttttagtttcttcactatatcaatgatatttttacagtatcattgttttctgttctcatgtttttctcaaccttctatttctccatagtgctattgatgtttcagaacactttactcagaaccaaagcagaccagaagaaatcactcttagagaaaattttgacaatgatctamttttccaagctgagagctttggtgagaatatttgagaactcaaaatta

SEQ ID NO: 427253 - DNA, 546 bp, Homo sapiens
atgtaggctggatatgccatctttgaaaggttactgaacctgggccacgcctttggttaagataaagtatgacaaagtatttaatttattaatttgttgactgttayggacaagcaaaaccttgtatgtggtatttctaaataagcttcacaactatccagcgtgtatgattctcatagggacattggccagtattcactgcagtacttcttttctttttttctttttttgtgacagggtatcactgtcacccaggccagagtgcagtggcatgatctcggctcactgcaacctcatcctcctggtttcaagcgattcttctgcctcagcctcccgaatagctgggattagaggcgcgtgccaccatgcccagctaatttttgtatttttagtacagacaaggtttcaccatgtttgccagactggtctcgaactcttgactgcaagcgatctgccctcctcggcctcccaaagtgctgggattacaggcgtgagccaccacgcctggccgcgctgcagtatttctaactaaaaaattacacttct

SEQ ID NO: 427254 - DNA, 546 bp, Homo sapiens
atgtaggctggatatgccatctttgaaaggttactgaacctgggccacgcctttggttaagataaagtatgacaaagtatttaatttattaatttgttgactgttacggacaagcaaaaccttgtatgtggtatttctaaataagcttcacaactatccagcgtgtatgattctcatagggacattggccagtattcactgcagtacttcttttctttttttctttttttgtgacagggtatcactgtcacccaggccagagtgcagtggcatgatctcggctcactgcaacctcatcctcctggtttcaagcgattcttctgcctcagcctcccgaatagctgggattagaggcgcgtgccaccatgcccagctaatttttgtatttttagtacagacaaggtttcaccatgtttgccagactggtctcgaactcttgactgcaagcgatctgccctcctcggcctcccaaagtgctgggattacaggcgtgagccaccacgcctggccgcrctgcagtatttctaactaaaaaattacacttct

SEQ ID NO: 427255 - DNA, 376 bp, Homo sapiens
tgtttatagtcaacaccaacactatagtacctttaagtagaagaagactgataggctgatcattttcattgtatttgaagcctcccaaagtcctgtggatttttttgtctctgcaaatatagactaattgccctttccactggagccatttatgttaacatcaattttaaaaaggcctatcatttgtataacacattataaatttatataacacttcggaattcttttgcatgcatgttcttcacgaaccaagcttgtgtasagtaacttgtgttgtttttatgtttactaaggagtcatttccctttttccatttaaggattttatagtcatttatccaaaatgtcaatattttgttgtttattacgcatttata

SEQ ID NO: 427256 - DNA, 636 bp, Homo sapiens
cttcatacatttgtgcacatttttgtctggatataagtttttatttgtctagggtaaatatctacaaatgggattgctgggccatatagcaagtatatgtttaactttataagaaattacaaaattattttccagagtggatgtaccattttgcattcccrgtaaccatgtaagagagttccagttgattttttgtttacttgttattttgagataattgtagattcacctgcagttgtgagaaataatacagagatcccatatatcagtttacctcagtggtaacatcttgcataactttaatataatacacaactaggaaattggcattgacactatccacccagcttattcagacatcacagttttacatgcacttattttgtgtatgtattaattctatgcaaatttatcgcatgtgtaggtctgtgtgggcaccaccatagtcaagaaacaaaacagttccatcacaaggatcacttgtgctaccctttgttagccacagccatctccctccttactgtcctccctggctcctgaaacccactaacctgttctccatctctataattttgtcattaatacagttaatttttatagattaatcttgtatcctatgaccttgctaaactcaaa

SEQ ID NO: 427257 - DNA, 563 bp, Homo sapiens
tataaacacataaagctctgtttccttctaggtaactgatttgagatcttcgctcttttctaatataaacacataaagctctgtttccttctaggtaactgatttgagatcttccctcttttctaatataaacacataaagctctgcttcttggtaactgatttggtatcttccctcttttctaatagaaacacataaagctctgtttccttctaggtaactggtttgagatcttccctcttttctaatataaacacataaagctctgtttccttctaggyaactgatttgagatcttccctcttttctaatataaacacataaagctctgtttccttctaggtaactgatttggggtctttcctcttttctaatataaacacataaagctctgtttccttctaggtaactggtttgagatcttccctcttttctaatataaacacataaagctctgtttccttcttggcactgctttagctgcatcacacagatacttatacgttgtatcttcacttttgttctgttaaaaatattttctaatttcccttgagacttgcagg

SEQ ID NO: 427258 - DNA, 563 bp, Homo sapiens
tataaacacataaagctctgtttccttctaggtaactgatttgagatcttcgctcttttctaatataaacacataaagctctgtttccttctaggtaactgatttgagatcttccctcttttctaatataaacacataaagctctgcttcttggtaactgatttggtatcttccctcttttctaatagaaacacataaagctctgtttccttctaggtaactggtttgagatcttccctcttttctaatataaacacataaagctctgtttccttctaggcaactgatttgagatcttccctcttttctaatataaacacataaagctctgtttccttctaggtaactgatttggggtcttycctcttttctaatataaacacataaagctctgtttccttctaggtaactggtttgagatcttccctcttttctaatataaacacataaagctctgtttccttcttggcactgctttagctgcatcacacagatacttatacgttgtatcttcacttttgttctgttaaaaatattttctaatttcccttgagacttgcagg

SEQ ID NO: 427259 - DNA, 567 bp, Homo sapiens
tttgctgggtacaaaatcctggttgacaactcttttctttaagcaattaaaaaaaatgttctgttttcttctgccctccatggtttctgataagaaatcaacagttatttaaattattattcctgtattttttttttttttttgacacaggatcttgctctgtcacccaggctacagtgcagtggtacagtcagtcatagctcactgcaacctcgacctcccgggctccagcaatcctcccacctcagtctcccgagtagctgggactacaggcaaacgccactacacacagctgatttttgtattttttatagaggtggggtctcgccrtgttgcccaagctggtctcaaactcctgggctcaagcaatctgcctcttggcctcccaaagtgcagggattacaagtgtgagccactgcatccagcctattcctgtattattaatgcatcatttttctctgactgctttaaagatcttgttttgtttttaattttcagcagtaactgaaaactattattattatcattatcatcatttgatttattctctctggggttcaccagaat

SEQ ID NO: 427260 - DNA, 545 bp, Homo sapiens
atatgcggcctttcgtatctggcttctttcatttagcataatgttgtcaaggttcatctgtgttgtagcatggatcagtaatacttcattccttttatagctaaatattccattgcatagacgcatcacattttgtttatccattcttctattggtggacatttgggttatttccacctcttagctattamgaatagtgctactgtgaagtacacttcttatacaagtttttgtttgagcatctattttccattctttggggtatatacctagcagtggaattgctggttcttatggcaattctatgtttaacttttcgaggaaccaccaaactgttttccatagcagcagcgtcattttacatccccaccagcaatacatgagagttccaacttctccacatccttgacaacgcttgttattgtccatcttttttatgctagccatcctagtgaatgtgaaacaatatctcattgtggaaaataagtattccatagatttttaacctgaaaaatcctttttaaaaagtagtcttacttcacacc

SEQ ID NO: 427261 - DNA, 545 bp, Homo sapiens
atatgcggcctttcgtatctggcttctttcatttagcataatgttgtcaaggttcatctgtgttgtagcatggatcagtaatacttcattccttttatagctaaatattccattgcatagacgcatcacattttgtttatccattcttctattggtggacatttgggttatttccacctcttagctattaagaatagtgctactgtgaagtacacttcttatacaagtttttgtttgagcatctattttccattctttggggtatatacctagcagtggaattgctggttcwtatggcaattctatgtttaacttttcgaggaaccaccaaactgttttccatagcagcagcgtcattttacatccccaccagcaatacatgagagttccaacttctccacatccttgacaacgcttgttattgtccatcttttttatgctagccatcctagtgaatgtgaaacaatatctcattgtggaaaataagtattccatagatttttaacctgaaaaatcctttttaaaaagtagtcttacttcacacc

SEQ ID NO: 427262 - DNA, 545 bp, Homo sapiens
atatgcggcctttcgtatctggcttctttcatttagcataatgttgtcaaggttcatctgtgttgtagcatggatcagtaatacttcattccttttatagctaaatattccattgcatagacgcatcacattttgtttatccattcttctattggtggacatttgggttatttccacctcttagctattaagaatagtgctactgtgaagtacacttcttatacaagtttttgtttgagcatctattttccattctttggggtatatacctagcagtggaattgctggttcttatggcaattctatgtttaacttttcgaggaaccaccaaactgttttccatagcagcagcgtcattttacatccccaccagcaatacatgagagttccaacttctccacatccttgacaacgcttgttattgtccatcttttttatgctagccatcctagtgaatgtgaarcaatatctcattgtggaaaataagtattccatagatttttaacctgaaaaatcctttttaaaaagtagtcttacttcacacc

SEQ ID NO: 427263 - DNA, 620 bp, Homo sapiens
ctgcaatagatatctgcaacttccttttcaaaaacaccatcggcattgctttctcaggaagccactgccagcctattgtgatagctgacactgagttcctgagaattctctaattaggatcccagattggagggtcagccagtggttaacatataatggacacaaaactgattttactggaagactgagggtgggcactcaccatggttctaagcattcattactcagaagatccataaaaacattacagttctgttgtgtaagagtttaggaaaaaaagaaaatcctgacaaaaatcccaacctaaaaaacagtgtcaacatttktaagtaggatggggaggcagagatgaattggcagtgttatcacagctactggactatgtggactttaacaaagtaagaaacgggtgggggttgggtggtggtatcttaatagagcaggagtagagacggatgtcctggggcagaatgggtaccaatgctgcctgaagcctggagctgggagctgaggactaagaggtagacaggagggtggggaccggtacctgctccaaggaactggtgccccagaactggtgagctggggtatgcatttagctcattcgtttaccagaatgc

SEQ ID NO: 427264 - DNA, 556 bp, Homo sapiens
taaacctcgttcctgttccttatctattaatagatctcagaagcctgaaccttgaagtctgataaatctagagctttcctgtcatttatatctaatgatcaattctaacagttagacaaaaaaccactaaatgaatgaaaagatgaattattgagaaacttagagggtcttttagcatggcaattaaagaagyagaaacaagtggctaacttgaagagccagaaatgttaaaaatctctgtattaatagtgattactgaagtgtttttaggttccaagttaaacatttgctgacactgcttactacaatatgtaggtaactcacgacatttttaaagacattttactgccctgagattgaatgtgagtttttttaacaaaaaaattatcaaaatcagaattctactttacctaaaatttgccaagcaactactatctgctactactttcgcatgtatcatctcatgtagtttccataaaaaactgtactttaccaatcagaaaactaaaaataagagcaaccttagatgaatgcctaaaactagaatgctataaaa

SEQ ID NO: 427265 - DNA, 556 bp, Homo sapiens
taaacctcgttcctgttccttatctattaatagatctcagaagcctgaaccttgaagtctgataaatctagagctttcctgtcatttatatctaatgatcaattctaacagttagacaaaaaaccactaaatgaatgaaaagatgaattattgagaaacttagagggtcttttagcatggcaattaaagaagtagaaacaagtggctaacttgaagagccagaaatgttaaaaatctctgtattaatagtgattactgaagtgtttttaggttccaagttaaacatttgctgacactgcttactacaatatgtaggtaactcaygacatttttaaagacattttactgccctgagattgaatgtgagtttttttaacaaaaaaattatcaaaatcagaattctactttacctaaaatttgccaagcaactactatctgctactactttcgcatgtatcatctcatgtagtttccataaaaaactgtactttaccaatcagaaaactaaaaataagagcaaccttagatgaatgcctaaaactagaatgctataaaa

SEQ ID NO: 427266 - DNA, 524 bp, Homo sapiens
ctactatgctctgcctgcgtgatgcaaggtgaatcaggcaccatccactgtccctcttgttaaggagtccacaactgtgctggcaggacagacacgtatataactgattataatgtacttgagataactggtatatcccggtggtgggaataagaggctttggcagcacacggagtaaagagcgaggatcctggaaggcaacctgcatgtagggagagtggaagctcacccgaggaggtgacatttgagctggttgtaaaggaagaataggatcagaccaggcgaaggagaggcattccaagtgaagaaaaaacaattatccacacatgccaagyttttcagatttgacttttagaagcgttttacttcaaaaaggtttaagtgtgcaatgtctaacaagaagcaaaaattacaatctagattgtttctttatgactagcctgctcttctcccacggatcctagctgtttaggaagtacaggtagtaagaagaggatgtgaagtactttggtagccacagagaa

SEQ ID NO: 427267 - DNA, 520 bp, Homo sapiens
tttccctcatctcactctgtagccttggtgatttagaaaaatatttcccaaacagaactgacaagagaacagataatgctgcaacatactaaattaattcaaatattactaattaattaagaacttgtcttgcctaatttactttagttttatattaaatatcatcttattcagtcaggcccacataaatacaaatgcccagctttaagcartatatttttttctaccaacttttcttccttagacaaagagagaacttgctggaaactgagaagctcctttgtgtttggtgtgggattacatgcagcgctacatcaaggctggcactgcaaacttctcatcttcctctggcccatccatgtgacccacagttcctccactgtcctgatgaatgagaacacttagttttcctgattgcatcaggaactgagcccacatcctctatggctattactgagtgatattactgtatctctttgtggctacattcaccttaatggctgagggtgacaaagcgagg

SEQ ID NO: 427268 - DNA, 520 bp, Homo sapiens
tttccctcatctcactctgtagccttggtgatttagaaaaatatttcccaaacagaactgacaagagaacagataatgctgcaacatactaaattaattcaaatattactaattaattaagaacttgtcttgcctaatttactttagttttatattaaatatcatcttattcagtcaggcccacataaatacaaatgcccagctttaagcagtatatttttttctaccaacttttcttccttagacaaagagagaacttgctggaaactgagaagctcctttgtgtttggtgtgggattacatgcagcgctacatcaaggctggcactgcaaacttctcatcttcctctggcccatccatgtgacccacagttcctccactgtcctgatgaatgagaacacttagttttcctgattgcatcaggaactgagcccacatcctctrtggctattactgagtgatattactgtatctctttgtggctacattcaccttaatggctgagggtgacaaagcgagg

SEQ ID NO: 427269 - DNA, 640 bp, Homo sapiens
tcttatggaaacaaaactgatgatcataaaacaatcaatagaaagtttccttttctaatattttgaattaaaaggtgttaaacaaattttaatttcttaataaaattgtagtaaagtaactttcataaggcaaaagttcatatcttctattctcacagtcttacctaacaaacatgaaatacttctaaaatagatacttcttattgttttttttttgtttgtttgagtcacagggagaaaagtcccttttatgttcttttaatacttgcttttattaacctcagcttcagttagctcacttccatatatcaagattctttctacaaccgaagagacaagaggtaaatgcaaatgtgggaagggaagctgcttggtaacacactagctgctccctggcagcagttatttctatctaaagcatatataccatattaagaggccatagtgaaaaatgaaaggatggaacggcaggttttcatttgtttttaacattttagaatgctgtaaataagtttgtgtgtttcaattcaaatggttccattacctcggaggycttaatcatttgtaatagcaatttcggaagcgtccaaagcttgtgcttaaggagtattattggcattcaatatagtcatatgatatt

SEQ ID NO: 427270 - DNA, 640 bp, Homo sapiens
tcttatggaaacaaaactgatgatcataaaacaatcaatagaaagtttccttttctaatattttgaattaaaaggtgttaaacaaattttaatttcttaataaaattgtagtaaagtaactttcataaggcaaaagttcatatcttctattctcacagtcttacctaacaaacatgaaatacttctaaaatagatacttcttattgttttttttttgtttgtttgagtcacagggagaaaagtcccttttatgttcttttaatacttgcttttattaacctcagcttcagttagctcacttccatatatcaagattctttctacaaccgaagagacaagaggtaaatgcaaatgtgggaagggaagctgcttggtaacacactagctgctccctggcagcagttatttctatctaaagcatatataccatattaagaggccatagtgaaaaatgaaaggatggaacggcaggttttcatttgtttttaacattttagaatgctgtaaataagtttgtgtgtttcaattcaaatggttccattacctcggaggccttaatcatttgtaatagcaatttcrgaagcgtccaaagcttgtgcttaaggagtattattggcattcaatatagtcatatgatatt

SEQ ID NO: 427271 - DNA, 610 bp, Homo sapiens
tgggaagggaagctgcttggtaacacactagctgctccctggcagcagttatttctatctaaagcatatataccatattaagaggccatagtgaaaaatgaaaggatggaacggcaggttttcatttgtttttaacattttagaatgctgtaaataagtttgtgtgtttcaattcaaatggttccattacctcggaggccttaatcatttgtaatagcaatttcggaagcgtccaaagcttgtgcttaaggagtattattggcattcaatatagtcatatgatattaagcagatttacaacsttctatgtggttatccctgatcatctttatttaaaagtaagttctggctgatgaggtggcttagtatcctcatggattttggcttgttagccgtcccctgccagaaaatctggctctgctggacaccctcacacctctccaaataaaccttaaatttgcaaggtgaagtggggggcagcagatggcaggaagagttcaactaagaaagaagtttacaaaggcagctttttaagaaaatgtacctggggttttggttttattcaagtacgacgaggccaacagatcaggaggtgactgtcattgagagg

SEQ ID NO: 427272 - DNA, 571 bp, Homo sapiens
accatgtaatattgtttactaccaagacaagtagtaaaagagtatgcgttcgatgttgttcaacatcttatttttcctggtgttgtcttttattttgctcacctcttttgtgtatctatcattaaccattcatgaactacccaaaagaactayagaacttatattgaaaccatttttttttttttttttacacaattagcccactggttagtctactggatctctttttccctggaggagcctcccgtccagcccctctggtctaggggttttccaggccagctgcccacctgttgtcctggggcttctttttaacaccattttgtgaaatccctatgcctctttcctgtgttggagcccccatttcctggatcccatgatttcctctttgttggtttacatcctcatttttgtagagcacattctctagtagcttcctgagaaaaggtacatgggaggtgaatttgttgagacctcatgtgtctgaaaatgtcttaattctactctcatactgagttaaacttgtaattgaattttaagtaaaatgtaattttccctcataatgtttagg

SEQ ID NO: 427273 - DNA, 571 bp, Homo sapiens
accatgtaatattgtttactaccaagacaagtagtaaaagagtatgcgttcgatgttgttcaacatcttatttttcctggtgttgtcttttattttgctcacctcttttgtgtatctatcattaaccattcatgaactacccaaaagaactatagaacttatattgaaaccatttttttttttttttttacacaattagcccactggttagtctactggatctctttttccctggaggagcctcccgtccagcccctctggtctaggggttttccaggccagctgcccacctgttgtcctggggcttctttttaacaccattttgtgaaatccctatgcctctttcctgtgttggagcccccatttcctggatcccatgatttcctctttgttggtttacatcctcatttttgtagagcacattctctagtagcttcctgagaaaaggtacatgggaggtgaatttgttgagacctcatgtgtcwgaaaatgtcttaattctactctcatactgagttaaacttgtaattgaattttaagtaaaatgtaattttccctcataatgtttagg

SEQ ID NO: 427274 - DNA, 571 bp, Homo sapiens
accatgtaatattgtttactaccaagacaagtagtaaaagagtatgcgttcgatgttgttcaacatcttatttttcctggtgttgtcttttattttgctcacctcttttgtgtatctatcattaaccattcatgaactacccaaaagaactatagaacttatattgaaaccatttttttttttttttttacacaattagcccactggttagtctactggatctctttttccctggaggagcctcccgtccagcccctctggtctaggggttttccaggccagctgcccacctgttgtcctggggcttctttttaacaccattttgtgaaatccctatgcctctttcctgtgttggagcccccatttcctggatcccatgatttcctctttgttggtttacatcctcatttttgtagagcacattctctagtagcttcctgagaaaaggtacatgggaggtgaatttgttgagacctcatgtgtctgaaaatgtcttaattctactctcatactgagttaaayttgtaattgaattttaagtaaaatgtaattttccctcataatgtttagg

SEQ ID NO: 427275 - DNA, 630 bp, Homo sapiens
cagaaattaaagggcctggttcattaacaaagaatcagataatctgacaaaagtgcatcaaaaaaggcaacrtgagtgtgtgtgtgtataaaggttagatgcatcttttcattttctttcacaaaagcatcatttgctagcgtgtgggatctgagtgctagtttgctggcttagattactaccgtttaaagaaagagagagataatggcaggatcttatttagaaaatagcattctacctgaataattttcttctttgagtattctaaggcaacatagttcatccaaaacagagaatgagaggcaccgatttttaacgtaacgactatgcactaccttacattttggacaattttgctctagctatgactcattaacaaatttttttttaattgccagagaaagttgagaagttccctttggaaaaatccaaaccacacttagcagtttcgtctgatgttcatttgtttaatttcctgggagtgaggttgactcgtttatggggacttaacctagtgccattattagcagaaaagattatttaacattttaagaaaacatgggaaaatgctaggcacatggcatcccaaacataaactttatttgctaccctctcgaagaatttgtttgc

SEQ ID NO: 427276 - DNA, 630 bp, Homo sapiens
cagaaattaaagggcctggttcattaacaaagaatcagataatctgacaaaagtgcatcaaaaaaggcaacatgagtgtgtgtgtgtataaaggttagatgcatcttttcattttctttcacaaaagcatcatttgctagcgtgtgggatctgagtgctagtttgctggcttagrttactaccgtttaaagaaagagagagataatggcaggatcttatttagaaaatagcattctacctgaataattttcttctttgagtattctaaggcaacatagttcatccaaaacagagaatgagaggcaccgatttttaacgtaacgactatgcactaccttacattttggacaattttgctctagctatgactcattaacaaatttttttttaattgccagagaaagttgagaagttccctttggaaaaatccaaaccacacttagcagtttcgtctgatgttcatttgtttaatttcctgggagtgaggttgactcgtttatggggacttaacctagtgccattattagcagaaaagattatttaacattttaagaaaacatgggaaaatgctaggcacatggcatcccaaacataaactttatttgctaccctctcgaagaatttgtttgc

SEQ ID NO: 427277 - DNA, 529 bp, Homo sapiens
taaaaccctaaattggatggattatagggtctggccagaacacaggacaagatggatctttagctggtaaacaccagtatggccatatcactgttttaggccagcatctgttctgcttggtcagtgcccaagacctatcatttgttaaatatttaggcatcattgttgcccatmtcaaaatgaaatgtttgccaaataccaaatgtttgacttttactctggcaaggagagagtaacagtgactggatatggtctcccacctgaaacaactaaaaagccagataaagtatatgaaacatggttttcagatactgggcatgaggtaatgcaagacaatgattcatgaaagaagtaaaacaaagtgagccatatgattgccccagcttattgccaggagagtttccgggctacagcacagggaagaggaactctggaaaagtctgacagtctctctgagtaaagaaatagttggtagtttaggatggcagcttagagttcatagggtaaagtaccagagagaagagaatag

SEQ ID NO: 427278 - DNA, 529 bp, Homo sapiens
taaaaccctaaattggatggattatagggtctggccagaacacaggacaagatggatctttagctggtaaacaccagtatggccatatcactgttttaggccagcatctgttctgcttggtcagtgcccaagacctatcatttgttaaatatttaggcatcattgttgcccatctcaaaatgaaatgtttgccaaataccaaatgtttgacttttactctggcaaggagagagtaacagtgactggatatggtctcccacctgaaacaactaaaaagccagataaagtatatgaaacatggttttcagatactgggcatgaggtaatgcaagacaatgattcatgaaagaagtaaaacaaagtgagccatatgattgccccagcttattgccaggagagtttccgggctacagcacagggaagaggaactctggwaaagtctgacagtctctctgagtaaagaaatagttggtagtttaggatggcagcttagagttcatagggtaaagtaccagagagaagagaatag

SEQ ID NO: 427279 - DNA, 562 bp, Homo sapiens
agatgacattaagattgctaatcagctaactttatgacagattattctggattattgatggrggcacaatataatcacaagagtcctaaaaaggggaagagggaggcacaagataaggttggagtaatttgatgtatgaagaattcaaccctccattaccagttttgaagatggaagacagcactgagccaaaaaacataggcaacatctacaggatggaaaaggcaaaaaaacagattctccttggagcctccagaaagaaatgcagccccgatgacatattgattttagcccagtgagatttgcatgagatttccaaccacagtactacaagataataaatttgtgttgtttttaagccactaagtttgtggctacctgttatagcaatagtaaaaaatgaataaaaagagaaattacataccaggcatacaaagaagcaggaaaatgtgaccaataataatgagaaaaataaaacagtagaacaaaaaaataaataacacatagatgacagaattcgtagacaaaaatattaaatattcataactgtgttccatgtgtt

SEQ ID NO: 427280 - DNA, 584 bp, Homo sapiens
tatttgaacaaataatggctgaagattatccaaatttgatagaaactataagctcacagatctaagaaactcgagaatagaaggcacaagaaacatgataaaagtatatgagggaacatcataatgaagttacttaaaatcaatgataaagacaaactcttaagagcatccaggaaaaaaagacatattacatacagaggaactaagataaaaataagagtatatttcttgttggaaacaatgtaagccagaagacactagaatagcacctttaaagaactgaaattaaaaaaaaatcttttctttaactttttctttacccagtaaaaatacctttcaaaatgaaagtgacagaaaaactttttctgacataataagctgaaacaatccatcaccagcagatctatactataagaaatattaaaaaggaattcctctaggcagagaaaaatgatgagctgtaaatcttgatctacacaatggaataaagaatatcggaaatggcaaatatatggttgaatagaaaaaaaaawtttttacttatttttgaactctttaaaaaataattgcctgaaaagagcaaa

SEQ ID NO: 427281 - DNA, 468 bp, Homo sapiens
ttaacccaatcacactgataatcatattaaatataaacagtctaaataaatatccaaaggcagagatcaatccaatatatcagattggatataaaaactatatgctacttataagaaactcacttttaatacgaagtcataaataagttaaaaataaaaggactgaaaaaaatacaccatgctaacattaatgaaaagaaagctggaaagggggcatgctaatattaggaaaagtgaatttcagataaaaaatataattatggataaatgagtcatttcataatgataaagaggtcaatttaacaagaaaatataacaatcccaaatatttattcactgaataacagaacttcaacatatatgaaataaaaactaataaartggaaagctgaagtagatgaatccacaattaacagtcagaaatttcaacaaccctctcttaataattgctagaacaagtacatagaa

SEQ ID NO: 427282 - DNA, 597 bp, Homo sapiens
tcttccagaaaattaaagggtataccttccaatttgctttatgattccagcattacttttgttacttaaatcagataaaaacattagaagaaagaaaaactatagacaatattcagcatgaactttgatgcaaattctaaacaaaattttagcaaattgaatatagtataatgaataatacatcatgactgagtagtttatcccagagatacaaggttggtttaacattaaaaagtaattcaygtaatttaccaaagtagtagactaaaaaagagaaacacacacacacgatcatctcaatagatgcagaaaaagcgtctgatgaaaatctgacatccattctctcagtaaactaaaaatcaaaggaaatttcctcagtaaaggttatgtactttaaaactacacatatgatcatacttaaaatggtatttcttcataaggtcagaaacaaggcaaggatatccactctatttctattcagccatcaggatatatgacaacatgcgtgactttcagaataactatattgagtgaaagaaaccagaaactgagtacattctataggtttcatttacataaaattctggaaaatgcaaa

SEQ ID NO: 427283 - DNA, 571 bp, Homo sapiens
agcaggagaaaattttatcttataatatcaataaataactcttagaatactctcaagattaattttgagaggaaacttataatcattaacttttatattgagcaacaattctataaaaacacaacagcctaaatcaattcaaaccttaaagtaaaaatgtttgcaacatatatgacctattttgtaaaggggcagaatccacaacaaagaaccctagtaaatcaacaagaaaaaaaaatgtttcaacagataataagtaaaaaacaaaakggaaatttaaaagagaagaaatagatatggtaaattaagatttggaaaagttcaaataaaaacaagatatttttcacacattagcaaacatttaaagaaacaataatagtagttttggtgagaatttgagggctgggctaacaatatgtgtagctagcattcaaaaggtatttatttacatgagaaaattttgccattttttcttcactggtaagaaaaaatgataaacaaccatatatttggaatgatatcaactttttaggattaaacacattcgtttatacatttgtagaaaaagaaa

SEQ ID NO: 427284 - DNA, 586 bp, Homo sapiens
tcaggaaaagttaaccataggtgggtggaagcttttccccagctggagaagctcagtatgtcaatgaaaccggaggttactaataaaaacacatgaatgacatgaacaggtctattctgaaaatagcagagttggaaaatgctaacgttagagacagagtcagtaacaacaatgaagcctgccagattggtgtcacttaagagacatgatctaaatagaaagaaactcaacccattgcatgaggatgcttaagttattttgtttgaagagaaatttatcttgctcagtggaataagccagaagactaaacaggaaaagaccattagggaaagatacccaacragcaaatcagaacaatatgaaaaaagtaatatcttaaagccacctatattaataaatttggtttgcctgttcagagttctaaaaatgacttgtgaggggagagtacagtgtttctttgtactccattactctttggggtaaaacctgtttgacaactcagttcaacatgactgacagtattaatcatgcacctatatgtggctagcactgcactaggaagtgtctctgctcataaacagtgaaa

SEQ ID NO: 427285 - DNA, 611 bp, Homo sapiens
aaagccaccatctgtctcttgcagagacagttcctcaatgttgaaggaaaaattttttctcctgaaagaccacagaaaggatccccacatactgctgtaataggctaacgcccctctgtccttgcactttcccatctttccaaccctctgcttgccatcctcagctctgcccatccagccacccctccactttcttgcctcatcagcccaccccttttttcatggctccactgccactcttgtaggagtgtgtagtccagctctgaaattactctcctgaaaatgctcatgccttctttgtgcccttgtcctttcattctcaccacctgttaaaatccaaccttggataaacccacagagaacttccttctctgtgcctgcctactgggaggacacaacagtgctggagaaaaccacgcagggctctcaaagagtgtccagacatyttaccatatttttctggtcagcttcctgtctctcccccagtgaaaccttcaagggttctcccttctcttccaaccttccattcctcatcagcccacttatcctcagcagatgcctgtccttttctgagaaatggaatccattagccaggaactccctccacctga

SEQ ID NO: 427286 - DNA, 626 bp, Homo sapiens
cttcatcatggctgtgtcagagaatgccaccattaatatctgaagggactaaagaaagaaactttgctggtataagtatgattttcattttaaaaacaagcatgtggggtggtttatcaacagacagtcctgagtgtatttgtaagctgaagagacagtttcaggcaggatttccagattctatttttttatctctgaccacttctctcatttcaaatcttggagccctgmaatagtaggaatgtagtgggacacaagagagggatctggagacctggctgcagggtaggctgaaacttgaaggagcatctgagagcttcttcctaatttcacagcagaggtgcgtctgggcgttacggtccccagggcgtcaacaaccatccctatgttgtggccaccaaagccatacctccatcaggccttccttcctgcttgccaggcccataaatctccctgctcaacacaggttttctttcaacaggttcctcaaactcaacatatccaaaaggaaatgagccatcttacccatccttctctttcagccttccccaccttctaagcaaatggctctatggttaaccccacttgcaagtctagaagcctaggagtcactgttgattcttcac

SEQ ID NO: 427287 - DNA, 626 bp, Homo sapiens
cttcatcatggctgtgtcagagaatgccaccattaatatctgaagggactaaagaaagaaactttgctggtataagtatgattttcattttaaaaacaagcatgtggggtggtttatcaacagacagtcctgagtgtatttgtaagctgaagagacagtttcaggcaggatttccagattctatttttttatctctgaccacttctctcatttcaaatcttggagccctgaaatagtaggaatgtagtgggacacaagagagggatctggagacctggctgcagggtaggctgaaacttgaaggagcatctgagagcttcttcctaatttcacagcagaggtgcgtctgggcgttacggtccccagggcrtcaacaaccatccctatgttgtggccaccaaagccatacctccatcaggccttccttcctgcttgccaggcccataaatctccctgctcaacacaggttttctttcaacaggttcctcaaactcaacatatccaaaaggaaatgagccatcttacccatccttctctttcagccttccccaccttctaagcaaatggctctatggttaaccccacttgcaagtctagaagcctaggagtcactgttgattcttcac

SEQ ID NO: 427288 - DNA, 531 bp, Homo sapiens
ttcactctccttatgttccatgtggtcttagtcatccattcctgtggtttctacaatgaaatgtctcatgaatcccttcaggttactccatctgtactgctcaggataatcgctggcattactgccatcactgtctcttatctgggtaactcctgtctggttgccaacctttccacacccccatcagtcctctataggggttacaaacatgctctgtaaaaatataattctgatcctgctactcccctgcttaamtttcttcagtgacatcctatagcaccctttatctattagtagcataaccacttatcatgttaatttgtttttgtgtatttactcttttctgtttctcccgccactctaaagcatgacagtaaggtctatgtcctgtattcccagtatttagcataacatctggctcaataaatctcagttaaaagagtgatgcttgaggagatgaaaggatttaacaaatccctcttcatatctgggcatattaaagaggataaaggtgttcctgtgaggattaaa

SEQ ID NO: 427289 - DNA, 575 bp, Homo sapiens
attgagcctaaatcctcagaaaatagagttcctatcagaaatgttggcacacgttccctattgctgctccgctggccatctccacactgcttaggctgttgtggacatgtggaatcagcagggaaatgcttttcacttttagctcacatatgtttttaagtagaatttttctgtagtggtactgatatccccagtatgagattagtagtrctattttcttaatggtcaaattttgatatttatcaatagccatcataatgatagatctgctgatggcatctggcacattaatttgtaaatgtggtagaattccaacaccgtgtaaactctttctggtggattttactttagaaaatcaactcactgctcttccaatctgtctgccttcaagttgttgcatgaggattcatctcaaatcaccagcaaacctgcaacttctttacctccttctccctttctctgtgggtaggcccattctctcaggaataccagacaagagggtcaagctaccgagaaacatgagaaaacatgtctagtaatagacctgctgaaatcactctatatttgtttttgct

SEQ ID NO: 427290 - DNA, 575 bp, Homo sapiens
attgagcctaaatcctcagaaaatagagttcctatcagaaatgttggcacacgttccctattgctgctccgctggccatctccacactgcttaggctgttgtggacatgtggaatcagcagggaaatgcttttcacttttagctcacatatgtttttaagtagaatttttctgtagtggtactgatatccccagtatgagattagtagtactattttcttaatggtcaaattttgatatttatcaatagccatcataatgatagatctgctgatggcatctggcacattaatttgtaaatgtggtagaattccaacaccgtgtaaactctttctggtggattttactttagaaaatcaactcactgctcttccaatctgtctgccttcaagttgttgcatgaggattcakctcaaatcaccagcaaacctgcaacttctttacctccttctccctttctctgtgggtaggcccattctctcaggaataccagacaagagggtcaagctaccgagaaacatgagaaaacatgtctagtaatagacctgctgaaatcactctatatttgtttttgct

SEQ ID NO: 427291 - DNA, 526 bp, Homo sapiens
agacccatagaaaatataatttatgaaaacctattttcatttctgcccttcttagcaaagtgagacataacccacttaagaaattctactcccttttattcctgtctgagaattcctgccatttgagaaaatatgctgttgcttaatttattggttggaaatgctaaaattgtatttgtgaaattaatattgtaaaaagagatggcaagaygtaaatagtattaacctttcattactctgtacttagaacatttttttcctgaaatttccgtacccagcttcattttccaaaggtcctggaagaccttcatagaacttggctcatattaggctacaatttaaatgtttactggacaaataaacaagaaaaataattaaaggtagcctacaaaggtgaatttccaaaaatcccataacctcagtgggctaaataccagatggagaagggtgctgcagatatgatgctccacattttccttttatgcttcgtctccaaggccctactctatttattgctgtggcatct

SEQ ID NO: 427292 - DNA, 606 bp, Homo sapiens
tacataaataattgtggaaaagaagaaggaggcatgagcaaaaattgaccttaaagaatacagatgagagagaaaaatatctggctcatggtaccgaatgcaatttcatgttagcttagagtcatcgtatgtatttaggttttattatttataaaaaagaaatcgtgctgaatgttctttgtgggaactgcartatattgctattgctacgatggtttactattttcacagctagatggcttaaacccaaactaaacaaatattttaaaagaattcccaccagcattattacttttttttcgtttctagtgttaatgaaaaagatcttctgcttttcaagtcctctgatatctttactcttgagcaattctcaattttatggcttatgatgagataatgtttattgaaaaataacaacttaagaaaataaccagcaactagtggtggttaagcagtgcagtgtctgaagtgagggcatttgagaactgcagtggctgtcaactccaaatattcaccaggtcttgactattacggcaattaggatgatgattttattacttgcacactgaagtagacatatttttgtgtactcatccaagatatcaa

SEQ ID NO: 427293 - DNA, 611 bp, Homo sapiens
tggattacataaataattgtggaaaagaagaaggaggcatgagcaaaaattgaccttaaagaatacagatgagagagaaaaatatctggctcatggtaccgaatgcaatttcatgttagcttagagtcatcgtatgtatttaggttttattatttataaaaaagaaatcgtgctgaatgttctttgtgggaactgcaatatattgctattgctacgatggtttactattttcacagctagatggcttaaacccaaactaaacaaatattttaaaagaattcccaccagcattattacttttttttcrtttctagtgttaatgaaaaagatcttctgcttttcaagtcctctgatatctttactcttgagcaattctcaattttatggcttatgatgagataatgtttattgaaaaataacaacttaagaaaataaccagcaactagtggtggttaagcagtgcagtgtctgaagtgagggcatttgagaactgcagtggctgtcaactccaaatattcaccaggtcttgactattacggcaattaggatgatgattttattacttgcacactgaagtagacatatttttgtgtactcatccaagatatcaa

SEQ ID NO: 427294 - DNA, 560 bp, Homo sapiens
acagagatgactctgtttattctgtcaatcatcagaaagtttcacaagtatgatttccattttacagaaaagaaagtaaggcttaaagtacttaagtaaaacttctaacattccaaatcaaacagatggcagagtcagaatgagggcccaggtctttgcctcagtatttaaacatgtattaaatgtgactatttcaaagtttccatctagaatgacccaacatgattactcatctaatacatgccactacttcttaaaatgtactttacccttaaaaaaatcaagatgggtcctgccgatcaattctaaagaagttccagaacagaatggttttcaacatcatcatcattaaaataacatattggcctccaaggtgaatatattagaaaaagaaatatyggcaatgggaatattggcatgcttgtgcttttatttaatctcattccgtacatcggcttcatctgtttttttcctggcctggccctcgctattatttgccaacacaggatgatttaaggctgaaaccactcaggactgcaaaccctgaaatgagagccctg

SEQ ID NO: 427295 - DNA, 585 bp, Homo sapiens
gatcacagttttgttacagttttatgttcttattttatgctttccactagttttcttgactttgcatattcttgatgcaaatcagtgaatgcatataaagtgtaaacaataggctctcaacatggagcctacccaaatgatttaactgtgtagcattgattrtcttgtccactgtgtgagcaacgtgcacaaaatatgcattttgtatgttacggaggtcttgctgatgtggatgaagaagtgtgagaactaggatggagaagaagctaacttcaacagtctactctttagtgtcctccctttacataaaacaaaacaaacaactgatcagctactagtaatcaacaaacttaaatttgctgagaggaagtagttaaatagcaataccaagatgtagaggttagggaaggttgttttgcccctgcctattgacctacatatactgaagcaaaattggaaaactgcagcatatttggtcacaaggtctttctatttccattcataatttcttttctttattccctctttttttttgttcttcagagaacacctttcttgatatgggtgttttaaaattctgatcag

SEQ ID NO: 427296 - DNA, 617 bp, Homo sapiens
atatgaaatccagaaaggtatatttctttcacgccatgtgatcacagttttgttacagttttatgttcttattttatgctttccactagttttcttgactttgcatattcttgatgcaaatcagtgaatgcatataaagtgtaaacaataggctctcaacatggagcctacccaaatgatttaactgtgtagcattgattatcttgtccactgtgtgagcaacgtgcacaaaatatgcattttgtatgttacggaggtcttgctgatgtggatgaagaagtgtgagaactaggatggagaagaagctaacttcaacagtctactctttagtgtcctccctttacataaaacaaaacaaacaactgatcagctactagtaawcaacaaacttaaatttgctgagaggaagtagttaaatagcaataccaagatgtagaggttagggaaggttgttttgcccctgcctattgacctacatatactgaagcaaaattggaaaactgcagcatatttggtcacaaggtctttctatttccattcataatttcttttctttattccctctttttttttgttcttcagagaacacctttcttgatatgggtgttttaaaattc

SEQ ID NO: 427297 - DNA, 535 bp, Homo sapiens
atggctgtcttaggcaagatgtttagacaaggctttgcttaggaggtgctatttgaggagatatgtgaataatggagtggggtgagtcataggaagcatggtcaaagagtattttgggcagaggaaacagcaagtacaaaaacccagagaaaggaagaattatgccacagtcatggaatagaaagatgaccaggatggctggagtaagaagagtgttagagcatgaggtctgagaggtatcaaggggccagaactcatgtagtgttttgtaaaccaagataaggcatttgaatttattctacgtgtgacaggaagctcttgcagggttttgagtrtggaggtgggttagggagtaacatattagctctatgaggacatctaggaggcagcaagagtagaagtatggaaaccagtttgtaggatgcttttgcagtgggacagaaaagagataagaattgctttgactctagcaatggtacaggtaatgaaaagaagtcaaacttggaatatattttgaatttagagccaatatgac

SEQ ID NO: 427298 - DNA, 573 bp, Homo sapiens
tgttttatttatgggaagattttaaattattgattcaaattatttaatagttgcaggactatgtaagttattttatttcttttttattgagttttggtaatttgtatttttgtagtaattttccacttggtctacgttttccaatttattgatataaaattattcataataattccctattatctttttaatctttgtgattttgtcccatttttcatacctaatactgcctatctatctcttttctttatcttgatcaatctgactggagatttgttagttatttcaaagaatccatttttggctttgttgaccaaactgtgttttatctttgttttcagtttcattaagttctgctcatgtcttcatttctttctctccactttcttygttttttttctgtctttcctcctaacttctaacttattttctaatataagcgttgaaggttatacatttttctacttttttgtgtgtgggaagtacaaaaattgtcaattgggaatttcgaagtagagaaaaatatttcattctgacttttaaattgccactgtcaattgtgcctaaaattca

SEQ ID NO: 427299 - DNA, 443 bp, Homo sapiens
attgtccattgtcctgatgtaaattttttttatatcttcaaacctttaataactttggctttttaaatgataggaatcatataaaaggggcccagctcatgcagacttmtaacccaaggtgtgaggaaaatatattttttaatcaaaccagtagacaagcatcatcttgtggatcgtgattttgtttagtcactttaatgtatatagacaggttgccatgtgcaggagaaaaaggactgccttccatgaaaattcatttttctacaagagttcttaaattcatgaatgtagtcacattgacctttctctgggggtccatataacatggttaggcatctgtgttaaattagatttgaaaattttctgctactataacaggttttaaaatataggacactagcatttttttatttcaagctgatttcatatatcagttcaggctt

SEQ ID NO: 427300 - DNA, 443 bp, Homo sapiens
attgtccattgtcctgatgtaaattttttttatatcttcaaacctttaataactttggctttttaaatgataggaatcatataaaaggggcccagctcatgcagacttataacccaaggtgtgaggaaaatatattttttaatcaaaccagtagacaagcatcatcttgtggatcgtgattttgtttagtcactttaatgtatatagacaggttgccatgtgcaggagaaaaaggactgccttccatgaaaattcatttttctacaagagttcttaaattcatgaatgtagtcacattgacctttctctgggggtmcatataacatggttaggcatctgtgttaaattagatttgaaaattttctgctactataacaggttttaaaatataggacactagcatttttttatttcaagctgatttcatatatcagttcaggctt

SEQ ID NO: 427301 - DNA, 613 bp, Homo sapiens
gacaattttagcaataaaagaaaatactcatgttaattttaaaaagaatacaaaattatatatccagtatgcctagatgtgtaaaattctattttaattcaaaattgcatagagatataccaaaatgtggtgattgtttctggattttattckttatacttcttacaattccactattgtgaagtacttaaagtactatttctagtagtttccattagcattcccaagctatttttacatgtcagtctcaattgtctcattttcatcatgggaattagtgtgtggtatataaaattagtctatatattattactacatatagtttataaactataatgcacctatactatgtaatataaacattttattttaatgtgttaatatatttgtacttgttaacttgcattttgttagtatatgcatgagttgatataagctgcataatatcagcaaatacatactacataatttcagcatatatcaatatgtatttcagttatataaaatttatttctgcctacaaaaaaggattaattacatttgaacttaattcagggtggtcttaatggctgctgcattctcctccattcatagtgacacaccacagcaagta

SEQ ID NO: 427302 - DNA, 613 bp, Homo sapiens
gacaattttagcaataaaagaaaatactcatgttaattttaaaaagaatacaaaattatatatccagtatgcctagatgtgtaaaattctattttaattcaaaattgcatagagatataccaaaatgtggtgattgtttctggattttattctttatacttcttacaattccactattgtgaagtacttaaagtactatttctagtagtttccattagcattcccaagctatttttacatgtcagtctcaattgtctcrttttcatcatgggaattagtgtgtggtatataaaattagtctatatattattactacatatagtttataaactataatgcacctatactatgtaatataaacattttattttaatgtgttaatatatttgtacttgttaacttgcattttgttagtatatgcatgagttgatataagctgcataatatcagcaaatacatactacataatttcagcatatatcaatatgtatttcagttatataaaatttatttctgcctacaaaaaaggattaattacatttgaacttaattcagggtggtcttaatggctgctgcattctcctccattcatagtgacacaccacagcaagta

SEQ ID NO: 427303 - DNA, 517 bp, Homo sapiens
tgacacataataagctttcaatagtatatattgagtggataatagaagtttcagaaatttccaccttaattttacagcaaagtccaaagactggtcttgcccctcccatggggggctggcatgtcctctagtagaggtgagtgtggaaactttctatccttctgagattgagatttgtgaaaatgaggtagggaagatgggatggcccgtttactttccattcctcattatattttgactttttcttctagagttggttttactaagtggataccatttgagcaccatattagccaatatcctgggatgattaaaaagatactgtaattgagaaaaaagaaggaattttttgkattcattttctctcattcctatccttactatagtttaaatgtggtcatcaaagagacaccaaaatgaagttcaagaatgtacaggaaggcagtggtgtaaaattagttggaaaataactgtcactaaaatgtcagaagtgagtcttaaagtaccactcatccca

SEQ ID NO: 427304 - DNA, 583 bp, Homo sapiens
tggcagtgatagcatgtaatgaattggtaaaatgtttgaatggycttattttcttatagctgatgaactctgggcaggtacgtagtttaagcatagggaaggattttacatcatgacttccagagcttttactgaatacagaaaaatattagcattcttagttgtgtcactggtttctccagatattgtaaaatttccacatgtagacagaaactattggcttgcttgtcttccttgcagaccagctacagtgtgtattcaacaagttaaaacctggtgggcttcttaactagggaaagtgtgtacatttatccaaggtgaaataaggttgccattaattttctgatttacagggtgattaaatgaaaaaaaaaaaaaaggatagaaacaattgcaagcagattgggaaaatgttctttatcctttccagaatatttctgatttttattatcattaacatctgagcatttcaatataggtcatatgttttaacaaacagcttaaactgaatacattttttaaaactctcacttgtgagtattgactaagtaaattttactcattgtggtaatggtgagaaagc

SEQ ID NO: 427305 - DNA, 513 bp, Homo sapiens
gtcatttgattcaactttttttgcacgtcttttttttgagttttaataaaacattttaagcactactgaacgtatttggggggtgatgttgttcacaggtatctctcttaatttttctgaaccayacatattagtgagatttgcaatgcttaaatgtctatagagtgtaatgctctgtctcctaagctgcaactctccaaagtaaatacatatgcattctcttgtgaagtttgtgctttcatttgtttgactcatttcattctttgactcaacccagaataagtaccctttacatagtttgggaattgatagtttcattcattatatttacctttgctgagtatttactggtcagaagtcattgattctcaggcagtctaggctataagataatgccgttgccacaaattggaaaaaaaaggtgatgacaaaccaaataggctaaaaatacagttcacttggacaggtaaaacaaacaacctggagggttaatggaaagcacgcatgctgtgg

SEQ ID NO: 427306 - DNA, 513 bp, Homo sapiens
gtcatttgattcaactttttttgcacgtcttttttttgagttttaataaaacattttaagcactactgaacgtatttggggggtgatgttgttcacaggtatctctcttaatttttctgaaccatacatattagtgagatttgcaatgcttaaatgtctatagagtgtaatgctctgtctcctaagctgcaactctccaaagtaaatacatatgcattctcttgtgaagtttgtgctttcatttgtttgactcatttcattctttgactcaacccagaataagtaccctttacatagtttgggaattgatagtttcattcattatatttacctttgctgagtatttactggtcagaagtcattgattctcaggcagtctaggctataagataatgcygttgccacaaattggaaaaaaaaggtgatgacaaaccaaataggctaaaaatacagttcacttggacaggtaaaacaaacaacctggagggttaatggaaagcacgcatgctgtgg

SEQ ID NO: 427307 - DNA, 592 bp, Homo sapiens
agtaggtgagttgcacaggaagatacatttagttgcatgtatggatggcttttctaatgaatgggaacattctagaaagaatgtggctgcctcatgaggcctgtgttcctggtctaaatgattcccagcagaagctgattgacatttggctcacactgatgccagggagattttccctttgggtggaaatgtggatgaataatttaaaatggtttctctgactctaagattctgtgagtctatggcaggatgaatttgtggtggtggtatggaaggacaggaagacctttgaatccagcatcaggaagaattactcccagtgacatttattctgttctgaaacactctgttctcatggatttggaagaaagtagtagtcgagattcatttatcctgtagtttagagtcacacattctgtagagttggcaaggtccacaaaagtcatcagatccaaccttgtactsactttcagaatctcctgatccatcatgaaaggtagcattgagttggctcaattgcttccagggacagaaaacttagcaagcttggcctcagagctcctgaaaccagtgccctgcagatgccaagcac

SEQ ID NO: 427308 - DNA, 576 bp, Homo sapiens
tgaaagaaactctaaagcagcarttttcaaacatgcttgattttgattaaaagttagaattacatttaacatcgtaatccaatacccatgccaatgtgacacatgcactactattattctattttctgtttcattctattctactctacttcattgaagaaatgttatctatgaggcactaacttgatttcataacctgttaataggctacggtgtacaattccaatcccctggaaactgttctctctgtgactatatactgcttatcgatggtgtaggggaaactctgggttgaagcagtcacctctagaacctctggggggccgtgaccggcagagatgcatgcacaccggctgttttgactacttctctgtgggttcccagttgtgcactgtgacaggaaggaaaagccaggaaggattttgctgcccctttacagttgcgaaagtgtctctgtgcaacctttgaaaatggacaagggatagctgccctctggttaaggcaacacacaccatgtgcacctgagatacacttgccttgattttgctgcatccctgaatgggaaacataatctgc

SEQ ID NO: 427309 - DNA, 603 bp, Homo sapiens
aaaatattacaaatcacatgtctgacaaagggcttgttttgaaacacgaaaggaactgttacaagtcagtaagaatgtgaacaacctaggaaaaattgggcaagagatgtgaacaaacactttaccaagaagtgatagtttgcatccctagtcattaaaaaactgcaaatgaaatgcacaatgagacacaattacacacccactagaatggctaaaatttaaaagactaatcatagcaattgttggcaagaatgtggagcaaccrgatgctcataaactgctgttaggaatataaaatttctttggaaaacaatttgacagtttctcaaacagttaaacatatacctaccatatgacccagccatcccactctgggtaattctccaagagaaatgtaaggaaatactcacacaaagacttgcacatgagtgaatgttcatagccctgtttgtagcagtcaaatctgcaaacaacccacgtagcctatctatcactcagcaataaaggctattggtctttgctacaacacgagtagggctttaaaagccatgtaaacaaaaagtacataacagtccattcatctaaaattctagaaaatgtgga

SEQ ID NO: 427310 - DNA, 643 bp, Homo sapiens
tgacggactcagatgagaatgaaagtcatgcagatggaaatcttgaacctgctgctgttcaacagggctgttgggagaagcccctggagccccagactctttcttcatctctgaagtgtgtgtagcatcgagcgggcttcactgcagaaaggagaagaaggaagagctggaaatggagtcctgagggacaaggggacgctgagagccactctttcaaccaggaagaaaagccacagtgccagaagaaaaggtcaaaaataaaatatttaaattttcttactggtacttttcagatccaagactctctgtgaatagtcaaatggagagttgactcacaaatgatgtgttgaaatgtatttggatgcttcacagtgcagaattataagcctcaattaaccagatagtttcctcagttctcctctgcccccacccctttttttttttttttttggagaaagattgtttacaaagctcaatctgtgttcatatggcagtcatcatcttaaacaatattragcaatatttattaagtcagtaaaaataaatttgacacttgccttctctgtagaggtttggaaccaaaacttgttgcacaagatgtggttaagtgagagaaacacacacagttgtgtagtaaacacca

SEQ ID NO: 427311 - DNA, 606 bp, Homo sapiens
ggttgttcatgtcccctcttcaaagtctcttctatacgcagggcttgtttcctaatataagacagtgtcctaacatgtaaaccaggaatactttcctacttcaagtaggaaaaaaacctaaatagagtgacttaaataaataggagcttttcccacaaaacaagcaacccagaggtaacttgctgctggcatttgttcagcagtttagcagtgtcagagacaataatgatttaatttttctggccttttcctcatggttacaagatggctgttgcatactcagccatcatgtccacattccatcagatgggctaaaattgagtgaggggaagagcaaaggactgaatcaacaaagcaaaaccttcctcagggatacagagaagacayggcttatgtctcatcagccagaacttttaacagggccaatcccagctggaatgtggctttgaagaaaggaggttataaatggaggctgggcatgacaggcagcctctttgagatggcctccattatcctacatcctggtatttatgcctacatctttccttttcatgtgcacttgacctagtgactcacttctgtgcatgcactatggcaagtgatgac

SEQ ID NO: 427312 - DNA, 579 bp, Homo sapiens
cattgcccacctgtcaacattgcaaagtagaaaaccaggagctggaggcacaatggtaagggagggatgatgccctggtggggaargggcaccatcctgcccaggtgggtgctgacttcacacatgcactcctcccagcacccaatacgaatcagtgttgggatttaggctgaagcctcagaggctttcctttctgaggaattccttctgcctcaaagtcatcagaagtgcacaaacagcagcccagatcgccttcctctaggtacacgtgaccttcagaggcacagaaggccctcaggaaatacatgctcacaggggatgatagggaaatatcttagaattaaaacccctataagacacaagtgacacatagaacaaacaatggtaattaagcagaacttaagaaatcagacaaaaaacaagcataaaaagtaagtataagaaatactttaaaagagataagagaagctatgtggaacacggagcaagaatttttaaaaatcataaataagaatcattaagagctatctaatatgaagacgtaatagctaaaacaaagaacacggcagatgaaccaaa

SEQ ID NO: 427313 - DNA, 579 bp, Homo sapiens
cattgcccacctgtcaacattgcaaagtagaaaaccaggagctggaggcacaatggtaagggagggatgatgccctggtggggaaggggcaccatcctgcccaggtgggtgctgacttcacacatgcactcctcccagcacccaatacgaatcagtgttgggatttargctgaagcctcagaggctttcctttctgaggaattccttctgcctcaaagtcatcagaagtgcacaaacagcagcccagatcgccttcctctaggtacacgtgaccttcagaggcacagaaggccctcaggaaatacatgctcacaggggatgatagggaaatatcttagaattaaaacccctataagacacaagtgacacatagaacaaacaatggtaattaagcagaacttaagaaatcagacaaaaaacaagcataaaaagtaagtataagaaatactttaaaagagataagagaagctatgtggaacacggagcaagaatttttaaaaatcataaataagaatcattaagagctatctaatatgaagacgtaatagctaaaacaaagaacacggcagatgaaccaaa

SEQ ID NO: 427314 - DNA, 579 bp, Homo sapiens
cattgcccacctgtcaacattgcaaagtagaaaaccaggagctggaggcacaatggtaagggagggatgatgccctggtggggaaggggcaccatcctgcccaggtgggtgctgacttcacacatgcactcctcccagcacccaatacgaatcagtgttgggatttaggctgaagcctcagaggctttcctttctgaggaattccttctgcctcaaagtcatcagaagtgcacaaacagcagcccagatcgccttcctctargtacacgtgaccttcagaggcacagaaggccctcaggaaatacatgctcacaggggatgatagggaaatatcttagaattaaaacccctataagacacaagtgacacatagaacaaacaatggtaattaagcagaacttaagaaatcagacaaaaaacaagcataaaaagtaagtataagaaatactttaaaagagataagagaagctatgtggaacacggagcaagaatttttaaaaatcataaataagaatcattaagagctatctaatatgaagacgtaatagctaaaacaaagaacacggcagatgaaccaaa

SEQ ID NO: 427315 - DNA, 579 bp, Homo sapiens
cattgcccacctgtcaacattgcaaagtagaaaaccaggagctggaggcacaatggtaagggagggatgatgccctggtggggaaggggcaccatcctgcccaggtgggtgctgacttcacacatgcactcctcccagcacccaatacgaatcagtgttgggatttaggctgaagcctcagaggctttcctttctgaggaattccttctgcctcaaagtcatcagaagtgcacaaacagcagcccagatcgccttcctctaggtacacgtgaccttcagaggcacagaaggccctcargaaatacatgctcacaggggatgatagggaaatatcttagaattaaaacccctataagacacaagtgacacatagaacaaacaatggtaattaagcagaacttaagaaatcagacaaaaaacaagcataaaaagtaagtataagaaatactttaaaagagataagagaagctatgtggaacacggagcaagaatttttaaaaatcataaataagaatcattaagagctatctaatatgaagacgtaatagctaaaacaaagaacacggcagatgaaccaaa

SEQ ID NO: 427316 - DNA, 507 bp, Homo sapiens
atgtagaaagaatttaaactttcagcagtaaatgtctgctagataacagcagctggatggttggagaccatctctggtgccatgagtatcctcccttctgccaaacatttttatctgtggagcacaacacagaactcacttcacatccctgcaactttccctggccaagtagatttggtctcagtgctcttatcgctcatgtgacaaatgtgtttctcacaagaatgtgtgtttatatatatatatatgtataaaaatgaaaggttggcaagaaattgatatgaacttgtatagattggatacctctgctagcgataatatttattcatccatcttgactcactccagattgctgagactctatgtgtgtaaagacagtttctatctcaaattataaacaatctcttagcacttattgtggtgtgatggagctaatagtacytcaataaatgctcatagaagattataactttccaatgtctgttttgtggcaatcaacatataacc

SEQ ID NO: 427317 - DNA, 462 bp, Homo sapiens
tgttttgtggcaatcaacatataaccaactgaagtaattttatcacattgaaaattaagtgctaagaaaaaggaaagaattggggtgtgtattttatgatataatttcatgtggcaatgtagatgtcaatgtaactttttccttttctaaatgcccaagtcatttcacaagaccacaaaactcttctttcttttcaagtgaaaatgatttcttttcaaatagacgaaaaagaaattcattgccttcaggttatatgaggtgagaaaatcaggggagactatcctgttttaaaggataagaatttgagcaatgaaaatagctrgagagcccagattctcattagcaccatttttatctggtgtgtgatagcaggagatagagttgattaaaatcgcttttcagaggattgaaaaagtacattcttgtcactctcctcagatcattggggcattctgtttattt

SEQ ID NO: 427318 - DNA, 512 bp, Homo sapiens
tcatctgtagaatgcaaaacaaagtggtatattcgtacattttagtactacctatcagtaaagaaagcccaaatcactggtataccagtaacaagaataaacttcmacatcattatgttgagcagttaagaagccagacacaaaagagcacaatcgtgattccattttaaaaaatggaatgtggtatctatagatatcagaagaatttttgtctctgaggtgggagattgactggaaagcatcaagaggcaactttttggggtgctggaaatattatttgccttgatatgggcaatggttacagggattacacatttgtcaaaattcatcgatatgtttacctaagttatttactttgtatatgttagacctcaataaagtgctattcaaaataaacaaataagaacattaattcaaatgaacatcagaaaaacccattaactgaaatgaagcatcaatcccatgcacaattttagggcatgcagattctctgaaagtccaaatgcccctca

SEQ ID NO: 427319 - DNA, 525 bp, Homo sapiens
gtgttagtttttttttttttgtaagtaacatgaaagaaaaaaccaaaaatctaaagaaaaaaagatggataggagaagtcaatttactttaagtagagaaaaaagaatactgaaaatataaggcaatcaattttaaggaactgacttaaccccaggatgaggttacagcaagtttccttcatttaacacagtccagtccaaacatttttcatgggcacaactgaaaagtgtcactccataaagaaaaaataattggtaattttatacttttataagaagtcagccagatgtatccacacatcaccgtcaccagaaccacaatcaacttttctattcctgtacctaaatttttctgagtgcttaaatatatccaacaacagaattaaggggaagggaaatgttctggattgaattgtgcccactccctaaaaaatgataagttgaagttttaaactccattwtctcagactgtaagcttatttgaaaacaggttcttcacaaaggtaagtgggttgaaatgacgtc

SEQ ID NO: 427320 - DNA, 533 bp, Homo sapiens
tgattgtgtggcaagattatgtctagttttgaaagaaactgccaagttgtctttcaaattgctgtaaaattttacatcccaaccagcaatgactgagggttcctgttgctccccagcgtttgacattaacagtgtcctagattttgaccactctaataggtgtgtagtggtagcaaactgctgtttgaatgagcctcactggttcatctctaacaggaaaggactagcctaaatatttaagtttatcttgtatgtataaagttggaaggtctctaacaagtaattttgtaaagcttaaattacacagtgaaagatgaacaagtaaattttattatttaattccctaaattgaaggatgatgtgaaaaagactcccagaaactgtcatatctgatttcaaaagatttatcactraacagttagaagacttctgctaagcacttcaaattatatctaagttcattcatctattaaaaaagagatgaaaagatgtcattcttccccattagagtcattcacaggaagctatgtgat

SEQ ID NO: 427321 - DNA, 647 bp, Homo sapiens
gtgggctgtctgcacagtcataacacttgagtgtggatttgggggtaagtgcttttaaatacatcctttctttaagttttatggcactctcttaaaggaaatgtctttgtcaggacagaaaatcaggactcagagatccacaacagacctaatgacacataagaagaatacttgatgtcaaaactccttattctttccctacctgatccacctttcccaggacaaggacccatgataccagatacctatgtttcccaacacgatatgcaaatagatgtcttgcttagtggataataattgaaatattttaaatgccagagaacttggtgtccttgattatattcacagaaaactaacaatttcatttaggtcactatttaaataccagcaattgaagcaaattccaccctaaatcaatgtctgctgaattaatgactatggtaaggaaattaataatttccttgagggaatcctacagaaataggcagatacttggaaagtgctatttatttagaatattaaggacttaggaacaccttgcttgatgcaggtgtataagagacacaatgagagagatggttgcccagtcttgtgatcacctgagwgtgtgtagaatgatcacataaaaagatcaaaataactatggg

SEQ ID NO: 427322 - DNA, 636 bp, Homo sapiens
ccttacatttgcaaattgatgaccaaaagttttgatgctttttttttaaaggctaatgctgaatattttaaaaggacaatttcttgttgtcacatttaagaaattggagattacttgctcttactatcaagcttcaaaggcaaagataggaagaaaatcagagtggaagttctgttagagaaataaaattatataagtaaaataagaacttcttgttggagaatttgggatcaatcatattttcagaccagtgtaggagccattaagaaaaaaatggattttaattttccacattagcctagagccttattcagcccacctttgtgtaatgagaccaactcgactgccttaatcaccgttgatagacggaggatcaatctattatgacttaaattgtgcttatcctcttatgtcatcaaacagactatcttttagaatacagttttcaccacatacagctccaaattggctgtctacataaagtaaattaacatactatctactaaataagcttattttaatayaaacaatgattaaaacttgtgtgtatttcttaagaatatagccagtagattattttataaatatgaacaataaatgttttgtgccatattgggtggcgaaggaggatttgct

SEQ ID NO: 427323 - DNA, 547 bp, Homo sapiens
tttaatagagttgcattttcaaagcaaaatttcctagctgtccttgccttgctaatgaagttttccacttatctataatatgtgcagaatggtgatatttgatgtggcattttcttgacatttctaggctactataatcatactctttaattgtctctgcctaatctgcataggagacctgacatctcatcctrgtttctgattttaatcataactgcatggagccagaagggtcactaaatagcatccaaaaaacactgttatcaaagacacttttgccaatgcttttaaaaagccaaagcaaatgatatttttctaaaaaatgaggttgtttgttgtggtgaaaacaaagagatagctttaaattaaataccaaatgggttttctaagcattaaaataggataagtataaaaccagactagggatacatctccaatatcactatgctgataacatcacttaaattcgctaggcatttatggaaaacaatgataattccagtaaatgccagttctactttcagagtagctccactgaaatgaatga

SEQ ID NO: 427324 - DNA, 621 bp, Homo sapiens
ttacgtggtgcagactacatctctttttcaagattgcaaaccagccattattggttgaaaatttaatgtcttgctttstttctatcatttcttatttcattttctgaagtctcagcagaagtcttgtctttctctataccatcttggtgctcgaggagacatttcttgtccttttcttcccacagacaaagaggagtgaccacaaccagaagttttctctatgcactccccaaaggccaactcatctggttaatggaaaaggtgagctctatgtatggtcatgtcattctgcttactcctagttcaagccctgaactaggaatttataaattataataatagtaatgacaataatcaatggtagatataaaagcaggcagttgaaaagtctgatttgtgggaaagtagtttagaccttggtcaccagcactagacatgcctgggatatatattcaaaattatgattccttttttgttttttagaaatggagtctcactctgttgcccaggctggagtgcagtggtgtgatcgcaactcactgcagcctggaactcctgggctcaagttatctccccatctcagcctcccaaagcactgggattataggcatgagccactgt

SEQ ID NO: 427325 - DNA, 621 bp, Homo sapiens
ttacgtggtgcagactacatctctttttcaagattgcaaaccagccattattggttgaaaatttaatgtcttgctttgtttctatcatttcttatttcattttctgaagtctcagcagaagtcttgtctttctctataccatcttggtgctcgaggagacatttcttgtccttttcttcccacagacwaagaggagtgaccacaaccagaagttttctctatgcactccccaaaggccaactcatctggttaatggaaaaggtgagctctatgtatggtcatgtcattctgcttactcctagttcaagccctgaactaggaatttataaattataataatagtaatgacaataatcaatggtagatataaaagcaggcagttgaaaagtctgatttgtgggaaagtagtttagaccttggtcaccagcactagacatgcctgggatatatattcaaaattatgattccttttttgttttttagaaatggagtctcactctgttgcccaggctggagtgcagtggtgtgatcgcaactcactgcagcctggaactcctgggctcaagttatctccccatctcagcctcccaaagcactgggattataggcatgagccactgt

SEQ ID NO: 427326 - DNA, 518 bp, Homo sapiens
tcttggtgctcgaggagacatttcttgtccttttcttcccacagacaaagaggagtgaccacaaccagaagttttctctatgcactccccaaaggccaactcatctggttaatggaaaaggtgagctctatgtatggtcatgtcattctgcttactcctagttcaagccctgaactaggaatttataaattataataatagtaatgacaataatcaatggtagatataaaagcaggcagttgaaaagtctgatttgtgggaaagtagtttasaccttggtcaccagcactagacatgcctgggatatatattcaaaattatgattccttttttgttttttagaaatggagtctcactctgttgcccaggctggagtgcagtggtgtgatcgcaactcactgcagcctggaactcctgggctcaagttatctccccatctcagcctcccaaagcactgggattataggcatgagccactgtgcctagccctcaaaattatgattcttgaggcatgttga

SEQ ID NO: 427327 - DNA, 621 bp, Homo sapiens
ttacgtggtgcagactacatctctttttcaagattgcaaaccagccattattggttgaaaatttaatgtcttgctttgtttctatcatttcttatttcattttctgaagtctcagcagaagtcttgtctttctctataccatcttggtgctcgaggagacatttcttgtccttttcttcccacagacaaagaggagtgaccacaaccagaagttttctctatgcactccccaaaggccaactcatctggttaatggaaaaggtgagctctatgtatggtcatgtcattctgcttactcctagttcaagccctgaactaggaatttataaattataataatagtaatgacaataatcaatggtagatataaaagcaggcagttgaaaagtctgatttgtgggaaagtagtttagaccttggtcaccagcactagacatgcctgggatatatattcaaaattatgattccttttttgwtttttagaaatggagtctcactctgttgcccaggctggagtgcagtggtgtgatcgcaactcactgcagcctggaactcctgggctcaagttatctccccatctcagcctcccaaagcactgggattataggcatgagccactgt

SEQ ID NO: 427328 - DNA, 605 bp, Homo sapiens
taaacaataaggatgaggcctatttttttgyttgtttctaaaacacttttcaaagaatgtacagtgggaacctacatggaaatcttcataacaaaaattttttaggtaatataaggcacttttccttaggggaaaattaagagtttagataagggacacatttttaaataatcaaaaaaaattgaaaagatgcttcttttgcatctttggattgtgttgtgttcaattccctattattttattttccttgctatgcaaactctagacatcttgaaaattagctattggtaatcttatcagttctcctgtaagtctgccaagtaattggatagcttttcttgttttttgctatgtcacatcttcgtacctctaacatgcacactctcattctctgtatttatttatagagctctcacctctcaacttctttctctatttctgatattctccatctgaagcatgtatcagaagttctctctgtgattggtggaataaattaaaactgtgtgattatttactactacattcagcagcttggatcaaaaacctagatttacaactttctaactgtgtgaacattgttaaatttctgattgggttaagtt

SEQ ID NO: 427329 - DNA, 495 bp, Homo sapiens
gacaaattttctattattttaattttaactcaaaaatctttaaaggaaacagattatgtttgaattatacttctcaataattgcactgaaatacagtttatttcctaggtaacaattccctaaaagtttttcattacatcataatgtgtttataacttcttgttagaaaaggtgtcagaccatattatgaaaaaatgtctggcacataaaagcagtrataataaaacagttaaaaatgtaagctaatgagtcatactaactatgctccaatcttatcttttctatctaccacctgagtgactttgggcagattcttaaactctctgtatatcagtgtccttattttaataatatttgcttataaaaggttattgggataattaaatgagctaatacaggtaaagtgcttagaacagtgctagacagagtggattgtacaaatatcatcactattgttattgtatagatatagctattattattttataggataat

SEQ ID NO: 427330 - DNA, 534 bp, Homo sapiens
cattccagttactctcaatgacgtctccaggctccatcccatcaggaccatggtctctggaatcctgactcacagacatgatccttagaaactctaaaactatttttataattgtctaaataaagatcttccacaacttctgttagatttattagtaggcatctttttattgctattttaaatagcattgttttaaaaagtagagtttctcgccaggtgcgggggctcatgcctgtaattcccagaatttkggaggccaaggcaggcagatcacgaggtcaggagttcaagaccagcctgtccaacatggtgaaaccctgtgtctactaaaaatacaaaaaaattagccaggcgcagtggcccacatctgtagtcccacgtactcagcaggctgaggcaggagagttgcttgaacccgggaggtagaggttgcaatgagccgagattgtgccactacactccagcctggtgacagagtgagattccatttccaaaaaaaaaaaaaaaaaagtagagttttcaaactgttactgg

SEQ ID NO: 427331 - DNA, 622 bp, Homo sapiens
ttggactgtctgggtctatcctctgctactaacttgttatataatcttggacaagctatatagcttgttttctcatctgcaaaaatggataacactatacataccttataagatattgtattaagtyctgtaaagtgctcacaacagtgcctgatacatggttgtatctaataaatgttaactgttaaataggacctacagtatgatgttgaaatggcatttagtgggttttgtttatatttaatacagcttgaaatatttggccctttaactgtacagtttctttcaattaaaaaaaacttcatgaggcaaggaagctatatactgcatttctcttcctttagtgtttcaataaaaatttttctttcaattaaaaaaaacttcatgaggtgaggaagctatatactgcatttctcttcttttagatttcaataaaaattttaaagtactttttaaacttagcaatgaataaaattcacatctttacttttatcctaaaaagcattaatgttaataacttcccactcttaaaccattgcagtatttcagttctatctttattttaaaaatccaaaaaatcagatgttattattttgattaatatattctacagttgatattt

SEQ ID NO: 427332 - DNA, 622 bp, Homo sapiens
ttggactgtctgggtctatcctctgctactaacttgttatataatcttggacaagctatatagcttgttttctcatctgcaaaaatggataacactatacataccttataagatattgtattaagttctgtaaagtgctcacaacagtgcctgatacatggttgtatctaataaatgttaactgttaaataggacctacagtatgatgttgaaatggcatttagtgggttttgtttatatttaatacagcttgaaatatttggccctttaactgtacagtttctttcaattaaaaaaaacttcatgaggcaaggaagctatatactgcatttctcttcctttagtgtttcaataaaaatttttctytcaattaaaaaaaacttcatgaggtgaggaagctatatactgcatttctcttcttttagatttcaataaaaattttaaagtactttttaaacttagcaatgaataaaattcacatctttacttttatcctaaaaagcattaatgttaataacttcccactcttaaaccattgcagtatttcagttctatctttattttaaaaatccaaaaaatcagatgttattattttgattaatatattctacagttgatattt

SEQ ID NO: 427333 - DNA, 622 bp, Homo sapiens
ttggactgtctgggtctatcctctgctactaacttgttatataatcttggacaagctatatagcttgttttctcatctgcaaaaatggataacactatacataccttataagatattgtattaagttctgtaaagtgctcacaacagtgcctgatacatggttgtatctaataaatgttaactgttaaataggacctacagtatgatgttgaaatggcatttagtgggttttgtttatatttaatacagcttgaaatatttggccctttaactgtacagtttctttcaattaaaaaaaacttcatgaggcaaggaagctatatactgcatttctcttcctttagtgtttcaataaaaatttttctttcaattaaaaaaaacttcatgaggtgaggaagctatatacygcatttctcttcttttagatttcaataaaaattttaaagtactttttaaacttagcaatgaataaaattcacatctttacttttatcctaaaaagcattaatgttaataacttcccactcttaaaccattgcagtatttcagttctatctttattttaaaaatccaaaaaatcagatgttattattttgattaatatattctacagttgatattt

SEQ ID NO: 427334 - DNA, 504 bp, Homo sapiens
atgacttacactcatgtagcacttactatgtatcagctgccaagtgctaagagacattattattattcctattttagaggagaaaatggaatcacagaaaggtgaagtgacttgtccacggtgtcgtcactccctgcctccaacctcagctctagtccaagagtctggctgggtgctaaccccagctccccagggaaaggccgatgcctgtgggtataggtcacctsgaacctagtctagagaattccatcacacacctggccctgccctcagtttacacaggggaacaaggagagagagaaaatgacaaagccgaggatgaaggaatgagaagaaaaagaggaaaaggaaagaggtgattggaacccaggtggtctggctccagagccgaagaccttattgcctcactgtgaagaaacgaatgtcaccaatgacccagatgctgggcttctctggtcatctcttctcagtcctcagggttagaaacttcttccccctaccttt

SEQ ID NO: 427335 - DNA, 504 bp, Homo sapiens
atgacttacactcatgtagcacttactatgtatcagctgccaagtgctaagagacattattattattcctattttagaggagaaaatggaatcacagaaaggtgaagtgacttgtccacggtgtcgtcactccctgcctccaacctcagctctagtccaagagtctggctgggtgctaaccccagctccccagggaaaggccgatgcctgtgggtataggtcacctcgaacctagtctagagaattccatcacacacctggccctgccctcagtttacacaggggaacaaggagagagagaaaatgacaaagccgaggatgaaggaatgagaagaaaaagaggaaaaggaaagaggtgattggaacccaggtggtctggctccagagccgaagaccttattgcctcactgtgaagaaacgaatgtcaccaatgacccagatgctgggcttctctggtcatctcttctcagtcctcagggttagaaasttcttccccctaccttt

SEQ ID NO: 427336 - DNA, 371 bp, Homo sapiens
tgggctgctgcttcagagggtgcaagccataagccttggtggcttccacttggtgttaatcgtgtgggtgcacagagtgcaagagtttaggcttgggagcctctacctagatttcagaggatgtatggaaaagcctggatgtgtaggcacaaagcctgatgcaggagtrgagccctcatggagacctcttccaggtcagtgtggagggcaaatatggggttggaacctctacacagagtccccactgggacactgctttatggagctgtgagaagaaggccactgttctccagaccccagaatggtagattcaccgacagcttacaccttgcacctggaaaagccacaggcactcaatgtcggcccttggg

SEQ ID NO: 427337 - DNA, 593 bp, Homo sapiens
gtgtggccaactcatttttggcaaacatgcaaaagcaattcagtggaggaaggatagccttttcaacaatgctggagcaattgaatatccataagaaaaaaaaaaaacctatgatttaaatctcacaccttatataaaaattaactcaaaatggaatatagatttaaatgtaaaacataaaactataaaagtttagaaggtaacataggagaaaatatttaggacctggtgtttcgtgataagctcttagacacaacaccaaaggcagatccatcaaaggaaaaaaatcaataaattggacttaatcaaagtttaaaacttttactttgcaaaaatccctattaagagkatgaaaggagaagctatagactgggagaaaatatttgcacaatgcagatctcacaaaggactcaaattcccaatataaaaatgactctcaaaacccaacagtaaaaaaaaacaaataatccaattagaaaataggcaaatgacatgaaaagacttttcaccaatggcaaataagtacatggaaagatatccatactactagccattagggaaatgcaaagtaggaccatgatgagatattagca

SEQ ID NO: 427338 - DNA, 540 bp, Homo sapiens
agccagtaaaacaggaaagagcacagaaaactgcacagatgaagtctttatggacctgtcctgaaattgacacatatcatttccactcacattccactggggaaagtttagccctgtggctacacctccctgcaaggaaagctgagaaatataaccttactttcatgctgaggaagaagaaataacagatttggatgcccagccagcagtctctcttccacrgtcagtggtgtgtgtagccttcttgccacatgtagaagacatccagtccctttccaagggagtcaaagcaaaaccccatctagcctctgcattcagctcagtgtccagaacttctaggtgatgtacagtcctttccaacaagtctgatggaatttctcttggtccacagacttacgaactgtgctctactccccacccctgcacacacccaaaatataggataattgcaattaagattgggagacacaggcagtgccttgtccataacaatgatggaaccctgccagacaagcattgtgaagaccctctgccctggca

SEQ ID NO: 427339 - DNA, 611 bp, Homo sapiens
gatggctcctcaaagatgcccacttcctaattcctgtaacctgtgaatgcattgtcatacagggcaaaaagacttggaagattaagtgaaagatcttgagatgatgcaattatcctagattatttaggtgagcccaatgtaatcacaacaatctttataagagggaggcagcagggccacactcacagaaagggacatggcgatggaagcagagggacctaaaaagtgatgtggtgctggaagcaggggctggagcaggaggtggaaagatgcactttgaagatasaggaagaagccatgtgccaaggactgtaggtggcttctaggacctggaaaaagaagaaaattgattctctcctagaaccttccaaagaaactagcacagcatatataccttgacttttgcccagtgagactaattttggtcttctggccttcagaactataagataataaatatgtattgttttaagccattatgtttgtgacaatttgttacagcaacaatagtaatctcataccagtttctactcaggaacagaagctccattaaggagtcacattatctttatttatttgatatcctgtatctaatatcatcaaatcaatca

SEQ ID NO: 427340 - DNA, 528 bp, Homo sapiens
tgtatacatatgtaacctgcacaatgtgcacatgtaccctaaaacttaaagtataataaaaaaagaaagtaaattggccttaaaaatgtatcccctattctgcaaatttgttctaatgmaataagttgtgtatgcagaaaaggtttagtggatgaatagaagttcactacagcattatctacaatagtaaagaaaaattgagtacaatcagatgcccaacatcagggctggttaaatatactatgatttatcaaaatgtggcaggctattccttcattcagaaaatgtttatcaagtgcttactctgtaccatgcactgttctggaaatgtgagagatgcagtggacacaacagacaggaatccttcccttgtgacgcctgcatgctggtgggaaataaagactgcaagcaccacacacttttcatagaagtgcagtctgtggcacataggagggtgctgacataaaacagggcaggagaatggaaaacgtgcatgaggaggggttgtggaggagtgggaagctatta

SEQ ID NO: 427341 - DNA, 629 bp, Homo sapiens
aatagtaaagaaaaattgagtacaatcagatgcccaacatcagggctggttaaatatactatgatttatcaaaatgtggcaggctattccttcattcagaaaatgtttatcaagtgcttactctgtaccatgcactgttctggaaatgtgagagatgcagtggacacaacagacaggaatccttcccttgtgacgcctgcatgctggtgggaaataaagactgcaagcaccacacacttttcatagaagtgcagtctgtggcacataggagggtgctgacataaaacagggcaggagaatggaaaacgtgcatgaggaggggttgtggaggagtgggaagctattaaatagrgtggtcaggtaaggcctcattgaaaaggtgacattaagtaaaaacctgaagaaggcaagggagcaagctgtgggcagagagtgtttaaagagtgttgtagaaaatagcaaatgcatggccctaagactccatgcgtattcaaggaatagcaaggaaagcaccacagctgacgtggagtgagcaagggggaaagagcagtagataagagtcagccagatgccttggggcctagtggaccacactgaggtcttcagagttctctctgaacaaggggcac

SEQ ID NO: 427342 - DNA, 574 bp, Homo sapiens
tttaccaatttatggtctctaagtgcatttcttaaagttgcatagcagcaatttcaatttaagaaagaacaatgttaggatttgaatagagtccagagaaaatattacctgagtatccaaataaatactaatacttgtcacttaaatagcaatgcctatatgccargcactgttctaagtcttttacatctcttatctgatttaataattccaacaaattgtatgaagagtttccagatgatgcaactgaggccgcaagatgttaaataattcaccccagctaatgactgaggtggctgcgttgaatgtagataatctgttccacggtcttgaccatgatttaataaccatctcaataaatatggtttgattggacaaaagttttaaacttctcttattggtcataaataatcaaaataaaaatagaagaaaatttaaaaataaagatttataaccattaaaatgatctcttcttaatttggccttggtcaatctgttttgactgtctctgctctcagtggctaaacagcattttaacaagttttctacacactaagtgcctatgaactcacca

SEQ ID NO: 427343 - DNA, 600 bp, Homo sapiens
atgttgaaactccaagttggaggttgaattaaagatgatgaagcccatctggaggcaaatttaagccttgtcagttgatattgggcactaagcagagtagcttatgtctgtgttttatcacacgtattttgctctggccagaatgaaaaaaaaaaattttcctttatgatgtgacttggcccccagggcaatggtgccacaagcctgatcactggggccactcagggtaaaggaacccagaagcctggcatgccgtcaaaagggtaaaaatttcttagtagtcagatttctggcttctctctctctctgcgcaaatggttgaatgaatggttaaaaataaaaattaaaaataagtgtggccaggtgcggtggctcatgcctgtaatcccagcacttagggaggttaaggccggyggatcacctgaggttgggagttcaagaccagcctgatcaacatggagaaaccctgtctctactaaaaatacaaaattagccaggcgtggtggcgcatgcctgtaatcccagctattcgggaggctgaggcaggagaataacttgaacccacaggcagaggttgcagtgagccgagattgcgccatt

SEQ ID NO: 427344 - DNA, 600 bp, Homo sapiens
atgttgaaactccaagttggaggttgaattaaagatgatgaagcccatctggaggcaaatttaagccttgtcagttgatattgggcactaagcagagtagcttatgtctgtgttttatcacacgtattttgctctggccagaatgaaaaaaaaaaattttcctttatgatgtgacttggcccccagggcaatggtgccacaagcctgatcactggggccactcagggtaaaggaacccagaagcctggcatgccgtcaaaagggtaaaaatttcttagtagtcagatttctggcttctctctctctctgcgcaaatggttgaatgaatggttaaaaataaaaattaaaaataagtgtggccaggtgcggtggctcatgcctgtaatcccagcacttagggaggttaaggccggcggatcacctgaggttgggagttcaagaccagcctgatcaacatggagaaaccctgtctctactaaaaatacaaaattagccaggcgtggtggcgcatgcctgtaatcccagctattcgggaggctgaggcaggagaatarcttgaacccacaggcagaggttgcagtgagccgagattgcgccatt

SEQ ID NO: 427345 - DNA, 460 bp, Homo sapiens
tataaaaatcttacaggacgcatcaaatttgaaatgatgttttcctttttttggactatatttgcataaatttgttattggtatatgttccaaagttatgggaaacttctrttattctaatatgacagtgtatgttattaataattatcattgttatgtaaaattttgtgtgccacagaggtaaccaaatttccttatcagttgtggctttaatagtggctatcctaaaactttttattatccatagatagttgtttaatcctctttagaagatggcttataatcaactatagaactagcaggtgttcttaaatgcaggtttctaataactttggaaattgtaacattggaataaaggaaacaacttttagaactctcattaagaggtggagtgttcatgaatggaatgttcagttaacaggagttaactgaattaactgaaccaatagaaaactgaagt

SEQ ID NO: 427346 - DNA, 549 bp, Homo sapiens
aggcttggaatcttgaggatcatgttagaattttgcccacccacctgaatagacttttaaaatagtcttttagattttttttttttttttttttgagacggagtcttgctgtgttgcccaggcttgagtgcaggggcgccggcgccatctcggctactgcaagctccgcctcccgggytcacgccattctcctgcctcgacctccccagtagctgggactacaggtgcccagctatttttcgtatttttagtagagacggggtttcaccgtgttagccaggatggtctcgatctcctgaccttgtgatccacctgcctcggcctcccaaagtgctgggattacaggcgtgagccaccacacccagcctagtcttttagtttcttttgttatctaagtaaacaaagataatacctgcaaataataattaattactttccaattttattcacaacaaatattaactaattttttttctggcttaaattatttctctttaatataccattttatacattcatgcacagatataacaatgcaaatgtatccaa

SEQ ID NO: 427347 - DNA, 557 bp, Homo sapiens
tgctctccaccctgggtcacacaaaagggagaaaaggaactaaggaaagctttgtttctccctcttgttctagatgagcaacagaccatctgcagtctatactcccctcaagtgtattytaaattactaaagctcctttaaccgtaaaactctaaaaaaaaaaaaaaaaaaagacttatattctcttgcataagggcacagccatcttacaaattggagacctagccagtcaaaaaacaacaataacaaaaaagccccaaggaaaaaagggtagaacaagatccccattcccaattaaaataaaacaatgccccttaaaaacctaattaaagtcttggtgatcccataaatacgtaataaaaaaaaaaaaaactttctaatatgcattttaaaaagcttgcaaaaaaccaaaaccaaacctcgtagtaactctaaactgtccttgctaaatcaaaaaccaaataacgcacccccaccccgccacctttttaaatagcctaaaaaaagctttagtaaaaacacctacctgtatcccaactcaataaaaaaaacaggtt

SEQ ID NO: 427348 - DNA, 557 bp, Homo sapiens
tgctctccaccctgggtcacacaaaagggagaaaaggaactaaggaaagctttgtttctccctcttgttctagatgagcaacagaccatctgcagtctatactcccctcaagtgtattctaaattactaaagctcctttaaccgtaaaactytaaaaaaaaaaaaaaaaaaagacttatattctcttgcataagggcacagccatcttacaaattggagacctagccagtcaaaaaacaacaataacaaaaaagccccaaggaaaaaagggtagaacaagatccccattcccaattaaaataaaacaatgccccttaaaaacctaattaaagtcttggtgatcccataaatacgtaataaaaaaaaaaaaaactttctaatatgcattttaaaaagcttgcaaaaaaccaaaaccaaacctcgtagtaactctaaactgtccttgctaaatcaaaaaccaaataacgcacccccaccccgccacctttttaaatagcctaaaaaaagctttagtaaaaacacctacctgtatcccaactcaataaaaaaaacaggtt

SEQ ID NO: 427349 - DNA, 570 bp, Homo sapiens
ttcccctattgtgtatttcagtctttaaatgattacagacattattgtagcctgttagaaacaccctaagtgtatatatcctttaggtgttaattaatctttctaaggctgttttgaaaagttgaagtatttcttatggaaagcctggagacattctcctattgtctttactagttacattggggtagcagtatcttcagtgaaattgaacataataataacctttaatcttggaaatgggtatgaatgaatggaatttttgcttagagttggggtggaaaataggttgagatgaagttaagaggaagaaagcctttagaagccatcacagtaacatagaaataaagtatagattcattcatagctacacaaatacctccactccattactgtgattcaagataaaaattcttcagaagtatttacattatataatgtattttcgctgaagaataaaaatacgttatagtgaaattsttaataaagcatcaaacatttgtataatgatttatacttttccatagctttcaaattcaaaacctcatgatacacaataaaataaatcataaa

SEQ ID NO: 427350 - DNA, 616 bp, Homo sapiens
ccaaggcaagcaaaatgctgcaatgtgcagagtccctattgtagcaaatatatcttatttttttaatataatagtttaaggaagaaacatgagcaagatgttagaataggaggtcctagtttttggcctcctcagaaacaccaatttaacaatcattcatggataaaaataycatagtgaggatttcagaatccagttgagatgttttcaggataccagtagagcacaacatatgagaatagtcacattgaaaaggaaagaaagaactctttcactttacccaggtctcctcttcctcaggcaagcactaatcagtgctgagataggccttcttggcctgagattttgcctacaggataaacaaagagttaagtgatcatccaactttgccagccttttgggacattggctgagaggttcatttctgcttaccttaccaagaacactgaggaaactggcatagctagatcacctgggtgcaatgaatttgtgggagctaacaacacctggtgcctggctttcaacaacctgtctgctaaccctgtcaaccagccaggctgaccaagaaccatcagccaagcagccaaactgtggacctcaacagctggcccatgca

SEQ ID NO: 427351 - DNA, 616 bp, Homo sapiens
ccaaggcaagcaaaatgctgcaatgtgcagagtccctattgtagcaaatatatcttatttttttaatataatagtttaaggaagaaacatgagcaagatgttagaataggaggtcctagtttttggcctcctcagaaacaccaatttaacaatcattcatggataaaaataccatagtgaggatttcagaatccagttgagatgttttcaggataccagtagagcacaacatatgagaatagtcacattgaaaaggaaagaaagaactctttcactttacccaggtctcctcttcctcaggcaagcactaatcagtgctgagataggccttcttggcctgagattttgcctacaggwtaaacaaagagttaagtgatcatccaactttgccagccttttgggacattggctgagaggttcatttctgcttaccttaccaagaacactgaggaaactggcatagctagatcacctgggtgcaatgaatttgtgggagctaacaacacctggtgcctggctttcaacaacctgtctgctaaccctgtcaaccagccaggctgaccaagaaccatcagccaagcagccaaactgtggacctcaacagctggcccatgca

SEQ ID NO: 427352 - DNA, 541 bp, Homo sapiens
ttcaattggcctatgttagagttaygacactgtcttagtgtcttgtccattcatgctgctataaaaaaataccttagattgggtaatttataaataatagaaagttatttctcacatttttggaggccgaaaagtccaagattaaggtgccagcagatttggtgtctggtgaggtcttgctttctgtttcatagatggtgcctcttactgcatcctccttttgcagaaggacaaaaaggacaaaagggtagaactcattccctccagctcttttgtaagggcactaatccaatctatgagggtggagccttcaaagcctagtcacctcccaaagacctcacctcttaataccaccatcttgaagtttaggttccaacctatgaattttgggaggacgcattcattcaaactgtagcagagacgtggattttagagtttgaatcagagttttactgagtaaagtccttaatcacatattcagtgaaaacaatgcagctgtttaaaactgatgataagacgggaagtcctgtgcgtaaatcac

SEQ ID NO: 427353 - DNA, 604 bp, Homo sapiens
aaacttttgctgtgaatttatcctgagccacacagatattcaaaattgaatatattattcttctcctaactacatttttatactccacattgaactgttgtaaattctgtatttttcaatctcttctattggactacagttttcaccagatacttgatagtaaatrtccagtttctgaaaaatactatgaactcaagattctcctaaaatcttgacaattactatagttaatgtagttactcagtttttcctaaatgctcctgtatgctgtaggcatcctttcctttaatactccaataaaattactagtttccacattccagaacctttctccacttactgtttcttgttaaatgcagcattgggctattggtggaatgatgagtgtttacaaacattggcctggtcaatcaacacttcacatttctgatatatccttgttatttcctaatatatgcttaattcaatacctgcctttgtgccttcacttacctagttgaaaagaatgtaatttttttggaaggcaacataattttactgaatgtttgtagataatgaaggatgactaaagctcagaaccagtatagaacttaaaagtcagtat

SEQ ID NO: 427354 - DNA, 647 bp, Homo sapiens
attactatagttaatgtagttactcagtttttcctaaatgctcctgtatgctgtaggcatcctttcctttaatactccaataaaattactagtttccacattccagaacctttctccacttactgtttcttgttaaatgcagcattgggctattggtggaatgatgagtgtttacaaacattggcctggtcaatcaacacttcacatttctgatatatccttgttatttcctaatatatgcttaattcaatacctgcctttgtgccttcacttacctagttgaaaagaatgtaatttttttggaaggcaacataattttactgaatgtttgtagataatgaaggatgactaaagctcagaaccagtatagaacttaaaagtcagtattagacatcagggaatatacgttcctaaactctttactccccagacaaattttcactggtaacatccaaattacaagattttctacccctatgaatatcctcttttaacttgtggaaaaaagccaaaatttctgtttgatagatttttttttctttgwtccctcatcgtagtttcaaaagtgcaattaattgatcttctagaacaattttatccttaagtgtaacccagctggccatgtagcagaaactctaaccagtatt

SEQ ID NO: 427355 - DNA, 492 bp, Homo sapiens
agatttgactataatcatttgctaaaaatccttcaaaattctctattgctttcaaaaatattggccaaaatcattgacagttggacaagcaaagctgagtttattggacttagcatcttcgtagagaaagtcacattgagcaaatagtagttttgtctcattatcagaatttatacaataatatccacatgattttatgagccgcccttrgtaattttaagacagctcatccaaggtagaggactggttgaaatgaagcagtttttatgcaaaatagctctgtatttttgggaagtccttaacgagcaaaatgttagtatgggaaaataatctaatttaattttttcatagtccaggcttccaggaacaaatatgtcctaaagtgagcaattcagttattttaccaattacaagtattatttagcttagaagcagtaaagttcatttggtctcagaattgtttagcacagacaggaaatatagttggtccaa

SEQ ID NO: 427356 - DNA, 527 bp, Homo sapiens
aaatgaaccataaaataagaatattggggctgtgcatatatagtctctgaaaattcaataataaaatgtttgaagaagattcgaatgtgttatccaagcaggtaaacacacatagcagtatcttttttgtatcaaaataataatacatttcaaaagaatcatacttagatactctgagcagggaggtgggaggagatagaagagcaaaaaagataactattggatactgagcttaatacctgggtgatgaaataatatgtaccacaaacccctgtgccacgtgtttatctatgtaacaaaccttcacatgtactctaaacctaaaataaaagttaaaaattaattttaaaaaacgttactttttttcaaataatttgaactgttctctagtttgtttttagtaatatctcccaactttgttaagacataytactcgccacccttgaatctaattgtctgctgccttcttacaaaaatgaaatccatactccaacaattaaaatattgactgtactgaagacatttaa

SEQ ID NO: 427357 - DNA, 524 bp, Homo sapiens
gcatatatttgtcctcttgttaaatttcattgatgtataaaagagaaatttgctcacctgaatttggttctcaggcactgcttttttggacatgtctttctgcatgatgtgcttatttttttcagttagcaccttccataccttaggtgcattacatttcctctttgactgctctgtgcccaagagctttaccctcagacactgcatttcttgtgcccctaggtcagctagtatgccactgggtttcrccaatgagagatactgacaggagttgagaaagtaaaaaacaaagaaagaatgggatattcatttccctttttttctgttttgtactatgtttaggcagtgactgaatctctccctttgccatatttttttccttatggccaatactcaaggtttctagctctccttggatttcaagaacataatatccccactttatctcttttgtcctaggactaataacaactttcagctattgctagtatctggatatctgatattcctttttgagccacatg

SEQ ID NO: 427358 - DNA, 472 bp, Homo sapiens
aaaaacaaacaaacaaaaaaacattgaaacatattaatgagaaaaagatgatttagtcaatagtaggtacatttcatgtatttttagaaatactaaaattaaatattctaaattaaaatatttccaaaaatttccttggatattcattttctctgataggacctaaaagaaataattttaattaatggagtttgctaattgatatttttataaaaaataaattstatgtttttacaagaaaaatctatgaagcaaatagataaaatatattcaagttatatttacatgtttatatatcaaagccatacttattctgtctatctttttcatctctataaaagtaagaacctatttattcatcaaatagtactattataagctttagaaatacagtgaataaaacatattcatttcctcaataaagataatttttataagaacataggaagatacacaaacaagtatttaagca

SEQ ID NO: 427359 - DNA, 453 bp, Homo sapiens
atcctaaattcattttgcagttgaagtgatgacctgtgttagttaattagctttaccggaaagaaagaataaacatttcatatctttatgatggcagtggttttgcaacttgagaggggcatgctctgaagttagatttttctcctcccacagaaattaggggaaagggactttatcttccttgataattacatttcaaagagatggttctcaggtccttgagaaaracattcctgtgtcattaagctgtcaagaggcttattgaacttttaaaaagatttatacacatttcaaaaagacacagagataacttaaaattacaagttttctaaggtaaatgctctaggaaaattagagggagggtcttttgccttattttcaagcttcctatttttaaattgtatttgcctttacactttcctgggcaagacacagctaaatttagctagaatg

SEQ ID NO: 427360 - DNA, 595 bp, Homo sapiens
acaagaaggaacttattctattagatatgaaaacaacttacaatgcatgtcctggtactcgttaatgaataagatgaacaagcaatggcatgcaaacaattgaataaagctacaaagtaaaacttgaaatattatatgtgtggcatactaattagtaaaaaaaaatctgaattattgaggaaattctattgtaacattacagtcatattgcaaaagtaaagttggatctattcctcagttcttaaaagttattaaatttaaatggaaatgatacttaaaaataacattaaaacaaaatatcttagaaatttctttagacrttataaatgtccaactcatgaaacaagtatacaaagattatctacagataaataatacccataaaccaacatgaaaaagactaaacacagtactaagaaattgggaaaagacagacagttcactaaaaggatataaaagggccctaaagcatatgaaaatatgttcaacctcttttataatatgagaaagacaggaaagataaacttttgctgatatacagtttatcacctatcagatggttaaagataaatgtctaatcatttttattgaaaaa

SEQ ID NO: 427361 - DNA, 480 bp, Homo sapiens
gcttttagaaaaacttcatattatttgtgttaaaattaggcaccctataaatctgttgacttaatgctagtacctggagctacaaagaaaatgttaatcctttcttcataccctgtggcgcacatcacaaactctacctgcagcaacacctttgcaatgtaactttgtaactcctcctaytaatatcaatcaggaattgatgggagaagtgaaaatagtaggattgctatggaataggggatttattaaataaaattggaccaaaggccactgtgggagctggttaaataatgttatgtgtcttagtttgtcttccgttgctataacacatatcacaaactgggtaatttataaagaaaatgaatttatttcttatagttctagaggctgccaagtccaaggttgagggccatattttgtgagggcttttgtgccacatcataacatggcagagggcatcacatgatgacagggcaagag

SEQ ID NO: 427362 - DNA, 553 bp, Homo sapiens
ttgtatatttgtttgctcttgtggaaagtacagattctcccatatacttttgttaaacttaaatattttatgcgcaaagtagtgtgagatcagtacgtaggaagggttatgtcgagtaaatttgttccactaattacatgaatattaaaaacatttaggagaataggtcaagcttaaaaatcagttacatttcaactgaatattacaatgaggtataacatagtaaaacatttagtgcctaacactttttccattatgatttttttgttattattacatagattttgcatagatgagtgctgcatggatattttgaaacccatagttacagttacaaagctatttggcaayaggacaagctctactatggggaaattgcgtacaaataagttgaagcataactaagtactttttaactttccttggtggcttgtgcttaaacatatatatatacacacatacacacacacacacacatacatataaacatacatatatatatgtatatatagtgggataactcattttactatgtaaaactttaattcacata

SEQ ID NO: 427363 - DNA, 553 bp, Homo sapiens
ttgtatatttgtttgctcttgtggaaagtacagattctcccatatacttttgttaaacttaaatattttatgcgcaaagtagtgtgagatcagtacgtaggaagggttatgtcgagtaaatttgttccactaattacatgaatattaaaaacatttaggagaataggtcaagcttaaaaatcagttacatttcaactgaatattacaatgaggtataacatagtaaaacatttagtgcctaacactttttccattatgatttttttgttattattacatagattttgcatagatgagtgctgcatggatattttgaaacccatagttacagttacaaagctatttggcaataggacaagctctactatkgggaaattgcgtacaaataagttgaagcataactaagtactttttaactttccttggtggcttgtgcttaaacatatatatatacacacatacacacacacacacacatacatataaacatacatatatatatgtatatatagtgggataactcattttactatgtaaaactttaattcacata

SEQ ID NO: 427364 - DNA, 547 bp, Homo sapiens
atttataacaagcaccatatgaaaacgggcaaacattatgagatattgtatgttgatgctcttcattctttgcaaatattaaaactgtgttttatgcataatttcaacagtctgggagaagataagcmtatgaattaaatatttaattgcctttagtagaaaaccagtttcatattatacatttcttggtaaaaattgcagcatatatttttatatctctttattggtgtcatagcccacagtttcaccaccccaaagcgtttcctttatcagtaaagaagcatctgtaagaaggaaaaaagaacatacagaattatattcatacacaaacaagctgaccaagtggtcttatttagctaaaatgtgaagaaaacagaaataatttttcagacttttcacatttattgggataaataatgaaagcctggaatactagcagttgtgctcataattatttcttattccctgttggttttctcttttttcttcactgagtgcacatttttatgattaaaagaaaagtattaccatagaaaatgaatactgt

SEQ ID NO: 427365 - DNA, 571 bp, Homo sapiens
ctgtgtgggcttgagaagaatgtctattcagatgcagttagatggaatgttctatatatgtctgttagatccatttttgctaaagtgtaattcaagttcaatgtctccttactgattttctgtctgtataatctattcatttttgagactggagtattgaagtacgctaccattattttattgtaatctatctctatcttcagatctactaatatttctttacatatttagtttttccaatgatgaatgcatacatatttacaattgttatatcttctcatttaattgacacttttattattatctaatgaccttccttgtcactttttacagtttttgatttaaagtctaattttgtctgatagaaaaataggtatctctactttcttttggtttctatttgcatgaaaaatcattttccatcccttccctttcattgtgaatatcgtcaatgtggaagtgggtatcttttacaacatstttttatttttactttttaaaaaattttcagttattatgggtacataatagctatattgcagtgagtctcttataggcaacacacaattga

SEQ ID NO: 427366 - DNA, 507 bp, Homo sapiens
tgcatgtttaaatttcattcattgtttactttaactcctgaatttctgtttggttctttattattatttcagtttttctgtaaatgtcttgttttggtcatgtattattttatgattttgtccagttgtttttctgtgttcttttgaagtttgctgagctctcataaaataattatttttaattatctgtcatgtaatttatagatctccatttatttggggcttgttactgtgaaattattatgttctttgggtrgtgttatgtttccctatttttaaaaatatttcttgttgctttgcattgatgtccacacatttgatggagcagtcaccattttaagactttatgaactggtttcaataggaaaagtccttcctctatgggtgggtgtgggggtgctagcaaggtagtttgtaatacttctggctctgtgggcacaggagtatcgtttacattgagctctgtcagctgaggtctgtgttggcaaaacttgtagggattttatg

SEQ ID NO: 427367 - DNA, 615 bp, Homo sapiens
taggatctagggagtggactagcttgctgtactggtagctcaaatgtcagagaaatgggtgctcatggaacagctgtggagctagagtcagaagttaggggacatgagagcaaccatggttctaaggtccagggtgcagctagcccatagccacagtggttctgatgtttgaggccttcatgttcccggcatggccataaagtacaagtctggaacacaagcaagcatagagtggctaaagaggtgagatttggtgtatgggcacatgtggggtgactatggcactaagggcatgggcatgcatgatgctgggaagggtaacagctccagtyccaggaagatacaatagcaacttctttttgcagtatgttccagagggaatagaacagggatgactgttggttacctcaatggcaaaaattgtcaatgtcatttgcaaagcaagctgatgaggattgtggtggcacccaccctgtggctgatactaatagccataatatttcttctttatttctagccatctccaggcacctcagatgtaccaaactttgtagcaataccttttattcagttattctttttcttttttatatatgctgcaccatgttgctgcat

SEQ ID NO: 427368 - DNA, 641 bp, Homo sapiens
taaaaaatgtagactttcagaaaacaaaccaaactttaagggataattttsatttgtctttgaagtgtgacaaaacagaaaaatgactaataaaaaccaagaaatgagatactttgaagaaggacatagtaaatcatgaaattctgcagagacaggaatacagaggcagaagaaagattacttattctgttataagaaaatcgtgggtaatattagtgtaatttcattaaagtggcatgtaagttaaataaagtttgtgtgggaggaagaaagaagcatgtgaaaacagggccagcacggtggctcacaactctaatcccagaactttgggaggctgagatgggtggatcacctgttgtcaggagttgagaccagcctgaccaacatagcgaaaccccatctctactaaaaatacaaaattagccaggcatgcataatccaacctacttgggagtctggggcaggagaatcacttgaacccgggaggcggaggttgcagtgagctgagagcgcatcaatgcactccagcctgggtaacaagagcaaaactccatctcaaataaataaataaataaataaataaatagatagatagaagcatggaaaaacaaagttgaatgctgaaatcatcttagccccca

SEQ ID NO: 427369 - DNA, 641 bp, Homo sapiens
taaaaaatgtagactttcagaaaacaaaccaaactttaagggataattttcatttgtctttgaagtgtgacaaaacagaaaaatgactaataaaaaccaagaaatgagatactttgaagaaggacatagtaaatcatgaaattctgcagagacaggaatacagaggcagaagaaarattacttattctgttataagaaaatcgtgggtaatattagtgtaatttcattaaagtggcatgtaagttaaataaagtttgtgtgggaggaagaaagaagcatgtgaaaacagggccagcacggtggctcacaactctaatcccagaactttgggaggctgagatgggtggatcacctgttgtcaggagttgagaccagcctgaccaacatagcgaaaccccatctctactaaaaatacaaaattagccaggcatgcataatccaacctacttgggagtctggggcaggagaatcacttgaacccgggaggcggaggttgcagtgagctgagagcgcatcaatgcactccagcctgggtaacaagagcaaaactccatctcaaataaataaataaataaataaataaatagatagatagaagcatggaaaaacaaagttgaatgctgaaatcatcttagccccca

SEQ ID NO: 427370 - DNA, 641 bp, Homo sapiens
taaaaaatgtagactttcagaaaacaaaccaaactttaagggataattttcatttgtctttgaagtgtgacaaaacagaaaaatgactaataaaaaccaagaaatgagatactttgaagaaggacatagtaaatcatgaaattctgcagagacaggaatacagaggcagaagaaagattacttattctgttataagaaaatcgtgggtaatattagtgtaatttcattaaagtggcatgtaagttaaataaagtttgtgtgggaggaagaaagaagcatgtgaaaacagggccagcacggtggctcacaactctaatcccagaactttgggaggctgagatgggtggatcacctgttgtcaggagttgagaccagcctgaccaacatagcgaaaccccatctctactaaaaatacaaaattagccaggcatgcataatccaacctacttgggagtctggggcaggagaatcacttgaacccgggaggcggaggttgcagtgagctgagagcgcatcaatgcactccagcctgggtaacaagagcaaaactccatctcaaakaaataaataaataaataaataaatagatagatagaagcatggaaaaacaaagttgaatgctgaaatcatcttagccccca

SEQ ID NO: 427371 - DNA, 545 bp, Homo sapiens
actgttacacctttatccatatccctcaacacccactctcatggttaatgctgttcagacaatgatttctatatttactgccctgtgttctcaaaacaaaaggcaacgcggtctgcatgccatgcaggtttggaggttgtacttctgccaactttgaaggctgacaatgtcttagcacatggagagtatttgggaaggagaaaagcattggcaaaagaaaaggcaaattaattgcccatatgaatgtaatagagtcttgcataaggaagtattgtttctcaraaatgccaatcatccattttcatgcttccctcgtattataattcatggttccagaagtattcatgaattagcatggcatttaacaattgcacatggctgctaggaatattttccaacatcaaacagtatctattactcttaatatataggcacaggtttagatgtaacttacataaggcatgatatccatttttcatattggcaactacgtggatactgaacattagaattaatacttccgtactgtacctaaaagtacctgt

SEQ ID NO: 427372 - DNA, 539 bp, Homo sapiens
cagagatattgcactgcgttttaattcatacacctagggtccaatcctgatcccctacattctctgtttcactccattacttgatttgatgtcactgaggctggcagtgaagggatcctttgcttttcaaggagaagtaaacaagagagtgaagcataaatccattagcttcctaggctacctcggttgcaaagcggtaaaatgaaataagtgtcttctgtgttgcactttgaagtaacaggaaaataagtgacctgtcaaccactaattactcagcagatcaccaatgaggggctctrgcttccatgagattgcctcagagccagctaggtgcttgtggttcagtacatcagccactatgttagtcaatgaagagtaattgagtgaagcaagggattcccatttatttggtgcagagattatgcatgaggttataagactttgaaacaaatacccgatgattaggaggaagttgtgagctctgatctggccaccagtgagcaactgtggtgggtatcctatccacagacccgaaaatc

SEQ ID NO: 427373 - DNA, 552 bp, Homo sapiens
tcaggagagagctccctgagaaactgctcccagccagagcaatggtctgggtccactgcgcaaacattcagtactgatctgtagctacactctaccgcccattgcgtatgagggtgagggcttgccttttcaagagactcaccttcakcccttcttgaaatacctagtacttcgcgaaagctgaatctttgctcaaaagtctttgagtttttctagccagagaaatgcagaggcagactgggggactccaaagtggtgggaactgctgtttcttgaagataaatttgcagtaaaatgaattctacaattgaggattaaaaggatttcaaatttaaattgaattaaaattttaaaacttaattcacttatttttcaaaacaaccttacaaggtatacactactattatccccatttccagacgaagaaaccgagtcacaaaaagggtaagtaatttgctcaagtaagtagtagatctagaatttgaactcaggtgggctggctctaaggtaaatgctcttaaccattaaacactctgctttgctccctcctgt

SEQ ID NO: 427374 - DNA, 552 bp, Homo sapiens
tcaggagagagctccctgagaaactgctcccagccagagcaatggtctgggtccactgcgcaaacattcagtactgatctgtagctacactctaccgcccattgcgtatgagggtgagggcttgccttttcaagagactcaccttcatcccttcttgaaatacctagtacttcgcgaaagctgaatctttgctcaaaagtctttgagtttttctagccagagaaatgcagaggcagactgggggactccaaagtggtgggaactgctgtttcttgaagataaatttgcartaaaatgaattctacaattgaggattaaaaggatttcaaatttaaattgaattaaaattttaaaacttaattcacttatttttcaaaacaaccttacaaggtatacactactattatccccatttccagacgaagaaaccgagtcacaaaaagggtaagtaatttgctcaagtaagtagtagatctagaatttgaactcaggtgggctggctctaaggtaaatgctcttaaccattaaacactctgctttgctccctcctgt

SEQ ID NO: 427375 - DNA, 471 bp, Homo sapiens
ctgtaggacaaaatatcttttctttctagagatggagtcttgctatattgcctaggctggactggaattcctggtctcacgcagtcctcctgcctaagcttcccaactagctgggaccatatgcacatgccaccacgccaagctcagaatatttttaatgtaattcattcctctaattccatggtactcctctgaggccctgggtgactctagacctttcccacarcagccaaatgacatgactattttctcagctggaaaattctggcatgaaggagtgatcttatgtgtgtactgtcctagaatgtgagctcctctcagtgtctgtagctgtatatgtgctacagattgcattttacaaaacctcatgcatgaagcactctgatttccaccccattccttctcccttcaaaggatgctcttttgtcaggaaaaagcaaatcactaagattaacaagcaaagagccagct

SEQ ID NO: 427376 - DNA, 471 bp, Homo sapiens
ctgtaggacaaaatatcttttctttctagagatggagtcttgctatattgcctaggctggactggaattcctggtctcacgcagtcctcctgcctaagcttcccaactagctgggaccatatgcacatgccaccacgccaagctcagaatatttttaatgtaattcattcctctaattccatggtactcctctgaggccctgggtgactctagacctttcccacagcagccaaatgacatgactattttctcagctggaaaattctggcatgaaggagtgatcttatgtgtgtactgtcctagaatgtgagctcctctcagtgtctgtagctgtatatgtgctacagattgcattttacaaaacctcatgcatgargcactctgatttccaccccattccttctcccttcaaaggatgctcttttgtcaggaaaaagcaaatcactaagattaacaagcaaagagccagct

SEQ ID NO: 427377 - DNA, 488 bp, Homo sapiens
ctggaagcttacaatgacttaagctgtgaacaacatagcaaagcaaaataaggaggcaacactggtgacatagcaataactatgtagtgaatgctgagttcggggaagcctctgagcttyggggtcactggggtagaattttatggcatagctcttttaagcaatggtgggtaggtgtcaacctggctaccagctggaaaatcacctcagaggccctggacaccagtacatctgctcagatgccatgactgtctgacatctgaattcctgggtactgataggcaaggtaatagtactcagttttagacataccacaggtcaaatcctagtctcccaaacatagcttcctataacaggctttgagtccaacaagaatgtttatcctattccccaattatgttatgaaggtgcccacagtgactaaaagaccaggaccgtgcaaatcaaattccaattcttcatactgcttcaagtactcttacacaata

SEQ ID NO: 427378 - DNA, 643 bp, Homo sapiens
tgacatcgctgcttgaactctgtaggctactatttaacaggtcaaagatttagatttccttttgtaaaatggagagttttataagtataaacatacaggtttagtgtggggattgagtgaaataacgtgaaaagtacttagtcyggtgcttggcacataattagatttcagcaggccttaaccactctgttcactgcctagcagagtatttggccaagggtacactctataaatctaaatcatttcctctcctttccttccatctatcactatcccctgtcctgatctctatcgttataatttggggtgtttgtatttagtaaccaaattcctctacaggagattaagatgtctaagtacaattttgaattccgtctcttttaaaatgatggtgaattaaagaggacacagtgtgtgtacttgtgggacaatgaatatacttatagatacagttaagatattactcaggttctagtttttaaaggtaaagcatgtaaacattgggcaatgccaggcacctcatagaaactcacaaacattcacagtaccttattactcaaagtacagtccttggaccaacagagtcagcatctcttgggagctcggtaggaaaccatgttctgaggccccacctcagaactgc

SEQ ID NO: 427379 - DNA, 643 bp, Homo sapiens
tgacatcgctgcttgaactctgtaggctactatttaacaggtcaaagatttagatttccttttgtaaaatggagagttttataagtataaacatacaggtttagtgtggggattgagtgaaataacgtgaaaagtacttagtctggtgcttggcacataattagatttcagcaggccttaaccactctgttcactgcctagcagagtatttggccaagggtacactctataaatctaaatcatttcctctcctttccttccatctatcactatcccctgtcctgatctctatcgttataatttggggtstttgtatttagtaaccaaattcctctacaggagattaagatgtctaagtacaattttgaattccgtctcttttaaaatgatggtgaattaaagaggacacagtgtgtgtacttgtgggacaatgaatatacttatagatacagttaagatattactcaggttctagtttttaaaggtaaagcatgtaaacattgggcaatgccaggcacctcatagaaactcacaaacattcacagtaccttattactcaaagtacagtccttggaccaacagagtcagcatctcttgggagctcggtaggaaaccatgttctgaggccccacctcagaactgc

SEQ ID NO: 427380 - DNA, 497 bp, Homo sapiens
tgccaaatcaaaatctgcatttaaacaatatggccaagtgatttgtgcacacactgaagtgtgagaaagaccgccatagaatgataaaatgatggctgacaattgaaagtacccatggacctagtttacagaggtcttagtatcaattcctcactgctactccaggccatcctcagcccaggctgccaaatcagctactaggaccacattgttgcagtgtgaggaaaagctctgagtctgaagtggctctaaaccaaatgctctaaaccaaatccctttagtgtgaacatacagagccctggccctattcacaagctgtgcctcacaccccatcacctttttcycatacccggatctccagatctcatcctgacctcctggacctagggctcattgccttagcctctgaaaattctcatactttcccactggatctggcaaatggtgatgctctttcactcctcattcttgactttccccttttggctgcaattggc

SEQ ID NO: 427381 - DNA, 510 bp, Homo sapiens
ggcaagatgaagacccttggctgttagtttaacaaggtacaagacttttcctcaactgtaagtattctggtttccacaatatgagccctagtgtttaggggactacacgcatatacttacatgaggttttcaatctggaggggctaagtagtgtttttccaacagaaatcccagtgtttaagtggcatagaattttctaaggactcaaagggcagagaatagtaggctctttaggstaaaaaattctgccatcacatcacacacacacacatcctacaaatatccccaccccctacaccacatactatatacacacatggacagacatacatgcacaccttacaaacacatggcacacataaccatgtccataccacacactgctccacactttcccccatatcatacaccaagcacaaactcacacacatacataacacccacacacataacacaaacacacacaaacacacacacacacagagtcagtagggtcttgctgctatggat

SEQ ID NO: 427382 - DNA, 510 bp, Homo sapiens
ggcaagatgaagacccttggctgttagtttaacaaggtacaagacttttcctcaactgtaagtattctggtttccacaatatgagccctagtgtttaggggactacacgcatatacttacatgaggttttcaatctggaggggctaagtagtgtttttccaacagaaatcccagtgtttaagtggcatagaattttctaaggactcaaagggcagagaatagtaggctctttaggctaaaaaattctgccatcacrtcacacacacacacatcctacaaatatccccaccccctacaccacatactatatacacacatggacagacatacatgcacaccttacaaacacatggcacacataaccatgtccataccacacactgctccacactttcccccatatcatacaccaagcacaaactcacacacatacataacacccacacacataacacaaacacacacaaacacacacacacacagagtcagtagggtcttgctgctatggat

SEQ ID NO: 427383 - DNA, 398 bp, Homo sapiens
ctcactacaacctctatcttagggcacaagcaatcctcccacctcagcctcctgagtagctgggactacaggtgcatgccaccacgcctggctaatttttttgtagagattgggttttgccatgttgttcagggtggtcttaaactcttgagctcaagtgatctgcctgctttggcctctcaatatastgggattagaggtgcaagccaccatgcccagcctctctcatgttttcttctaagggttttacagttttcagttttatacttgggtctttgagaactttttgttaacttttgtatatggtataaagttatgtgtccaacttctttctcttgcctggtaccatttgttgaaacgtttccccatttcaacaaatggtgaaacaaatggttttc

SEQ ID NO: 427384 - DNA, 398 bp, Homo sapiens
ctcactacaacctctatcttagggcacaagcaatcctcccacctcagcctcctgagtagctgggactacaggtgcatgccaccacgcctggctaatttttttgtagagattgggttttgccatgttgttcagggtggtcttaaactcttgagctcaagtgatctgcctgctttggcctctcaatatactgggattasaggtgcaagccaccatgcccagcctctctcatgttttcttctaagggttttacagttttcagttttatacttgggtctttgagaactttttgttaacttttgtatatggtataaagttatgtgtccaacttctttctcttgcctggtaccatttgttgaaacgtttccccatttcaacaaatggtgaaacaaatggttttc

SEQ ID NO: 427385 - DNA, 599 bp, Homo sapiens
tcaaattgtcccaggagacaaaagtaagttttgtcttccacacactggagatctatgtctgcctgtgttctaaagtcgtttctgatccatattcagtgaaatggatattaaccttgagatgtggtgaaaaagatacaggcactggtgtccgactcacattcaaaccctgccgtattctttgggattggggcagattctttatgtgtaatcctcagtagcatcctcttgttttatataatttmaatatttattttagattcagagggtacatgtgcaggtttgtaacctgggtatattgtgtgatgctgcggtttgaggtacaaataatcccacgggaataggtagtgagcataatgcccaataggtagtgtttcagcccttgccctcccctctagtagttcccagtatctattgtttccatctttatgctcatgctttatgccaatgcttagctcccacccgtaagtgagaacatgtggtatttggttttctgtttctgcattaattcactcaggataatggcctccagctgcatccgtgttgctgcaaaggacatgattttgttcatttttatggctgtgtagcagtccatgttgtat

SEQ ID NO: 427386 - DNA, 506 bp, Homo sapiens
tacccatttgacaggagaaaactgaagcaaagagatgttaagatgcttgccaaagattacacgtctaggaagtggaaaagcaaagatttgatccaagacagtctggctctggaatctaggctcgtatccattacactctacttcctctacagcaacaatctggaggttgaaatatcaaggcgttatttccaacgctttaaaatattatttacactacaaactagtctaggtgattttctaaaaacaggccttctcagctttgcagtccttgccaaagcatgtaaaatgtgagtttgggagatttaccaagaatttgaaaatcactttcaaattcctttgtagaattccatsggaatgggagaagagactccaggttcattattaaaagcatttggcatttcacccacctatagtaaggaggacactgagctaatttctttcatgctgacttaagttagccatttagtcaatcaatcaatagttccctgttgcaagaggcaatatgg

SEQ ID NO: 427387 - DNA, 603 bp, Homo sapiens
cggaggtttttgagtttatatgtgttagcagttwgtgctacttatcctaatgaatacatgtctctttttggactctggattctgggccatgaaaattacataaaatattcttagtttcagtaatttgtttgtacacggtgacctttgaagttattgtttttaatgtggtatcacaaaaaactcattttctttaaatataaaattttaaaatttattctactcttaagctgtattaggttatgaaaataaaatatctccactttactcagataagtggagacatatgtattcattcacttaaaaaaaatgtattgccttcctaaactgtggctagcactgttctagatgctgagaacaaggacagggcactgtgaggaaggataatgaagcctttggatctccatgttcaaaagcctgtgctggaggcaagctgtcagaagtgtcagaggtgatggtgactatgatgaagtaggcccctactttcatggtgtttgcactctaagagggaaagacaataacttgaaaggtaaaaaaaatacataatttataaagtgataagcattgtaaataaagtaaagtgcttgataaataataaagcaataa

SEQ ID NO: 427388 - DNA, 580 bp, Homo sapiens
tttgtagggtcccttactacctgtgaggagtagaacatcacagagaaagtcaattttgagctagttttgagggatgaggagttcttgaagcaggagctgagtagtagaattcttgattttcttctttcttgatctgctctctgtgttcatgttgccccagcatggcagctgggatatgagaggaattcagaaaggttgctgtatccatggtacgatggctgctataaatagcatttttccttaaatcttatttcttctgatacattctcaaaaatataccctctcttaatatcctttaaagactcccttaggcaaagataaaatattacccacaatgtgctattctcttaatagctttgccaatgtttgctgttccaatgtcaacagtcattatatagygtggctttcaatttgggattaaacctcttttattcttgcagtaatcagaaaagtaattggatagttagtatgctctttggaattccattgaaaaagaatgagattctgccagatcctgtcatggaagaagaaaacaggtgcaaaaggtgaagaaaaagctcctgaaagggaagtgctgaca

SEQ ID NO: 427389 - DNA, 604 bp, Homo sapiens
taaacctcttttattcttgcagtaatcagaaaagtaattggatagttagtatgctctttggaattccattgaaaaagaatgagattctgccagatcctgtcatggaagaagaaaacaggtgcaaaaggtgaagaaaaagctcctgaaagggaagtgctgacaggtgacaccagtcacaaaacagacttgcagcacccaaggggcaccagcttgggagatgtgccaaaattggcctgtgggtcccaacaagcaggagcttgaaggaaactaattaattaaagagtgtcaaacacattgtcagagtgcagacagcagaaaataaaatggacttcacatggtttgaccagtagggcaagagtaagatcatactgaactcataaacttttttttctgaaaaagatcaagcacattttaattctatcatggttagaagacaaattgctatttcaaattttggctgaaatagaggcttcctaaaaagagagaaagaaaaactagtatttaytgagcacatactatgtgccaaacattgagagaagccttctggacaaataagttgacacttcaaggggcacaatttacattgtagtatatgtgaagttgt

SEQ ID NO: 427390 - DNA, 382 bp, Homo sapiens
tcaaattttggctgaaatagaggcttcctaaaaagagagaaagaaaaactagtatttactgagcacatactatgtgccaaacattgagagaagccttctggacaaataagttgacacttcaaggggcacaatttacattgtagtatatgtgaagttgtkcagggtttcagcacttctgccattttgtgcatgtcaactcatttaaaccttgtgaaagctcagtgaaggaagatgttatttttacagatgaggaaatagacctgggtcttgacttcagctccccaatgtattagctatgctatctttgaatgttacttaaccttgctgagcttagaagtccctccttattccactatcccacatggatgtcagatggcagcca

SEQ ID NO: 427391 - DNA, 599 bp, Homo sapiens
aatctcatctaaatcagatatgggtaagactcagggcatcattcatcctaaggcaaattctcttctagccataaacctttgaaatcaaaacaagttacctacttccaaaatgcaatgatgggacaggtataggatagacatccccattccaaaagggagaaataggcaagaagaatgggtaactggtgccaagtaagaacaaaacccaacagggaaaacaacattaactcytaaagaataattttcctacaactccatgtcctgcatcctgggcacatggaggccctcaaggcctcaggcagccctgcccctatagctttgctgggattaatccacccagcagctcccacaggttggagtcttgtgctagtacctttcttaggctgggattacacactggtgaccgtacagttttggggtctcatgaactgcccagttctgtggctccactagacattgtcctagtgaggattcctcagtggctttgctcctacagcttcatgggccataccctattgggtgttctgtgtgaaggctctgcctgggcccctaggttgtccatgacatcctttgaaatccatgtggaagaagccatgacc

SEQ ID NO: 427392 - DNA, 541 bp, Homo sapiens
caactacttcatgtaacttgaggctattcttgctcagacttcaataataatttctcccttaaccagtgggcaccattgccgcttacttaaactattcctacagagatggttcatgcctgccttcaggtttctatctggtatgttttccttcaaggagcttagaaaaacaggttctcattttgtttcactgtcctgaaagtttgaaagaactgaaaagagagagggagagaagtaatacccactgagtaccgattatatgcttggctctttgtataaatgacttcactaaattcttcttaaagatactgtgttgcagatcttattattgccattatacacagtggggtatactacatcctatacattgtactgaatttaccaagtcattcactgtaaatagcaragccttgaaatgagccactctcttatatcatctcactctaccattgcccctgacactctcagtcctagtcctagactttcctcattatctccataatgtgaggaaactgggaggaacttatgttctgtgggagttacc

SEQ ID NO: 427393 - DNA, 604 bp, Homo sapiens
ttaagctcagcttagaacccagatcctccagatcttaaaggctggtgcttcaaagaacattcctrtgaccacatgcagtgtttcttcctccacgtagttccacagttttctatctctgagccttagagtggggtatgaatgcagccgttcgggatgtgctgagaaaaaacaatccaatatactgcattgtttcaggatatcacgttattctgttaaggatcctagacattcacaggacgttcaacctcaatagctggatatatccactaccaagacagagttagcagtgcaagtcctagcacatgacaccttgcttgttttgatttacccattgtctaaaaaatgatctagaagttggatgctacttctaaatcacctggtttttcattgtaagtgacaacttttgcattttattagcctggtctactttttaataagcctttacaggactaatatatcataaaaacatcattaaaacattcctctctactggttataaattgccttgatggtgctatgactacatctcccaaagcacttttgacagaatgagccttaagatccaggcatgtcattgtcatagcagaaggatgacattgcagct

SEQ ID NO: 427394 - DNA, 553 bp, Homo sapiens
ctgggtgcctagtcatttgatgtcccatggtcaaatgccctctatctatcaagggttaatagcatgccagatgttgtttttcaagaagtgaataattctgcagtacaaatggcatggccttactcaggaagctcgggcacctgttttagtctcccacttggcttgtcataaactccataaggcaacttttcccaccactggcacctctaattataccacagggtcttgggcatatttgagttgcaacctaaacctcttactggaggtcctattttctactttgggctctctaaaaactagcatccttcttcagataaactgaagcagaattctcaggatattgccttcagaacatgaaaaggtctaacactcactgatcttccttctttgtggtaggaaragtataatgaaataatttgactatttcctttggaaggcataacacaacatgtccctaaccacttgatctcataaaattgtactaatatggcaggcctcttgatctttgtaggatgtatctaaatgctggagcacatgtgtcttactaaggtct

SEQ ID NO: 427395 - DNA, 591 bp, Homo sapiens
ggttggctacatttattattaatgttccaaccctggtcctaagcattctctgccgttccgttgcaggagaagagagyatcttcatgtgtcagcaaggtagccttcttgttttcatatttggctttcggttgcctgttaatttctcttagcctttcattatctttttctagaatgtcatccaagctaagtattaatcattgaatgctatccctaaagttactttctcctcacatttttcaaaagtctggtacattgcaccagtcaatgtattcccatccacctgtataccatcccagttcaccccaggtgaattatttctatttgctgcacagtgtgagatgtgctttacatgtgggctttttcagttttcacagctacaaggtgaggtttggcagtgggatcttccaaaccccaggtaaaacagcaggctctttattttcatttgaggcacaaagaagcaggaagacccacaagttctatcgtgccattcctgacatacagactctgaagtcagttcttgcttcatttcttggaaaaatgtagttacgtctgcagagcataaatctgtgaaaacacaaaattaatacatca

SEQ ID NO: 427396 - DNA, 603 bp, Homo sapiens
cattgaatgctatccctaaagttactttctcctcacatttttcaaaagtctggtacattgcaccagtcaatgtattcccatccacctgtataccatcccagttcaccccaggtgaattatttctatttgctgcacagtgtgagatgtgctttacatgtgggctttttcagttttcacagctacaaggtgaggtttggcagtgggatcttccaaaccccaggtwaaacagcaggctctttattttcatttgaggcacaaagaagcaggaagacccacaagttctatcgtgccattcctgacatacagactctgaagtcagttcttgcttcatttcttggaaaaatgtagttacgtctgcagagcataaatctgtgaaaacacaaaattaatacatcatatccatcttcaaagtatccacatttgggaattgggaaactacagtgagtattttttctgcaacaaatcagagactaagccagacactgaagccccagaatgcacctgtgttcaacagttctatctgcggagtaacccggcatgatctactgcactagctctttcaaagagaagcctcagaagggaggagaagaatgtctgagggtt

SEQ ID NO: 427397 - DNA, 591 bp, Homo sapiens
ggttggctacatttattattaatgttccaaccctggtcctaagcattctctgccgttccgttgcaggagaagagagtatcttcatgtgtcagcaaggtagccttcttgttttcatatttggctttcggttgcctgttaatttctcttagcctttcattatctttttctagaatgtcatccaagctaagtattaatcattgaatgctatccctaaagttactttctcctcacatttttcaaaagtctggtacattgcaccagtcaatgtattcccatccacctgtataccatcccagttcaccccaggtgaattatttctatttgctgcacagtgtgagatgtgctttacatgtgggctttttcagttttcacagctacaaggtgaggtttggcagtgggatcttccaaaccccaggtaaaacagcaggctctttattttcatttgaggcacaaagaagcaggaagacccacaagttctatcgtgycattcctgacatacagactctgaagtcagttcttgcttcatttcttggaaaaatgtagttacgtctgcagagcataaatctgtgaaaacacaaaattaatacatca

SEQ ID NO: 427398 - DNA, 584 bp, Homo sapiens
ttattgtcttttgttgatttcttttagaataatcaaatattttaagcatttaatttctcccttcaagatgggtagttatatattcttttccaattttgggggaaggttacaatagagattacatttaccactgaccgactatagtctaaaacaaattattaccacttctttttgttatttaacatttactatttatagccttctgccttttgtgttatcattgtcatgtattttaatgttataactattttaaatttcacaagataatactcattattctgtacagtcaggatttatatttacccacattttaccgtttctgttgctcttcttgcctttttataccctgtgtttccttctgggatcattttccttctctctacataactcatcttactatttctttttagagcagatttgctggtgaattattttagtttatgtttgtcttaaatttgttartttaccttttagttttaaaggataaaattatagttagtactttcattcagcactaaagatgttattccattgtttcctgattttcattattttaattgataaatcatctttcagttttatgg

SEQ ID NO: 427399 - DNA, 458 bp, Homo sapiens
cctgtttttctgactgcttttgagaggtttctctttactttggtttttggtgttctttctgtgatgtgcctaggtatggtttaggtttttatttatgttgatctgtctttcastttactaatcctgtcttctactatgtcctgctacactcatttggtgtttaacccatataatgaattgttaatttcagatttttatgtagtagttccaaaatttccatttatttcttttttatagactctaattctctggtgatattacaagacttttatctaccttctgcatcttttcaccaattacattaaatatattaaccatgattatgtttaagttcttttcagctaactacagagtgtgtgtgtcttctgttcatatggcaggtggggcgtggcacacacagccttgcatgtgcatgcacaggcacgtgtttccctcttggtttttagttatgtggtctt

SEQ ID NO: 427400 - DNA, 458 bp, Homo sapiens
cctgtttttctgactgcttttgagaggtttctctttactttggtttttggtgttctttctgtgatgtgcctaggtatggtttaggtttttatttatgttgatctgtctttcactttactaatcctgtcttctactatgtcctgctacactcatttggtgtttaacccatataatgaattgttaatttcagatttttatgtagtagttccaaaatttccatttatttcttttttatagactctaattctctggtgatattacaagacttttatctaccttctgcatcttttcaccaattacattaaatatattaaccatgattatgtttaagttcttttcagctaactacagwgtgtgtgtgtcttctgttcatatggcaggtggggcgtggcacacacagccttgcatgtgcatgcacaggcacgtgtttccctcttggtttttagttatgtggtctt

SEQ ID NO: 427401 - DNA, 602 bp, Homo sapiens
gtttccacattttaatgataaaascagtggagtaatataacacatttatttcaaggtcagtggttttcaaccaagggagatttttcatcctaaaggatatttggcaatatctggacacattttagttgtcacaagtggagagacgatattactggcatttagtgaatagaggccagagattctgctaaacattaaacaatgcaaaagaaagctcccaactgacaacaacaaaaaatatctggctggtactgaaatgggatagttcccttgtctccttcatgggactcgtgaggaaggtggcttgtttactcagcctgcagctcttaacccctcacaagaggaggcacacgcaggtgagtggatgcaggggctgagatgagttcttctgggtgctggcaaaaatagaactccgtgcagtcccacagcagcatctggcgagggcgggggtgttatccatgacccctggaaccccagaggacatctgttacagtgtgcttttttagctttgccatccaaggatggcttaagtatttaatggctcagtgggacagccctctgtatcttgagctctggtttggcatccaggaggaataaggtcacag

SEQ ID NO: 427402 - DNA, 602 bp, Homo sapiens
gtttccacattttaatgataaaaccagtggagtaatataacacatttatttcaaggtcagtggttttcaaccaagggagatttttcatcctaaaggatatttggcaatatctggacacattttagttgtcacaagtggagagacgatattactggcatttagtgaatagaggccagrgattctgctaaacattaaacaatgcaaaagaaagctcccaactgacaacaacaaaaaatatctggctggtactgaaatgggatagttcccttgtctccttcatgggactcgtgaggaaggtggcttgtttactcagcctgcagctcttaacccctcacaagaggaggcacacgcaggtgagtggatgcaggggctgagatgagttcttctgggtgctggcaaaaatagaactccgtgcagtcccacagcagcatctggcgagggcgggggtgttatccatgacccctggaaccccagaggacatctgttacagtgtgcttttttagctttgccatccaaggatggcttaagtatttaatggctcagtgggacagccctctgtatcttgagctctggtttggcatccaggaggaataaggtcacag

SEQ ID NO: 427403 - DNA, 602 bp, Homo sapiens
gtttccacattttaatgataaaaccagtggagtaatataacacatttatttcaaggtcagtggttttcaaccaagggagatttttcatcctaaaggatatttggcaatatctggacacattttagttgtcacaagtggagagacgatattactggcatttagtgaatagaggccagagattctgctaaacattaaacaatgcaaaagaaagctcccaactgacaacaacaaaaaatatctggctggtactgaaatgggatagttcccttgtcyccttcatgggactcgtgaggaaggtggcttgtttactcagcctgcagctcttaacccctcacaagaggaggcacacgcaggtgagtggatgcaggggctgagatgagttcttctgggtgctggcaaaaatagaactccgtgcagtcccacagcagcatctggcgagggcgggggtgttatccatgacccctggaaccccagaggacatctgttacagtgtgcttttttagctttgccatccaaggatggcttaagtatttaatggctcagtgggacagccctctgtatcttgagctctggtttggcatccaggaggaataaggtcacag

SEQ ID NO: 427404 - DNA, 562 bp, Homo sapiens
gagggtgtggctttgccagggacctaacccttctctgcctggtatttccctgccttctgtccctataggtaatgccaatagtgctaaggctgagaaactctgctctaggtgctagactcccatggctttgacacttcactacatctgtattccccagtccttggggacagttaaagggcatgatggaacatgggaacaaggtcctatagatcttatttggagggtccattctgttcaccatctttyttttttttcttttgtgagaccaagtctcgcttcatcacccagcctggagggcaatggcatgatctcggctcactgcaatctccgcttcccagtttcaagcgattctcgtgcctcagcctcctgagtagctgggattacaggcgcacgccatcacgcccaggtaatttttgtatttttagtagagacagggtttcaccacattggccaggctggtctcgaactcctgacttaagtgctctgcctgccttggcctcacaaaagtgttggtattacaggggtgtgccaccacacccagaccaccatcttttaagagaat

SEQ ID NO: 427405 - DNA, 562 bp, Homo sapiens
gagggtgtggctttgccagggacctaacccttctctgcctggtatttccctgccttctgtccctataggtaatgccaatagtgctaaggctgagaaactctgctctaggtgctagactcccatggctttgacacttcactacatctgtattccccagtccttggggacagttaaagggcatgatggaacatgggaacaaggtcctatagatcttatttggagggtccattctgttcaccatctttcttttttttcttttgtgagaccaagtctcgcttcatcacccagcctggagggcaatggcatgatctcggctcactgcaatctccgcttcccagtttcaagcgattctcrtgcctcagcctcctgagtagctgggattacaggcgcacgccatcacgcccaggtaatttttgtatttttagtagagacagggtttcaccacattggccaggctggtctcgaactcctgacttaagtgctctgcctgccttggcctcacaaaagtgttggtattacaggggtgtgccaccacacccagaccaccatcttttaagagaat

SEQ ID NO: 427406 - DNA, 555 bp, Homo sapiens
tcacatagaacaaactatttttctaaacattggcacacatgaccaacactactcaagccctagggaagcacttcttaatatttcttttcttgtgttctaaaatcaaagagcctgccatttggtgggttgtgacactactgatacatagacatcacttcactgtgtgccaatgatttgagtggcagaagcttttagtaaagacaaaggacaaattaattaacttgtcaaatcccccctctcagattcttgaayaaagactcatttcccaggaacttctagtgtccattgtctagttcccaatgtatagtttcataggtaatcacaagtcaacacagtatttacagtaattgcatgtggtgactgaggaaaaattttgctttattaaacagtttatgttattcctcatcaaatttgggaagcttttaaaaattaatagactttaattttttttaattttgttttttggaacagtgtcagatttacaggaaaattgggcagataatacagaatgttccatgtaaccctctatgtctttttcacaatttctcctactat

SEQ ID NO: 427407 - DNA, 555 bp, Homo sapiens
tcacatagaacaaactatttttctaaacattggcacacatgaccaacactactcaagccctagggaagcacttcttaatatttcttttcttgtgttctaaaatcaaagagcctgccatttggtgggttgtgacactactgatacatagacatcacttcactgtgtgccaatgatttgagtggcagaagcttttagtaaagacaaaggacaaattaattaacttgtcaaatcccccctctcagattcttgaataaagactcatttcccaggaacttctagtgtccattgtctagttcccaatgtatagtttcataggtaatcacaagtcaacacagtatttacagtaattgcatgtggtgactgaggaaaaattttgctttattaaacagtttatgttattcctcatcaaatttgggamgcttttaaaaattaatagactttaattttttttaattttgttttttggaacagtgtcagatttacaggaaaattgggcagataatacagaatgttccatgtaaccctctatgtctttttcacaatttctcctactat

SEQ ID NO: 427408 - DNA, 555 bp, Homo sapiens
tcacatagaacaaactatttttctaaacattggcacacatgaccaacactactcaagccctagggaagcacttcttaatatttcttttcttgtgttctaaaatcaaagagcctgccatttggtgggttgtgacactactgatacatagacatcacttcactgtgtgccaatgatttgagtggcagaagcttttagtaaagacaaaggacaaattaattaacttgtcaaatcccccctctcagattcttgaataaagactcatttcccaggaacttctagtgtccattgtctagttcccaatgtatagtttcataggtaatcacaagtcaacacagtatttacagtaattgcatgtggtgactgaggaaaaattttgctttattaaacagtttatgttattcctcatcaaatttgggaagcttttaaaaattaatagastttaattttttttaattttgttttttggaacagtgtcagatttacaggaaaattgggcagataatacagaatgttccatgtaaccctctatgtctttttcacaatttctcctactat

SEQ ID NO: 427409 - DNA, 594 bp, Homo sapiens
tttagcttttttttttatggtttctacatctttgctgaacttctaattttgttcatgtattgttttcctgttttttaagttgtccttctgtgttcttttatagcttgatgaacttactaagaaaagtatttggaattctttgtctggcatttcacagatctccatctctttagtgttggctactagcactttcttttgttccgctattggtgccatgtttccatgattatttatgatcctgtggttttgcattcgtktctgcacatttgaagaagtaggcacttcttccaatctttgaagactggctttggcaggaaaagctcttcatcagtcaacccatccagaagttctgagcaggccagatggtagggtccatgggtaggtttggtactatagtcctcaggtgggttggtctgatgcctctgtcagtgagtaggcctggctcctgtgtccacagggctgggctagtgtctgggtccacatgggaagacctggtgccttgctctgtgtgggcaagcctggagccttgttccatgggtgcaggcctggatcctggttccacaagcatagcgtggagcctatcagctaggtgag

SEQ ID NO: 427410 - DNA, 627 bp, Homo sapiens
ttaatatacaaacataaattgttcttctacaagtaatgaacaatctgaaaatgaaaataagaaaattccatttacaatgtcaacaaaaaataaaatatggataagtttaacaaaatgagtgcaagatggtattctatacactacaaaaacattgttaaaagaaatcaatgaagatctaaataaatggaaagacatccataatcatagatcagaagacttaatatggcaacattcctcaaggaatggaccatctatatatctatattggtatatctatatagatatatagataamccttgaaaacagactcaatgtgcaatccttatcaaaataccagcaaagttttctttttctttgtcattttctgcaaaaaaaaaaaaaaaaaaaaaaaaaaatctaatccaaaaatcacgtgaaaattcaaggaacccagaatagccagacaatcttgaaaaagaagaacaaagctataactcacacttcccagtttgaaaacttactatatatctgccataatcaagacagagtgatacataagcatagttaaatcaatggagtagaactgagagttcgaaataaacccctcacatttatggtcaactgatttttgacaggatatcaaaataa

SEQ ID NO: 427411 - DNA, 627 bp, Homo sapiens
ttaatatacaaacataaattgttcttctacaagtaatgaacaatctgaaaatgaaaataagaaaattccatttacaatgtcaacaaaaaataaaatatggataagtttaacaaaatgagtgcaagatggtattctatacactacaaaaacattgttaaaagaaatcaatgaagatctaaataaatggaaagacatccataatcatagatcagaagacttaatatggcaacattcctcaaggaatggaccatctatatatctatattggtatatctatatagatatatagataaaccttgaaaacagactcaatgtgcaatccttatcaaaataccagcaaagttttctttttctttgtcattttctgcaaaaaaaaaaaaaaaaaaaaaaaaaaatctaatccaaaaatcacgtgaaaattcaaggaacccagaatagccagacaatcttgaaaaagaagaacaaagctataactcacacttcccagtttgaaaacttactatatatctgccataatcaagacagagtgatacataagcatagttaaatcaatggagtagaactgagagttcgaaataaacccctcacatttatggtmaactgatttttgacaggatatcaaaataa

SEQ ID NO: 427412 - DNA, 656 bp, Homo sapiens
attaggcaatggtttcttagctatgacactaaagcataaataactaaaataaagaatacattgtacttgatcaaaattaaaactttgtgctgcaaatgacaatgccaagagagtgaataatctagaggataagagaaaatccttgcaaattggatgtttaattgcagatttgtatctagaatatataaaaactcttctatattaaagtatatatcatatgtaatatataaatacaaaataatatataacttcataacagcaaaacaaagataayatattttaatatataatatcaacaaagttaactcaatatataataacaaagaaaaataatcccattttaaatggcaaaggatttaagtagacattatttccccaaagaacattaacaagtaccatgcaaaaagatcctctaacaccattgtggagtaagacaatgatgagatagtacttcacatgcactaggatttggatgccatgactgtaatcaaatggcagtaattaaaaagatatatcaataagtgttgatgaagatgtggaagaattgaaattctcatacactactgataataatgtaaaaatggagcagccactttggaaaatagtctggcagttcctcacatcattaaacagaattaccatatgactgagtattc

SEQ ID NO: 427413 - DNA, 609 bp, Homo sapiens
taatcttattctttcttatatcttccgtgagacagtgggctccttgacatrggggcatagtcatctcttttattcagcattttttttctttttatttccaaataatattctgttacataaatttaccaccttttggtgtttctttttaatttttttgtttcagtaactttaaggagtacaagggattttagaaacatggatgaattctgtaatgatagaagtctgggcttctattgtcactgtcagctgaatagtgtgtattgtacccagtaggtagtttttcgtccctcagaccctgtaccttcttcccttgtgaatcttcagtgtccattataacactctgtgtgcctttgtgtacccatatcttagctcccacttgtaagtgagaacatgcagtatttggttttccatttctgagttacttcacttaggacagtggcctccagttccatctaagttgctgcaagtgacattgtatctttcttttttgtggctgagtaatatcccatggtgtatatgtaccacattttctttatccactcattggctgatgggcaattaggtagattccacattttcaattgaattgtgctgcaatatgtgtgcagg

SEQ ID NO: 427414 - DNA, 609 bp, Homo sapiens
taatcttattctttcttatatcttccgtgagacagtgggctccttgacatgggggcatagtcatctcttttattcagcattttttttctttttatttccaaataatattctgttacataaatttaccaccttttggtgtttctttttaatttttttgtttcagtaactttaaggagtacaagggattttagaaacatggatgaattctgtaatgatagaagtctgggcttctattgtcactgtcagctgaatagtgtgtattgtacccagtaggtagtttttcgtccctcagaccctgtaccttcttcccttgtgaatcttcagtgtccattataacactctgtgtgcctttgtgtacccatatcttagctcccacttgtaagtgagaacatgcagtatttggttttccatttctgagttacttcacttaggacagtggcctccagttccatctaagttgctgcaagtgacattgtatctttcttttttgtggctgagtartatcccatggtgtatatgtaccacattttctttatccactcattggctgatgggcaattaggtagattccacattttcaattgaattgtgctgcaatatgtgtgcagg

SEQ ID NO: 427415 - DNA, 526 bp, Homo sapiens
aacacttttgacacatataataggagaggctcacagtgtacaagaagctctgatttattattgaagttcccacttyctaactaacaagtggacacttgcaagtagtttaacctttctgatcatcagttttctctatggtttctaagatctcttctagcgtcagtgtttcctgtatctaaatctactctattacgtattgaaatgactcttcagggagtgtctgtgactaacttttttgataactacatattcctatggctggcagttgtgccatctccctcagttttgtacagaagtgggtgaaaggaaaacacaagattggcatttgttctgtaacaggagatttcatgacatagaagaacgaaacagatggagatttaactcttaacactgccagtagtaacattctatgaggccgtagtttcattatacagtacatatctaatgcgcttagctaagtgaattatatttattaaatttaggtgtttgtgatatctatataatgcacctagtacaatgcctggca

SEQ ID NO: 427416 - DNA, 526 bp, Homo sapiens
aacacttttgacacatataataggagaggctcacagtgtacaagaagctctgatttattattgaagttcccacttcctaactaacaagtggacacttgcaagtagtttaacctttctgatcatcagttttctctatggtttctaagatctcttctagcgtcagtgtttcctgtatctaaatctactctattacgtattgaaatgactcttcagggagtgtctstgactaacttttttgataactacatattcctatggctggcagttgtgccatctccctcagttttgtacagaagtgggtgaaaggaaaacacaagattggcatttgttctgtaacaggagatttcatgacatagaagaacgaaacagatggagatttaactcttaacactgccagtagtaacattctatgaggccgtagtttcattatacagtacatatctaatgcgcttagctaagtgaattatatttattaaatttaggtgtttgtgatatctatataatgcacctagtacaatgcctggca

SEQ ID NO: 427417 - DNA, 526 bp, Homo sapiens
aacacttttgacacatataataggagaggctcacagtgtacaagaagctctgatttattattgaagttcccacttcctaactaacaagtggacacttgcaagtagtttaacctttctgatcatcagttttctctatggtttctaagatctcttctagcgtcagtgtttcctgtatctaaatctactctattacgtattgaaatgactcttcagggagtgtctgtgactaacttttttgataactacatattcctatkgctggcagttgtgccatctccctcagttttgtacagaagtgggtgaaaggaaaacacaagattggcatttgttctgtaacaggagatttcatgacatagaagaacgaaacagatggagatttaactcttaacactgccagtagtaacattctatgaggccgtagtttcattatacagtacatatctaatgcgcttagctaagtgaattatatttattaaatttaggtgtttgtgatatctatataatgcacctagtacaatgcctggca

SEQ ID NO: 427418 - DNA, 526 bp, Homo sapiens
aacacttttgacacatataataggagaggctcacagtgtacaagaagctctgatttattattgaagttcccacttcctaactaacaagtggacacttgcaagtagtttaacctttctgatcatcagttttctctatggtttctaagatctcttctagcgtcagtgtttcctgtatctaaatctactctattacgtattgaaatgactcttcagggagtgtctgtgactaacttttttgataactacatattcctatggctggcagttgtgccatctccctcagttttgtacagaagtgggtgaaaggaaaacacaagattggcatttgttctgtaacaggagatttcatgacatagaagaacgaaacagatggagatttaactcttaacactgccagtagtaacattctatgaggccgtagtttcattatacagtacatatctaatgcgcttagcyaagtgaattatatttattaaatttaggtgtttgtgatatctatataatgcacctagtacaatgcctggca

SEQ ID NO: 427419 - DNA, 607 bp, Homo sapiens
gctacatagatttcgtccatttttatcaataaatatcaaatttcaatgaaataattctagttttaaatatatacacatatctggctgggcgtcgtggctcatgcctgtaatcccaacactrggaggccaaagtgggcagatcacttgaggccaggagttcgcgaccagcatgcccaatatggtaaaactccatttctactaaaaatacaaaaatcagctgggcatggtggtgggcacctgtaatcccagatacttgggaggctgaggcaggagaatggcttcaacccaggacgtggaggttacagtgagccgagatcatgccattccactccagcctgggtgacagagggagactccatctaaaaaacaaaaaacaaacctaatatatatataaatataaaatatataattatatgtatgtatatatgtaatatataacatataaatacatatataatgtaatatatattttatataaacatatacatatacgtgtatataaacaaacatgtatatacacacacacacatatctacatatgcatgcacacatgcttcttaggttaggtttccccagaagtataccctaagacatagattcggggtga

SEQ ID NO: 427420 - DNA, 609 bp, Homo sapiens
ctataggaattaaaatcactttttaattcagctaaaatgagaaacactttcctttgtggctattcttgttcttttctacctttcctattttttcctaccccttaattactagcaccacgtcctgtgcataataggtacacagtaatgtttttctacagctcttatttcttaatgccaaccttccaacttccaaatgcagcctgccctttcaggctccagccttcctttgcctctcagtattttacagaatctggtctaacttctaatttcatacattaggttttaatgattccaacaggtggcctgccttggccaatgtaaataagcaactgtcctgttttccaatcccctttcaactccagcttgtcacttctggttcttatttgtttaattgcagcaagttttctaccctgtaaattttaataaactcccatcagtcctctctggtcctaagcattcagttatgccttgagtctgaggaggactggratgcaactccatcccccatcccgggacttttttcctttgctcaggggaccagctttgggccagtattgccagctccgtcctcaacactgacaagccttctgacttgagtagagataacag

SEQ ID NO: 427421 - DNA, 506 bp, Homo sapiens
tttattttgtacattgctagtaccacagttgccccaaaccattgctgtaaggtgtttatttgtcccttatgaaactggaggtacatttgggttacttccagagtataatgagaagaactcctgtcctagaaccatactctggcttctgcttttcctttgtcatagctaagtccactctactgaactagaacactgtgsgtgaatgcgttaagtgcctaccatctgctttatgctctgtagggctctggggagggtaagatgggttattgtggatgtgttcctgataaacagacatgaatacttctcccttggcagcctgagacatctgccgaatttgggagcatgactatccttgttcagcatagccacgggctcagtttactttctgtcactatgctattgtttcttctgtcccttggtaaggcctggggagatgagcatcccttcctctgatgtagagccagtggcccccagtaccagtgagggcttcttcatctttattgtgc

SEQ ID NO: 427422 - DNA, 633 bp, Homo sapiens
attgatgcatgtgcagcttcctcagagccagtgtgcaatccatccgtcacttccccccagcaattatgtctcagactctaaaacaggaagctcgagtatccactctcgatggagatgaaagatgtgtggagaatgccctgacgccaccttttcagtgtctccacagctagaatsactttataggccaagtgaaaaactactgaggactaatttgtcaacaaagactttctttgaagttaggcagacaagtggattcaaaacaattgtatgtgtgagtaacattgggcatgcttttttttttttttctcctggaaacagccaggacttttgacacagcagagctacaagtgtggaacattgatttagtaggacctttgtgactgacagtctcttagatctctcaacctctggaaaataaggaaagcttataaggtaaactgaggtgttgatgcttcctacgtctttttcaaggtttcttctgtgaggaaagatggagccataattctcctctccattcaaccctgagacccagcttctgcagccctagctgggataaggtattggtttatggaaaatggatatttaagatcataaaggtattgctgacacccatttacccaaagacacaagccc

SEQ ID NO: 427423 - DNA, 633 bp, Homo sapiens
attgatgcatgtgcagcttcctcagagccagtgtgcaatccatccgtcacttccccccagcaattatgtctcagactctaaaacaggaagctcgagtatccactctcgatggagatgaaagatgtgtggagaatgccctgacgccaccttttcagtgtctccacagctagaatgactttataggccaagtgaaaaactactgaggactaatttgtcaacaaagactttctttgaagttaggcagacaagtggattcaaaacaattgtatgtgtgagtaacaytgggcatgcttttttttttttttctcctggaaacagccaggacttttgacacagcagagctacaagtgtggaacattgatttagtaggacctttgtgactgacagtctcttagatctctcaacctctggaaaataaggaaagcttataaggtaaactgaggtgttgatgcttcctacgtctttttcaaggtttcttctgtgaggaaagatggagccataattctcctctccattcaaccctgagacccagcttctgcagccctagctgggataaggtattggtttatggaaaatggatatttaagatcataaaggtattgctgacacccatttacccaaagacacaagccc

SEQ ID NO: 427424 - DNA, 614 bp, Homo sapiens
taatatatgcattttagtttgtgacactttcagattcagccatatctgtaatgaaaacagagcaacctttaaaattaaaaaaaaaaaaaaaagtcctttctrccagagacatggcctgaatcagggccaaagatttcaagctggtgaaccagcaaaggagtcagataaatcagaatgagtgtaacagatctgatctatttcagctcagattaacctctttactatgtcttcaatggccaaaaagcctgggtcacaggagtaaaaatgtctaataaagcagaaccctggggaaaaaaactaaaagaagtgaatcgcataaagaaaagtgagatgtgtgaccatggcaaaacatgactggctatggtgaggattgagaaaggggagggaaacattctttaccatgccagtccaagaggcagatttatttcacttgtatataataattctagatcccagtgacaatttacattacttgacaacagctgcttataggtcaggtaacaatagcactgaataatctcataatgaacaactgtggatttcacattggtgttaattgcatttcatgctctttgaaagcctcaaacaggcagtgtgaaaaacacaaccaggtt

SEQ ID NO: 427425 - DNA, 614 bp, Homo sapiens
taatatatgcattttagtttgtgacactttcagattcagccatatctgtaatgaaaacagagcaacctttaaaattaaaaaaaaaaaaaaaagtcctttctgccagagacatggcctgaatcagggccaaagatttcaagctggtgaaccagcaaaggagtcagataaatcagaatgagtgtaacagatctgatctatttcagctcagattaacctctttactatgtcttcaatggccaaaaagcctgggtcacaggagtaaaaatgtctaataaagcagaaccctggggaaaaaaactaaaagaagtgaatcgcataaagaaaagtgagaygtgtgaccatggcaaaacatgactggctatggtgaggattgagaaaggggagggaaacattctttaccatgccagtccaagaggcagatttatttcacttgtatataataattctagatcccagtgacaatttacattacttgacaacagctgcttataggtcaggtaacaatagcactgaataatctcataatgaacaactgtggatttcacattggtgttaattgcatttcatgctctttgaaagcctcaaacaggcagtgtgaaaaacacaaccaggtt

SEQ ID NO: 427426 - DNA, 623 bp, Homo sapiens
atattctcactatatataactccttggttttgtgataagatcaaraagctttacatgaattttgttataaatcaatacaaaatgttaacacatgtatataatttttaattttattatatacatatgaatttttcttatgaaaagcgtgaatttttaggaaagatacttttaatgaactttgatgatatttttcctcaaaactatgcaaattctgttgcattggagatgtctgtaggacatcaaagagctggtctccacagaggaggtgaaaattcaagactttgacacatacccaaagcctctcagcagaagtttgaggactttccactatagtgatatttggagttgtaggatggaagagaaaattcagtggaatattggggaatgtctccttctgcctaaaatctcctctgctagcaacaaataccccatttacatgatgtaattatcatgcattgcatgcctatatcaaaataccttatgtagcccataaatatatacaactatgtacccacaaaaattaaaaataaaatatcctcctctagtccagctgagatgttctttattttataaatctcccactcctaagcaaaacactgagcaagataattaaagttgaaagg

SEQ ID NO: 427427 - DNA, 623 bp, Homo sapiens
atattctcactatatataactccttggttttgtgataagatcaagwagctttacatgaattttgttataaatcaatacaaaatgttaacacatgtatataatttttaattttattatatacatatgaatttttcttatgaaaagcgtgaatttttaggaaagatacttttaatgaactttgatgatatttttcctcaaaactatgcaaattctgttgcattggagatgtctgtaggacatcaaagagctggtctccacagaggaggtgaaaattcaagactttgacacatacccaaagcctctcagcagaagtttgaggactttccactatagtgatatttggagttgtaggatggaagagaaaattcagtggaatattggggaatgtctccttctgcctaaaatctcctctgctagcaacaaataccccatttacatgatgtaattatcatgcattgcatgcctatatcaaaataccttatgtagcccataaatatatacaactatgtacccacaaaaattaaaaataaaatatcctcctctagtccagctgagatgttctttattttataaatctcccactcctaagcaaaacactgagcaagataattaaagttgaaagg

SEQ ID NO: 427428 - DNA, 535 bp, Homo sapiens
tagtccaacctctaatccagtgttctcatccaaaggaaatcagaattttctctaagacaccccttccaagctgttgtctattctgtctttaaacatttccaatcaatgggaaatttactgctttcagaggtagactattccatctttgcccaactcatgactgaagaatgtcctgccaaagtgcttcaaagtttcatgatacactctatgggaaattttgtgataggaattttgatcttaggattttggagtcagtcataagackaaatccacgtttaggaaatatacatacatttagagtgaatcattattgctttaatttattcaaaaatatttgttgaccatacattacttttcagagattaaccaggtatgctgctgagtcccaagaaaattgtcatcaagcgagagatgataaaattatatgatagcccttataacattttatttttattcacttataaaacttacataggcataaaaaaaagggagaccaattcagtgttggcaggacaggagagactcctcaaaggaa

SEQ ID NO: 427429 - DNA, 535 bp, Homo sapiens
tagtccaacctctaatccagtgttctcatccaaaggaaatcagaattttctctaagacaccccttccaagctgttgtctattctgtctttaaacatttccaatcaatgggaaatttactgctttcagaggtagactattccatctttgcccaactcatgactgaagaatgtcctgccaaagtgcttcaaagtttcatgatacactctatgggaaattttgtgataggaattttgatcttaggattttggagtcagtcataagacgaaatccacgtttaggaaatatacatacatttagagtgaatcattattgctttaatttattcaaaaatatttgttgaccatrcattacttttcagagattaaccaggtatgctgctgagtcccaagaaaattgtcatcaagcgagagatgataaaattatatgatagcccttataacattttatttttattcacttataaaacttacataggcataaaaaaaagggagaccaattcagtgttggcaggacaggagagactcctcaaaggaa

SEQ ID NO: 427430 - DNA, 597 bp, Homo sapiens
caaatcatttttcttataagaaaatattgcattacaaatgtaactgaagccctagaacactcctccgaattccctcctccccaggggtaaatactgtcctgaagttgacatatgtcattctagtgcatacgttttttacttccacacgtttattcttaaaatatacatgtatagtgctatattgtgcctttcaaaatttcacataactggtattattatctctctgtctttttttttttttttaaggcagggtttcactctgttgctcaggctggagtgcagtggtgcaaccatggctcactgcaacctcaacctcccaaggctcaggtgatcttcccacctcagcttcctgagtttctggaactacaggattgcgtcaccatgcctggctagtttttctrttttggtagagatgggtgttgccatgctgcccaggcttgtctcgaactcctaggctcaagcaatccacctgccttggcctcccaaagtgctgggattacaggcctgagccactatgcctggccataatgggtattattctctatgaatccttgtgtgactttttttcagctgacactattttttaaatatttgccc

SEQ ID NO: 427431 - DNA, 549 bp, Homo sapiens
tcataattaactgtgcatttccttgccaaagtcaaagacagactaacttcatttggtctatccatgcccaaggagcaacttagcatgtctttatgcccctgttcttcttactcctcaaatctcctttctgtcaatttaatcaggggttaaagacatcacttatgattatcatatcattattatattcttacaatactagtcatattttaaagaaggtctgatgtcatttgattctatacatttgatgggttttcctgcacacttgaagtcctttaaatacaatcccctattcctttagtcttctgtgtaaaaaaaaaagagccaaagggaggaagaggagtttgtatagctggcaaggttgttccaacrcagtgcttagttgggtacccagttttctggtctctctacccacttcaacttagagtaagcccagtgaggattggtggattgaatgaggtgtttcttaatagcaaatcttaatgttttaaagaacaaataataggagaaagaatcaccaaacgtgggtgctagacgaagaggatgtgagaa

SEQ ID NO: 427432 - DNA, 702 bp, Homo sapiens
ttcagaagtgcaagatgactctgcctaaggtcactcaatccactagacgtcaaatatgctcctcatatgctcagctcttgtggtttgtgaggctaccaaagatgaagcttgggtcagttaaaactttttgtcttctctcacctttatcaaccagggtcccagagaaaacagatggcatctttgtgtggggattgtgaaaaaatttttagatgaaagaatgatttagagaagagtgggtaggtataaaagaacccaacaaggaatattgaggcacccaggcactaacatgaagaataagtagaaatggtgttcctggagcccagttgagagctgtagccaaggaagactatggcagaagctacagtcatagaagaatatggtgactagtataactgcaacaaatccagaaggagtgcaattaycaacaccactctccttctgctattgggctcttctgctcgtgtttccatgttggtcaaacccaaatgaagcccaagagtaatggagtccaggtgatgcagtctctagaggtcatcctctcagagaagggatgtcaatcattcagggaagagaggatgaagaataaccagcatataccctcaaatcagcacctgagacttggtgaagatttcccttccaagcaggcttctagtgaagtgtagaaggtaaggtgaaaactcagttcattttagcactggcctt

SEQ ID NO: 427433 - DNA, 606 bp, Homo sapiens
tgatgcagtctctagaggtcatcctctcagagaagggatgtcaatcattcagggaagagaggatgaagaataaccagcatataccctcaaatcagcacctgagacttggtgaagatttcccttccaagcaggcttctagtgaagtgtagaaggtaaggtgaaaactcagttcattttagcactggcctttaactcatccttcaaggccaatctgataaatcacatcctccagaaaaccttctctagacccttctctatgtccccttatcttccagtgcctaactctttcacaacacttaacaaatttcgctgaagttatatctatgtgtctctctccctcactggactgtaagctccttgaggatagggattatatattacacacctttgcatctaacatagtgtcaggcatctaaaattkcccactttgtaccagagatttcttattcaacagtatacattttccaccaagttcttagtcttcaaactgcaaactttcccttgcatggcactgagcatgcctatggcccagtgaaaactgaaaaacagtggttcataacacagggatacaaaatcaacatgatgaatgtaattgaatttctggtc

SEQ ID NO: 427434 - DNA, 563 bp, Homo sapiens
atagcatgggcaaatatctaatataaatagggtctttgactcagagaatgagaagtacttaactaaggttgagacaaagaataagggatggacttgattcacaaaaggagcaattgggccttcaaattcatatcaataactgttcccagtatcctgaggatggagggaagctctggaagggttaataaagccagagggaccaactgtccttatttttgtggaaatttcacagttctagcactgaaagttttgtgtttaaggaaacccctctatcccagacaaaccagggttgttggtcaccttaaatgtgccacgacatagtttggttttagaaatattatcatggctacaagatggagacttgattacagggagtgtgacagaaaggaaatcagttaggaggctgttgaagtgatatgggagagaartaactgtggcctgaactaaaataatggtgatgggggatgaagagaaatgaagtgattcaacaagagatgctaagacaaagactagacagaggtcatattagacttgtatggtgtattagtgtgttgtcacactgc

SEQ ID NO: 427435 - DNA, 568 bp, Homo sapiens
ataggagtgaaacaatgagaacacatggatacagggtgggggaacatcacacaccggggcctgtcgtggggtgggggactgggggagggatagcattgggagaaatgcctagtgtaaatgacgagttgatgggtgcagcaaactaacatggcacatayatacctatgtaacaaacctgcacattgtgcacatgtaccctagaacttaaagtataattacgtagatagatatgtaaataaataaaaattcaatggctgtagagtttggtggaaggaagggatgaataaacagggcacgaaggatttttagggcagtgaaactattctatctgatactataatgatggatacatgtaattatacatttctcaatgcctatagaatgtacagcaccaataaatgaacactaatgtaaactatggactttaggccacaaagatgtgtcagtgtaggtgcatcactggtaacaaatgtgtcactatagtgcaggatgctgacagtgggggtgtccgggcctcgatggagaagggggcatttggggattctctttactttctgctcaatgtttc

SEQ ID NO: 427436 - DNA, 568 bp, Homo sapiens
ataggagtgaaacaatgagaacacatggatacagggtgggggaacatcacacaccggggcctgtcgtggggtgggggactgggggagggatagcattgggagaaatgcctagtgtaaatgacgagttgatgggtgcagcaaactaacatggcacatatatacctatgtaacaaacctgcacattgtgcacatgtaccctagaacttaaagtataattacgtagatagatatgtaaataaataaaaattcaatggctgtagagtttggtggaaggaagggatgaataaacagggcacgraggatttttagggcagtgaaactattctatctgatactataatgatggatacatgtaattatacatttctcaatgcctatagaatgtacagcaccaataaatgaacactaatgtaaactatggactttaggccacaaagatgtgtcagtgtaggtgcatcactggtaacaaatgtgtcactatagtgcaggatgctgacagtgggggtgtccgggcctcgatggagaagggggcatttggggattctctttactttctgctcaatgtttc

SEQ ID NO: 427437 - DNA, 568 bp, Homo sapiens
caggctggaaatttgcttgtttgtttgtttgttttttgagaacagagtcttattctgttggccaggctggagtgccgtggcgtgatcttgactcactgcaacctccgcctcctgagtagctgagattacaggcgtgcaccatcacgtccggctagttttttgtagttttagtasaggtggggtttcaccatgttgcccaggctgatctcaaattcctgagctcaggtgatctgcctgcctcggcctcccaaagtgctgggattatgggcctgagccaccgtgtccgactgaaatttgcattttctacctgctccctctggaaattcttaagtgtctcgtgaagggaaggcttatacaaaatcataaaaatgtaattctacttgtagcaagttcccccacaaaagatctagcagaatttaaagaaaggttatgtttggtcattatttcctttgaaggagaaatagttttcttatgtgattccatctgcaaggattgtcagatatcggcagtacttcagtagtacaaaaatcagggataatgttgttctcccaagtattaacttacaagg

SEQ ID NO: 427438 - DNA, 620 bp, Homo sapiens
ggatgatccactgtgccatctgtctggaggtatttaagaattttattttgacttcatctgacatcatgatttttaaaaggatgtcaaagcagacatggcatgagttcttgcagactctgtttgagtctacagatcatttttaatcctgtttattctaaaatgacttccctgtatgtttattagactctttggattctaaaaggcaaaaaccccacacatgagctgtcatattcatttttttcttccacaacaaactaactgtcctatagcacagatactgaaaactaacaataattcaggtttgaaagtggaaacctaggaagatataaaaataatatatttcagtctattttaatcattgccccatcagacactaatagaaagactggaatttctgtggatggcttaagtctgtatyacacattttcatgtaaaattaatctaatgcacactctttcccaggtcacactgattcatgagaattggagagccagaaacggaagccaggcagtgtggtcctaagctgaggatgatgttatacactgtgagaggcagtgcacatggtcacaagcaaaatcaggttggtaaggctcacagggaattactgtaagccataaaat

SEQ ID NO: 427439 - DNA, 577 bp, Homo sapiens
ataaataatgagcaagtaaataactgaaagacwaagaataaagcatcttaccaaactagcagccccagaagacaacctctaggccagccaacaccagtttacttttcttccagcgttagtcctcagccagaggccagtgaggctaccagataataagcatcagcagaggtgcttatggattttgattcttagttttcattctacagattaccactctaaaactttctccatttctcctccaaaaatggttccagcagttaaaaaataatccttagcttctggaaagacattttcccccatccttcctcattcccaggtcctcagggtaccacctacctgtgattttacccagactggttttctggaagtcagggttcctcagctcttcagtgcttgcagatttcatgacagagttgatagacgacagggtgctgatgagctgagagttgagggagcccatctgtgagtgaggttccccgaaagcttctgccagttcactgtagttctcagccagcagtgtctgctgttctgccagcagcttctggatacgctcaatgtagtgatccaggccagtcat

SEQ ID NO: 427440 - DNA, 545 bp, Homo sapiens
aagcctaaaagctcttttctgtggcatgaaatgtcaatcataaaaaaaaatggtgactctatgatgagaaagctgacaaataaccacctcgaccaggtgatcaaagttgacatcatgtatctgcatggggaagagcagagcatcacttttgcactgtcctgccaagaaggcrtggcctggaccctgcctgaaacacattctacagaatgtcaggcctctctttttaaaaccatcatggccatgaaaaaaaggtaaaaacgagaacttttcagatggaaggaggccaaaaagacatgacaactgcatttctacacacagacacacacacacacacacacacacacacagatggaacaaatacggtaaaatgttaaccactgggaaatctgagtctgggtgaggaagacatgagagctctttttatgtacgattaaaattatttaaaaataaattttatttctgtctttcctttcttcatctgtgcatcaatgtccttagggtgcacgagtgcagtcagcctgccactagggagcacagcccagact

SEQ ID NO: 427441 - DNA, 571 bp, Homo sapiens
cagctgtaagcctgttaattctaggaagaaatcagaaaggcagcaaatgtttcctcattgtttgtgctgacttactccctctttccctaaccctccactgcagagaaaggctctctgttacaatttgagctatagcacagcagctggcttgtgaaggaaatgattgagttttatgctgaaccgaggctggaatggaggcaagtggttcctttttggtttcttcttatttaatgcaacatataattagaaggctaaaaacaatcaccattcgtaaaccataggcccaagcctccttcccttgctctgtaccctcatactcttaaacattttattcataacatcttcgagcaacctttgtttttgtttcaaaaagttagtaagaatggtatgttcccctaatgatttaaattcattacctmaaaaaaaaaaaagttcttttttgagatagtgtatcactctgtcacttaggctggagtacagcggtgcaatcacagctcactgtagcctcaacctcctgggctcatgtgatcctcccacctcagcctccagagtagcacgacaccatgctcag

SEQ ID NO: 427442 - DNA, 569 bp, Homo sapiens
gggaagtgcataatcagaaataaatgccaatactcacaacgagaagtctgctgaggaagagcagagcacagagttttcaaatccttgtaggaagggctgttttaaccctttgactggctacccagtctcttagaataatagcaacagctcgagttcttaacacagcgaatctccctgttgggtgtttattttgtatgtgtttttttctttctttcttgttggcacctataaagttggtaccaggcaaaaatccccaaccaaagggtttctttgcccagtacccaggagcaggagcacagatttttctccttcctacactcaaataggctggtactcactggaagataaatcatcctttcttggcttagctggagagctaatcgcctgtctgaaatctgatgcttaagccattatgactggctcaaggcttggrgcaagaaagcttataaggcgaagctggctacaggttaaaacaaagccttaagagtttatgaaacaagcaagctctgatgagccaggggcttttcaaaacctctccgggggctgggtgaattctgaggttctgatta

SEQ ID NO: 427443 - DNA, 569 bp, Homo sapiens
gggaagtgcataatcagaaataaatgccaatactcacaacgagaagtctgctgaggaagagcagagcacagagttttcaaatccttgtaggaagggctgttttaaccctttgactggctacccagtctcttagaataatagcaacagctcgagttcttaacacagcgaatctccctgttgggtgtttattttgtatgtgtttttttctttctttcttgttggcacctataaagttggtaccaggcaaaaatccccaaccaaagggtttctttgcccagtacccaggagcaggagcacagatttttctccttcctacactcaaataggctggtactcactggaagataaatcatcctttcttggcttagctggagagctaatcgcctgtctgaaatctgatgcttaagccattatgactggctcaaggcttggggcaagaaagcttataaggcgaagctggctacaggttaaaacaaagccttaagagtttatgaaacaagcaagctctgatgagcsaggggcttttcaaaacctctccgggggctgggtgaattctgaggttctgatta

SEQ ID NO: 427444 - DNA, 646 bp, Homo sapiens
attcagtttacaacatgattcagaaacttggggaaaaagcagactgcctcatccctacaccccaaagaaacacagctattttcctaaccaacaatcaccatttacttcctagctggctatgagagaacagtcaagagcaatttatgatgctcttacctccttaacaaaagacgctgcagtactgttagcagtaccataataaaatgttttttgttttttgctttagagatagggtctggctctgtcacccaggctggagtgcagtggtaccatcataactcactgcagcctcaractactgggctcaagcaatcctcccacctcagcctcctgagtagctgggactacaggtgcataccactatgcctggctaatttaaaaaaatttttttttgtagagatggagtctggctatgttccccacaccggtcttgaactcctggcctcaagcaatcctccctcctcggccttccaaagtgttgggattacacgtctgcgccaccccatctggcctaaaatgttttgaattaatgaaaacagtactgtaccaatcaagagaagtaggatggaggatctggtgaaaaagaggtaacactacgagggaagattgattttgatgggctggcggtgaggaagggcaggggtgc

SEQ ID NO: 427445 - DNA, 646 bp, Homo sapiens
attcagtttacaacatgattcagaaacttggggaaaaagcagactgcctcatccctacaccccaaagaaacacagctattttcctaaccaacaatcaccatttacttcctagctggctatgagagaacagtcaagagcaatttatgatgctcttacctccttaacaaaagacgctgcagtactgttagcagtaccataataaaatgttttttgttttttgctttagagatagggtctggctctgtcacccaggctggagtgcagtggtaccatcataactcactgcagcctcagactactgggctcaagcaatcctcccacctcagcctcctgagtagctgggactacaggtgcataccactatgcctggctaatttaaaaaaatttttttttgtagagatggagtctggctatgttccccacaccggtcttgaactcctggcctcaagcaatcctccctcctcggccttccaaagtgttgggattacacgtctgcgccaccccatctggcctaaaatgttttgaattaatgaaaacartactgtaccaatcaagagaagtaggatggaggatctggtgaaaaagaggtaacactacgagggaagattgattttgatgggctggcggtgaggaagggcaggggtgc

SEQ ID NO: 427446 - DNA, 462 bp, Homo sapiens
tttataagcagcataaatttattgctcacagttctgaagtctgggaattccaagatcaagatgacagcagattcagtatctggtgagggcctgttcctcaaggatagtgccttctatgtccttacatggcagatgggcaaaagagctaacaagcttcctcaaaccctttgtaagggcactaatcccatttgtgagggttctaccctgatgatttaatcacctcccagaggacccatccttaatgccatcccgttgaaggytgggtttcaaaatgtaaatcttgggagacacaaaacattgagaaccatagcagtctctcagacctcgttgtactcagcttcattttaggataactccacatttgagttaagaaaccaagagtttgtattcccaactctatgcttcatgaggttaaagactcttggcttctcattctcactgctcaggcaggggtagtccatc

SEQ ID NO: 427447 - DNA, 648 bp, Homo sapiens
cagcaacctgtggctcctgccccacagagatgagctggttagcagagagcctattgtcagctgggcgtggtggctcacgcctgtaatcccagaactttgggaggctgaggcatgcagatcacctgaggtcgggagttcgagaccagcctgaccaacatggaggaaaccccgtctctactaaaaatacaaaattagccagatagcgcatgcytgtaatcccagctacttgaaaggctgaggcaggagtatcgcttgaacctgggaggcagaggttgcggtgagccaaaatcgcaccactgccctccaccctgggcaacaagagcaaaactctgtctcaaaaaaaaaaagagagagagagagagcccatcgtcctcagaaggtaaaggctcccggagccatacttgcccacctgtgcctgagcaaatgagcacagcacgctgtaggcttccacatgccccttccctgtgagtgctagttcaaggctgtagaatgactccaaggtctgtcaactccacaggtgaggaagggactctggttaaatcctccttgaccctgaaccctctatcttgcccccctactgcttccttttgtaactttccctatcaccactctgaaacacccttgtgagagtcgttctgaactctgcat

SEQ ID NO: 427448 - DNA, 648 bp, Homo sapiens
cagcaacctgtggctcctgccccacagagatgagctggttagcagagagcctattgtcagctgggcgtggtggctcacgcctgtaatcccagaactttgggaggctgaggcatgcagatcacctgaggtcgggagttcgagaccagcctgaccaacatggaggaaaccccgtctctactaaaaatacaaaattagccagatagcgcatgcttrtaatcccagctacttgaaaggctgaggcaggagtatcgcttgaacctgggaggcagaggttgcggtgagccaaaatcgcaccactgccctccaccctgggcaacaagagcaaaactctgtctcaaaaaaaaaaagagagagagagagagcccatcgtcctcagaaggtaaaggctcccggagccatacttgcccacctgtgcctgagcaaatgagcacagcacgctgtaggcttccacatgccccttccctgtgagtgctagttcaaggctgtagaatgactccaaggtctgtcaactccacaggtgaggaagggactctggttaaatcctccttgaccctgaaccctctatcttgcccccctactgcttccttttgtaactttccctatcaccactctgaaacacccttgtgagagtcgttctgaactctgcat

SEQ ID NO: 427449 - DNA, 648 bp, Homo sapiens
cagcaacctgtggctcctgccccacagagatgagctggttagcagagagcctattgtcagctgggcgtggtggctcacgcctgtaatcccagaactttgggaggctgaggcatgcagatcacctgaggtcgggagttcgagaccagcctgaccaacatggaggaaaccccgtctctactaaaaatacaaaattagccagatagcgcatgcttgtaatcccagctacttgaaaggctgaggcaggagtatcgcttgaacctgggaggcagaggttgcggtgagccaaaatcgcaccactgccctccaccctgggcaacaagagcaaarctctgtctcaaaaaaaaaaagagagagagagagagcccatcgtcctcagaaggtaaaggctcccggagccatacttgcccacctgtgcctgagcaaatgagcacagcacgctgtaggcttccacatgccccttccctgtgagtgctagttcaaggctgtagaatgactccaaggtctgtcaactccacaggtgaggaagggactctggttaaatcctccttgaccctgaaccctctatcttgcccccctactgcttccttttgtaactttccctatcaccactctgaaacacccttgtgagagtcgttctgaactctgcat

SEQ ID NO: 427450 - DNA, 648 bp, Homo sapiens
cagcaacctgtggctcctgccccacagagatgagctggttagcagagagcctattgtcagctgggcgtggtggctcacgcctgtaatcccagaactttgggaggctgaggcatgcagatcacctgaggtcgggagttcgagaccagcctgaccaacatggaggaaaccccgtctctactaaaaatacaaaattagccagatagcgcatgcttgtaatcccagctacttgaaaggctgaggcaggagtatcgcttgaacctgggaggcagaggttgcggtgagccaaaatcgcaccactgccctccaccctgggcaacaagagcaaaactctgtctcaaaaaaaaaaagagagagagagagagcccatcgtcctcagaaggtaaaggctcccggagccatacttgcccacctgtgcctgagcaaatgagcacagcacgctgtaggcttccacatgccccttccctgtgagtgctagttcaaggctgtagaatgactccaaggtctgtcaactccacaggtgaggaagggactctggttaaatcctccttgacsctgaaccctctatcttgcccccctactgcttccttttgtaactttccctatcaccactctgaaacacccttgtgagagtcgttctgaactctgcat

SEQ ID NO: 427451 - DNA, 367 bp, Homo sapiens
taccatatttaaagaaagactgattcacgttgaggtgaaccatctaaacccaattttcgttatattgttttctagaaagtagattaaaaattaaaatactcccaagcttgtcatggtggcttacacttgtaatcccagctacttgggaggctgaggtaggagaacagattgagcccaggaggcggatgttgcagcgagccaagatcaccccactgcactccagcctaggcaacagagygagatgctgtcaaaaaaaaaaaaaaaagaaaaaggaagggagggagggaaataatattatagaaagcatataaaaatattaagaaagagaaaaaaacaatcttaactcaggtatctttgtagaaaatgc

SEQ ID NO: 427452 - DNA, 367 bp, Homo sapiens
taccatatttaaagaaagactgattcacgttgaggtgaaccatctaaacccaattttcgttatattgttttctagaaagtagattaaaaattaaaatactcccaagcttgtcatggtggcttacacttgtaatcccagctacttgggaggctgaggtaggagaacagattgagcccaggaggcggatgttgcagcgagccaagatcaccccactgcactccagcctaggcaacagagtgagatgctgtcaaaaaaaaaaaraaaagaaaaaggaagggagggagggaaataatattatagaaagcatataaaaatattaagaaagagaaaaaaacaatcttaactcaggtatctttgtagaaaatgc

SEQ ID NO: 427453 - DNA, 319 bp, Homo sapiens
tcgtgctgtaagaatgatagaatcctataacaatctatatgtttaaattcttttctatttgaaagcgccttgtggtacaagtgccttcagatgtgagcacagacatcagttgaaatacaagacagtcgtaatagagctaaatttgataagccacacaagcatgactcaggcaacccagcctcttaaatcaggatgcacaattaattgctactcttttatttattatctttaatccctcattggatacagttgacttgctacttcctgggatgaggccacagcatargcagggatgaataatttttaaattatgaagcaa

SEQ ID NO: 427454 - DNA, 576 bp, Homo sapiens
ggcaaaactcctccctaccaaaaatacaaaaattatcctgatgtggtggcgtgcccctgtagactcagctattcaaggggctgaggtgggaggattgcttgagccctggaggtcwaggctgcagtgagccatgacccactgcactctagcctgggtgacagagatcctgtccaaaaaagccaaaaaaaacaaattgatgtcatactggattagagggggctaattcaattcctggtatccttatatgaagagggagaatgtggacacagacacacaggggacaacaccatgtgaagacccagacacagagggaagaggaccggatgaagacaggtagagtttgcagtgatgtatctacacaccaaggaatgccagggttgctagccaccactggaagtgagtggagacaagggctctcttatattcttcaaagagagcttagtgctgccagcaccttgattttggacttccagcctccagagctgtgagacaatttatattgttttaagtcacccagtttgtagtaattttgttacagtagtcctcgcaaaccaatagtcatttagcagagaccac

SEQ ID NO: 427455 - DNA, 576 bp, Homo sapiens
ggcaaaactcctccctaccaaaaatacaaaaattatcctgatgtggtggcgtgcccctgtagactcagctattcaaggggctgaggtgggaggattgcttgagccctggaggtcaaggctgcagtgagccatgacccactgcactctagcctgggtgacagagatcctgtccaaaaaagccaaaaaaaacaaattgatgtcatactggattagagggggctaattcaattcctggtatccttayatgaagagggagaatgtggacacagacacacaggggacaacaccatgtgaagacccagacacagagggaagaggaccggatgaagacaggtagagtttgcagtgatgtatctacacaccaaggaatgccagggttgctagccaccactggaagtgagtggagacaagggctctcttatattcttcaaagagagcttagtgctgccagcaccttgattttggacttccagcctccagagctgtgagacaatttatattgttttaagtcacccagtttgtagtaattttgttacagtagtcctcgcaaaccaatagtcatttagcagagaccac

SEQ ID NO: 427456 - DNA, 595 bp, Homo sapiens
ggtgggcggcggggaggggaggaataagtgaactaaggactggggaggggagaaggaaaggggaaaatggggagaagctggccaacaggtaccaggtttcaattagatagaagtaaattctggtgttcttttagtcaggtgacgrtgattaatggtaaggtactgaatattataaaacagctaaaaatagaggcttttggatgttctcgctgcaaagaaataagtgcctgaggtgacacattaaaaaccctgattggatcgttatacagtatataatatcaaaacatcaaattgtatcgcataaatatctataattacaagatgtcattacaaggatcatttaaaatctccagcagtcacaaacatttttaggctaggctagtgcttcctttaaaaacacggttaacttcttgactattttagtctagtcggtgctgaggctaaagcagctccatctttgatgctaatctgccacgttgacttcttcaacgctagtcccgggaatgcctgtaagatttctactttcatgtaccacaaatcctgccattagattgtttaccttgatgttaatgtaaacacatacttaccataaata

SEQ ID NO: 427457 - DNA, 595 bp, Homo sapiens
ggtgggcggcggggaggggaggaataagtgaactaaggactggggaggggagaaggaaaggggaaaatggggagaagctggccaacaggtaccaggtttcaattagatagaagtaaattctggtgttcttttagtcaggtgacggtgattaatggtaaggtactgaatattataaaacagctaaaaatagaggcttttggatgttctcgctgcaaagaaataagtgcctsaggtgacacattaaaaaccctgattggatcgttatacagtatataatatcaaaacatcaaattgtatcgcataaatatctataattacaagatgtcattacaaggatcatttaaaatctccagcagtcacaaacatttttaggctaggctagtgcttcctttaaaaacacggttaacttcttgactattttagtctagtcggtgctgaggctaaagcagctccatctttgatgctaatctgccacgttgacttcttcaacgctagtcccgggaatgcctgtaagatttctactttcatgtaccacaaatcctgccattagattgtttaccttgatgttaatgtaaacacatacttaccataaata

SEQ ID NO: 427458 - DNA, 636 bp, Homo sapiens
aaaaaagtcttcgacttagaaaaattcatcttaaataattaattacttaaaattaaataattaagcttaaatcttggatttcctattactaaccaagaggcttagaaagagaacatcaatgaatctgrccagaaacaagttttaaacccctgcaaacctctgaagcacatccaaaatgcacaggtatctactccatatgctaaggaccttctctcaaggtttcttagaaaatattatataaaaaggaaaggggataacaattgattaaaaatgcaactatacaattattttagaatcatacgtaagatcaatttcaaactatttaaaaatgactagaagtagttgttttatggatttttaaggattcatctggcacagtacacaccttctggtgtagaaaatactgaagtttcccattctaagtgaccttgagttgcttttgtttttaacggtgtaagcagcctcctctactaataaaggttattcaaaattaattcctctactagaatatttttactacattttgagaaatcccccaagcatgttctccacactaaataagccaacgactaaatgtttagagaatttttctgcccagagtataatttaaaagtccattaatttttttcagtaaac

SEQ ID NO: 427459 - DNA, 636 bp, Homo sapiens
aaaaaagtcttcgacttagaaaaattcatcttaaataattaattacttaaaattaaataattaagcttaaatcttggatttcctattactaaccaagaggcttagaaagagaacatcaatgaatctggccagaaacaagttttaaacccctgcaaacctctgaagcacatccaaaatgcacaggtatctactccatatgctaaggaccttctctcaaggtttcttagaaaatattatataaaaaggaaaggggataacaattgattaaaaatgcaactatacaattattttagaatcatacgtaagatcaatttcaaactatttaaaaatgactagaagtagttgttttatggatttttaaggattcatctggcacagtacacaccttctggtgtagaaaatactgaagyttcccattctaagtgaccttgagttgcttttgtttttaacggtgtaagcagcctcctctactaataaaggttattcaaaattaattcctctactagaatatttttactacattttgagaaatcccccaagcatgttctccacactaaataagccaacgactaaatgtttagagaatttttctgcccagagtataatttaaaagtccattaatttttttcagtaaac

SEQ ID NO: 427460 - DNA, 524 bp, Homo sapiens
aagtagaacctatgtctctaagtcttgtgaccttgaagtctaattcaaaaatctaatcatwcttggattataaagaagttgagaactgcctgaatataaaagctaccatgcttatgttattgtgggaaggagttctggaatcagatagacatggacctcaaagtaagctgacagaactcattccaggggaacagtaaggccaccttctaaactaggagaggacaaactgaaagtgtatattttggtgaaataaaaatttaaagttttttaattcaggactttttatgaagactgttctaattattattatttgtgaatattgaaaccaaaacttttaactttggcatttggaaacttcatgttatcttaagagccaaagcaaatcacttagaagatcaacataataaagttttgcctagctccagtaagaaataggatgatataacttttaggtggtattgtggtcagtccattgttacacaatcccatgtctctagttttggggtggctgatacagtacagga

SEQ ID NO: 427461 - DNA, 540 bp, Homo sapiens
gtgttgattttcttgcaaaggctttcccacattcactgcactcataatgcctttctccagtatgggattgctgatgtatatggagacctgacttcctagtgaaggctttcccacagtcactacatttataaggtttctctccagtgtgaattttctggtgtgtaaagagatttgatctgtcagtaaaagcctttccacattcagcacacctatagggtttctctcctgtgtgaatctgctgatgtacgtggagctgtgatttcttagtgaaggatttcccacaaatactgcattcatagggtttctctccagtatgaattctctcatgtgtaataaaatgggatttgtggaaraaggccttaccacattcagtgcaaacatatggtttttcccctctatgaattctctggtgcatacttaatgttgacttctgaatgaatgctttcccacattcactgcattcataatgtctctctccagtatgacacttctgatgtatcctgagccgagacttccaggtgaatgattttccacagtcgc

SEQ ID NO: 427462 - DNA, 521 bp, Homo sapiens
gtgccaatgtcacacatggacacatacatcatttagtgcccttgcaccttactcaaaaatttatttctggaactaccacattaaaatatcatcccatcccatattgtacaaagatttaagtgcaaaagttttaccataacatggttaataaaaaagaaagattagaaatgtttaratattcaataattgtggattgcttaaatactttataaaatatccaaaggatatactgttctattacgttattatactatctgatttcacaggcccttcaagttatcatcaaccctggtacctaactcctcactaccactcttcaatctgctctaagtgtcaattggtgcccagagactactcccagaagccattactgaaacctcagattcactgatttccatgccttgctgcccctgagccaggcctgcatcactcatcctacaatacctgatcacagagtcttcaattcctctaccctaatggtcctggctctctaccaatcaatcccacatccccatgactgg

SEQ ID NO: 427463 - DNA, 527 bp, Homo sapiens
aactgtgccaatgtcacacatggacacatacatcatttagtgcccttgcaccttactcaaaaatttatttctggaactaccacattaaaatatcatcccatcccatattgtacaaagatttaagtgcaaaagttttaccataacatggttaataaaaaagaaagattagaaatgtttagatattcaataattgtggattgcttaaatacttyataaaatatccaaaggatatactgttctattacgttattatactatctgatttcacaggcccttcaagttatcatcaaccctggtacctaactcctcactaccactcttcaatctgctctaagtgtcaattggtgcccagagactactcccagaagccattactgaaacctcagattcactgatttccatgccttgctgcccctgagccaggcctgcatcactcatcctacaatacctgatcacagagtcttcaattcctctaccctaatggtcctggctctctaccaatcaatcccacatccccatgactggcc

SEQ ID NO: 427464 - DNA, 621 bp, Homo sapiens
tttctgccttttaaacgttaataaaaktaccctcacaggtgaaaccaataagccttacctcctaagctaatgcattgggcagtctccatagctctccccagaaggagcctagggcagctaattttgagcttgtaaaggcttttaatggctcaagataatttttagggctatgacatgaaccccaaaatttctgttccctggaaggcaaagaccaaaaggaagtaccagcacgtggttacaaggtcaagctcccaaggacataaaacaagatgagaggaaaacttcatccagttttttttgttgttgtttcagggacctgtagcaaagtttgttactgaccagcttgctgggccatcttgaacagagggcttataggatcctaggcctgtattctatcctaaggtaccgttctcccttatagaacaacacagaaatacaattcatagcacgaagtacatcagattttctacagcctcagactagtctcatgaatcctttttcccactaatcaaaacccacaaaacataggcattagccactctgcttagcacccattgtcaacctggcaaggctcaaacttgcctccagttggaccctgtcatctctgatccactcaaagtg

SEQ ID NO: 427465 - DNA, 621 bp, Homo sapiens
tttctgccttttaaacgttaataaaattaccctcacaggtgaaaccaataagccttacctcctaagctaatgcattgggcagtctccatagctctccccagaaggagcctagggcagctaattttgagcttgtaaaggcttttaatggctcaagataatttttagggctatgacatgaaccccaaaatttctgttccctggaaggcraagaccaaaaggaagtaccagcacgtggttacaaggtcaagctcccaaggacataaaacaagatgagaggaaaacttcatccagttttttttgttgttgtttcagggacctgtagcaaagtttgttactgaccagcttgctgggccatcttgaacagagggcttataggatcctaggcctgtattctatcctaaggtaccgttctcccttatagaacaacacagaaatacaattcatagcacgaagtacatcagattttctacagcctcagactagtctcatgaatcctttttcccactaatcaaaacccacaaaacataggcattagccactctgcttagcacccattgtcaacctggcaaggctcaaacttgcctccagttggaccctgtcatctctgatccactcaaagtg

SEQ ID NO: 427466 - DNA, 621 bp, Homo sapiens
tttctgccttttaaacgttaataaaattaccctcacaggtgaaaccaataagccttacctcctaagctaatgcattgggcagtctccatagctctccccagaaggagcctagggcagctaattttgagcttgtaaaggcttttaatggctcaagataatttttagggctatgacatgaaccccaaaatttctgttccctggaaggcaaagaccaaaaggaagtaccagcacgtggttacaaggtcaagctcccaaggacataaaacaagawgagaggaaaacttcatccagttttttttgttgttgtttcagggacctgtagcaaagtttgttactgaccagcttgctgggccatcttgaacagagggcttataggatcctaggcctgtattctatcctaaggtaccgttctcccttatagaacaacacagaaatacaattcatagcacgaagtacatcagattttctacagcctcagactagtctcatgaatcctttttcccactaatcaaaacccacaaaacataggcattagccactctgcttagcacccattgtcaacctggcaaggctcaaacttgcctccagttggaccctgtcatctctgatccactcaaagtg

SEQ ID NO: 427467 - DNA, 610 bp, Homo sapiens
ttttgtagacaataatgaccagccatgggcagacacagaactccccagcccagactagtagggtcaagtctgcaagcacaacggaagctccttcttgctgagataggtgactggaaacaagaccacagttcccacgyccagaggcagttgcgactcaagtgtgtttagtctcctgggcctggaggagagtaatgggcagcccgctgggctgtaatggccatctgcccgcctgcggtttctgccctgatgcgcatggtcccttccttcctagccagaccgtgttccaatcacctagttctaatcggccttgccccaagtgcatcagatgctgcttcaagtttcaattacactgtataaaccaggtttctggagaattccagccagacagtgatccgaggcactcaccccggaccctgcatatggaatctgactcagatctatgttgtattcacagcacctgcctagtgatggcaattttgtccaacagcacctgcctcccctctccggctctttgctcttgggtagtctccctgacacctggcctttgtgtctacctcaggagctcccagcagcgctggtaacaggcaccaagcttctgagtaaagccttg

SEQ ID NO: 427468 - DNA, 610 bp, Homo sapiens
ttttgtagacaataatgaccagccatgggcagacacagaactccccagcccagactagtagggtcaagtctgcaagcacaacggaagctccttcttgctgagataggtgactggaaacaagaccacagttcccacgtccagaggcagttgcgactcaagtgtgtttagtctcctgggcctggaggagagtaatgggcagcccgctgggctgtaatggccatctgcccgcctgcggtttctgccctgatgcgcatggtcccttccttcctagccagaccgtgttccaatcacctagttctaatcggccttgccccaagtgcatcagatgctgcttcaagtttcaattacactgtataaaccaggtttctggagaattccagccagacagtgatccgaggcactcaccccggaccctgcatatggaatctgactcagatctatgttgtattcacagcaccygcctagtgatggcaattttgtccaacagcacctgcctcccctctccggctctttgctcttgggtagtctccctgacacctggcctttgtgtctacctcaggagctcccagcagcgctggtaacaggcaccaagcttctgagtaaagccttg

SEQ ID NO: 427469 - DNA, 587 bp, Homo sapiens
ctaatataatatgttatatgtatatcagttatatatatacagataaaaagcacatctttattttacagggaattctttccaatcaaatccacaagaaaagaactctaaaagtgagcaaagtacttttttgcagatccacaagttacttatgtacatatgaaaaaatccttagtgtttctcataagagaatttaagttaaaagaggaatgagactgtgttctatccacagtgtttgtgagaatgaagagcagtggtacttacactgctgcttgacgtttaagttgctgatgacttttcaagtagataatttggagataattaccacattttaaaaatgcatatgccctttacccaccaattccrttgtattaaaataccttcagaaaatagagatacatgcactttgtttttctcagcatttatgttaacaagaacccatagaatggatatgtggccattgaaggtggcaataggtggagaagtatgttggtgtgtgaggatgtattgttatagccagtgaggaaaaaaaatcaatttgtttgcacatacacacaaacatactgtggtcttgtgttagccaaaactat

SEQ ID NO: 427470 - DNA, 632 bp, Homo sapiens
ggtgaaaccctgtctctactaaaaatacaaaaatttagccgggcatggtggcaggcacctgtagtcccagatacttgggaggctgaggcaggacaacggcgtgaacccgggaggcggagcttgccgtgagcggagatcatgccactgcactccagcctgggagacagtgtgagactccgtctcaaaaaaaaaattcaagtgacttattggcttttattatgctagaaataagccctatacatcagtattagaacttttattgataagccattgtatttttatttctgatttatattttgcctraagtaaaaaaaagttaaatagcaatttaaatggaaaccaatacaaatggatttaaaaagtaaagttgcattagcatcccaggattatcattataattgagaataaaatttcttactgagctttgctttttaatatttattttcaaaaatttttaactggtctctcttacacagaacatactgaactttctaatagttaagataaaaatctatcctcttgtattaggaaaaatcccatggactatttaataataaggaaaataagtgcatttgaagccaatctctcttaattcacagctcatttccttagtggcccctttggaccaggag

SEQ ID NO: 427471 - DNA, 632 bp, Homo sapiens
ggtgaaaccctgtctctactaaaaatacaaaaatttagccgggcatggtggcaggcacctgtagtcccagatacttgggaggctgaggcaggacaacggcgtgaacccgggaggcggagcttgccgtgagcggagatcatgccactgcactccagcctgggagacagtgtgagactccgtctcaaaaaaaaaattcaagtgacttattggcttttattatgctagaaataagccctatacatcagtattagaacttttattgataagccattgtatttttatttctgatttatattttgcctgaagtaaaaaaaagttaaatagcaatttaaatggaaaccaatacaaatggatttaaaaagtaaagttgcattagcatcccaggattatcattataattgagaataaaatttcttactgagctttgctttttaatatttattttcaaaaatttttaactggtctctcttacacagaacatactgaactttctaatagttaagataaaaatctatcctcttgtattaggaaaaatcccatggactatttaataataaggaaaataagtgcatttgaagccaatctctcttarttcacagctcatttccttagtggcccctttggaccaggag

SEQ ID NO: 427472 - DNA, 517 bp, Homo sapiens
ccgtataaagacaccgttaatttagtaaataattatcaaaccacttctataagttaggtttggcaaattgtaggagacaaagatggaattgacatagtttttgtctttaagatgctcataatagaatatagataactgtttaatttttgtgtttttttcaacagaatttttaagaaaaatattttaattcattcatatactyatccacttaaaaaataaccatcatgtatcttttatagactaagcatttttccaatgttacaaaatacatttaaaaaatagttaggagattgttattaccactgttatttattttatttactaccttaagtagtgcttactgtgtgtccaatgtcatctgggagcttatagttattatttattatgtatgtatcatgttcagtatgtgccaggcatgtttacatttgtggtaatgaatgcaagcttctaaaatgtgggtaggatttagggtaagcgtgcagagtgagtggaactttgccaggtaaggaggcagagg

SEQ ID NO: 427473 - DNA, 517 bp, Homo sapiens
ccgtataaagacaccgttaatttagtaaataattatcaaaccacttctataagttaggtttggcaaattgtaggagacaaagatggaattgacatagtttttgtctttaagatgctcataatagaatatagataactgtttaatttttgtgtttttttcaacagaatttttaagaaaaatattttaattcattcatatacttatccacttaaaaaataaccatcatgtatcttttatagactaagcatttttccaatgttacaaaatacatttaaaaaatagttaggagattgttattaccactgttatttattttatttactaccttaagtagtgcttactgtgtgtccaatgtcatctgggagcttatagttattatttattaygtatgtatcatgttcagtatgtgccaggcatgtttacatttgtggtaatgaatgcaagcttctaaaatgtgggtaggatttagggtaagcgtgcagagtgagtggaactttgccaggtaaggaggcagagg

SEQ ID NO: 427474 - DNA, 525 bp, Homo sapiens
aggtaatgcccacagagttcaagaccagccggccaacatggtgaaacccygtctctactaaaaatacaaaaaattagctgggcatggtggctggcacctgcaatcccagctattccggaggctgaggcaggagaatcgcttgaacccaggaggcagaggttgcagtgagccgaggtcgcaccattgcactcccgcctgggaaacaagagcaaaattccatctcaaaaaaaaaaaaaaaaaaaaaaaaaagtgttgtagttgctcaataaatggtaactgctgaaactgctattacagtagtagcattaaagtagatacagggatttccatgtagtctgatgtaatggctattttcagtgttttccaatcatttgcttatcttcccttagggaaaaaaaaagtatgtttcttctttgaagctgttctttaggcacaggtgtcctgcccactgccccaccctctagtctcttaaggggatcagctgccctatttctctctgcaaacatttcccacacctaagctagg

SEQ ID NO: 427475 - DNA, 474 bp, Homo sapiens
cttcatccattagctctttttatccacaaaacagcattgtgaagtaggcagagcaaacattttgaaaatacccattttacagagggaatctgagtcctagggagggttccctttaactgctatgccatggtgctgactccsccatgggagaaatataatgtccctgtggccagagggcacataggtagctggataaaaaggttgtgcgttgtgctcaagtcaggtttctttttcttttttttttttctagatggactctcactctgtcgcccaggctggagtgcagcagtgtgatcttggctcactgcaacctctgcctcccgggttcaagcaattctcctgcctcagcctccagagtagctgggaatacaggtgcacaccaccatggctggctaatttttgtattttttttagtttcaccatgttgtatttttttttttttttagttttttgattgtttgtttatttttgttt

SEQ ID NO: 427476 - DNA, 621 bp, Homo sapiens
tcacattattgacaagtatatgatttcccataccttttggaatattgaaaatacctctaggtacccttctctcactgcctttactactttcccagacccttttgggtccacaggtctgaggttgaaaatcctaatgtaacctaaatttctcctgaaaaggaactcagagagatcaagtgagttttttgctcccttgccccatactgagattgtagtatatgaggaaaatggcagttataataaaaatactaattaccacatttagagccttgtttaaatatagtaaacaatatatttttgatcaaaaacagcctcttaaaatttatcaataactttttatataatggcttatttgatggaaatgrtaataatgataataataaccatgaacctactgaatatgaaatatattaataaaccatcttaaaatgttatttactcttcacaacaatgagaaaaatgtgtattattttctctggtttacagatgaggaagcaggttcatatgttatctcatttaatttttgtcataacccttgaggttggttctcttacgatccacaaaacatgaggaaattgaagctcacagaggataagacatttgctcaagctcacacagcaa

SEQ ID NO: 427477 - DNA, 621 bp, Homo sapiens
tcacattattgacaagtatatgatttcccataccttttggaatattgaaaatacctctaggtacccttctctcactgcctttactactttcccagacccttttgggtccacaggtctgaggttgaaaatcctaatgtaacctaaatttctcctgaaaaggaactcagagagatcaagtgagttttttgctcccttgccccatactgagattgtagtatatgaggaaaatggcagttataataaaaatactaattaccacatttagagccttgtttaaatatagtaaacaatatatttttgatcaaaaacagcctcttaaaatttatcaataactttttatataatggcttatttgatggaaatggtaataatgataataataaccatgaacctactgaatatgaaatatattaataarccatcttaaaatgttatttactcttcacaacaatgagaaaaatgtgtattattttctctggtttacagatgaggaagcaggttcatatgttatctcatttaatttttgtcataacccttgaggttggttctcttacgatccacaaaacatgaggaaattgaagctcacagaggataagacatttgctcaagctcacacagcaa

SEQ ID NO: 427478 - DNA, 543 bp, Homo sapiens
gccggctgaaatcgactggagatgtcacagggagaaaatgctttcctatgagttagtggagcatggtctccacaaaaattgcctttttactgaacagagaaagtggcaaactgatgtcctcttcacagagttctgactttagtcctctagctgcwgccattagcaattcctttccatccagtgcatagaagtcacaggaggcatgtcacaaaaatggggagtagggaggagaaaaattagatgtgtacacacatgatctcattttgtcaccacagcaacctaattgtcattatcctgattttttaaaaggtaaaacttgaggtggtgaatgcttgtccaagatcatggagttggtgactggcagagccgacatatggacccaagtcctttcaatgccaaatccactgtaggggaaatggcccttctgtctctttctctccctctgtctccccttttcctcttgattccatgtgtcaccttccccactcccagtctcgaaggggtcagaggattatatgacacaacacaatgccttgcatacag

SEQ ID NO: 427479 - DNA, 562 bp, Homo sapiens
aaaacttcacatctgccaccagctgaaaaccaaaatactggcttttgagtctcttttgcctttcaaatattgcatgtatggctctaagccctgaaactttgtgatatgggctgaatggtgtcccctcaagttcacatgttgaagttcataccccccagtaccttagaatgtgattgtatttgcagatttaccttaatctttttaaaaaggggttaaggtaaaatgaggttatgtgggtgggccctactctaatatgactgatgtccttataaaaagaggagtytaggacacagataggcacagagagaagaccacatgaagacatggagatgagatgaccatccacaagtcaaggagagacttcagaaaccaccgctttcaacaccttgatcttggattttcagcctacaggactgtgagacaataagtttctattgtttaagccacccagtttgtggcactctgttatggcagccctagcaaactaacatattctgggaatagggattttgcaagacttagttattaggtttctaagggcaaaaatggtactgagttgcaa

SEQ ID NO: 427480 - DNA, 562 bp, Homo sapiens
aaaacttcacatctgccaccagctgaaaaccaaaatactggcttttgagtctcttttgcctttcaaatattgcatgtatggctctaagccctgaaactttgtgatatgggctgaatggtgtcccctcaagttcacatgttgaagttcataccccccagtaccttagaatgtgattgtatttgcagatttaccttaatctttttaaaaaggggttaaggtaaaatgaggttatgtgggtgggccctactctaatatgactgatgtccttataaaaagaggagtttaggacacagatwggcacagagagaagaccacatgaagacatggagatgagatgaccatccacaagtcaaggagagacttcagaaaccaccgctttcaacaccttgatcttggattttcagcctacaggactgtgagacaataagtttctattgtttaagccacccagtttgtggcactctgttatggcagccctagcaaactaacatattctgggaatagggattttgcaagacttagttattaggtttctaagggcaaaaatggtactgagttgcaa

SEQ ID NO: 427481 - DNA, 562 bp, Homo sapiens
aaaacttcacatctgccaccagctgaaaaccaaaatactggcttttgagtctcttttgcctttcaaatattgcatgtatggctctaagccctgaaactttgtgatatgggctgaatggtgtcccctcaagttcacatgttgaagttcataccccccagtaccttagaatgtgattgtatttgcagatttaccttaatctttttaaaaaggggttaaggtaaaatgaggttatgtgggtgggccctactctaatatgactgatgtccttataaaaagaggagtttaggacacagataggcacagagagaagaccacatgaagacatggagatgagatgaccatccacaagtcaaggagagacttcagaaaccaccgctttcaacaccttgatcttggattttcagcctacaggactgtgagacaataagtttctrttgtttaagccacccagtttgtggcactctgttatggcagccctagcaaactaacatattctgggaatagggattttgcaagacttagttattaggtttctaagggcaaaaatggtactgagttgcaa

SEQ ID NO: 427482 - DNA, 535 bp, Homo sapiens
agccattatcaaagccactaatggttaaaaaatctggactatatttttaggggttggggccactgctatcaatcccagcagcatggtgttcctttttgaccattcaagactctgcccaatgttgtggcaaaggcaagggtaaggagtcaaaagacctggatatgggcattgggctggtagcagtagctactatggagtcccaggttcactctgggctaaacactgtgctaaatrtctcacaaatatgttctcagttaacgcttgttgcaagtagagtactgtttttatccattttttacaaatagagaaattacctaagcttatttctggcatttcattgtgcaggaatctccagctcgtcactcaaactctctgggcttcatttattttatctgtcaaatggagataataataatatctgtcttggatagtcactgggaagatttattaaaaggttgcagtgaaagtaactgataaagcctataaacttgcaatacattattataaaggctccgattttccagagcaaagtctg

SEQ ID NO: 427483 - DNA, 518 bp, Homo sapiens
gacttcattaatctttggaccaccactctcaaacagggaagggacattaatcacagttctccagtgggggagcaacaggacccggagagagcaagtggtttgtcatttatagagaagtgctggagtaattggaactatatatccagcttggagtctttctaaaaaaaaaawtttttttgctattagacaatcaatcaaccatgtttatatatttagtagatacctaatatatgctatgagtacttaaatgtacgcaaaatacaaacaactgtgggttatagctcttatccccttacagtccaaggagcaaggaaagacaaatctgttagaaaaaacatagtagcacagatatgatactgtgttgttcattaaatataaagcagctgctgttttgttctttgaacacagtataaaatctaattccttggcttttatatcttttctctgcttatgcaaatacttgttagtatctgtcatacacaaggctctttaacacacatctcctctttacatgatca

SEQ ID NO: 427484 - DNA, 518 bp, Homo sapiens
gacttcattaatctttggaccaccactctcaaacagggaagggacattaatcacagttctccagtgggggagcaacaggacccggagagagcaagtggtttgtcatttatagagaagtgctggagtaattggaactatatatccagcttggagtctttctaaaaaaaaaaatttttttgctattagacaatcaatcaaccatgtttatatatttagtagatacctaatatatgctatgagtacttaaatgtacgcaaaatacaaacaactgtgggttatagctcttatccccttacagtccaaggagcaaggaaagacaaatctgttagaaaaaacatagtagcacagatatgatactgtgttgttcattaartataaagcagctgctgttttgttctttgaacacagtataaaatctaattccttggcttttatatcttttctctgcttatgcaaatacttgttagtatctgtcatacacaaggctctttaacacacatctcctctttacatgatca

SEQ ID NO: 427485 - DNA, 518 bp, Homo sapiens
gacttcattaatctttggaccaccactctcaaacagggaagggacattaatcacagttctccagtgggggagcaacaggacccggagagagcaagtggtttgtcatttatagagaagtgctggagtaattggaactatatatccagcttggagtctttctaaaaaaaaaaatttttttgctattagacaatcaatcaaccatgtttatatatttagtagatacctaatatatgctatgagtacttaaatgtacgcaaaatacaaacaactgtgggttatagctcttatccccttacagtccaaggagcaaggaaagacaaatctgttagaaaaaacatagtagcacagatatgatactgtgttgttcattaaatataaagcwgctgctgttttgttctttgaacacagtataaaatctaattccttggcttttatatcttttctctgcttatgcaaatacttgttagtatctgtcatacacaaggctctttaacacacatctcctctttacatgatca

SEQ ID NO: 427486 - DNA, 616 bp, Homo sapiens
gatgacacctattccatgcataagtaaactgttgcccagtgaaggaaagagacttacccaaagtcatgtatctaagatttcaactcagttctgtctaacgcttgatcttcaaatcttctccagcatagtaagctggtgcccctgttaatgtagatgagtttggatgggtttattccaatatcgcacgtgtctcttgtctcattatccagtgagttccmtgagccaagcactccgcagctccatcgcagcgtgggcctcttggaaattcggtgctagttctcaaggcctcctacctgctgaaccttagtcttcattgctgaaataagagctgtcctgcaaacagagtttggcgctcgctttctggcctccggctggtggagcaaggacgtttccagcacataagattccccactctgttaaaaaaaaatgtgtttatacttggtcccctctgaaggcggacgacacccatacttttgtcccagcccaatttgctggctgggatttttctcatcctttaaatcccgggaagcaaggaacctgccctctggcgccatctaccggcactgtttttcgagtccaaggagccccctgcggagttgggatgtgtttagtaatt

SEQ ID NO: 427487 - DNA, 560 bp, Homo sapiens
tgttcccttgttaagcactgccttgttgatctcctaagttatatctgtaggyagaattcaagtttcccatttccccagagctgaggtttgatttacgcatgtaatcattgagttagtactagttcatgttttctcttgtgaatcttttccatagtattagattactatcttttgagacttattctatatttaaacaaggttgattattttagaaacaaattaagaaataagctacagacagacccaaaatgctaaactgttagtttccataggcataggggtttatttgggggtgaggtagtagagagagagatagagatggagaaagagggaaagaattaatgaaattgggagactgtttcattcagatcacaacttctagtttgactcttcctaaattctttgcttcttaattttcaaatcacttcagattgcagcaatgttaacctcagcaactaaaaataaaaacttcagtatataacttgggaagaaaaaagtagtaaagggaagcaattcaagatctgttattggtatttgaatacatttattgtgacaagaat

SEQ ID NO: 427488 - DNA, 560 bp, Homo sapiens
tgttcccttgttaagcactgccttgttgatctcctaagttatatctgtaggtagaattcaagtttcccatttccccagagctgaggtttgatttacgcatgtaatcattgagttagtactagttcatgttttctcttgtgaatcttttccatagtattagattactatcttttgagactkattctatatttaaacaaggttgattattttagaaacaaattaagaaataagctacagacagacccaaaatgctaaactgttagtttccataggcataggggtttatttgggggtgaggtagtagagagagagatagagatggagaaagagggaaagaattaatgaaattgggagactgtttcattcagatcacaacttctagtttgactcttcctaaattctttgcttcttaattttcaaatcacttcagattgcagcaatgttaacctcagcaactaaaaataaaaacttcagtatataacttgggaagaaaaaagtagtaaagggaagcaattcaagatctgttattggtatttgaatacatttattgtgacaagaat

SEQ ID NO: 427489 - DNA, 554 bp, Homo sapiens
ggtttaggttatgctgccataacaaacaatcctaaaatttcagtggcttaaaaataaattttatattttgctcatactacatgttcaacttcacggggctctgcttaatgtgctcatttagaaacctagtctgaagaaggtttcatcttgatacatgcttcaacaatcatcgcatcagtttggcaggggaaagaaagcatggtgaactcacattggctttaaaagctccctcctaggaatgacactttttattgtatttacatattattggctaaaattagtcacatgrccatgccttacttaaagggtgcaggaaagtgcaatcctactaggtacccggaagtcaaagagctggaaatgcacacctccatatactctaggttatgctgtgttagccatccaaaaatcttactgggttacaatcacagaattgtttctcactcatattgcatgtccactcatatggtttggttgtgtccccactcaaatctcaccttgaattgtaataatcctcacatgtcaaaggtggggtcaggtggagataattgaatcat

SEQ ID NO: 427490 - DNA, 645 bp, Homo sapiens
cttataaatggaatatcaactcatattcatatagtgattttcattttacacagtaatttcactatgcatttattaatttaattttcacaatagccttataagtttatctccattttacaaatttaaaaatgagacatgggataaaaatgactttccccaggccttcccaagttcacacagctaattcttgacagaggtaagagaagaattcaggtcttctgcctctaactctgcatcatatgatactgcatctcaaattacttgcaaatacatatggaactcctgtgtgtcttaaaccatattttctgtagttgccataagttactccaaatgagtgttagaattataaaattctctattcccttttaggagagtcatgatacaaattgacattaattagtctctaaaactttatgtattattggaatatgtttaattttgtatttcttaatgcttcccaattttacaagaccacagaacatccctctacctactcccrccaaatctggactaaacctgaaaagatatcaaaggaacatagctttttattaagtgtgagttaatccatgaacgatagcttcaatcagcagtaattttcttaacataattcatgcctgaggattatattcagtttagctggacatc

SEQ ID NO: 427491 - DNA, 618 bp, Homo sapiens
tggtctatgcctgtcttgatgttgtaaggtgacctgagtgttttcaagattaccaaagtattatagaaatgcatgttaaaatgataaagagaaaaacaacaacacacacacacaaaaaaaaaacacattgcaatcaagcacgtcacacacgtctagataaaaatgatgactctttgtgtggagttagatgtcattaaaagcatagaccatgatttaaaatagttgctgtggtcagacatgtgataccacaaagcggaagaagtctaatcttgagccacatgtattttttaaaaaatatgccagtgcccatttatttatagaaacaagcttggccattcattagtaaccaaggcaggaagaagtcatctgatattcatgcacaaatttagctatttccatttgaatgaatataatcttgaaagatttagtttttaaaggttctattkattcataataattaaattttatgtaaaacattacttgtaaagcattttgatataagttttttaacacaatttttataatatgatcttgaggaagacagggcatttattatagttatctgtataagtaaatacagataaactaactaactaaataaataaactaaataaataa

SEQ ID NO: 427492 - DNA, 313 bp, Homo sapiens
tgtcagttgactttgattcttacagtctgttgtaatcagtttcatagactttagtcacagtttctgtgtaactagagttacctggccttcccagttctgaggggctttctaatacagagctccactgttttttatgacagtaccacagtatcttcctccttctgcggtctctctgtttttgtcttgcttatgcttcttcaactctgcgcctggataactttcatgttaatccattctgagtcatttgttcttcttggcctgtcaagacacccamaaaaggccaagctgttcacccagggagccatactggcac

SEQ ID NO: 427493 - DNA, 548 bp, Homo sapiens
tttctttttctcactctgctcyaatctttcagtcaacactgactgcctcctttctataatttgagaatttacaagaaaatagtatgtgggaccttcagtgaactgagcttatgtgattcaataagcctcattcaccctaaatctaattttaccagttaagttcttgataataggcccgtgttccaagacattcttgaaagcactgaggaaatcttttgataatattatctctggtatacttattccatattggatttattttcatttaatgtcacactatcacttataatcctttcaacaagagagagtagttatgtctgactctagactgtgctttgcaaataaaatttcgtaagtatggaaggaggtgccttattcccaaacccaaataaatggagagctatgctaaatgaacactgacacattatttggagttgggatagaatgttctgttacataacaatgacataaatgcaaaaatgatggaggtgctcaaatatctgcatgtagaggatttggaaaggaaggtgatatagtttggatttgtg

SEQ ID NO: 427494 - DNA, 613 bp, Homo sapiens
gaaactgaggcttgagggcaaggggcagaattgatatagtttggatatgtgtcccctctaaatctcttgttgtattgtaatctccagtgttggaggtgggacctggtaggaggtgattggctcatgggggaggatcttcatgatggtgagtgagttctctcaagatctggttgtttaaaagagtgtggcacctccctccccacaaccctctctctcttgctcctgctggcrccatgtgagacacttgctcccctgtcacctcctgccatgattggaagcttcctgagacctatccagaagcagatgccagtgctatgcttcctgtatagcctgcagaaccatgagccaattaaatttcttttttaaaaaaataaattacttagtaccaggtatttctttatagcaatgcaagaatggcctaatacagaggtatgttttaaatattagagagcaacttcaataaatgactgttaactttccaagtttctaataacactattccagtgatttcatttgcttttgttcttactaaacatcgaggtggctaacaatagagacttatttgctttgcttttcctcattaattatataattttcttagaaaaatctctca

SEQ ID NO: 427495 - DNA, 613 bp, Homo sapiens
gaaactgaggcttgagggcaaggggcagaattgatatagtttggatatgtgtcccctctaaatctcttgttgtattgtaatctccagtgttggaggtgggacctggtaggaggtgattggctcatgggggaggatcttcatgatggtgagtgagttctctcaagatctggttgtttaaaagagtgtggcacctccctccccacaaccctctctctcttgctcctgctggcaccatgtgagacacttgctcccctgtcacctcctgccatrattggaagcttcctgagacctatccagaagcagatgccagtgctatgcttcctgtatagcctgcagaaccatgagccaattaaatttcttttttaaaaaaataaattacttagtaccaggtatttctttatagcaatgcaagaatggcctaatacagaggtatgttttaaatattagagagcaacttcaataaatgactgttaactttccaagtttctaataacactattccagtgatttcatttgcttttgttcttactaaacatcgaggtggctaacaatagagacttatttgctttgcttttcctcattaattatataattttcttagaaaaatctctca

SEQ ID NO: 427496 - DNA, 533 bp, Homo sapiens
tgttctgttctttccaaaaccatgccagttattgctgacaaacacattaactccactttcttcatgtcctttctaatgctttgcttttatgtctatttacatatatctatatatataaagtgtatacatttatataatatgtgtatataatatatatacctatatattttattattattattttactaaatattggtgtcagacttaccrgacatttgtttgtagtaataatcttcctacttgagaaagtagctctaagtcaacagatagtgtccatgcttagcagtatactactattattgtgagtacaagtggtctgtggtgttccactgttttctgtgtctgttctgttttttttttttttattaagccttgtctgccatcttatttgtattctattttaaaaaataaatgaaaggctttgattctgttgaatcccagtgacatgttcatcttgctgctttgaaatctcacatttcaaaagactgtgagccaattctcacagctataccttttcctgctgtgtgagtttg

SEQ ID NO: 427497 - DNA, 533 bp, Homo sapiens
tgttctgttctttccaaaaccatgccagttattgctgacaaacacattaactccactttcttcatgtcctttctaatgctttgcttttatgtctatttacatatatctatatatataaagtgtatacatttatataatatgtgtatataatatatatacctatatattttattattattattttactaaatattggtgtcagacttaccggacatttgtttgtagtaataatcttcctacttgagaaagtagctctaagtcaacagatagtgtccatgcttagcagtatactactattattgtgagtacaagtggtctgtggtgttccactgttttctgtgtctgttctgttttttttttttttattaagccttgtctgccatcttayttgtattctattttaaaaaataaatgaaaggctttgattctgttgaatcccagtgacatgttcatcttgctgctttgaaatctcacatttcaaaagactgtgagccaattctcacagctataccttttcctgctgtgtgagtttg

SEQ ID NO: 427498 - DNA, 533 bp, Homo sapiens
tgttctgttctttccaaaaccatgccagttattgctgacaaacacattaactccactttcttcatgtcctttctaatgctttgcttttatgtctatttacatatatctatatatataaagtgtatacatttatataatatgtgtatataatatatatacctatatattttattattattattttactaaatattggtgtcagacttaccggacatttgtttgtagtaataatcttcctacttgagaaagtagctctaagtcaacagatagtgtccatgcttagcagtatactactattattgtgagtacaagtggtctgtggtgttccactgttttctgtgtctgttctgttttttttttttttattaagccttgtctgccatcttatttgtattctattttaaaaaataaatgaaaggctttgattctgttgaatcccagtgacatgttcatcttgctgctttgaaatctcacatttcaaaagactgtgagccarttctcacagctataccttttcctgctgtgtgagtttg

SEQ ID NO: 427499 - DNA, 514 bp, Homo sapiens
aattattaattaaatgaaaattgatgtgtaaatcccctgcatctctctggatgacctttttctagtgctcttgactacactgtctccagcgaacctcctgggtarttgcatgattataacatgtattccctgtgtattttaatcagttactgggatggttaaagggagatacttttgggcacagttatcacttccaagctgtattagccccttataatgcttactctaaacagttgctaatgttttgacctttgcagctcatctgaaaaacagatttggccggatatgttggctcatgcctgtaatcctaaaactttcggaggctgaggtgggaggatcatttgaggctatgagtttgagatcagcataagcaacatagtgagatccctgtctctacaaataacaataataataacttttaaaaaaactataaaattttgaaaagtgatttacttggctgtttgttattaaagtgagttcaaattgagaatttaagtggaagctaaattagcat

SEQ ID NO: 427500 - DNA, 614 bp, Homo sapiens
ggaatttccttttttcatcaattgacaaaagcaattcttttttttttttttttttgagatgaagtcttgctctgtcacccaggctggagtgcaatggtgcgatttaggctcactgcaccctctgcctcccgggttcaagcgattctcctgcctcagcctcccgagtagctgggattacaggcacctgccatcatgcccagctaatttttgcatttttatagagatggggtttcaccatgttggccaggctggtcttgaacacctgacctcaggtgatccacccacctctgccttccaaagtgatgggattacaggtgtgagccactgtgcccagccaaagaacgattctattaatgttartttattttgtagtttatagttcctacactaaattgtagtttctgcagatgaattttggagtcatgttgtttattagtgtttactttgaaactatatgtggactagaaagttctaatatttatgggattggttcataatactgagtagtacttgaagtatttagtctgtcagactttaggtaaaatcacaggttaaatattctggagagagaacactatctctccattaaaagatatatagaaaatgtggtttca

SEQ ID NO: 427501 - DNA, 598 bp, Homo sapiens
gagtcagtggattcaagaactggtggggtctatcgttggttctgtaatgttggaaatatcacccagtcctcaagcttctggagctataatatataaaatgaggattgttaaacctcatactctgtaaggccactccacttctaagttgccatatgtgtttaataaatagggacctgttgaaatttttagcgggttttattgtgctgttgttatttggccttaagaaggmagtattaagtttagggaactgggatttagattcaagggttttgagttcaagttttgtttctgtctcttgctaccttcatgacattgattaagaaagtcatttagtcttcttgagaccattttcttatctgtgaagctgggatgatgtttgctttgcttaaaacataggttgaggatcaaatgtgatgaatatataaaatattgtgtgttctataaggtgctacaggaaatattttaaaagacataaagtggtagactattatggtaatcttatgcgaggagatataatttggagataagtagtacctatgagaatagagagctacaaacgtataagacattttgaatgaaatatagatagaaaatagat

SEQ ID NO: 427502 - DNA, 565 bp, Homo sapiens
gggcaattccgggagagactgagtcactcaagactcatggtctgcactgggcagccaaaggcgattcggccaccaagtgtgattctggcctcattcagaagtggatgctaaacaatacaccctttcaccaggagcccatcacatgggcatcaggagatgggggcgagtgatgtgccagccttctagactggcaggcctggggggcagcagagggcacaatagctagaaagactcccagatgaaaacttctgggctttgaagccttcgaacaaatgaagaagaaaatgacttcttcgtgtcctattaagacagtgagttgtggcttttttgagagcagcttgctcagacctcttatgaaagatagatcagtagcaasagcactggtgtaggagtcagaaatctgcaattatgaaccactgagttttgtgtgtgtgtgtgtgtgtttttgtttttgttttttgtttgttttgttttgttttttaacttgctggaggaccatactcggctatccttgattttattttctcctgtgtcacaagagaaattggttagaagcttcccattg

SEQ ID NO: 427503 - DNA, 630 bp, Homo sapiens
ttcaccctttttcccaggtggccatccagtccggtttgagcacttaataccctatatcccaggaaactccttagtgccaagcaaacgagaacagctggtctacctatctttaacctggctrtctattggttattcttcagatctcagcttaagtgtcctccagggccttgctactcaaaatatgattcctatactaccgctccaatcctatttaactgactctctgtttaacacaatccactggtgattcagatgaatgataaagtttggataccttcagggaacctgtcctgacctctcagaccagatcacatacactgtcttctccattagactacaaattcatgagggaagggacatctctgtctcattcttaataggctgtgaacactaagtatggtacctgacaaagtgtaaaggctgaataaatacttgcgtgggtgaatggacaaacctagattacatgaggttaaatcaggcagactgtggtggatgtggttgctactctagcccatagccccatgacccatctgagttcacctgaagttgcccctctcaggacagtctcagctaaacacttcaattcctggtaactcttcttttatgcctaaggcctttctaagagtttga

SEQ ID NO: 427504 - DNA, 583 bp, Homo sapiens
ctcatgatcatacttcaatgggtgccttccattctcggtctcatttccccacctcctcacatgtgcttcctcggattgcctcccaggtaacccacctgccctcaagatttggcctatagatctgcttttagagggccataaaccaaggcaccatctctttttttttttttttttttttgagatggagtctcgctctgtcccctaggctggagtgcagtgacaggatctcagctcactgcaagcttcacctcccaggttcagccattctcctgcctcagcctcccaagtagctgggactacaggagcccgccaccatgcccggctaattttttgtatttttagtagagacggggtttcaccgtgttagccaggacrgtctcgatctcctgacctcgtaatctgcctgcctcagcctcccaaagtgctgagattacaggcgtgagccaccatgcccggatggcaccatctcttatatcttcttcagtctcatctgagggtagtgctctttgttgtcttatattaaactctccactttgagctttttattttccttctcagtgacatatacagaagagttgttctt

SEQ ID NO: 427505 - DNA, 535 bp, Homo sapiens
ttccatttacaatcaaagctgagaaccaccaatgtagaagcagctctattcagaaaggaaaagcaaatggaaagtctacctcayggtgtgtcctctctaatgtggggaaaaggccaaagacccagaggaaggaggtttgtagataagtggggcaaggtggggtgaagtcaaaaactgagaaggggctttgtgcccacttctcatttgggatttggaacatgtgtgctaggagagtgacccctccccagctgccaataggctcagagaagctggcgtctcagcatcattaggcctggctccgagaatctcttcatgttcccacattccctgaatgggggacctggaaagtagctgatggtgctgactggtgggtctgcctgagcagtcaccatggtggggagcaagtgaccctaagcaggaccatcgtgtggagctgtgcagcccatgcaaggcacatcactgggggcatcactgataataaactgtgccgcctggagttttgagatgtggagccttgatcatggagctgaaaagt

SEQ ID NO: 427506 - DNA, 545 bp, Homo sapiens
atatttacaaggaagagaggaaaggtggatatttaattcttcagtcatcagagtagtgttcaatgcttgggaaggctctgggagaagggaaacatgtcaatgtgccgaatgccagcttttttcttataggtcaagtcaaaagaggaaaacgtacagctgtttgattttcctctttaccatttgcatttcttgaaatgcaataaacagagccaacaatttctgctacagagaaattaagctaacacgcacagcattgtctatttcacatttttaaactacaattgargagagcaataccatatatctgattctgagtaagggttgtttcaattctcagttatcaatattagacatgaaataactttgaatataccctttatttgacttaacaggaaagtggagtcgtgagtctgaactaggatttgcaatagcgaaaagcttattagaggcatagacatggaagaatattgtactgtaaatgcagtcaacattttaaaagtgtcaaaatctctaacatggtttagcaattaaactgtcaatgcccc

SEQ ID NO: 427507 - DNA, 545 bp, Homo sapiens
atatttacaaggaagagaggaaaggtggatatttaattcttcagtcatcagagtagtgttcaatgcttgggaaggctctgggagaagggaaacatgtcaatgtgccgaatgccagcttttttcttataggtcaagtcaaaagaggaaaacgtacagctgtttgattttcctctttaccatttgcatttcttgaaatgcaataaacagagccaacaatttctgctacagagaaattaagctaacacgcacagcattgtctatttcacatttttaaactacaattgaggagagcaataccatatatctgattctgagtaagggttgtttcaattctcagttatcaatattagacatgaaataactttgaatataccctttatttgacttaacaggaawgtggagtcgtgagtctgaactaggatttgcaatagcgaaaagcttattagaggcatagacatggaagaatattgtactgtaaatgcagtcaacattttaaaagtgtcaaaatctctaacatggtttagcaattaaactgtcaatgcccc

SEQ ID NO: 427508 - DNA, 473 bp, Homo sapiens
tggagaagaaaagcaaaaaagagagagagagaatggggaacattgaaacagctactataaagagtatgctttggtagtcaaaasgatgacttactcacaggaaccattacatatagcacatcagtaacatcattttttagccttgaaaaaaaaaggccttgtaaatttctagcaccagaaggttggcattgttctgaaatgagtacctaaaccgatgatctcactgctgcatttcttctccctatgggagctaattctaggcacttaatttctctacacctttgctctgcgttgtcctcttcctcataaggccttcctgagccatctcataatattcattttttaatattttaccttctgtgctccatattccccatctctcaagtgaaatgaatttgatgaagagggctaaaggcctttctgtagcttcatgttagttcagcaaacatctatggaataccactagatgccac

SEQ ID NO: 427509 - DNA, 600 bp, Homo sapiens
gtctattattttaccaatattacactgtcttgattgttgtagctttatagtaatcttgaagttggacagtggtagtcctctgttcttcttccatattgtgttggttatttggggtctttgttctttccatataaactttagaatcagtttgttgatattcayaaaacaacttgctgggattttgatggggattgcattgactctatagatcaagctgtgaagaaatgacaacttaccaggtttgagtctttctatccataaacatggaatatttctacttagttctttgatttccttcattagtgttttgtagtttccctcatagagatcttgtacatattttgttatatatgcacctaagtatttcattgtaggggttgctaacgcaaatagtattgtgtttttaatgccagtttccacttgttcattgctaatgtattggaaagcaatttacttttgtatattaactttgtattcagaaaccttggtattatcagttattcattctgggaagctgttttgttgattcttttagattttctacatagaccatcatgtcatctgtaagaaaagacagttttatttcttcctttctaatct

SEQ ID NO: 427510 - DNA, 544 bp, Homo sapiens
agctaggacttccagtacaattttgcaaaggaattttgagaggaaatatacttgccttgtcctgatctgaatggaaaagcttttagtttctcactattatgatgttagatgtaattttttaaaaatagatattctttattaacttgggaaagttcgcctttattcttagtttactgtgagtttttactataaatacctgttggattttgccaaatactttctctgcatctattgatatattcatgtaattttttagcctgttgatgtgatggattacattaattaattttgatttttcaaccagttttgcacagctgggatgagtrtcattttcttgtgctgtataactctttatatatattgttgagttcaattcactaatattttgttgagaatttttacacatttcttatgtattcataagagatattggtctgtagttttcttttcttataatgtgtttttctgctgttggtattggggcaatgctggcttcatagaagaagttaggaagtatcttttctgcttctatcctctaaaaaga

SEQ ID NO: 427511 - DNA, 595 bp, Homo sapiens
gttcttactgattttctgtctcctgaatctgcccatttctgacagagaagtgttgaaatctccaataatagtggatttatctatttctttttgcagttcaatcaatttttgcctgtagtagtttgatgctctgttgttaggtgcatacacattaaagactgttttgtcttcttgaagaattgatccctttatcattatataatgccctctttatacatgataactttccttgctttaaagtctactctgtctgaaattaatatagctgctcttgcttttattggatcagtgttagcatggtatatttttctcaatttacttttaatcttaatgtgtctatatttaaagtaggttttttatggacaacacagagataggtcttgttttttaattcactttggcaatctctcttttaattgctgaatttagaccattgatgttcaaactcatcattggtatagttgaattaatatctagtrtacttgctactgtcttctatttggtgaccttgccctttgtttctacttttgtcctcaactctttttttctgcctttgtggtactaagtatttcacatgattcattgtttcctttgt

SEQ ID NO: 427512 - DNA, 605 bp, Homo sapiens
attggtatagttgaattaatatctagtgtacttgctactgtcttctatttggtgaccttgccctttgtttctacttttgtcctcaactctttttttctgcctttgtggtactaagtatttcacatgattcattgtttcctttgtcatatcagtaatatttctttttttaaccttttttaagtggttactctagagtttgcaatacacatttactactaatccaaacacactctcaaataaaattataccacttcaaagaaagtgtgagttccttttaataacaaaatagcctgtagtcccagactttcagaggctgaggcaggtggatcgcttgagtccacgagttcgagaccaggcaacatggcaaaaccccatctctacaaaaaatacataaaaattagccaggtgtggtggtgtgcacctgtagtccyagctacttgggagggtgaggtgggaacatcacctgagcccagaaggtggagtttgcagtgacctgagatcacaccactctactccagccttggtgacagaatgagaccctgtctcaaaacaaaacagaaacaaaaataatattatttttctcttcattttaacattattgtcat

SEQ ID NO: 427513 - DNA, 640 bp, Homo sapiens
gtggctattggctggggtggccaggttttcctctaggtggtttcttatgtcatcaggctagcaaaagcgcatttacatggtggtctcaagatttcaagcacaaccagagaagacaagcctcaatgtacactctttagttttcagtttgtgtcacatttgctaatgtcccatttttccaaagtgtgtcacatggacaacccagattaaagggacagagaaataaattccagcccttgatgggaggaaccacaaaattgtggccattttttcaatctaccacatcatgcttaaccctcatggggttcccaagataatctctaacttattttataggattgcccttcagaaatatgccatttgtcaccaagakaaatatttagcaaataacaatagaaataactctggtttcagcagtgaagcttgacagtgacaggaaatgagtagtagaaagtcttatgtgtctggtagggtctgggactgattttgggagagaatgggcacctagacatagtccaagctgaaaaagttcatgaaataagatgacacaagttggatgtattccaaatgggcagcaggaagcagatggggcatctgtggttcctatcctgttctccaggaaacctgttacagactgtatttc

SEQ ID NO: 427514 - DNA, 608 bp, Homo sapiens
taggtctgatcctatcacagactagtagagtggtttttgaaagtatccttaacattcctgaattcatttttaaaatcgaggcaatgaaacttctctacataagacaattgatctgtgttgggaagactaagagcaagctggtgactgggtgatggttgaggatgacatcaatatccagtggtgagtagtaattatgatgggacattctaaagtgtggtttatttttttcagcttctttatgaagataaaaaggtggcattggtattgccttttgaaaaataaaagaagttttggtgaaatcacaatatggattggggctcgcagactgaaataatgggagaatctctggaggactgaacctgggaactctaggtagggacagttaattctagaaastgtctggaaccattccagtgtccagaaacttggtgattgcaacataattttggcttgtgaagaggtgagtggtgtggtcagtcaccactatttaattcaataaatatttgtggagtgtctactatgttctgggcactgtgtggtaggatggcacatggagaaaacactctggtttattatttcacatatggccataaatgccatgtaccatc

SEQ ID NO: 427515 - DNA, 556 bp, Homo sapiens
gttgaacaggagctaggaaaaataaggcattctaagtcatagaatgagataggaagtcggcacaagatacatctcataaagaccttgctgataaaataggttgtagtaaggaaactgrccaaaacccaccaaaatcaagatgaccacgaaagtgaccgctggtcgtcctcactgctacactcccaccagtgccacgacagtgtacaaatgtcatggcaatgtcaggaagttaccctatatggcctaaaaaggggaggtatgaagagtccaccccttgtttagcatatcatccagaaataaccataaaaatgggcaaccagcagccctcagggctgccctgtctattgaatagccattcttttattactttactttcttaataaacttgcttttgctttgtactgtggactctccctgaattctttcttgcgcgagattcaagaacgctctcttgaggtctggatccagacccctttcctgtaacaattagacttgtcctttttctcctttgctgattttggggaagcaagcttctgtgctgtgcaacatggcctgt

SEQ ID NO: 427516 - DNA, 556 bp, Homo sapiens
gttgaacaggagctaggaaaaataaggcattctaagtcatagaatgagataggaagtcggcacaagatacatctcataaagaccttgctgataaaataggttgtagtaaggaaactgaccaaaacccaccaaaatcaagatgaccacgaaagtgacckctggtcgtcctcactgctacactcccaccagtgccacgacagtgtacaaatgtcatggcaatgtcaggaagttaccctatatggcctaaaaaggggaggtatgaagagtccaccccttgtttagcatatcatccagaaataaccataaaaatgggcaaccagcagccctcagggctgccctgtctattgaatagccattcttttattactttactttcttaataaacttgcttttgctttgtactgtggactctccctgaattctttcttgcgcgagattcaagaacgctctcttgaggtctggatccagacccctttcctgtaacaattagacttgtcctttttctcctttgctgattttggggaagcaagcttctgtgctgtgcaacatggcctgt

SEQ ID NO: 427517 - DNA, 400 bp, Homo sapiens
aacatgagctcaagttcatgtcccgcaaaagttagctgaagtgagagtgtgggtagacttaaattatgctagaaaattatggtaatcaattatggtaggttgttgtgtayctgatatgttcacaccttcttgtatccatgcccttggatagttccctcccacaaagatgctgcatttggccatgtgacttgctctggccaatgggacaagagcaaatatgatgcaatctaaggcttgaaaagcacatgtgcattagcacatgttctctctagtggcccttgggtccctattgagaagctatgtgaacagcatgcctgggctagactgctggaggatgagacatagggagaagagctgagccatctcagcaagggtcatactaaagcaaccagctcccagc

SEQ ID NO: 427518 - DNA, 592 bp, Homo sapiens
ttccacattttgtgatccaactaacagttgcagaacaaaaacccattaaagaaaaaccataacttccagctactgaaattgaccaattgtatgttgcaatttcctgtacaacaagattttayagcaaagaatttggatagccttttaaagtctgatagaagactggattgtgcttttaaaaatagaatctgttcagtactttgccaattgtcaagattagtgcaattcccacttaacactctgcctttgaaaattgtctttgtgctatcttagtccccttgggaaatcagtgaaatagttaaggaggctgagactcagtggtgttaagtgacttgccccaggttgcaaagcctttgaatgacaactggcacttggactccaattattctccaggagcattgccaggttctagggagaaggacgctgcctcttctgtgtgccacaggagtagtaacccagccaaacccccagacctcctgctgtcagcctatgaaagacatggtcagagtgacaggagctgctctccttcagagctggtgtggacaggcacggggcactgtggctcctttccagcacagagggacccatttaa

SEQ ID NO: 427519 - DNA, 606 bp, Homo sapiens
tgccaattgtcaagattagtgcaattcccacttaacactctgcctttgaaaattgtctttgtgctatcttagtccccttgggaaatcagtgaaatagttaaggaggctgagactcagtggtgttaagtgacttgccccaggttgcaaagcctttgaatgacaactggcacttggactccaattattctccaggagcattgccaggttctagggagaaggacgctgcctcttctgtgtgccacaggagtagtaacccagccaaacccccagacctcctgctgtcagcctatgaaagacatggtcagagtgacaggagctgctctccttcagagctggtgtggacaggcacggggcactgtggctcctttccagcacagagggacccatttaaaggagctttccactcagttggaaaggggctgctttctgggatctcatgaggaaacagcaagggtaatggtctctgtaatattttggaaaatgaataaattcagcaagytgagttcaccaatatggcacattgcctagatgggtcccatgctcagaacacacttattctctcttcccctttatagcataacaggttccttcagctcacaggacctg

SEQ ID NO: 427520 - DNA, 606 bp, Homo sapiens
tgccaattgtcaagattagtgcaattcccacttaacactctgcctttgaaaattgtctttgtgctatcttagtccccttgggaaatcagtgaaatagttaaggaggctgagactcagtggtgttaagtgacttgccccaggttgcaaagcctttgaatgacaactggcacttggactccaattattctccaggagcattgccaggttctagggagaaggacgctgcctcttctgtgtgccacaggagtagtaacccagccaaacccccagacctcctgctgtcagcctatgaaagacatggtcagagtgacaggagctgctctccttcagagctggtgtggacaggcacggggcactgtggctcctttccagcacagagggacccatttaaaggagctttccactcagttggaaaggggctgctttctgggatctcatgaggaaacagcaagggtaatggtctctgtaatattttggaaaatgaataaattcagcaagttgagttcaccaatatggcayattgcctagatgggtcccatgctcagaacacacttattctctcttcccctttatagcataacaggttccttcagctcacaggacctg

SEQ ID NO: 427521 - DNA, 558 bp, Homo sapiens
gtatgtggctcatagcttccatattggacagtgctgacatagaacatcacagaaagttctatcactcagggctgagataggggcaaattaggagactactgcagcagtccaggggagaaacaacaaggctcctaaaataggcagtggaaatggagcgtgacatcgttcctctaaagaacgctatttaggttggcatctcactgacacaattagactgaagtctgctgttgaagtctcattttgttgagtgcttgaaagtacatttttgtcacttgtggaacaatgtttgataagtgttccaggagtatgtattgtgtatgtttaacaatactgataattttcaccctaagttggtttctttggtttctggcaaacctgaagagccaagtgctataaacactcatgaaagccccaagtggaaagcgttttgagtgctttagagaaatggtgctccaaatatttgaagcattactattctcaaaaacagtatcaagacacttctwtctgtgacctccatctatgaagatcacaggcagagggaacttgttggttacaaga

SEQ ID NO: 427522 - DNA, 494 bp, Homo sapiens
atggctgtgttctgtgtgtgcaggaccctggcagggaagagtgtatgaagctggttctactataaaactactataaaacttcaaaggctagaactggactccccaggtagaaaaaaaacatggaattcagttcaataatagaaaaacattttaaaaagtcagacctgtcctcaaatgaagtaggtgacctcagaggggtcactgtgtgcawgactgtggtgcagggatggtgggtaacctgatgacgtcttctagattttgatcaaagggaccattgctttggagggaaagggacacaactctgaccctaaggaggctggaaaacacaggcttggggtgagttgcagacaccttatctgagttcagagacaatgaagtggaccctcctgcctctatttcctaagagaagcagggtgtgactgaatggctgcaaatattctgattctagtgccctgaacttcatgtctgggccctccacacactcgcacccaatg

SEQ ID NO: 427523 - DNA, 591 bp, Homo sapiens
gacgatgtctttaaatgctacctcttgaccttgcattttgtgctacagttttaaaggactgaaggcaaaattggagcttagcctgttttgacacacacacacacaaatagcctacaaaataaagctgaagaactggaatggtatagttcttgaaatggtttttgaaatacagttttgaaatgcagaaacatgatcctgtccttctagttggggtaaataggaaagaaagttgttgcaacacaagagtagggtacaatctttttttaagactgcagagctaataggaaaaaaatgaactagcaaattctctcttggttttgagagaagataaatgtgaagraaactttcccccacagccaggactgtttacatgcgctgctcaaatcaatctttcctaagcacgcgcattgcatcccattcataatgatctgatgcctttctcattgcctctgttcattctctccttgctgaatttcatcctctgctggttagaattgtggcttgatttaaaaagaaaataggctttatgttttctaatgaaagctttcttttaatccaaataagtacaaaaaagggtttggtttaaatatg

SEQ ID NO: 427524 - DNA, 551 bp, Homo sapiens
agcataaaattgtcaaggtttatttatgttgtartatatatcactacttcatttctctttattaccaaataatattttattgaatggatgtgcagttttgtttatgcatttatcagctgatagacagctgggttgcttcccctttttggctattaggaataatgcttctgtgaacatttatgtacacgtttttgtatagaaatatgtttttatctctctttggatattaacctaggagtttaatgtctggatcatctagtaactctatctttagccttttgaggaactgctggactgtttttcacaacagctgccccattttacattctcactagttgtgtatgatgattccaatttctccatatccttgccaacacttgttactatctacctttttgatgatagtcatttgagtggatatgaaatgatatctcattacagtttttggatagatttgcattcgatttgcattttctgatgcctaatgatgttgagcatcttttcatgtgcttatagacctgttgtatatctttttggaagaatgtttgttc

SEQ ID NO: 427525 - DNA, 458 bp, Homo sapiens
gggagacagggataggaggaatagagaaagagaaaggggggaaatattcttatccctctacagacttggctacaggacatggatgtggataaggcccttctcttttcagcccaaaactttgagtgcccaacagtttctttagggctcagcacaattcagataaaagatgggctggaggcagtatgaatgttacctatatgttctttgcctttatagttgatggcacatgtgtatacttttaacygataactttctcttagagtgttgaatgtgcatttcactgtgatcaacaaactcaaaaaatgaccttgcattgagaaggctaaacggtctccccaactgaggtttgacaaatacttgagcaaaacctctatttctgcacttctcaaggagcttggagcactgggaaatttttaatgaggagtgttatctggactattctcactggtgtgctggta

SEQ ID NO: 427526 - DNA, 458 bp, Homo sapiens
gggagacagggataggaggaatagagaaagagaaaggggggaaatattcttatccctctacagacttggctacaggacatggatgtggataaggcccttctcttttcagcccaaaactttgagtgcccaacagtttctttagggctcagcacaattcagataaaagatgggctggaggcagtatgaatgttacctatatgttctttgcctttatagttgatggcacatgtgtatacttttaactgataactttctcttagagtgttgaatgtgcatttcactgtgatcaacaaactcaaaaaatgaccttgcattgagaaggctaaacggtctccccaactgrggtttgacaaatacttgagcaaaacctctatttctgcacttctcaaggagcttggagcactgggaaatttttaatgaggagtgttatctggactattctcactggtgtgctggta

SEQ ID NO: 427527 - DNA, 601 bp, Homo sapiens
tgtagttttttgaggaacctccatactgttctcataaaatctgtgtgtttacactaccaccaatggtgtataaaagtttcctttaatcatttgttaaaacaatgatgttgagaattatttcatatgtttgttggccatttgtatgtcttcttttggcaatgtctgtccagatcatttgcccatttttaaattggattgtttgtgtggtttttgctgtggagatgtttgggttccttttatattctgaatattaatctcctgttaggtgaatactttggaaatattttctcccattcaataggttgtcttttcactttgttgattgtttcctttgctgtacagaagattttttgtttaatataatctcatttgtttttgcttctgttgactgtgcatttgcagtcttattcataaaatctttccctagaccaatgtcctgaagcatttctcgaaycttttcttgtggtatttttatagtttcaggtcatacatttaggccttcaatcaattttgagttgatttttacattgggtgagaaataggagtctagttttattcttccacatatgaatatacagttttcccagcaccatgtattgaa

SEQ ID NO: 427528 - DNA, 608 bp, Homo sapiens
ttacttccttttttactatttatttttatagcttggtggttttctgtagtgrtaagttttgcttcctttttctttctcttttgtgactctaccagtgagttttataattttacatgttttcatgatagtgttatttttttttatttctgaatataagactctcttgagcatttctaaagggagaagaacttctagtaagactggtctagtggtgattaatttcctgagtttttgcttgtatgtctgtaaaagattgtatttctccttcatttctgatggatatatttgctggatttattattggctgacttattttttctttcagtactttgactataccattccattttcttctgacatgtaaaatttctgctgaaaatgttgttcttagtttaatagagattcacttatatgtgacttgacacgtttttcttgttgtttttagtattctttgtttttgacctttaacaatttgattatagtgtgcctcacagaggacctgtttggtttgaatttatttaaggacctttgagcttcctggatctggatgtccatcgctctcccaatacttgagtaattttcagctattatcttactaaatgtttttt

SEQ ID NO: 427529 - DNA, 608 bp, Homo sapiens
ttacttccttttttactatttatttttatagcttggtggttttctgtagtggtaagttttgcttcctttttctttctcttttgtgactctaccagtgagttttataattttacatgttttcatgatagtgttatttttttttatttctgaatataagactctcttgagcatttctaaagggagaagaacttctagtaagactggtctagtggtgattaatttcctgagtttttgcttgtatgtctgtaaaagattgtatttctccttcatttctgatggatatatttgctggatttattattggctgacttattttttctttcagtactttgactataccattccattttcttctgacatgtaaaatttctgctgaaaatgttgttcttagtttaatagagattcacttatatgtgacttgacacrtttttcttgttgtttttagtattctttgtttttgacctttaacaatttgattatagtgtgcctcacagaggacctgtttggtttgaatttatttaaggacctttgagcttcctggatctggatgtccatcgctctcccaatacttgagtaattttcagctattatcttactaaatgtttttt

SEQ ID NO: 427530 - DNA, 631 bp, Homo sapiens
ccagggcctgcgacaggccccgggccaaggggagggagagcattaggacaaatacctaatgcatgcagggcttaaaacctaggtaatgggtttataggtgcaccaaaccaccatggcacatgtataccgatgtaacaaacctgcacattctgcacatgtatcccacawcttaaagtaaaaattttttaaaaatttctctaagttaatttaaatcatttgtgcagcagttatggcaatttcacaaataggaagagttcacatattatacttaaaagaaaccaggcagtagaatttataagcagtgtgataagcattacctgtctttacttgccagttaagtttttatgaaaataattttattctgtgtacttcatagagtgtaagtttctaatagagcacacatctaggtttgtacatctcttttcaaattgttttcaataaatactgtttatggtgggtacattttaactaatacagcattgatcttttctaacacatttgcagaggaagatactcattactgttttagtgtgactcagaacacaaaaagtgctatttatgattggataaccagaccctgaattataagtagcttatatttcaaaagttaatttgtaactgcaatctgtaa

SEQ ID NO: 427531 - DNA, 532 bp, Homo sapiens
cacttttaaagaatgaattttaatcaaatccagtttccattctttatggtttaacagagttctgtctttgacattcccttttgctttatcatgtaatccttcgatatttttggaaaatcctttcatcattacagtaaaataccatcatatttcaatattttaatattatttttagtcttaatgtgctgaagtttctcacttcttttgtgtccagtcttctgtattcagccacttgctagaacacagaaaacacagtcactgaatgtgtgctcttttccctagagagagaatttgttttaagtgccttttcatgtcytgaggggcaactcattcttgacagttatttgaaagacttaggccttgcctcacagcctagtacaacagacagaaaagtaacccacagttaaaacaaagaaggccatgctaagtgctatgatggagtttatgtgggaggccagggtaggaatacctgagcaagcatagggaagtcattgagtgcttaggaaaatatgatgcttgaagaagtagaagt

SEQ ID NO: 427532 - DNA, 532 bp, Homo sapiens
cacttttaaagaatgaattttaatcaaatccagtttccattctttatggtttaacagagttctgtctttgacattcccttttgctttatcatgtaatccttcgatatttttggaaaatcctttcatcattacagtaaaataccatcatatttcaatattttaatattatttttagtcttaatgtgctgaagtttctcacttcttttgtgtccagtcttctgtattcagccacttgctagaacacagaaaacacagtcactgaatgtgtgctcttttccctagagagagaatttgttttaagtgccttttcatgtcctgaggggcaactcattcttgacagttatttgaaagacttaggccttgcctcacagcctagtacaacagacagaaaagtaacccacagttaaaacaaagaaggccatgctaagtgctatgatggagtttatgtgggaggccagggtaggaatacytgagcaagcatagggaagtcattgagtgcttaggaaaatatgatgcttgaagaagtagaagt

SEQ ID NO: 427533 - DNA, 405 bp, Homo sapiens
cctttccaatccattcgattccattcgattcatacacccaaaattctctttcattcwattttattccatgccatttgattgcattgcattccattccgtttgattccagtccattcaagaaagttccattccattccattgctttccagtccattccattccactctagtgtattccactgcattcctttccattccattccatactattccattccattcctttgcattccgtttccaatctattggagtccattgcattccagtccaatccattccattacattccttttgattccctgccagtcgattgcattgcatactacaccattccaaaggagtccattccattctatctcaacactttccattccactctgttcgagtccattccattccattccat

SEQ ID NO: 427534 - DNA, 405 bp, Homo sapiens
cctttccaatccattcgattccattcgattcatacacccaaaattctctttcattctrttttattccatgccatttgattgcattgcattccattccgtttgattccagtccattcaagaaagttccattccattccattgctttccagtccattccattccactctagtgtattccactgcattcctttccattccattccatactattccattccattcctttgcattccgtttccaatctattggagtccattgcattccagtccaatccattccattacattccttttgattccctgccagtcgattgcattgcatactacaccattccaaaggagtccattccattctatctcaacactttccattccactctgttcgagtccattccattccattccat

SEQ ID NO: 427535 - DNA, 620 bp, Homo sapiens
tacacccaaaattctctttcattctattttattccatgccatttgattgcattgcattccattccgtttgattccagtccattcaagaaagttccattccattccattgctttccagtccattccattccactctagtgtattccactscattcctttccattccattccatactattccattccattcctttgcattccgtttccaatctattggagtccattgcattccagtccaatccattccattacattccttttgattccctgccagtcgattgcattgcatactacaccattccaaaggagtccattccattctatctcaacactttccattccactctgttcgagtccattccattccattccatttaattcaagggcattccattccattccattccattccatttcatattattccattccagatgattccattccattctataccattgctctctgttccattccattccatctgtctccattcctttcgtttcgattcctttccattccattccattacatttgatcctattttattaaattgcattctattcgagtgattgccattcgagtcctttccattcgattccattccattctattccattc

SEQ ID NO: 427536 - DNA, 616 bp, Homo sapiens
gtaaagtatctaactcaaagctgattccctaaataaagatgttcactacacctgtaaaaaagagaggtgttcttggcaaaaggaacataatgaagaaaatctttgggacaagaaagatcatggggtgccacaagaagataccactccgcacccagcaggayggccataataaaaagaatggaaaaaaacaagcattgacaagaaagtgaagaaattgcaaccctcatacattgctggtgaaaatgtaaaatgatgcagctagctgctttggcatttctttaacaagttaaacacagaattaccatatgactcagcaattccactcttaggtatatgccaaaaagaatacaaaacctgcgcaagaatgttcacagcagcagcacaccagccaaaaagaggaaacaactgaagtggtccatcaactgatgaatggataaacaaaatactccatacaatggaatatcattagccataaaaaagaacgacacactgacacatgttccaacacagatgaaccctgaaaacatgatgcaagggaaagacacacaaaagccacatactgaaatcaccagagtcagcaaatccatacagacagagagcacattagcggttgaca

SEQ ID NO: 427537 - DNA, 465 bp, Homo sapiens
attccactcttaggtatatgccaaaaagaatacaaaacctgcgcaagaatgttcacagcagcagcacaccagccaaaaagaggaaacaactgaagtggtccatcaactgatgaatggataaacaaaatactccatacaatggaatatcattagccataaaaaagaacgacacactgacacatgttccaacacagatgaaccctgaaaacatgatgcaagggaaagacacacaaaagccacatactgaaatcaccagagtcagcaaatccatacagacagagagcacattagcggttgacaagygctcgggagggaggaccagggagtgactgcttaatgcttatgacatttccatttggggtgacaaaaaattctggataatggtgatggttgtgcaatattgtgaatgtacttaattgtgtactttaaaatggttaaatggtatattttaagttatgagtactt

SEQ ID NO: 427538 - DNA, 590 bp, Homo sapiens
tgtttcaggaagtttccctgagcgagtggaaggggaggcctcacactgaagccagaatacaaaggaagtcctcttgagatggataaagcagttcttacatgcaaatctcagaaaatggcaactccatctttccacctgttcaagcccagaaccgytggcagtgtcttgactctctcgtcagaccccacatccaatttgccaaaaatccagttaaatctaccttcaaaacatatccagaatctgaccatttttcagccctgggactgctaccactggagttaaaccaccaccgtccttcgtcagggttactgcgacagcctcctaaattggcccttacttctccagttaccggcccacaccagtctactgcctgcattaggttgatgccacagctctgctcagagaccaagggctcccccaaggtcaagtaaaagcccttcatggcctacaaggctggcctcgatcaggtcctcaacttttctgatctcatctatccctgtccttgctcccacactgccagcctcactgtcctctttgctggtcctcaaataagccagctgctctcttgcctcagggcctttgtattagct

SEQ ID NO: 427539 - DNA, 590 bp, Homo sapiens
tgtttcaggaagtttccctgagcgagtggaaggggaggcctcacactgaagccagaatacaaaggaagtcctcttgagatggataaagcagttcttacatgcaaatctcagaaaatggcaactccatctttccacctgttcaagcccagaaccgctggcagtrtcttgactctctcgtcagaccccacatccaatttgccaaaaatccagttaaatctaccttcaaaacatatccagaatctgaccatttttcagccctgggactgctaccactggagttaaaccaccaccgtccttcgtcagggttactgcgacagcctcctaaattggcccttacttctccagttaccggcccacaccagtctactgcctgcattaggttgatgccacagctctgctcagagaccaagggctcccccaaggtcaagtaaaagcccttcatggcctacaaggctggcctcgatcaggtcctcaacttttctgatctcatctatccctgtccttgctcccacactgccagcctcactgtcctctttgctggtcctcaaataagccagctgctctcttgcctcagggcctttgtattagct

SEQ ID NO: 427540 - DNA, 543 bp, Homo sapiens
ttactgagaacctcctttgtggccaggattatgtttctatctaagtcccatgaacttggagcatatttacaaaattatttaactttataaagtatttcaatgaataatgcagtcttccaaaatgtgcatggggctgtaattccatctagtgtttacratgacactataagccttggatggaattacaatcttaatgggaacaatcagagtgcactactccatatgctcagagaattcaggatgaactcaacttctaaaataaaaagcaccaagccattggcatgtaattacaaccaggaggccaagctgtctgcttgctagtatatgagaaatgctcaattgaaagtaccatctcaccttattgtagcaaaacctatttaatgtatctgaaaaacctcttcctctccaaaattaaactttcgactttcgtgatgagaaaatttccacaagggtctaccacatagaggtgatatatatcgggtgatgacaagattgtctggatgctaccaataaaatctaagaatcttctaataccacctacat

SEQ ID NO: 427541 - DNA, 608 bp, Homo sapiens
attttgcctggggaagtcagtttggaaaatagctctgaccactaaagaagctttctttcagtatgttgtaatggttaatcatctgtaaaccagaaaactcacaacgtcctccaaaagtagaagacaaatacactaggaactggaagatctgagctcaggtcctggctttcctatgaaccagctgtgtgactttggtcaagtcacattccctctctgatcttctgtttgttcactgaattgtggcagggttgtgggggtgcaaaaggagggcttctagttcttccctgatgcaattctctgacgtgcaaaggtrtagactacagttggcaaacattttctgatgaggatcagatagtagatatttcaggctttcttggactatggtctctttcaccatgactcaaatcaaattctgccagtgtagtgcaaaaactgctatagacattagacaaattattggatgtagctatgtgctaataaaactttatttacaagaacaggctggatttggcccatggaccatagtttgcctactcctggtctggatgaatgcctccttgttgccattcagttcacagagcttgatatgaagatacagttcacgagat

SEQ ID NO: 427542 - DNA, 429 bp, Homo sapiens
cgccgaggccgggcgaccacccgcggagaagtccagccctccgtgagaccccctctctctcaccgccctctccggggaggaggaatgggaagagggcggccgggaaagggaccaccccccaaccccagccgccgcctcccccctgcgccacccggagggaggaggacatggctctccgcactygcgaccggaccagcagccgggggagcggggcgccgccgccgctctccccgcccgcgccccccgcccgggcgcgccccctagcccggcgggcgcccacccagcccctgacagcccccccgccggccgcccctgcgcccagagtgggggtgtcggcccgggagcctggagccggggacggttgtatgtacacacatacacacacacacacacacacacgcacacacacagaacacgacgcgtcgattt

SEQ ID NO: 427543 - DNA, 535 bp, Homo sapiens
taccagttagggtttgtgtagatctgcttaggagaaagaccttttctccaatgacttcaatctgtagtcctatgagctgcttggtgaaaattgtcttaagttccaacagtgggactgcttcatgttgtttgggtcatacaaagacaggaggtgtgstaacagacaagcctctaagcaagaagtcatagggctagaccttaccaaggagtcagaagtcaacatgatttggtataaactaaaattattcaagtgcaattaacctgctataactggagcccttcaacttcctggaaggagcaaaggattatcataacctgcctagttcacagaccctgccatgcctttgtgaggcttttcttagtgccctaacctcttagttacctaaccttatcagtttactgtttaactcttgatagtagaataattggatgactttcaacaacatattgagtcgttttccaagaatcccgttgataagcttatccactgatgtccacctgccagccttcctgtctactcatgaattgatcatcac

SEQ ID NO: 427544 - DNA, 535 bp, Homo sapiens
taccagttagggtttgtgtagatctgcttaggagaaagaccttttctccaatgacttcaatctgtagtcctatgagctgcttggtgaaaattgtcttaagttccaacagtgggactgcttcatgttgtttgggtcatacaaagacaggaggtgtggtaacagacaagcctctaagcaagaagtcatagggctagaccttaccaaggagtcagaagtcaacatgatttggtataaactaaaattattcaagtgcaattaacctgctataactggagcccttcaacttcctggaaggagcaaaggattatcataacctgcctagttcacagaccctgccatgcctttgtgaggcttttcttagtgccctaacctcttagttacctaaccttatcagtttactgtttaactcttgatagtagaataattggatgactttcaacaacatattgagtcgttttccaagaatccygttgataagcttatccactgatgtccacctgccagccttcctgtctactcatgaattgatcatcac

SEQ ID NO: 427545 - DNA, 548 bp, Homo sapiens
aaggaaggggacagaaccatcaggagttacgcagctccaaggttttccctgtccttgtccttgtctctattgccccagaagtatgtctggtaagggatgaagagcaaaaacccaggaaaatgacaaaattgacctawttatctttggtgtttcctaacccctggtgccctaaacctagtcctgatggggcgtgggtggaatttcaccctacccaggcctgtctgtcactgataccttgtcccttcctcataagagaaacattctgtgtctaatatttttaaaaccctttttacccatttctaaagtagcaagtagataggcttataactagtgggtgctcggccgcctactcatttttcttacccaagttaagtgtactttaacatattatgtagacagtactctagcagtggctaattccaccatatgcaggataggctggatatgatagacttctagagggggaagatcaggcccaggcccctcttcagtccctctgaggatagttactcaccagcttggtaatcttgcacaagttacctctacca

SEQ ID NO: 427546 - DNA, 548 bp, Homo sapiens
aaggaaggggacagaaccatcaggagttacgcagctccaaggttttccctgtccttgtccttgtctctattgccccagaagtatgtctggtaagggatgaagagcaaaaacccaggaaaatgacaaaattgacctaattatctttggtgtttcctaacccctggtgccctaaacctagtcctgatggggcgtgggtggaatttcaccctacccaggcctgtctgtcactgataccttgtcccttcctcataagagaaacattctgtgtctaatatttttaaaaccctttttacccatttctaaagtagcaagtagataggcttataactagtgggtgctyggccgcctactcatttttcttacccaagttaagtgtactttaacatattatgtagacagtactctagcagtggctaattccaccatatgcaggataggctggatatgatagacttctagagggggaagatcaggcccaggcccctcttcagtccctctgaggatagttactcaccagcttggtaatcttgcacaagttacctctacca

SEQ ID NO: 427547 - DNA, 547 bp, Homo sapiens
tgtggctttaatttgtatttttctgatgattacatatgttgagcattttttcatatgtttgttggctattcattatatcttcttttgggaaatatctattcatgtcctttgcccactttttaatgggattattttttttttcttgttgattagtttgagttccttgtagattctggatcttagtcctttgtcaggtgcatagtttgcgaatattttctcccactctatggkttgtctatttactttgttgattattgcttttgctgtgcagaagctttttagtttagttaggtcccatttatttatttacttttgttcctgttgcatttgtttttggggtcttagtcatgaattctttgccaaacccaatgtccagaagactttttctgatgttaccttctaggatttttatggttttaggtcttagatttaagtctttgctatatcttgagttgatttttgtatagtgagagataaccaaggatgtgaaagactgctaaaaggaaaactatgaaacactgcctaaagaaatcatagatgtcacaaa

SEQ ID NO: 427548 - DNA, 547 bp, Homo sapiens
tgtggctttaatttgtatttttctgatgattacatatgttgagcattttttcatatgtttgttggctattcattatatcttcttttgggaaatatctattcatgtcctttgcccactttttaatgggattattttttttttcttgttgattagtttgagttccttgtagattctggatcttagtcctttgtcaggtgcatagtttgcgaatattttctcccactctatggtttgtctatttactttgttgattattgcttttgctgtgcagaagctttttagtttagttaggtcccatttatttatttacttttgttcctgttgcatttgyttttggggtcttagtcatgaattctttgccaaacccaatgtccagaagactttttctgatgttaccttctaggatttttatggttttaggtcttagatttaagtctttgctatatcttgagttgatttttgtatagtgagagataaccaaggatgtgaaagactgctaaaaggaaaactatgaaacactgcctaaagaaatcatagatgtcacaaa

SEQ ID NO: 427549 - DNA, 588 bp, Homo sapiens
aagtatctatacaaagatgaaatgaaatagactttaagcaaaaaatgttgctagagacagagaggaacattttacaattccctaatatcctggaaagaggaattggtgagtggaaagaaggggagaatctgaarctacaatgtttgcttgctcctttatgattggtttaggaactggggaagacatcaacaggacgaggcccattagagtaaaaaatgtcctaggaatatgagctaggagaaacaaagtcagggggaagaagacataacttggaatccctttccccacaaacctcacagatcaacatttaattggcctttactatgaccttcctgtgagccctcagtaacaataatctcatgatcaggttgggttctagaaaaatgtacattttatatcttgttaagaacaagattgagaggacagaaattatttggtaggatggtaattccacttaatggttaaatggaatgtgtgcctcaaagaagattaagctaagaaaaagaaatgatgaacagttatgaatgaaggggaaaaaagccctcaagaaaatgaaaggtgttttagctatgaaaggcaaaatgtttc

SEQ ID NO: 427550 - DNA, 599 bp, Homo sapiens
ttttatattatatgagttatattgcaagttttaaaacgtataaagttgaaaatgtgagacataaaatatataatctttcagtgagaactatgatttaacccacattatagttgaataaataaaatagaactagtcttaattttttaaatgagaagtaactgttgttttgttggtcttaaactttgaatttgtttaagcaatattttatgtcctgtatagaagatacatacaacattctagttagaagctttagaaatgttctaaatgagaataatattcatagtaccacaagtttgattcttataattctgaataatcaacttaaatatattactgtgctggttatttactttctatccattgcatgttttctgagtgcagaattaaatygtaccaatgaaatactacattcattgtatcatagtacaaggagggatctacgagagcctctcattttacagaggaaggaattgaggctcagagagatgaaattacttgcccaaactcacagaactaattagttactgtacagtgaaagctttcttgacagcatttaaactgttgcttcaaatcttagcatgccagaatgggctgataat

SEQ ID NO: 427551 - DNA, 573 bp, Homo sapiens
ttgcattgttttatgaaattgaaataatgaaggctggctgccattatttaaatccaatatgtcattttaaaataagataatcttatcttgttttctcatgagaatgtgacaggactgaacaaatttatacaagactcttcttgatggtgctcaaataggagcagtgtgtcatttatcttctgaagatgctgccagaaatatggttattaaactgtaggtcttagatatctttacatgatgttatgtgcacatatatatctcaaacagtatgtgttgctgttttggttttgtaattaaaattartttttcaaaatatggtcttcttaggccttccaaaaagagttggggaagaggaccagcagtgtgcaggccctgaagcgctcagcccgagaactcatagaaggcagtcgggatgactcctcctgggtcaaggtccagatgcaggaattaagcacacgctgggagaccgtgtgtgcactttctatatcaaagcaaacacggttagaagcagccctgcgtcaggtaaaaaccatgtaaatgagagctgggtgtaatgggaaaagtattgaaacc

SEQ ID NO: 427552 - DNA, 524 bp, Homo sapiens
catttctcttatggagaaaagaataatcagacattaggaattaatttgaaagtttgttataagtaattttattaaatgactccttgagcaaaaaagtacttttcatttgagacaatgctttattcaaactgtgtttttaactgataagtggcatatatgacctactaagccataggatagacagacatctattgtgtacagtaaagctatttttaatcctatttaccacgtatagcaaagaccagtttctccaagtgtaagcctcaacctgactctctcagcatccctcctggtgcccccagccttacacgctacactccaatgaagcccgaatgcctagcatggccagatttaacaaactawatcacagaatgctcagttaaatttgaatttccaataacccacaaataacgggttcgtacatgttccagttattgcataggatatactaagccattatttgttgtttaatgggaagttcaactttaactgtgtgtcctgcactttatctgacaatactgcaa

SEQ ID NO: 427553 - DNA, 596 bp, Homo sapiens
agtcattttagtttataataactgtgaaaataaaaagaaatcaaagacttagaaatgtgttgggtgatggtcactggctctgatcttactgtatgtatgacccttaattaatcccacttaccttcttgcctcactttgttcactttacaactaggtgtttaggcttctagaacattatcaaaaccccccactaaaattccaggagttcttggtctattttagaggtaccttattaaaaaatacataaaatttgtcctccatggcaaatatcacctgttgccttcaagtttcatgtttattttgcatttcttttttaaaaatactcacttgcattttaatactttcwtattttaattttttaaatgttggtccacctaaactttttaacattataatttaatgcaaggcaaaaattatatagatctcaaatattagttaagtaaacattaatacatattttaaaaacataaaagccttaaagagctttgaaattacttctaagtttttaacttctagaaatttagctgaactgtgaaatattcataatgtagtaagattgactgaagaggcaaacaccaaaatcatatgattttttt

SEQ ID NO: 427554 - DNA, 607 bp, Homo sapiens
ggtcaatacgaagactatgttgtgacagcaatttttaaaattttggaatcattttagatggtgcctctgagacattttcaaacaaaaaagccttataagtatcttaaggattgcctggtgagcctttctgttaaataaggcttctaagactactaagagtgtggtctcataaccaccttatagggagcccggggtacagaaggacttgcctgggagagatctgcgcatgtggattttatctaatggagtggattttaaattggtacacaagaagcttacagagtttctaaaggaattgtataagcttgaactgaaatgaacatagacagtacaaaatggagggatgcccttgaacaggaagcagactaaaaaaatgactcagctgcaacwccagccatttcctgtggaaaggaaagatgaatcagagagatagaagcaagattctgagggcaaaccaaaatctacagacaattagtcccagacaacagtgctgatccctcatttaaaactggcaatttgtgctcagcttattccagacacactataaatcagtggcgattatcatttccattcccccctttttaaatgagagtatctctaagttgtc

SEQ ID NO: 427555 - DNA, 522 bp, Homo sapiens
gttcttatttttacctttgaatttgtgttttgtaagtgaagtctgatgggatgatagagtatgagcaggggtttggagcctctgctcagaatcacctgcttctcaccatttcactaccttcccggtaggggctgcagctgcctgcacagcccctgcccagtgacgctgttaccctttccccaggtggggtcagagcacaggtctaggaagcaatagagtccagcccacacacaaagtcatggtatgtgacccttggatgccagcaagggtacagaagtttgatgttaaataacaaagaatgccataatgggtcaatagagacaacagaaaaaaggaaaatgcttttttcctgcattttgaataaggagcctagcatttttcttttatagtcaacaatttacrtagccagctgtggggacaggagatattactttgacaaaaagggtcatgtatgtatatctccagttgagaaacaccattcccaggtttactttctcaattaagacatattaccacccagtg

SEQ ID NO: 427556 - DNA, 529 bp, Homo sapiens
aatttcttctggcttgtagggtttcagccaaaaggtccactgttagcctgatggggttccatttgtaggtgacctgctttttctttctagctgcctttaacattctttctttcatttcaaccttggaaaatctgatgattatatgtcttgaggatgatcttcttatgtagaatcttgcaggggttctctatatttcctgaatttgactgttggcctctctagtgaggttggggatatttccatggatgwtatcatgaaacatattttccaagttgtttacttttttcccattcctttcagggatgccaacagttcctaaatttggcctctttacatactcccatattttttggaggttttgtccattccttttcattcttttttctttatttttatctgtctaacttcagagagccagtgttcaagttccaaaattatttccttagcttattctgctgttaatacttgtgattgcatcatgaaattcttgcagtgtgtttttcagctctatcagatcagttaggttctt

SEQ ID NO: 427557 - DNA, 583 bp, Homo sapiens
taactgctgggctgcctctgattgaagtggtcaggtggggtcaggatggttgtgctggagtcccaggtgagatggccctacccagtgaggaaaagtgaggaccagaacctgcatggagaactgtcagcctcttttccatgaagtgaatgctctctgctgggggtccagaccagctcctggtccctgtggactctccagagcctggcaacaacaagggcaagggttgtgaaaaaagcaaagatggcaamccacccctcccactgggaattgcagagctgctactgtctcgacggccccagcagagtgtgcctggagacccaggaccctcctagtgaggagatacaagatctggggcccatgtaacaaaaaatctgcatgctgggggtccactccagtccctagtcaccttagattttccagcacttaaaggtattaacagtgaaggctgcaaaacagcaaatatgacagccttcccctttctctgggagctctgtctcaggaaggtacagacctgttgccaacctaaacacaccagtaggggtggttgtagtcctcagtcaggagattccactcagtgaagaga

SEQ ID NO: 427558 - DNA, 586 bp, Homo sapiens
tgtaacactgctactggtggctggctgtagttccaaaccagtgggtcttatcctgcaaagtaccatggaagtgggtggggcctgaagatcattgctgctcagccctctggattcagcccctttcctaggagtttttaaaggggtctatcctcctgctttgccacagttgcagccacttttgctaggaagctcagatatctaaagctcccagggctccaagtgtgcctaagcagctgctctgctaagaccccacatagctcttcgtgtcagacagcaggccctggtggaatgccttcacaaggggatctcctgaccccagsgttacaaaaatttgtgggagaagcatggatcccagagtcactcactgcttccctgggtaggggaggctcccctggctccatgttgctcctgggtaagcagccatcctgccttgcttttctccattttctatgggttgagttgttttcttgatgaatcccaatgtgtgtacctagatgtttcagttcaaaatcctgtatttactcatgccttctatttctctccatgagagcagcacacattagctgcttctagttgaccatcttgg

SEQ ID NO: 427559 - DNA, 556 bp, Homo sapiens
acccaatatttagttcctacttataagtgagaacatgcagtatttagttttctgtttctgtgtyagtttgcttaggataatggtttccagctgcatctgtgttgccacaaaggatatgatttaattctttatggctgcatagtattccatggtgtatatgtaccacattttctttattcagtccgccattgatggccacctgggttgattccatgtcttttctattgtgaatactgctgcaatgaacatatgggtgcacgtttcggtagaacctgtgggtatatgtactgtaatcaaattgctgggcccaatggtagttcaactcttagttctttgagaaatctccaaacttctctccacagtgtctcaactaatttacattcccaccacagtgtataagtaagtgtcaacgtgatcattttaaaacacaagtcagattctgttgtgcttcttctcaaaagtgtcaaatggctccccctctcactcagggtaaaagccaacatctctccaacaaccttgtaaattctgacatgatcctttcatccatcacctccct

SEQ ID NO: 427560 - DNA, 489 bp, Homo sapiens
cctgtcctgccttagagaggcctgaagtaggtatgcccctattattctctatttcagcctcttacttgttttcttcatagacctcattagaacttgcaagtatctgttgcttcctttttcatctgtttacttgattttgaggtagggggattctgtccaccccactagaatgtaaactccctgggggccaccaccactgccagttgtacttggaagttaaaatataggttaactaggaaaaataagtcatttccatcagaattattacatttatcaaataattaccagggtttctttaaacaaaaagctcttcttcagcatctaaagttatctgatttacaaatgcctgattcattcctaactttcctggcattctcctatctcaaaacaaataacttatatgtatttctactttattttatttggtgtgaaaatgagaaaraaattttgtgagtgtatcaagatgggaaggatcaccctttttttatc

SEQ ID NO: 427561 - DNA, 620 bp, Homo sapiens
tctcaaaaatactttcaacagtgtcagtatcactgtgataactggccagaccccctgtgagctgtataggttcacatacatttattgaaattaaaacagcagcatccatgcttgttactttccaggcatatcttttgatatgagaccatcatttcaaagtgaatcgaacccatctcatgtacttaaagatcctgtttcgatatgactgcctttgtgggaagtatttcaggagcaaagaccctgcactggctagctcttggcagacccgatggcctgttaataggactagttcctacactgagaccatcttgaactcaggagtggccttgaggctaaaagacaaaagcagagtttagagaagttaatgaatgaattcatgctggcaaatgtttctcttgggccagaactcccattgattcctttcacattccctgtcsctgtttctcagaggcctccagttacatatgacaaatggctgatcatccaagcgaagtgacctgccattcaataaactatatctcaaccagtgtagaaggcagctcatttttctccttagggatctattctcccttcatctgtatgaatatcctaaatggggttcattgaggccattacctgtg

SEQ ID NO: 427562 - DNA, 532 bp, Homo sapiens
acaagtgaagcatctggggtccaaaatgaacagagcaggcaatcaaaacctctaacagaagggggctataacagaactcattgctctaattagttcccaaattatctctgcatgctagactcaccaggaaaactgaaaattccagagtccaggtcacctaagactaactaaatcacaatttttgagggtgggaaatgggcatcagyattttttaagctcttcagatgatgcttatgtgcaaaattgggaaccactgttctggtgccaatactggcaatgagacatcttagtcaaggacagatgaaagtttttattagttctgtacaatgagccaagggggtagagccaagaagatgggtctaaggaacctcctttggcttaaaagaaagcataaattctcaggcagttgtcagagaaatacttccacagccctctcttggatattctgatctgagatttctggaagcatcaaggcctgactttgccttgtcaaatttctggccactctctcagactatctgtacttttaatt

SEQ ID NO: 427563 - DNA, 627 bp, Homo sapiens
gcatggaaaggttgaagatacaagaatgaaaaaataataatatcatggaacagagaagagatgctgggtacaagggaagaaataagccttcaggagcaataggatacacttctttcatgagacaagaaggaatggtgtagttgaacagaaatacaatgtatggtgtatttatttctcaggaagaaagaggataggcagttgaggaaattctacctgattgctccaaatgtctttgtaaggtaaaaagtgagttaatatgagaatgacagtagaggtaatgaggtagtaatctcaaagaaagtgatgacaggttgaattatcttttgtgtgaactgggaacgatcttagggatgcatagaaggattgtttgacamtatttaggacatgcttgaaattgaagaatgtgaatttacagcagttccaacctgcaagtggttgtatggttttctgcaggaatatagttgaagaaggcaaagagttttgccaagcagattcaatgaatgagaggacatgaaagttgaagttttcagtaagagggtggtcaaaggttaaaatactaagggagaaaagataggacagacagtaagtaattggagaagcaaaagggactgatggttttaatgaagc

SEQ ID NO: 427564 - DNA, 606 bp, Homo sapiens
gacccttttggcagtctgataaagactatggagcccttttcaaaataaataaatgcctgaaataaatacataagattcccaagaagattaccatggaaaaagttatccaactatttgaaaatatgtgatatataatatcatattctgaacatattaaacaaaatctagtagtgagtttaataacttttgtaatttygaaatagtggtgagcatgatctttggagatatacctacagcaactgtaatgttatataaaaatatctgtgatttctgttggtgaccatgtcataggtactgctgatgtcactttgttctactgcttacaccataaggaaaggaactgtgacgtttcagttacaggttagtagaaatagagatgtcatttttttctacctaaattaatagacctctgaattctacctgtggattctaggttacaaacccttactgtagataaagttaatgatccaaataaataagaatactgtaaaatttgtatctgcattatttaaaaaccgattcattcatgaaattcaaatgttactgagtaatcaacaaaaagatacttaatgtcaaaagaatgagagatgacttagactgaactat

SEQ ID NO: 427565 - DNA, 354 bp, Homo sapiens
gaatgtagatagggacttaaatggtgattgcctttctcgtctatttgcggggagagatgtaggattggttactttggtcctgtagctgggaatcttgtggtctgctatgccatccactctggaattcagtttaattcacttcattttcatatcaagcaatttgggagagtgctgggctatgccccaaacagctctgacccctgagaggtgagggaatcactcaatccaatagttacctgcctcccctcctcacttcccaaacagagtttgaacaatagtgcctcttcccatcmcagatgcaacaacaacaacaacaacaaaacaaaacaaaaaacaaaaacaaacaaacaaaca

SEQ ID NO: 427566 - DNA, 597 bp, Homo sapiens
gggatttcagaatgttgacttgcactcacttaggctttcccacggcagtggatttcagtctagctgagctctcwgttacttgaagttagaagaaagcagcatgaaggagtggaaagagcctggaatttagagtcagtgggccagtacctgagcccctgctctgtgactcaagcaagtcattgcacctctctgagtcctaccaactttacagggtatggtgaatgtctaatccaacaagaaacttcaaaacactttctaaaaccataaaacactaaatcaatgttgcttatttgtgtgagagctcaggagtagaaatgtagatttgagccatcaatagaaatgtgagaatgaaaggctgagagaagtcttatgagattttcctgacaattcaactctttaaaatgatcagatgcgataaacccagtttttctcataccaagttttgcttttcctgttgttgactttccttaacaatctttccccttgacagtgaattttagaccttcccttacaaagccacaagcctggcaggtagacttctcccccaatttcagttacatgtatctgttcaaaaagagacttttgttgatcagcctt

SEQ ID NO: 427567 - DNA, 597 bp, Homo sapiens
gggatttcagaatgttgacttgcactcacttaggctttcccacggcagtggatttcagtctagctgagctctcagttacttgaagttagaagaaagcagcatgaaggagtggaaagagcctggaatttagagtcagtgggccagtacctgagcccctgctctgtgactcaagcaagtcattgcacctctctgagtcctaccaactttacagggtatggtgaatgtctaatccaacaagaaacttcaaaacactttctaaaaccataaaacactaaatcaatgttgcttatttgtgtgagagctcaggagtagaaatgtagatttgagccatcaatagaaatgtgagaatgaaaggctgagagaagtcttatgagattttcctgacaattcaactctttwaaatgatcagatgcgataaacccagtttttctcataccaagttttgcttttcctgttgttgactttccttaacaatctttccccttgacagtgaattttagaccttcccttacaaagccacaagcctggcaggtagacttctcccccaatttcagttacatgtatctgttcaaaaagagacttttgttgatcagcctt

SEQ ID NO: 427568 - DNA, 630 bp, Homo sapiens
ctttgttatctgtgggtgacatcaccctccctgagctcagcactgtgttatggtttagagcagtgtgaaaaccaaggcctgtggggttcaacctcaccagtccttgtagttaagggtagattttacatctttaatgggttgcggaagagaaggaggtggaagaagaggaaggagggaggaggaggtgaggagaaggagctaccaagactgaatgtggctaataaagcctctttagttcctggccctttgcagaaaaagtttgctgacccctgtttagtgaggtgcttctcaaacttaaatgtacataagaatcccctgaggatcttgttaaaatataaattctgattcagtacgtctgggacagggcctgagatttctgcttgtgtaaaaaggtcccaggtggcaaccatgctgctggtccttgtgctacactttgaayagtaaggattctgcctcagactaactctggacccctaaccatgctctttgcttataggaacatgcactaataattactctccatttgcctgtatcttaaaatctttcacttcttttctgtgttcatagcagatgaacttacagcaattcatctttaaaacagccttcattttttccctcaaaaatggtaat

SEQ ID NO: 427569 - DNA, 618 bp, Homo sapiens
tgggaacaaaatggctttgatgaggattactgatgtttttcaggttgtcagggtcagctgctcagcaaattctggcagtgactttctttccattccctttagtgccattgctttatcagtagtcaccagtggactcaagacatggctgttttaaagaagttctctcagcagctgctgaagtagacaggttggtgtggttggtggtcgccttakcatacacaatggaggcctccttgtgttcaaatcctcaatttcataaggtgaagtcatgtgtcctttcattagagaggaaccatattaagaattatgtgagtgagtggaccttttaggtctcttcgattccagctactaagcgaataacaagtatgtttccaggttggaagcactaagaaaggagatgaggaggaagggacttggaaaaggtaaaattggaaacgaggaagaaaagcagatgaaaggccctggtcacagttccaggctaggctgaactctgctcagttaggagaaggacctagttcactctccttccccccacccatcactccccctctttccctcctctcttccccctcccatgccctactttccttccctccccctctcctccttctctcctag

SEQ ID NO: 427570 - DNA, 517 bp, Homo sapiens
aggctgtccatttttaaatgtcatttatttggtgaagaaacgagtttgtttgttctttagagtttcccacgtactggatttggctgaatacatcctcttggtattgtttaaccgattcctctatattccatattttttgtaattagttaaatacagaggattgattaaagttgttttattgatattatttggcacaattttatagtggatatgtgtacttctatagttattaggaggcacatattatctgcttgtccaacttttagtgatgttaaaattaatcactgggtttaggygctggcagcttgatccatcagttataaatttccccatcaacatttcaactaatggtttgataattggtgatgatcatttcctagatccattatttcataagggctgtaaaatggtgattttctgagtctatcatcccttctgcctttattagcatgaatatttttcataaagagggacttttcctcatcaacttcctaactgcttagctcattttaaaaac

SEQ ID NO: 427571 - DNA, 570 bp, Homo sapiens
atgtggcttacattgcttctactggacaatgcagccctggagaatacttacatttaagtgggcagattcagaaatatttaagacagactgagaaggagaataacaagtttgtttactctcgaaagccaaaggagctgggcatggtggctcatgcctgtaatcccagcactttgggaggccaaggtgggaggatcacttgaggtcaggagtttgcgatcagcctggccaacatgctgaaaccccatttctactaaaaatacaaaaattagtcaggcatggtggcaggcccctgtagtcccagctactggggaggctgaggctgaggctggagaatcgcttgaacccgggaggtggtggtagcagtgagcagagatcgcgccactgcactccagcctgggcgacaagagyaagactccatctcaaaaaaaataaaagaaaagaaagaaaaagaaaagaaaccaaaggaattgaatgtatttttccttgcattcatctcttatgcatatttagatacttttacataattgaatcgtgtactaaatactgtttttttatgtgaacactgcattt

SEQ ID NO: 427572 - DNA, 586 bp, Homo sapiens
gctcttccttgtccactttgcctagtgaccaccactgtcttctgcctggggcagcaaatgatttgtgtcagcggaagaggcccaagttcatccattgctctccactcccaggtaggggcctgggccggggtgcagggaggcgatggttgagtgcacacacctgaggtgtcttgtcccactctgtgtgcagccctgggctaacagaaacttagcattcagcaggcagcttggaaggggttcccttcagctacccctgagccaggtacctagcatgtccaaacacagacgttacaatgccttggggattggccatttgttgtkcactggggctgcggcccatggaaagggaagatagacttcatcatctccaacttgggtcctgcatcttcatttcacattaagttctgcaaattgtacagctggccgtgacaacagtgatttaatacttccttatccttaggtacatgaccgtgttatcctaaggatataaatgtctggatgcttattgcacatgtacatatatgccatatgtaggtaacaacaacaataatatgtaggtgtgtgtaggtaacaacaaaaccaaatc

SEQ ID NO: 427573 - DNA, 582 bp, Homo sapiens
tctgcaccatgtgccctgctgacctagataagaaatcactttaagggcaagaagtatttccttcactgatgctaacacccctcactctcaattctcacaagggatctggaatcaaaacacctggtttaaatactaactttatcagtgtacatccttgggaaagttacttaaacttttttcacttcagatttcttatttgccacatagagacaaaatagtgcttagctcatatagttgtaagaatcaaagccataatgccatacaatgcttagcatagactttagcacataatgtagttgtcactccaatgctggatgttattgtttatcatgaatgttattgttattgatcattgtggttattatyttctttatcaaaataatgttatccaggcctcaaaccatctagtgatataaagtacaaatagcagttggacattttactcccctatcttggtcactttcattaacaagtgtgagtgcttccttaataacaagcattagctaaaaatgtcccccctctcccaccaccaaatcttcaaacagcctctagattattccctctgcccctactcttcagggc

SEQ ID NO: 427574 - DNA, 562 bp, Homo sapiens
tttttttgttgttgttgtttgtttgttttcattggcatggaatatctcttttcatccctttattttcagtctatgcatgtccttataggtaaaatatgtttcttgtagacaaccaatcaatgggtcttgtgttttaatccattcagccagtctatatcatttgattggagacagttgagtccatttacattcaatgttattattgataactaaggacttaaccctgctattttgttatttgttttctggttgttttgttgtcctctcttccttctttctttcctttgtgtcttcttctaatgaaggtgattttctctggtgatatgatttagtttgttgttttgtatttttcgtgtttccattgtatgtttttggtttgaggttgccatcaggcttgcaaatactatcttacaacccattattttaacctgataacaacttgacgctatttgcataaacaaataagctaaaagaaaactaataaaaactctatgccttaacttcatcctccagmtttttaactttttgttgttcctatttacatcttattgtgttgactgta

SEQ ID NO: 427575 - DNA, 320 bp, Homo sapiens
gatttgcctatttctcctttcatttctttkggttttatcttccttactttgaagcactcttgttggatgcataggatttaggatttaggatttttaggtctacttgatgatctcacccttttatccctatgaaatgcccttttaaatttctggtaatactttttattcggaagtctacattgtgtgatgttactgtagcctctctagctgtcttatgattaatgcctatgtggtatagtttattcttcatattcaaaataggtgttttgtagacagcatttctcttttcattcagtctgatatgccctgcctgtatgtaa

SEQ ID NO: 427576 - DNA, 520 bp, Homo sapiens
cttagggttagagtaagaggtttggaagctgcaatatatagatgatgttaaaaccaagacaatgaaagaacacacctagggagagagtgtagattttagaagagtattcakaaattcaacatagatcatcaaaccagatatagagttttaggtaacggtaagtcattcaaatggcactctctagaaggtaatggctagaaaaaattgacacttgggctgcttgatggaaagcaataaaaatagagttttgaaagtcataagcataatggtaattgttgaaactctgagaatggatgagcttctaaataagagtgaattatccctgaaggtgttacttatactcatgccagagagaaagatttgttttcatgattagatgttgaaagactcagaaatgtatcgggggaaaagaaaacgcaagtcttacgtgatatagccaacacttccttatccagccatttaacatttaccaaattttgtccttatccccgtttactctttgacttttaaaaaattgtga

SEQ ID NO: 427577 - DNA, 568 bp, Homo sapiens
aatttttatttaaaatctgaattgatttaactatttatatattctaagagttgaaagggattgtcataattcccatgagagtggcagtaatatttctccagtgcttcctttttcttaaaaaacctagttgggatggagaaggtgctattcagaggaaatgctttattgtctatcaaaggattttaatgaatctttggatttgcaaagggaaagccaaagctaagtgtgggaataaggctggaaacaaatggagtgtactgaataagacaagggtaggacttttattttctcttgaaagaggggcaaataagaaatagagtgggagcacagagctgtgtasggtggtaacagcacagcaagcaaggtgggtaaagaacttgtcatcccatggatagctggtatctaatactcgacgttaagatttttatgtttttgcaatattcccattcatttttccaacctccagcaatgtctgctacacctgcgtaaatcttgcataagtgaggattgggagatagagggatatgcatacaaatcaaagaaagggagttgctcccagtttgagtca

SEQ ID NO: 427578 - DNA, 568 bp, Homo sapiens
aatttttatttaaaatctgaattgatttaactatttatatattctaagagttgaaagggattgtcataattcccatgagagtggcagtaatatttctccagtgcttcctttttcttaaaaaacctagttgggatggagaaggtgctattcagaggaaatgctttattgtctatcaaaggattttaatgaatctttggatttgcaaagggaaagccaaagctaagtgtgggaataaggctggaaacaaatggagtgtactgaataagacaagggtaggacttttattttctcttgaaagaggggcaaataagaaatagagtgggagcacagagctgtgtacggtggtaacagcacagcaagcaaggtgggtaaagaacttgtcatcccatggatagctggtatctaatactcgacrttaagatttttatgtttttgcaatattcccattcatttttccaacctccagcaatgtctgctacacctgcgtaaatcttgcataagtgaggattgggagatagagggatatgcatacaaatcaaagaaagggagttgctcccagtttgagtca

SEQ ID NO: 427579 - DNA, 636 bp, Homo sapiens
ttattcataaacattttcgtttgtgtttctaaaatataaggatgtttaaagtatgtatctgtaaaaggtaagcacttaaaaaaacaaaacaaaacaaaacccacaaataccacttcaggccgaacataagtttgacaatagtttctaagcatcatcaaatatcgaactagcatacaagtatccagttgccacatacaaatcataatattttagagcttgcttgtataatatgattaaacttcagtaacttaagagggctttartctcccatttaacatagaatatgaaaacttgtcctaatgggaatatttctgttgaaaggcagcttgagtttcccactgtggtctcagttcttaatgttttgatttgaattttcatgaaaatgtttattttcatgaagccccatttatttaaagcatgaccttatttttttttttgcaagttctgaacctgtcgtcctgttttaatttgtacgtctggaccacataatatctttatggtactcaaagccccttggggctggggcgaggatgcagttaagaggcattatcaatacaagttaatccgggatgtctgctctcatttttcaggttttcatgtttaagtcaataactactttgacatacagatctgact

SEQ ID NO: 427580 - DNA, 636 bp, Homo sapiens
ttattcataaacattttcgtttgtgtttctaaaatataaggatgtttaaagtatgtatctgtaaaaggtaagcacttaaaaaaacaaaacaaaacaaaacccacaaataccacttcaggccgaacataagtttgacaatagtttctaagcatcatcaaatatcgaactagcatacaagtatccagttgccacatacaaatcataatattttagagcttgcttgtataatatgattaaacttcagtaacttaagagggctttagtctcccatttaacatagaatatgaaaacttgtcctaatgggaatatttctgttgaaaggcagcttgagtttcccactgtggtctcagttcttaatgttttgatttgaattttcatgaaaatktttattttcatgaagccccatttatttaaagcatgaccttatttttttttttgcaagttctgaacctgtcgtcctgttttaatttgtacgtctggaccacataatatctttatggtactcaaagccccttggggctggggcgaggatgcagttaagaggcattatcaatacaagttaatccgggatgtctgctctcatttttcaggttttcatgtttaagtcaataactactttgacatacagatctgact

SEQ ID NO: 427581 - DNA, 627 bp, Homo sapiens
gccaaaacattaggcagatggttatcaaatgattttcacattccctatgtgaagatcactgtgccctgctgatgacaggattacatagggactaaaacaaattaactggaagcagggaggagaagggggagaatcctattagtytggaccacacatgtggttaaataaaagcaggaacaatcacagcattgggttttatttagatcagtatgtgctttctcaaagggattgaaagtatttggaatgtgatttgtctttttccactttgattgctttgtaacgtggtgcctcttaagaaacctcatgggtgcataagcccaccacagtgtggcattctctttagaactcccagtgaggtgggttcccaccctgatctcagaatcttgttcagggtatcttttgtgtatttaaaggacacttggtcttctctgactatccctgctcaaagacaggatcactgaaatgactcccagcaaaggataaaaacagacatgatccagtgtgtgtaatgtataacaaacattggcaggtttctcattctgtgtttaactttgacatgaagctagtctgtcatgtttgaagatcaaatgagatttctgccaacccactcctagatagggaggattt

SEQ ID NO: 427582 - DNA, 627 bp, Homo sapiens
gccaaaacattaggcagatggttatcaaatgattttcacattccctatgtgaagatcactgtgccctgctgatgacaggattacatagggactaaaacaaattaactggaagcagggaggagaagggggagaatcctattagtttggaccacacatgtggttaaataaaagcaggaacaatcacagcattgggttttatttagatcagtatgtgctttctcaaagggattgaaagtatttggaatgtgatttgtctttttccactttgattgctttgtarcgtggtgcctcttaagaaacctcatgggtgcataagcccaccacagtgtggcattctctttagaactcccagtgaggtgggttcccaccctgatctcagaatcttgttcagggtatcttttgtgtatttaaaggacacttggtcttctctgactatccctgctcaaagacaggatcactgaaatgactcccagcaaaggataaaaacagacatgatccagtgtgtgtaatgtataacaaacattggcaggtttctcattctgtgtttaactttgacatgaagctagtctgtcatgtttgaagatcaaatgagatttctgccaacccactcctagatagggaggattt

SEQ ID NO: 427583 - DNA, 572 bp, Homo sapiens
cagtacaattgtcaatacaataatgtaattgaaaagttagacctgacttgtcaaatgaggaaaatgtattaataaggaattgtggaacagtgagcctctgagaagattatgttgctatttagctgcagacaatctgcaaaatagaagtgtgctaattctgctcatcttggtcaaattaatacatccaaaakgtttgaatgacatcaagttattcaaagcatttgaccaggaggtaaccctctctcttgcctagttaatttttgttaactctcacatatttcctagtggtagtgaaaacagggtcttttaagccacctagactatgttgccttacctattttatgttttcttaccattttctcttagtcctttgaagcatttgtcacaactgggttattatttggctaatgtttgcattttctgctagtttgtaagctctgtaacatcagttctatatttgccttttccatcactttattgctgtggtaattgttctatttgttaaaagtattctgtacctttcactgcagaatccctctctaccagaatgttatagtaccagtcccaaagct

SEQ ID NO: 427584 - DNA, 224 bp, Homo sapiens
acctaagccactcaagttaaatatgtgtgatrtaacaaaagtcatgcattatttactattaactagtgaggtacagcagtggttcatggaagggagggaaaagtggtatgtcgcaatagccaggtgagagttcacttgaggatgtgaactggatgaacaagtggatttatcaaggcttttagttagtggaggggtgagaggaggacatggcagatttctaaaag

SEQ ID NO: 427585 - DNA, 613 bp, Homo sapiens
cattgtatagtaaatgttatacatacaaccttttatcaagggatacmatttttgacctggggtagaaaatcaatggtcatttgacacacggtgaagattccaagactagaacaaaaagtattcttttggatcttcttattgaattattttcagagaagaaagccatgaagaggttcccagttctgtagaaaagtcaattcaagcttgtaaaatgtgctatttgcagatgttggtactgtttattcacagattcaacaggcctaaaggagcaggtttctcacgaatggacatttcatcactcaccactgtgttgcttctcaagcttcctctcccaacatcacagccctgcaagactagtctcttatcgggctcccatttcaatcaggctatactgcctctctccaagtctgcatcccactctgtgctgataatccagtttgaggacagttccatgtgtatactacaaggcatttgcgacacctgaactccaatagtattacacacacacaaatgcacttgcctttaattgatttttaatttatttaggcccgcatgatttttttatgtctccacttttgctgaaaaactcatagatttgttttccagttatgca

SEQ ID NO: 427586 - DNA, 613 bp, Homo sapiens
cattgtatagtaaatgttatacatacaaccttttatcaagggatacaatttttgacctggggtagaaaatcaatggtcatttgacacacggtgaagattccaagactagaacaaaaagtattcttttggatcttcttattgaattattktcagagaagaaagccatgaagaggttcccagttctgtagaaaagtcaattcaagcttgtaaaatgtgctatttgcagatgttggtactgtttattcacagattcaacaggcctaaaggagcaggtttctcacgaatggacatttcatcactcaccactgtgttgcttctcaagcttcctctcccaacatcacagccctgcaagactagtctcttatcgggctcccatttcaatcaggctatactgcctctctccaagtctgcatcccactctgtgctgataatccagtttgaggacagttccatgtgtatactacaaggcatttgcgacacctgaactccaatagtattacacacacacaaatgcacttgcctttaattgatttttaatttatttaggcccgcatgatttttttatgtctccacttttgctgaaaaactcatagatttgttttccagttatgca

SEQ ID NO: 427587 - DNA, 613 bp, Homo sapiens
cattgtatagtaaatgttatacatacaaccttttatcaagggatacaatttttgacctggggtagaaaatcaatggtcatttgacacacggtgaagattccaagactagaacaaaaagtattcttttggatcttcttattgaattattttcagagaagaaagccatgaagaggttcccagttctgtagaaaagtcaattcaagcttgtaaaatgtgctatttgcagatgttggtactgtttattcacagattcaacaggcctaaaggagcaggtttctcacgaatggacatttcatcactcaccactgtgttgcttctcaagcttcytctcccaacatcacagccctgcaagactagtctcttatcgggctcccatttcaatcaggctatactgcctctctccaagtctgcatcccactctgtgctgataatccagtttgaggacagttccatgtgtatactacaaggcatttgcgacacctgaactccaatagtattacacacacacaaatgcacttgcctttaattgatttttaatttatttaggcccgcatgatttttttatgtctccacttttgctgaaaaactcatagatttgttttccagttatgca

SEQ ID NO: 427588 - DNA, 619 bp, Homo sapiens
aaaaagaaaataataaagtagtatatataaagtgaaaattaaaagtccccctctgaagtgacggtaggtattccaaatctttttctgggtatatataagtgaatgtatatctaaataacaaaatgtcacctattcagatttctcaatatcagaaccatccaaataatgagattggcctaaaaggatttttttgaaatgcttatccatttaaactatcatgccgagtaataattgaggagtaattcctcatggtatgtggcatatggtgggatgtgctggttggttgccatggagattcatttggtggtatattgcgaagtgaggttggtggctgttctggtaatgcatgagttgggctggttcagagttatttctatgttgtaaaagcaataaagtttaaagtactgaaatgaaaktatacaaatacattacacatcccattcttacttcataatccatataatggaaagtggagaacgtattcagaagatgtatagattggattaaggttttgttttgttgttatcattgggttcttttgtaggtagaatatctagattcgttaatctagccacattgcaagcattttggcaaaaaatagttcttctactgtatttgt

SEQ ID NO: 427589 - DNA, 561 bp, Homo sapiens
atttgtaaacactgccacctaaacccactgcaaatctacatgacagggaaaaaatattggaaataaaactaaatagagatcccaggtccctcacccagtgaataaaagagaatctaagtctagttagaattttagtaggaagctaatcttacagacaatcactgaggaaaggcacagaaaagcamccttgtgggggattgcagggggctctgggagtgcatgtagataccagcaagtagcagtgacatcatcttcttctttatatgggaaacaccctcatggtactgaaacccatactagcagacttccaaatgaaacttcttcggagaaacagctgtgggtttcacagagggccatccttcaatctacaggcttgggtatggtggagcttttggccacattgcttctgacaatctgtccatgtccccagccctgaggcttaatgctagaagctacagcctacctcatacacaggacagttccttgcacatgttggcaaagtttctagggtaaagatgttaccactgagtactatttggggaatggaaacaggagatctga

SEQ ID NO: 427590 - DNA, 535 bp, Homo sapiens
ggcaaattcccaaagcaaaaggaggtaaatgagaacaacatgaatgagacaaacaagggagccaccatggaggaacagtttaatcaacacttagagaaacatggctgcctcctgctgagatggaaataaatctgttttgtagacatcctgrtgcctttaaccatatcctcttcctgtagtatgaagcctttcagcttttgcatcactcctgctggaaatcacttcataacaaaagaagttgaaaaatttcagatccaggctttaaaattaagttctaaaaaataaaaacagtagcagacacagttggtgccttacctataacaccttggacatttactgtgaaccccatgactcactgcctgaggattttgccagactggggagcatgacagaccagtgtgcaaagcaagtaggaagcgctaggctgtaaactcccccagaagttgctctcatccaatggctgggttcatggataactaatttgatggacaaagagtcaaaaactgagtgtgtgtgtgtgtgtgtgtatatatat

SEQ ID NO: 427591 - DNA, 535 bp, Homo sapiens
ggcaaattcccaaagcaaaaggaggtaaatgagaacaacatgaatgagacaaacaagggagccaccatggaggaacagtttaatcaacacttagagaaacatggctgcctcctgctgagatggaaataaatctgttttgtagacatcctggtgcctttaaccatatcctcttcctgtagtaygaagcctttcagcttttgcatcactcctgctggaaatcacttcataacaaaagaagttgaaaaatttcagatccaggctttaaaattaagttctaaaaaataaaaacagtagcagacacagttggtgccttacctataacaccttggacatttactgtgaaccccatgactcactgcctgaggattttgccagactggggagcatgacagaccagtgtgcaaagcaagtaggaagcgctaggctgtaaactcccccagaagttgctctcatccaatggctgggttcatggataactaatttgatggacaaagagtcaaaaactgagtgtgtgtgtgtgtgtgtgtatatatat

SEQ ID NO: 427592 - DNA, 406 bp, Homo sapiens
gtcctaaacccattctaatggccctggggcaggaggggatatcgtgttatgtcccctcctcctcagccatgcatcccgctctctggagtactgccagctcccttcaccagtccccatttgcagaacccctcaccccctcaccatgttcttaggaagatgaatcaggagtgaacagtttagacattatttaagttctcttttgatcacatagaacgtaagtaaagaattcttgggacaagtgatacactgcattcctyaagtatgtctatctgtgcaaagcaccgaaggggctgcattgtttaccttaacagttacagcccctgctaatgattacaaggatgctgtttatatcaatatttaaatatgccatttctcccaaatgaaccacaacagcctcatttaatgt

SEQ ID NO: 427593 - DNA, 606 bp, Homo sapiens
ttatttaagttctcttttgatcacatagaacgtaagtaaagaattcttgggacaagtgatacactgcattcctcaagtatgtctatctgtgcaaagcaccgaaggggctgcattgtttaccttaacagttacagcccctgctaatgattacaaggatgctgtttatatcaatatttaaatatgccatttctcccaaatgaaccacaacagcctcatttaatgttattttattaggatgagcagatatttgggcaatgttaaacctgtatgccacttgctatacaaacctctctaataatgcctcagtttagcatctaaatacwtatttaaacagtttaaaaacacattgactacataatttgtatttgtaactgctcaaaataaaggactttttattgagtgtgccaaataatgtgaatttggatgccttctgaaaggatgcattattcatgtggaagagaaacaaaatcaataaatgaaaattcgaataaaaataaaacccattatgttgctgcacccagacaatgatcgtcttgtgcattatttactcaaggaaaagacacaggaaaatggcccttctggaagtgggctatgaagtgaatcata

SEQ ID NO: 427594 - DNA, 583 bp, Homo sapiens
aataattgtgttacattcattgaatggaacactatgtagaaattaaaagaagcccaaatgtgggcttggaagctagtccatgtggttttaaatcctggctttcccacttaccaacgatataattttggacaactacttaatttcttttcatctcaatttcctcaactatagtttttatctctgtggtgaagattaaatgattgagtgcatgtaaagctctgagaaccatatatgcacacagtaagcaccctgtgttagctacaattattgaaagagtgcacataggcttttgacatatctaaaaaaaatcaagaaacagatttgaactagatggtgaaggtacaagggaacayataaactgaggataaataggatgaataagggcaagaagaaatttcagaaagtggcaacaaaatgtaaaatgtcaggaagtgtgggaaaaaatcatgtaccaggacaactacaaccattctggggcagagaatgtgggcaagacagacagtagaagatagggctgagagaaagtcatgggcctgacctgaagcagcatcagtgataggtgggagtcctctcaaaatccaca

SEQ ID NO: 427595 - DNA, 563 bp, Homo sapiens
tttctggtttgtcttttattttaagagttcctggtgggatgttggagtggaattcacattttcagtcctccactcattaggcaagtggtatttgtccatttgcctrtggtttaaattcagcaaaaactaaaaacaacaagaacaacaaacatttcttccctcatgtaaggagtttgtatccagataataaacagcaatcttatacttgattcaacagtttcaaagttactattatgaaactttgaattccttaaatgttctctgggcttattgtcagacttcttaatttccccttttggttctctattgtactgtatacatgccaaagacgtaaacatgacctttctattttccaccagcactgtagatccattaaagggtcttttaaatgctgctgtattgggaggtccttcttagcctggactggcttcctgaggcctcttttctttttcgcagatccaggaaatgttaccaacatggagtgctacgaagctggcagagtatttgtcatagagtgtatttccatggttcttacttcttctcttatggctattgagacttct

SEQ ID NO: 427596 - DNA, 563 bp, Homo sapiens
tttctggtttgtcttttattttaagagttcctggtgggatgttggagtggaattcacattttcagtcctccactcattaggcaagtggtatttgtccatttgcctatggtttaaattcagcaaaaactaaaaacaacaagaacaacaaacatttcttccctcatgtaaggagtttgtatccagataataaacagcaatcttatacttgattcaacagtttcaaagttactattatgaaactttgaattccttaaatgttctctgggcttattgtcagacttcttaatttccccttttggttctctattgtactgtayacatgccaaagacgtaaacatgacctttctattttccaccagcactgtagatccattaaagggtcttttaaatgctgctgtattgggaggtccttcttagcctggactggcttcctgaggcctcttttctttttcgcagatccaggaaatgttaccaacatggagtgctacgaagctggcagagtatttgtcatagagtgtatttccatggttcttacttcttctcttatggctattgagacttct

SEQ ID NO: 427597 - DNA, 550 bp, Homo sapiens
attgtgttttctagttctgtgaagaatgatggtggtgctttgatgggaattgcattgaatttgtagattgcttttggcagtacggtcattttcacaatattgattctacccattcatgagcatgggatgtgtttccatttgtttgtgtcatctaygatttctttcagcagtgttttgtagttttccttgtagaggtcttttacctccttggttagctgtattcctaagtattttatttatttttttgcagctattattaaaggggttaagttcttgatttgattcttagcttgctcactgttggtgtatagcagagctactgatttgtgtacattaattttgtatcctgaagctttgctgaattcatttaccagttctaagagctttttggatgaatctttagggttttctaggtatatgatcatataatcagccaacaggaacagtttgacttcctctatactgatttggatgccgttggtttctttcctttgtctgattgctttggctaggacttccagtactatgttgaatagaagtggtgaaagtg

SEQ ID NO: 427598 - DNA, 550 bp, Homo sapiens
attgtgttttctagttctgtgaagaatgatggtggtgctttgatgggaattgcattgaatttgtagattgcttttggcagtacggtcattttcacaatattgattctacccattcatgagcatgggatgtgtttccatttgtttgtgtcatctatgatttctttcagcagtgttttgtagttttccttgtagaggtcttttacctccttggttagstgtattcctaagtattttatttatttttttgcagctattattaaaggggttaagttcttgatttgattcttagcttgctcactgttggtgtatagcagagctactgatttgtgtacattaattttgtatcctgaagctttgctgaattcatttaccagttctaagagctttttggatgaatctttagggttttctaggtatatgatcatataatcagccaacaggaacagtttgacttcctctatactgatttggatgccgttggtttctttcctttgtctgattgctttggctaggacttccagtactatgttgaatagaagtggtgaaagtg

SEQ ID NO: 427599 - DNA, 550 bp, Homo sapiens
attgtgttttctagttctgtgaagaatgatggtggtgctttgatgggaattgcattgaatttgtagattgcttttggcagtacggtcattttcacaatattgattctacccattcatgagcatgggatgtgtttccatttgtttgtgtcatctatgatttctttcagcagtgttttgtagttttccttgtagaggtcttttacctccttggttagctgtattcctaagtattttatttatttttttgcagctattatwaaaggggttaagttcttgatttgattcttagcttgctcactgttggtgtatagcagagctactgatttgtgtacattaattttgtatcctgaagctttgctgaattcatttaccagttctaagagctttttggatgaatctttagggttttctaggtatatgatcatataatcagccaacaggaacagtttgacttcctctatactgatttggatgccgttggtttctttcctttgtctgattgctttggctaggacttccagtactatgttgaatagaagtggtgaaagtg

SEQ ID NO: 427600 - DNA, 558 bp, Homo sapiens
tgacaaaatttttctttctatgtgacacaggttcagcacatgaatccaaagaggcataaacacacacagacacagacacagacacacacaaacacacacacacacacacacacayatatatatatatattcatgtcctgaacctgtgtcacacagaagggacatgaatattaagcacatgaatccaaacaattaggcatatataatattaatatataaatatacatgttaatattcatattatatattcatattatatgtgtaaatatacaagcatcacagaaaagcatcactgcttttctacataaacattatatatacatatatgtgtaaatatgtatatgtgtttgtgtatgtgtgtatgtgtgatgtttatgtagaaaagcagtgatcaccttccatagcaggagcagcagttgagtgtagtggacactgatgagatgatctgcctagatgcccctctttcatttctgccggaaaccgcccactccttgtccatatatcccttttgggaaatttcaatgtctcatactacctcatccttctagaagttgttgtt

SEQ ID NO: 427601 - DNA, 609 bp, Homo sapiens
ggagttagttaagccaatctaatgagaatccttctcagcaatttaaatacagtctagaactgacatcaatggtttctcttagagggcgagaattatatgacataaagtccaggaaccactgtgtcttgtgtcccatatcacggagaaagtctatcaccagggagtggaaatgaagcaaacactcaagcttggaagcaagcccgaatgggatgtggtgcttggcctctggtgccaggatggtccggctacatgcctcttactcctacacgttggttttacacatttccttggactccataaaccaaaaagccccccttttgcctgtgctagttcaagctggtttggatcccctgttagcaaaggagtcctagttaacattctgctgaattaaaacatttgattaatggagaactgaatcttcttctactcttgttcacaaattgaaacttatttgtttgacatcctgaatataacaatatattacttcctctgggttgatactcagtatatcagtacttagagcaatgagaatgaaggtgtaaagacatagacgtactgaccccaggaaatggaatacattctgtttataataaatgttkgaaatgagtt

SEQ ID NO: 427602 - DNA, 404 bp, Homo sapiens
ccgttaaattttgttttgttttgtttttttgacccaactttggattgttgaggcatcaggtaagaagctgtaaaaacatacattctatccatgctgagtaatatacaggtcacagctgtaactcaagttaagccaccagctaagaataaaagcacaagaaaataaaccaaccaaaatcgaaagcaaacaacatgcttatcacataataactattgaataatgcaaatattaacaaagcaaaccaagcaggrggcctccatctcaggaagaagaaaagccagcaaatggaaggcagtgattgggaaagcgataggctcttcctcctcgttcattattgagaaaaagtggatcaggactgacatctgctggccttgctaatgggatgtacccattgaaacaagggt

SEQ ID NO: 427603 - DNA, 597 bp, Homo sapiens
agaaattcttttccagaacaatccctaatgtgcttcatttcaataataaaagtgagactggtgggccagaaatcttttccctacaccttttgcttatatgaatgtcaaagtactgtcamaagtatatatgactgctgtctctttcagttaaatacatatgtatgcctcttagtgtacgtgtgcatgtacccctggacacaaacaacttatttaaaaaaattctttttacaaggcatatggaaaaattgaagcctggaaaattttccccagagacagaagggggagaaagcctgaaactttgactgccagagcatgaaagagacatactgatcacacattatctttaaaaacacttgcaaaaatcatccggcttagatgaagctggatgaaattgatccagcaaagctgaattacattgccacctcaaactacattttgggaggcagaggcaaactagtgcatataaatcattagctttaaggagaaaattattagcttatgtcaaaaactctgcaaatcccattttctcttttcaccttctttgagactctgtactttgcttccagcttaaacaaaagaaaaatgaacagtttcagt

SEQ ID NO: 427604 - DNA, 537 bp, Homo sapiens
atcagcctgagtccctgaatggttatagggagcagagcctcctcaccaattagattttagtggatgagaaaaaaacttcyattgtattatgtcattgagatttcaggaaatccaaataacagctagaatttccataactaatgtgcacattcattccagagtgtggaatgttgccataacaaaaacctaaaatgtctggcatcagctaagcaacgaggatgtgaatggcagggaaactgactttggaggctggaaagatgaagatctatgttatgcggtggcaaaacctttgataaaactgcctcttgctataactcaaaagacaggccaagtgcatgctgattctttagctctagggaaaagggttggaaaacagaacgttagtagcaatttccaaaaaaaatggatgaactcaggcaaggattggcttgttttcaagcaaaaatgaaatggaatgtcagaaactagaggtgttgaaaagttggaaaaattgactgcttccaaaaaaacagtaggaaatcagaatgaataagactc

SEQ ID NO: 427605 - DNA, 598 bp, Homo sapiens
agttggtgaaggagcttgctcaggatcacacaggcagagctgccagggctgggactggagcctaggaggctaactctgggtccacctcgcttaatcaccaccctctcctaatcaccaccctctcctacaatgctggttagtgtgctgggccccatgtgtgaaattttctgatattctccccactaaaatytctgtctcctgtgtcttatcacacaggaacatgcatctctgattgctttagtttcccaccttgtaaaagaggttacctaataatatcttccacaaggggtcgttgagaggatcaaatgagcaagagcaaaaaatgcatttgacaaaatgtccagtaaaacacggccatgtattagtccgctagggccgccataacaaagcactaccactgggtggcttcaacagcagagaccgatcgcctcacagttctagaggctacaaggagctagcagggctggttccttctgagggctgggagggaaaatctgtcccaggcctctccccaagctgcaggtttgctggtaatctttggcggtccctggcttggcatcactctaatctctgtcttcatctttgcgtgtgtgtgtct

SEQ ID NO: 427606 - DNA, 598 bp, Homo sapiens
agttggtgaaggagcttgctcaggatcacacaggcagagctgccagggctgggactggagcctaggaggctaactctgggtccacctcgcttaatcaccaccctctcctaatcaccaccctctcctacaatgctggttagtgtgctgggccccatgtgtgaaattttctgatattctccccactaaaatttctgtctcctgtgtcttatcacacaggaacatgcatctctgattgctttagtttcccaccttgtaaaagaggttacctaataatatcttccacaaggggtcgttgagaggatcaaatgagcaagagcaaaaaatgcatttgacaaaatgtccagtaaaacacggccatgtattagtccgctagggccgccataacaaagcactaccactgggtggcttmaacagcagagaccgatcgcctcacagttctagaggctacaaggagctagcagggctggttccttctgagggctgggagggaaaatctgtcccaggcctctccccaagctgcaggtttgctggtaatctttggcggtccctggcttggcatcactctaatctctgtcttcatctttgcgtgtgtgtgtct

SEQ ID NO: 427607 - DNA, 598 bp, Homo sapiens
agttggtgaaggagcttgctcaggatcacacaggcagagctgccagggctgggactggagcctaggaggctaactctgggtccacctcgcttaatcaccaccctctcctaatcaccaccctctcctacaatgctggttagtgtgctgggccccatgtgtgaaattttctgatattctccccactaaaatttctgtctcctgtgtcttatcacacaggaacatgcatctctgattgctttagtttcccaccttgtaaaagaggttacctaataatatcttccacaaggggtcgttgagaggatcaaatgagcaagagcaaaaaatgcatttgacaaaatgtccagtaaaacacggccatgtattagtccgctagggccgccataacaaagcactaccactgggtggcttcaacagcagagaccgatcgcctcacagttctagaggctacaaggagctagcagggctggttccttctgagggctgggagggaaaatctgtcccaggcctctccccaagctgsaggtttgctggtaatctttggcggtccctggcttggcatcactctaatctctgtcttcatctttgcgtgtgtgtgtct

SEQ ID NO: 427608 - DNA, 565 bp, Homo sapiens
gatgcttcttataagactaaatattatttactaaatataaattgttgcttattagtctagatgaggaaacaatggaataaacattagaaaatctcaaaaatataatttaatgttcaactaaaaatcttcatacataggattaatasagtataaacactagttcgttgggaagagacattcatctactcatatatataaaatcaaggtcagtgagtcctctcttttcacttgcagataattgctgattggtgagctggagtacagcaggacaggcagaggacaaaggatgaggacatgctgaaacataccaaccagcagagtacctgactggcaatcagaacttgtgcaaatgacttgggtggccttgggaggaaagatagaaccccagtagtgagttaaccagaatatacttcatatagaaacagtgccgaagactaaagtcttgtaccattttaactacacttgtggtatatggtattaataaggtatccttaaaaaggatcttctactccaaataaacctttacaattcaaaataaaatatcttttacagcatttcatgtcac

SEQ ID NO: 427609 - DNA, 568 bp, Homo sapiens
tcatttaattctgttgtccaggaggaaagcctttgggaattcagcctgtttaaaatgctcaaagatgctgccagcaacttaaaacagacaaatagaaaaaaaagaaagaaatataaaactgtgaaagtacactttgcaatgtgtaaatcattaattaatgtgtttaattaattaattgtgtttaataagtaataaaacagtagttttgctactgtccagcacttaatatctatttagtttaaaattctatgttcatttgcttgacttgctgaaagtcctatgaaatgggatgcttcttataagactaaatattatttactaaatataaattgttgcttattagtctagatgaggaaacaatggaataaacattagaaaatctcaaaaatataatttaatgttcaactaaaaatcttcatacataggattaatagartataaacactagttcgttgggaagagacattcatctactcatatatataaaatcaaggtcagtgagtcctctcttttcacttgcagataattgctgattggtgagctggagtacagcaggacaggcagagga

SEQ ID NO: 427610 - DNA, 467 bp, Homo sapiens
cactaaaaatttagagaggattgctcttggatgacccctactgtcctaagacttttagtacaaagaaaaacagcaagcatagtgaaaaatgcccaataaggaggcagtgtttagtcccaagtttatcttcctcatttgctcctgtatgaccttgagcaagccacttaccttctcaggtcctcagtttcctgatctgtaaaatgggagggtgggtagggattaatactttatccagttaggctacataatattttgagatttctttcagttctgctaatacttaggattctttgagttggggcccragaactgtggagacagtctcaaggagggtcacaaggttccttttagttaagaaaccaaattgaacaaaagcaattactacttggcaccataactcatctgtcagtgtgtcaggcattttatacaggttttcatttatttctcataataaacctacagagcca

SEQ ID NO: 427611 - DNA, 551 bp, Homo sapiens
attactacttggcaccataactcatctgtcagtgtgtcaggcattttatacaggttttcatttatttctcwtaataaacctacagagccaatgtttttgcctccattttatagggtgggaatctgaggatcagtgaggctaaataactggaaagtaaaagagctggggcaaacccgcttatttggttttggtgtctctgccccatttcactttgcatccataatgggtgtcaccttctgctaactttctctcaggaagtgttttgctcttggttttggagccatctatcattcaccttgcaattgcatgcccatagctcacagtttcttccaaatagaaatatacacactattttgcttactgacaggtactttccatttgaagagtcatgtactgtgatgcctgacagtgctccctagagcaaatttagggtgaggaagagcaaaggaaactaagtagatgcctaaaagtagaatcatggtaaccctgcattaaagcccttgactataatttaaagtagtaataatttggaagccaaaggaaagacacca

SEQ ID NO: 427612 - DNA, 551 bp, Homo sapiens
attactacttggcaccataactcatctgtcagtgtgtcaggcattttatacaggttttcatttatttctcataataaacctacagagccaatgtttttgcctccattttatagggtgggaatctgmggatcagtgaggctaaataactggaaagtaaaagagctggggcaaacccgcttatttggttttggtgtctctgccccatttcactttgcatccataatgggtgtcaccttctgctaactttctctcaggaagtgttttgctcttggttttggagccatctatcattcaccttgcaattgcatgcccatagctcacagtttcttccaaatagaaatatacacactattttgcttactgacaggtactttccatttgaagagtcatgtactgtgatgcctgacagtgctccctagagcaaatttagggtgaggaagagcaaaggaaactaagtagatgcctaaaagtagaatcatggtaaccctgcattaaagcccttgactataatttaaagtagtaataatttggaagccaaaggaaagacacca

SEQ ID NO: 427613 - DNA, 486 bp, Homo sapiens
tctgctaatacttaggattctttgagttggggcccgagaactgtggagacagtctcaaggagggtcacaaggttccttttagttaagaaaccaaattgaacaaaagcaattactacttggcaccataactcatctgtcagtgtgtcaggcattttatacaggttttcatttatttctcataataaacctacagagccaatgtttttgcctccattttatagggtgggaatctgaggatcagtgaggctaaataactggaaagtaaaagagctggggcaaacccrcttatttggttttggtgtctctgccccatttcactttgcatccataatgggtgtcaccttctgctaactttctctcaggaagtgttttgctcttggttttggagccatctatcattcaccttgcaattgcatgcccatagctcacagtttcttccaaatagaaatatacacactattttgcttactgacaggtactttccat

SEQ ID NO: 427614 - DNA, 551 bp, Homo sapiens
attactacttggcaccataactcatctgtcagtgtgtcaggcattttatacaggttttcatttatttctcataataaacctacagagccaatgtttttgcctccattttatagggtgggaatctgaggatcagtgaggctaaataactggaaagtaaaagagctggggcaaacccgcttatttggttttggtgtctctgccccatttcactttgcatccataatgggtgtcaccttctgctaactttctctcaggaagtgttttgctcttggttttggagccatctatcattcaccttgcaattgcatgcccatagctcacagtttcttccaaatagaaatatacacactattttgcttactgacaggtactttccatttgaagagtcatgtactgtgaygcctgacagtgctccctagagcaaatttagggtgaggaagagcaaaggaaactaagtagatgcctaaaagtagaatcatggtaaccctgcattaaagcccttgactataatttaaagtagtaataatttggaagccaaaggaaagacacca

SEQ ID NO: 427615 - DNA, 568 bp, Homo sapiens
aagtgctcaggtgaagagaatggcagtgttaagtcatgtcaaataaacaatcgacttgggtgaaaagagggtgactgctaagcaaatgcaaagccctgcaggtcctccatcttccctttgtcctgggactgtctccaacgagtggacattttcctgagcaattctggagccatcaaggaggttgagactcagtttccttgtttgtaaaatgagaagagtaataccgggtaattttaaagagtaaacaatgtgatttgttacacgtctgggcataaaacgatagtcttgcagttgttactgagagaggcacagtctaccttttttgtatcagtccaggtatttaaggtgtccgtactcattgttaacatggctcaagcagtttttcaagggtttaggacacactttatgtaacttcaatttcttatagttatttacttctatattcctggtatgcaatactcttttggcccccatcagtgctaagtttcagtcccatatamgcttagcttaccactgagcagtgtgattgggactgacgataggaagaggctctccttcgtgttaaaac

SEQ ID NO: 427616 - DNA, 576 bp, Homo sapiens
gaattgttttaacttatattgtcatgttacacctggatgaggaaacatataaagtaattaagtgaaacctactgaggaaaacagggatttcagctgaatttagctaattaatcccaagactggccccaagtgtagaaagaaaaaatattccaaggggttctccttaccggttttaatttagctctgggcaatggcagtgtgattctgctggttttgtatctcattaccctcaagagcaccctttttccytcctgtgacccgcacttcaaaggtgataacatcacctcatcaattgtcaatgctaccagttcaataaccagctatcatggtggggcatctttcttgatgagaggcagatcttggctctctccaaaaatagcttgcatgcagtgccaggtaaccccagatttcctcagtcatctaagctcaggaaaaagacttcatacctgtgctttctttgggacatgttcatagtcaaataaggattatatttcctgtgactttggtcttgagacataactgaccataatattttttttcatatcagtacccatcataaccatcttcctttaaaac

SEQ ID NO: 427617 - DNA, 524 bp, Homo sapiens
aaagatttgaaatcttaaactcatcttcatttagttggtacttagagacagatgtcaaaacatgattgtataggcttatgttatttataaaaaaataagatatttactttagtacctttcaggggaatgtatttctttattractatttctcctgatatttcactcctctttttgattgacatttagaacaagaaccagagaaacatagaatgcagcgatgattatttaatgagctgaaatagtctattcctcacatctcggggagagactcaatgaagacctctcaggaagttggagatttccactcctataatttgattctaatatttcttcttctcattcaattcactgggagtatgtagaagagtgtggcttactctcttaaagaagaatggaagggaagttgaatctattggcagcaacatcatctttcatttgactcaggagctgggaggaataactgcttcttacccacactatagaatgaaagctaagactacagtctcatactggatttcaaggc

SEQ ID NO: 427618 - DNA, 656 bp, Homo sapiens
atattgtcatgagaaagtgtcgtgagattaaaagcagctgagaattaatcatcagtaatgtgagacgctgtatacattatttccatgattttgcccaaattcagtagtacagaagtacagagaaatgccaaaaggcaggttctagagcagggtttcttatgcttgtcattgatattttgggctggataattctttttttctctggagctgttctgtgtattttaaacatccttggcctctatccactagatgccagtgttgcccctcacttatgacaaccaaacaggtttccaaatattgccaaataccccctggggacaaaataggcccagytgacaaccactgttctagagtttcagtggctggacacaaacccaggctttactatgtaacagtatgattagtgcaagttactcaatccctctgtgcctcaatttcttctgtgaagtagagatgaaaattatacccagctgataaagttcagttttgctgtttgagaaataaaagagaaaatgcatatgaagcacaggtgacggtgtctgaaacatggtaaatattcagtaaatatcagctatcaattgtatgtttattgatagtcttattttgattccaaatcactggaaaaattctactgaagtctttacattgaactcatg

SEQ ID NO: 427619 - DNA, 656 bp, Homo sapiens
atattgtcatgagaaagtgtcgtgagattaaaagcagctgagaattaatcatcagtaatgtgagacgctgtatacattatttccatgattttgcccaaattcagtagtacagaagtacagagaaatgccaaaaggcaggttctagagcagggtttcttatgcttgtcattgatattttgggctggataattctttttttctctggagctgttctgtgtattttaaacatccttggcctctatccactagatgccagtgttgcccctcacttatgacaaccaaacaggtttccaaatattgccaaataccccctggggacaaaataggcccagttgacaaccactgttctagagtttcagtggctggacacaaacmcaggctttactatgtaacagtatgattagtgcaagttactcaatccctctgtgcctcaatttcttctgtgaagtagagatgaaaattatacccagctgataaagttcagttttgctgtttgagaaataaaagagaaaatgcatatgaagcacaggtgacggtgtctgaaacatggtaaatattcagtaaatatcagctatcaattgtatgtttattgatagtcttattttgattccaaatcactggaaaaattctactgaagtctttacattgaactcatg

SEQ ID NO: 427620 - DNA, 572 bp, Homo sapiens
aaccttacttcatggaactttcagcccataagctcattgtgcaggaagagaaatagactttcctggttctcattcagcatgtattcaacaatggggagttcagcacgttgcaaaacaagtacccctgtcgcattctcctgcaaccaattatgattccctccagcccatatgtctgyagtatgcctagaaaccttgctaaaataaaaacacaattctgtgttgcttcactgatcttaacagtatagtatcagaaatgctatgagattagtttgtcattacttaatttctggtatgcccaagatgactaccaatgataccactttacttcccaagtcgtaaggctctagtcagtaatttgtcctacagccatggtgtagagtatctatagtgtctgcagtgcatgtgtgtctatatgaatacatgtatatatgtatatagatatacttatgtacttatgaatacacttatgtgtgtgtgtatatatataaataaatatatatatagtataaacatgtgtctatatgaaatgtatctttccctgtctgcttttgaatgtaggacatttcacttat

SEQ ID NO: 427621 - DNA, 572 bp, Homo sapiens
aaccttacttcatggaactttcagcccataagctcattgtgcaggaagagaaatagactttcctggttctcattcagcatgtattcaacaatggggagttcagcacgttgcaaaacaagtacccctgtcgcattctcctgcaaccaattatgattccctccagcccatatgtctgcagtatgcctagaaaccttgctaaaataaaaacacaattctgtgttgcttcactgatcttaacagtatagtatcagaaatgctatgagattagtttgtcattacttaatttctggtatgcccaagatgactaccaatgataccactttacttcccaagtcgtaaggctctagtcagtaatttgtcctacagccatggtgtagagtatctatagtgtctgcagtgcatgtgtgtctatatgaatacatgtatatatgtatatagatatacttatgtacttatgaatacacttatgtgtgtgtgtatatatataaataaatatatatatagtataaacatgtgtctatatgaaatgtrtctttccctgtctgcttttgaatgtaggacatttcacttat

SEQ ID NO: 427622 - DNA, 578 bp, Homo sapiens
tgatgggtgatgtgttgaatgcacagctgccttaggtatgttttagaaaagtgcttattctgattttctgaagagagattaaatggccttgccaaggagtttatattgcttagggtatgaaaaaggcaggctcgttagcatccctcaaaacaggcaaggattcaaataatatttattcaaaaaatgaatcaacctgtgaattaagacctcatcagcattggatatgtcctgccttattkgagattctagatcattagtttagaaaataataggacatttttaaaataattgtgttctatgtaaattatagggatgtgagaaaaataatatttagtgcttaagctacctttccatatacaagaacatagtaccagcttgcactgatccgttcacgtggaagggaataaactctctcctctttccttttagcataatagttaggacgatggcactcaaccttttaatatattattacagcacacttaagcaaggcaaagacctcacagtccgcttagcccacccattatcactttctagtggatttccagctctctgtgtgtcacacaggcaaaatagca

SEQ ID NO: 427623 - DNA, 625 bp, Homo sapiens
ggagtaattatttgtgtattataagacctgagataaggacttgtgatagttaattagagtcttgcctggaggaattcatgatcctcccagtggactgagactgaatctttgggaaacaccagtttgtggcatgggctttggacttgtgctcatattatgactagtccacttaagagatgcatccttagtcaacagaatcaacctctctgtgtccaactttccccatttatcaaactggtgccatgattccttccttgtgcttggcaaatagaaagcggtcagaagatggtggttgctactgagcatgaaaactgcccgtcctgtggctgagctcactgccattgcaccaaagagagctgcaaaagcccagacatgatgagtgcctgtgttttcttcatcactgaaggttgggcatcctctctgagagccacgactgggcatatgcatgttttggggttgagtacytgaaactcttctgacttggcagatcatgtatcaaatagagctgctcctacagatcatgcattccttcccctaggagctagttcttattccctacaattccaagacaaggaaaattacacctactgattaattcggcaataaattcttaccaaatgcatac

SEQ ID NO: 427624 - DNA, 632 bp, Homo sapiens
aatgatctggtattgctcctacttcctatagagcagtgattctcaaaacgtagtctcctatggaagcagctgcatcacctgggagcttgaaggaaatgmaaatccttgggacctaatttcagaccgactgagctagaaactcttggggtaggtcccagtgatctttgagaactactgctgtaggtctaaaaaagtcttattttccctagggctttccctgggaatgaagggatgccgagagagcaagagcttctcattctgcagtgctgtctgatagaattttctgtgatagtggaaatgttttatatctgcactctctaatatggtagccactagccacatgaccattgaccatttgaaatgtggctagtgcaaatgaggaactaagttgtaaattctctttcattttaattagcttaaatataaatttagagagctgcatgtggttaatggctatctaattaacctcttttaccaataagcaggggaagcatgggttcagtaattgtagtgaggaatcatcaatccaaacttggagtgagctcagggttaagtctgaggcagaatctgtgaggcaacagctgtcttctccagggatactctcttagaatggagaaaaaaatggactcact

SEQ ID NO: 427625 - DNA, 580 bp, Homo sapiens
ttactttgcacatacagagtactgctataaaaaacctccatgagttaaatatgctgcttcattatggtaacattttgttaaaattaacgcatcactagcaagaacatttccacattatagagcaatagttctctttcacgtaacttttcatttattaggtggtcaaggacaaatcacctactctctgcacctgtattctcctagtcaatagcgaacttcaacatgctttcagattcactgggcagaaaagacaataatgtaaatatatgcatgtgtctctatagttgcttggtagcgtatatgcataaatacatcttgttaattaatgtggagggatgttgtctgcatttgggatctcctgaagacttttgtccccatatttaccatcctaaaattagtcttgaaaaaacacaaagttggatgaaaattctcgctattctgcttgcttggraggattgtccgcttgtatgaaaaccatggtctcatcatctataaaatgaagattacaatttcttctcctgtgcagatgtgttgtgaggttcaaatgagattctaacacgttgtgaaatggtgattatta

SEQ ID NO: 427626 - DNA, 505 bp, Homo sapiens
cacaccccaaagtgagccttttctgaaactttaaaataagtcttcacagttaataaaagtttgaacaatgaacaatatctctatgataaatagcacagctttcaataatatatttcagaacttttccgtaggactctcctgaaatgtcatgattatatcatctggaaaacttattgagcaagtgacatggataaactaagagagccaggcttctacagtttactcctgatctcggattgtcacaggttaatttttcatcgttttatccctatcactgaatacagtacctgtcacgagtgtctgttaaatgaaagcaccaagaaaattgaaccataccttgtttcctaatctgtaatagtatgaaagtatggttagcctctttagatggttyactataaaattataaggactagtgaagcaacattgctgcagtttttgacattttataaatatgctccttgtgtattttatcctatactaatttctgctcttgtctgcaacaggc

SEQ ID NO: 427627 - DNA, 458 bp, Homo sapiens
taatctggttgggcctggtcaagcttatttaaattgattgcagggctgagcatcagtccagagagacaatgctgtcagttctcacacgtttggctttgccattatatccatcagctatagtagttatgattccttaattaggaggagcctagataaatgtctaattcctttttactaaatatattcgtgctgaaatttcagacttttaagaatattgaacttgttctcttactgaaaagttaaaaagttaatgacattcttgaaaaaaacttgtgcattaggggttggtaaaggggacattaaagaaggaygctgtactgttgacttgtttctttaatcttgaattggggagaaaatctctccaaatagtggatggccactgtggtatcaggatagccgttctatgacgaaattatttatatctctacttggtgttcttcaggactgagaccacattt

SEQ ID NO: 427628 - DNA, 565 bp, Homo sapiens
ttcacaactgataaaagatgttacttctctgacttagcaaaatcatccctttcctgcttatccaatatctttttccaaaaattgtggctaactctactcaagatgctcataattccagtattaattatctaagaattcttccaaggatctcccaagaacacatttctcaatcttgtttctcagggtctacttaaaaggtagtggggtattgtggaaagcctctgggagtataagaatctggatcaaggtctggtctttgcatagcctatctttgtagtgccaggcaacgtacttaagccttctgagcttcagcattctcatgcttaaaatgggaataatggaatctaccttaaaagacaggttatgaaaattaaatgctgtagcatatataaaatgcccagcatactgcctggcatattttaggtacttagcacatgttcattmcatttgcacatcattaattctcacagtcccagatcatgagagccttcagacagacgggcccatcaaagcccttctgtcaggtacactcacaccactcaatcattcactggttttggtatta

SEQ ID NO: 427629 - DNA, 621 bp, Homo sapiens
attttaggtacttagcacatgttcattacatttgcacatcattaattctcacagtcccagatcatgagagccttcagacagacgggcccatcaaagcccttctgtcaggtacactcacaccactcaatcattcactggttttggtattaatcacaccaatgagcttggtaggagccagcatgcttctttccaccacatayggcaacccaccctcaagtgagaatacttgttttcaccccagtagtatctacaggcttcagatacaggcagatatatgagcaacaggacggtgtggaacacccctttgaggaggagctgcatcatcacatgccactcgtccaactcatgtattgtgggaaaacaacagaggcccatttgctgttttaatttcaaagaatcctctttgttcattctttattatttcattcaacaaagatttgttgagcccattttttgtttgtgccagacactattctagccctgacttcaggaccacatcagtcccagaaatcatgaggctgttttcaaaagaccactctaggtgaatccagaagttcaaggaatttgagtttaattttttttttaatcttcaattgatggaggaggaaccaaaggagttgg

SEQ ID NO: 427630 - DNA, 621 bp, Homo sapiens
attttaggtacttagcacatgttcattacatttgcacatcattaattctcacagtcccagatcatgagagccttcagacagacgggcccatcaaagcccttctgtcaggtacactcacaccactcaatcattcactggttttggtattaatcacaccaatgagcttggtaggagccagcatgcttctttccaccacatacggcaacccaccctcaagtgagaatacttgttttcaccccagtagtatctacaggcttcagatacaggcagatatatgagcaacaggacggtgtggaacacccctttgaggaggagctgcatcatcacatgccactcgtccaactcatgtattgtgggaaaacaacagaggcccatttgctgttttaatttcaaagaatcctctttgttcattctttattatttcattcaacaaagatttgttgagcccattttttgtktgtgccagacactattctagccctgacttcaggaccacatcagtcccagaaatcatgaggctgttttcaaaagaccactctaggtgaatccagaagttcaaggaatttgagtttaattttttttttaatcttcaattgatggaggaggaaccaaaggagttgg

SEQ ID NO: 427631 - DNA, 523 bp, Homo sapiens
gtgagcttagattgtctacaggtgctctttcaggctttttgatgtaggcatttcatgctatgaactctcctcttagttccacttttgctgtatcccagaggttttgatacattttgtcactataatcattcagttcaaaaaatgttctaatattcatcttgattttattgttgatctaaagatcattcagaagtagattatttaatttccatgtatttgtgtagttttgagggttccttttgcagttaattttcaattttattccactgtggcctgagagagtacttgatatgattttgattttaaaaatttattgaggcttgttttgtggcctrtcgtatagtctatcttgaagaatgtgccatgtgcccatgaaaagaatgtatattctgtagttgttgtgtagaatgttctgtaaatatctgttaagtccatttgttctagggtatagtttaagtccattgtttctttgttgactttctgtctggatgacctgtctagtgctatcagtggagtattaaag

SEQ ID NO: 427632 - DNA, 524 bp, Homo sapiens
ggttggtctggtatgagttgctttaatggcttaagttggttggcctccagccaggaggtggcattttcaagacagcaccagctgcagtagtagaaggggcatatacacttgccctacattggccaggataagtactcgggtttctcaggtgatgggtggggccatagagctctcaagagcttatgtcttttgtctttggctaccagggcaggcagagaaaaatcatcaggtgggggcagaattaggtgggtctgagctcacactatccttgggcagggcttgctgtggctactgtggggaataggggtggttctcaggacaatacagttatgttctcagggtgattttggctgcctctgctgcatcatacaggtcaccagggaactaggggaargctggcagtgataggcctcacccagctctcatgcagcaaggccagtctcactccctccatgcctcactaacagcaccaagtttacatccaggcagctggggagcagggctgagatcttgccccaggctac

SEQ ID NO: 427633 - DNA, 538 bp, Homo sapiens
atataattgcaatcatagaacacataaatttttatcatctgctgtttcacttaattctgagttgtaaacattttccaagttgatatataatttttatttttattrcatttttggtacaaatcgacaatttttctggctgcagagttcatcaaatactgcaacatagtcctctagtaatttaaatactcgtttgttttcaattttgtgttatttcaaaaaagctgctgtagatatcatgtaaacatatttattttcttaaaataaatgcccagaaccaagatttgttacataaaggtaagaacattttgtggcctttgacccaaaccatttattggcagctctggatcagcccttactgtaagctttgccagttctcctctcctcaatctgaggcatgacttctttgggctcctaaagtcctgctggctctcctgctccctatccactcccaggcccagcccaggcaaatgaagaatgctgaccagcagatcccagtcaacttcacacttcattactttatctctgcccttcttccttt

SEQ ID NO: 427634 - DNA, 533 bp, Homo sapiens
atagattatcaccatcttgaccatgatgtactttactacctgcatttaccctttccccagaatgttaggtccaggagcacagaggctttgttttgttcactgctgaatccccagtgactagaacagtgtccggcacatagtaggcacacaattaatatttgcccartgattgaatatacagtcggttctcattattcttggattctgcgtctgtgaatttgtttacttgctaaatttatttgtaaccctaaaatcaatatggcaatttcaaagttattcataaacatgtgcagagcagtgaaaaatttgagttgcccaaaacacctgttctcagctgaggttgaataagacactgtcttctggtttcagctttcatgatgtaaacatgtgtcctcttcacagtctgtttggtgccatgcttttcccattttttgttggtgatgtcactgtttaaaatgaccgccaagcatagtactgaagtgctatctagcgttcctaagtgcaagaaggttgtgatgtgccttacggagaaa

SEQ ID NO: 427635 - DNA, 533 bp, Homo sapiens
atagattatcaccatcttgaccatgatgtactttactacctgcatttaccctttccccagaatgttaggtccaggagcacagaggctttgttttgttcactgctgaatccccagtgactagaacagtgtccggcacatagtaggcacacaattaatatttgcccaatgattgaatatacagtcggttctcattattcttggattctgcgtctgtgaatttgtttacttgctaaatttatttgtaaccctaaaatcaatatggcaatttcraagttattcataaacatgtgcagagcagtgaaaaatttgagttgcccaaaacacctgttctcagctgaggttgaataagacactgtcttctggtttcagctttcatgatgtaaacatgtgtcctcttcacagtctgtttggtgccatgcttttcccattttttgttggtgatgtcactgtttaaaatgaccgccaagcatagtactgaagtgctatctagcgttcctaagtgcaagaaggttgtgatgtgccttacggagaaa

SEQ ID NO: 427636 - DNA, 553 bp, Homo sapiens
actgaagtgctatctagcgttcctaagtgcaagaaggttgtgatgtgccttacggagaaaatacttgtgttagataaatttcattcaggcttgagcttatagtgctattggccatgagttcaacgttaatgaatcgacaatatacactaaaacacggtgtccttaaacagaagcacacagaaaacaaggttatattaatatattgactggttgatgaaaatgttgtgaacagagactttcaggaacacaaacctgtattttccctaagggcaattgttcagtatttactaattcagtgttcaaagagactgagactttatagatcataacwactataacaacaaagaactactagaacaacaaagatcaactgtacatgcatgtgaatgttgagcactagcccattaacagtggtagtgatctggcaagtgactttaactcagccatgggttcctaagctgtaaattggtaatgatagcgcctatctgcatggctgttctgaaaagtaagtgagattattaatgtcatcaaatgcctaccacagtgcccaacc

SEQ ID NO: 427637 - DNA, 556 bp, Homo sapiens
ataatgtgggtaaagaaaaaaattaagcagtyggaagtaatcaaccaattgcctagccagtgtagacacagcaacctaaatgcatcttaaaatacatgttgctgagccaatttaaaaaggatgatgtatataacacaatggtatttatgtaaatataaaatgcattactacaaaaataaaatgaacatttaacaaaaaatacataaagccgatttgaatggttgcttatgggacaagagggaaataaagtgaagaaaggaaggaaagaaggaagagagagaaggaagagagggaaggaagaaaggaaggaagaaaaaaacagtttgaacattaaagcagctggcgtagccatctggcacatagatgtattccttaggtgtcagtttcttccttctttgctctgaatccctaattctgaaggattttcgtaatcagaaaagtgttaaaataaagaataaaggcacagaggtcagtgggaaagtggctggcttccagttagtgtgaccggttgcactaataaactgcaaccatagaagtggctcatatttcaatttta

SEQ ID NO: 427638 - DNA, 380 bp, Homo sapiens
aatccaaactgtaatccaactgcctcaggcatactttctcaggacccctcgagattgtgttctctggggccatggtcattcattgggtcagaataaacctctttaaaatattttacagagtttggtttatctgttaacaccatggacagcatattgggcttgtatagcagaatgggtgggtcaaggtcaagagtgcatcagctgacatcaagtagggtggtcaaagcaagcacaagatattctaggagaaccatggaagaaactgaacttcaaaastggtatttccattaagaatttatcaggtagataaaagatgaacaggcatcagcagaagaagaaacatacagaataaagcaatgaaatacaaaaagcacatcatt

SEQ ID NO: 427639 - DNA, 556 bp, Homo sapiens
catacatacacataaataaatgcatagtttcccttcccaacatttagctcatatggaacatactgttttgtaacctgccaggcctttttaagccctgaaattcaaactcaagcccttgaggcaaactcttgaaaaaagggaggaamgggcttcaatagaaatctcacaagaaaaagcaaaggaaggaaaaatggagggcacatgagatcaaagaagacagaggatatggaactgaaaggatatcacaaaggaagcaaaagataaagacggactttttcaatttaaaccccattttctaattttcttaattgcatcaacactgcgctattgtgtgtttttagaaattctactcctcaattcagtcttcctctcctcctcttcctccccccttctctgtgactgggtagttcacagcacagtgtagagatgccaactgctggagccaaattcaattccaaatccaaacataagcaacgtttgtgaatcgagatgctttgaggttcacccaactccaattttaccaattccctccagggaaatatttctctttgaagct

SEQ ID NO: 427640 - DNA, 556 bp, Homo sapiens
catacatacacataaataaatgcatagtttcccttcccaacatttagctcatatggaacatactgttttgtaacctgccaggcctttttaagccctgaaattcaaactcaagcccttgaggcaaactcttgaaaaaagggaggaacgggcttcaatagaaatctcayaagaaaaagcaaaggaaggaaaaatggagggcacatgagatcaaagaagacagaggatatggaactgaaaggatatcacaaaggaagcaaaagataaagacggactttttcaatttaaaccccattttctaattttcttaattgcatcaacactgcgctattgtgtgtttttagaaattctactcctcaattcagtcttcctctcctcctcttcctccccccttctctgtgactgggtagttcacagcacagtgtagagatgccaactgctggagccaaattcaattccaaatccaaacataagcaacgtttgtgaatcgagatgctttgaggttcacccaactccaattttaccaattccctccagggaaatatttctctttgaagct

SEQ ID NO: 427641 - DNA, 616 bp, Homo sapiens
aatgatcagatactgaatctattttgaagaaaatggcagcataattttctgaaggatcagatgtggggtgcacgggagaggaatcatggtggacacttaaaccatttgctgagaaggggaagtgtgacagaagcaggtctgggggtgggattggggaaaagattggaagcttagtactaaatattcccaggtggtttttgtatgcatgtgtacaaaacagacaccgattgtttcacacacacacacacacacacacaaacacacaaacacacacggtcctttctcctgtatatycttaatctccattaacaaaactatccaaccagacattcatgctagatttaaagatcctattgcctcttcctcattccagcatttaagcattccctctaggtcatccctgtcagcattacacaggttctcattccatgagtacaccttgttttctgtgtcagggtataaatcttcccctcaatacaggtgatacacttggtcaccttctacttgaccttgcttcacaaatatcaaccattgtttaaggcacaacttaaatattccttcttctctgtagcctttatgagctcaacagcaaaattagctactcactcctgtcatt

SEQ ID NO: 427642 - DNA, 495 bp, Homo sapiens
ccacaggtggaactgcatatcagagaatacacactgatgggccaggagcccattctaatttccacagagttagaaagaaatttagattagtagacaacatttaaaaattgagaaatagcacatgaaaattcaaatttgttgctttgggtagggaaaacaaacagcatgtaacaaaattgggccaaattcctgcctggcaaccatcagctgggctgagagctgccatcctttagacagggcacaggcctgttgtgggctatagtccccatgctgtacatctcccaatttcccaccctcaacacccaccaacaacacccattgggttacttccctgtccctgcctgagtttgcactccttgacttacggccataccagactgagctacaagtgacactgggcctttctgagagaaggaaacatttttagacatratacccttagaagcaatatttgctggggcctgagccctgcccgggcccggagagataaagatg

SEQ ID NO: 427643 - DNA, 616 bp, Homo sapiens
aatgatcagatactgaatctattttgaagaaaatggcagcataattttctgaaggatcagatgtggggtgcacgggagaggaatcatggtggacacttaaaccatttgctgagaaggggaagtgtgacagaagcaggtctgggggtgggattggggaaaagattggaagcttagtactaaatattcccaggtggtttttgtatgcatgtgtacaaaacagacaccgattgtttcacacacacacacacacacacacaaacacacaaacacacacggtcctttctcctgtatatccttaatctccattaacaaaactatccaaccagacattcatgctagatttaaagatcctattgcctcttcctcattccagcatttaagcattccctctaggtcatccctgtcagcattacacaggttctcattccatgagtacaccttgttttctgtgtcagggtataaatcttcccctcaatacaggtgatacacttggtcaccttctacttgaccttgcttcacaaatatcaaccaytgtttaaggcacaacttaaatattccttcttctctgtagcctttatgagctcaacagcaaaattagctactcactcctgtcatt

SEQ ID NO: 427644 - DNA, 528 bp, Homo sapiens
tgtcctggcttgcacagaactttggggtgtgaaacccaggatatgaaacttctggtgctaaaaccaggacattctggggcaaactaagatggctgatcaccctagaaggtcaagtcatygaagtaagcagcaactaatgatggcagcgttttacagcctccaaagctctttgtctttcattatcagatctcatcctggcaacaatcatgtgagaaagacagagcaggttactgttccactttatttacgaagaaacctggggctcagagaatgcaagtgacttaccagaaatctaatagctaataagtactggaataagaccgcaaatccagatctgctaacgaatacaaataatagggtctgagaagtgattgaatgtgttgagaaacaaagagaagatagaggctttttagctgactgagagaacatttccatgaaaagaaataagaaaattaggagaaaataatctttgggacaggaaagatgggttcggtttggagagtatcgtgctctgaattcactgagcaa

SEQ ID NO: 427645 - DNA, 497 bp, Homo sapiens
ccacagcaagtcagtggcagatccaggcctatcccagtatcccgaatctcagttttctgtctactatttcacctgccctcataaatgtttctgaagctaaaacaattacagtcatccttccaaaaacctcatcataaaattgtagagctgggatagaaaagtttcttccactgctgtctggcaggctgaattatggctctcaaagatgcctgagtctcagaactggtgaacattactctgtatgagaaagggtctttgcacatatgattaaggatttggagcaggagagattattctggattatttgagtgggcatgatataatcacaagagtcctcmcaagaggaagcagaagaaaccagagtcagagagagggccatgtgaaaatggaagtggtaactggatgatgggctttgaagacggagaaaggagccacaagccaaggaatgcaggtcacttgtagaagctggaaaaggcaaggaaacaaactcctccaaa

SEQ ID NO: 427646 - DNA, 497 bp, Homo sapiens
ccacagcaagtcagtggcagatccaggcctatcccagtatcccgaatctcagttttctgtctactatttcacctgccctcataaatgtttctgaagctaaaacaattacagtcatccttccaaaaacctcatcataaaattgtagagctgggatagaaaagtttcttccactgctgtctggcaggctgaattatggctctcaaagatgcctgagtctcagaactggtgaacattactctgtatgagaaagggtctttgcacatatgattaaggatttggagcaggagagattattctggattatttgagtgggcatgatataatcacaagagtcctcacaagaggaagcagaagaaaccagaktcagagagagggccatgtgaaaatggaagtggtaactggatgatgggctttgaagacggagaaaggagccacaagccaaggaatgcaggtcacttgtagaagctggaaaaggcaaggaaacaaactcctccaaa

SEQ ID NO: 427647 - DNA, 515 bp, Homo sapiens
aaactgagacagcagtggggctaagtgagttgtccaaagaggcacagtgagttggttgcagaacccagygtgatttgctaaccagtattatcatcacatggcctttagccctccaggattgtggcagcctttggcgccaccctgcatgaacccagagcttattatctgagccagggcagggagtctcccagatccatcaaatttcttgcctctgatgacaggtagatgacagaacggagcaaagtcacagaagctttggctttggggaagacagaaccttattagctttgtcagacactcactcctctggttttacgactgcagctttctatatatggcccgccaggccccagtggatttccctactaatgccatgtctatctaatagtggcagacctaggatggccctgatcatttccctgatgacaacactgaagcacacacatgccacagagcaacacactgtaccttctgtggcttgtgccaaagtgagccccttgctcataaatgtagca

SEQ ID NO: 427648 - DNA, 515 bp, Homo sapiens
aaactgagacagcagtggggctaagtgagttgtccaaagaggcacagtgagttggttgcagaacccagcgtgatttgctaaccagtattatcatcacatggcctttagccctccaggattgtggcagcctttggcgccaccctgcatgaacccagagcttattatctgagccagggcagggagtctcccagatccatcaaatttcttgcctctgatgacaggtagatgacagaacggagcaaagtcacagaagctttggctttggggaagacagaaccttattagctttgtcagacactcactcctctggttttacractgcagctttctatatatggcccgccaggccccagtggatttccctactaatgccatgtctatctaatagtggcagacctaggatggccctgatcatttccctgatgacaacactgaagcacacacatgccacagagcaacacactgtaccttctgtggcttgtgccaaagtgagccccttgctcataaatgtagca

SEQ ID NO: 427649 - DNA, 563 bp, Homo sapiens
caggacagaatggaagcattattggacagactcagatgctcagggcctcttaggggtattatgggtttatttatgcccctcacctccctgccaccaaattcacatgttgtagtcctaaccgccaggatctcagaatgtgactgtatttacatgtaaggtatttacaaaggtaattaaggttaagtaaggtcatatggataggccctaatccartatgtctggcctccttgtaagaagagggaaagaaaccaagaatgtacatgcacagagagaaggccacatggggacataacaagaaaatggccatctgcaatcaaatgagagagagaggactcaggagacaccaagcctgccaacatctaggtatggacttccagactccataactgaaaatggccacctgcaatcaaacgagagagagaggactcaggagacaccaagcctgccaacatctaggtatggacttccagactccataactgaaaacaaatgttgtttaagccacccattctatgatattttgttatggcagccctaggaaactaacaccgaaggcaattcaa

SEQ ID NO: 427650 - DNA, 628 bp, Homo sapiens
tctggtaccacacaagctctcctaccataatgcttaaaagtagcagcaaataattagaaaattaaatttaaagtactatttgcaatagcatagaaatataatcttattagaaataaattaatgaaagatatacaaacactctacattamaaactataaactttcctgagaaaaatttcctgagaaaaagtttgggctcaggtgatccttctatcttgacctccaaaagcatttggattacaggcataagccactgcacctagctagaaaaaattttaaacatctaaataaatgtataaaagtactatgtttatgcatcagaaagctcagtgttataaaactcaatattgtcaacatttgaaagtctaaataaatgtttagggatactatgtttatgaattagaaaatttaatttatttacaaattgatccactgatgtaatgcaaccaaatttctagcaggcaagatgattcaaaaatttatatgggagtgcaaaaaaccaagaatagcaaaagcagtactgaaaaagtacaaatattgggtgactcaccctacctaatataaagatttaccataaacgtcaagaggcaatacataattctattggccaaagatatagacacagttta

SEQ ID NO: 427651 - DNA, 527 bp, Homo sapiens
aaactccaagtctcagtctctacacctataaaatggaaataatgaaaagacatagaagagtactcattcagtaaagtgaagattcaacataaaacccttgcaagttcttgtcacacaatcaaattaataaatgttaaccatcattagtgaaatgggactatccttgacagtctaggatgcatggtaaactttgtccttaaggacggaatctttgtttcagtggttccccttacgatattccaaaacaactttgcagcttcaactcaaagatagtcactgatttggctttgtcctacatttcagtcaacacatatttactgagatgatgtgtccagccaatgctgggctctgaggctctgaggctgcaaagatgaagaagaaatagtcccagccccttctgaactcacagatggctgagagagttcaatycaaaaagacatcatcaccgaattagctctattttattatagtctgataagtcaagtgagagagggagaccaaggggactgtggacacacagagaagag

SEQ ID NO: 427652 - DNA, 615 bp, Homo sapiens
gtcagaaagtctctcccttaaagcctttatccctttcctatggtttgcaagacttcataacatcagggttattttccagccataaagtgctctgattcaaaagaatatgttcctctctgttagtgctaagcaaccttttagctctcagataattccaaaagagtaatgtcaacaatcccttttttctcgtcaattcaaaatgaagatagctatattgggtcctagacagtccactgctagaagagccctgagattttttctgacccttcaggtaggacgggagttaggggatgctccagggtaggtccctcaacatttatcccttctttgagggccacaagstaagagccccttccaggcactatcctcagggaccaatgggttccagaatctcttgtgttattgttgtatcttaatttaatagctacttctaaggtagtttgctaataaaatatagtcttttcatttattaactttgaaagtttcattgagcacatttctatggtgaatgatatgtataaacctacaatctgtccttgggacccatttgactataacatggtttctcctgtggctatttggcaatactttccactcatgaagaaagtttttgta

SEQ ID NO: 427653 - DNA, 656 bp, Homo sapiens
gccagtctgctcagttggtaggtaccatggtagagtaaaaatattttggctttaaaattagaccaatctgggttttaaacctggccctatctctaactagctgcatggccttgagcataccacacaacccctgagcctgagtttagtgtttggcccaggagaagttccatgtatatacattagcacctctttctggtacatagcrgtctacaccagatgaggcagtagatagatcctatttgaaaatttagaatagagaggtagccactaaacttctgaaatgtgatgaaagctttataaagtgaaagaaattttcatgtgctattcctaatatctactacatatgtacaatatgtaatattgattcaatttataggtagttcttgggacatgtgtagatttctcaaatccttgtcacaacttcacagggtggttccctccccaccaacaaccatcccacctcacaccgattcccaggatgatgcccttctgggaaatacctgattactcaataactactggtacatatttgtattttctgtaaagacatatgaatacagaatatgtggtattagaaaatataattttttctacaataaaaatctactactcatttaataaaagaatacaagagcaacttcaataactgagaaaat

SEQ ID NO: 427654 - DNA, 600 bp, Homo sapiens
aatcactgtttcattgtttttctagagctaactacttgaagctccatccaatttccctgtcacttctaagttattctaagagagtcattactgctgaatgactattatattaaatggaaacagtctgtacccaggatgatttgatctaaataggccactttccctgatcatgtgtgtctctgggtatgctaatgtctttgggatggaaagggtgtattgaatgaaagttttcccatgagaattcccatgtcgagacccatactgcctaatgccagttctcagggacaattctccactgccaatctcaaattgcatattgttaatgtgcaccattaagattaatctttgcttttgctgtcagttcttatttaaaggcccacattttctttgctgcagttaaatctagttatgaaatcttccttgattytgaggctctcacgccaccttaaattgattggccttaatgtgaggatcgagtgtgtgaggaggagattaaaatccatctgaatgcacaattcagttaatacagatgaaactggattcttttatagattctttaaagaaagtatggccccagaattttattacacataaatttat

SEQ ID NO: 427655 - DNA, 577 bp, Homo sapiens
tatctactagcatcaataccatccaggaaaacatggcctcaccaactgaactaaataagacaccaaggaccaatcctggagaacagargtgtgtgacctttcagacagataatttaaaatagctttgttgaggaaactcaaagaaattcaatataacacagaaaaggaattcagaattgtatcagataaatttaacaaagacattgaaataattaaaaagaatcaagcagaaattctggagctgaaaaatgtaattggcatactgaagaatgcatcagagtcctttaataggagagttgatcaagcagaagagacagaagagagaattagtgagcttgaaggtagactattagaaaatacacagtcaaaggagacaaaaggaaaaagaataaaaaacaataaaacacatctacaggatctagaaaatagcctcaaaaggacaaatctaaaagttattgaccttaaagagaagatagagaaagaaataggggtagaaagtttattcaaggggataataacagagaacttcccaaatctagagaaagaatccatatccaagtataagaaggttacagaa

SEQ ID NO: 427656 - DNA, 581 bp, Homo sapiens
ttctgttgagcctgccctcctttctgtgggcacccaaatatgaccctctcctgtctggcaccaccaaactccacaaggtaacttctcctccttccctccagaccatgccccagcccaggaactcttctccagaagtgagacagagaactgtttcaaattaactgtgtggcataaagtttgcaccatgcttccctcaaatcttccttttgggtatcaaaagcccattttgaaggtcaaaaaacaaaaagaaaaagaaaagctcgctggtatttttcacccttttagtcctgcttccccyggtggaaaggccaagtgcaatggggtagagaaaggaaagcacaatggtgatattccaaaacgtcgtcacatcattatcattgaattatctgtctgctctccaatgagtgtgggcaacttgaaggcagaatctctatacctgaggcctgcaccccagtgctgagtgtcacttctagaacattgcagcctcaggaactcctcgctaagtggacacacatgtgagctattactatttttgattatcagatatggagatatttgactgcaatacgtggtattcttaa

SEQ ID NO: 427657 - DNA, 571 bp, Homo sapiens
cttcttttgaaataattactctaacaaataagcacacaaatatgctaatttgcatctcagaaagattccagcgtttttctgaaccagtcactgataatagagtcatcagtggaagaaaaaaaggaaaaaaaaaaaaaacaaccgtaattgtccaccaaaagttcayggttccccttccatgattattctgggtgccacctgccccttccttcagggtacagctatatgaacagttcttgccaaagacacatgagcagaagtgaagatctcttctgaaatggggttttgaagaagaaagtgtgccttccccaccacatatttccattttggctggctggagagggagggctcaggggtcctcagggatggaaggaaactgagaccctgaatcatcacatgaaaggagaaaaacttctgtttgttaagttgaatgttgggggactgttggtgtggtagattgcttaatggctgcaaattcctcccctcccaggctacctgcacctttgcgatatgactttgctgcaccttctgtccagaagtggaagaaaactgcctggcctcatgacttgtt

SEQ ID NO: 427658 - DNA, 586 bp, Homo sapiens
agggaagttaaaagaatggatagagaaagacgctgtgacatccagtaccagccccagactgtgtgtaaggccactttagacccctagccctgtaagccactgatgactgcagccatcagagtgagcctaggagaaaccagaagaactacagaattgtaaacctcaggggaaaatagcatttaaaaatacaatagagataagacytcagctagtcatagatgcccctgtgttgcaaacttccagaaaaaaaaaaaaatgcggtaatctctggagtatttttaggggaaaagatgtgacaatagattctataactaaacaattactctgtgtaatgtggctgacaaaaattgtacccaaggatataagacatgttaattatatcatctatatatgcttccgggaagcatatatggataaaattacttgaagatttaaccaagacataaaccaaaattttaaaatttaaattggaggttgtggccaaaagcctcagtggtacaaatgaaactaaataaagagttgtttaaataactataaatatagtttcataaattaatacagatggttttaacaattcttaaaagag

SEQ ID NO: 427659 - DNA, 586 bp, Homo sapiens
agggaagttaaaagaatggatagagaaagacgctgtgacatccagtaccagccccagactgtgtgtaaggccactttagacccctagccctgtaagccactgatgactgcagccatcagagtgagcctaggagaaaccagaagaactacagaattgtaaacctcaggggaaaatagcatttaaaaatacaatagagataagacctcagctagtcatagatgcccctgtgttgcaaacttccagaaaaaaaaaaaaatgcggtaatctctggagtatttttaggggaaaagatgtgacaatagattctataactaaacaattactctgtgtaatgtggctgacaaaaattgtacccaaggatataagacatgttaattatatcatctatatatgcttccgggaagcatatatggmtaaaattacttgaagatttaaccaagacataaaccaaaattttaaaatttaaattggaggttgtggccaaaagcctcagtggtacaaatgaaactaaataaagagttgtttaaataactataaatatagtttcataaattaatacagatggttttaacaattcttaaaagag

SEQ ID NO: 427660 - DNA, 542 bp, Homo sapiens
catctgtcttacttgtggacctgcgtgaagaaccagtgacaatttatattaaatgagtcaagtttaatatcaatcttaattttgaaatgtaaaaactagtatttccttctgggactccaattaatgttctatgcattccactttggagaacaaagctatagcaaataaaccagtatggaagcattatggaaagaaggctgcagaaatgagaccaagtgtaccaattgtgacaacaaatacaaataatcagaaattaaaacttaactatagaagatacttccaaaactaaaatattgaatttattttaaaatattaagaacacaaagagagggagagacacacttttgtttcagcaagcccaaacaaaaaggaagtaggggccacaatattaatatcagacaaaagagaatatgcagcaagtaggatgacgcggggcggggagtatcattgaatattaataaaaagcaaagtctgtaataaaaatgccatatgctagaaaccctaggcaaaaygtacagacacatggtaagagagacttcaac

SEQ ID NO: 427661 - DNA, 594 bp, Homo sapiens
aggcccaggggttcatgcctacaatcccagcactttgggatgctgaggtgggaggattgcttgagcctaggagtttgagaccagcttgaacaagatggtgagaccccaggagtttgagaccagcttggacaagatggtaagtccccaggagtttcaggccagcttggacaagatggtaagaccccaggagtttaagaccagcttggacaagatggtaagaccccacctcaaaagaaagaaaggaaaggaaaggaaagttcttaaaaatgccttacatatctcaaatttatagaaatacctatattttcttctagttttaaatttacttttaaaactttagtccatctgaactgtattttggtgcaaggcatggggctagaagacagtacagcaagaggttarcaagataaacccagactctatactgcctgggttcaaattccagctctactcctgaccagctgtgtgatcttggacaaattacttagcttgtctgtgtttcaaccttcttatctataaaatggtgataacagtatctacctgtagaatttctgtggggaaaaaaatgttaattggtataaagtacacagagcc

SEQ ID NO: 427662 - DNA, 621 bp, Homo sapiens
tctggtgctattcctcctgtgccaacactatttaagtgactctaactacccaatgcactttcatacttcttggggtacgtacaacttcattattcctctttctcaatgtattcttgactaaccctatcctgatatttttctagatgaacctgaatatagttcatcgaatgccaagaataagtcctttaggattttaattggaattggattgaacttgtgtgttaatttcatatttttacatcaaaataaatttaatgacaaaaagcagtttacattttcaaaaatacttttagagcattgtctaatttgagacttagaaaatatttatgaaactattacaaaaagtctagaaggagcacctccttaacctatcatgaagccagcatcagactgataccaaaatctgtcagagacacaatgaaaaaaagaaaactttaggccaatatccccgatgaasttagacataaaaatcctcatcaaaatattagcaaaccaagtccagcagcatatcaaaaaattagtacatcacgatcaactatactttattccaaggatacaagcctggttcaacatatgcaaatcaataaatgtgattcaccacacagacagaattgaaagcaa

SEQ ID NO: 427663 - DNA, 600 bp, Homo sapiens
taaaaatcctcatcaaaatattagcaaaccaagtccagcagcatatcaaaaaattagtacatcacgatcaactatactttattccaaggatacaagcctggttcaacatatgcaaatcaataaatgtgattcaccacacagacagaattgaaagcaaaaactataacatcatctcaattgatacagaaagagttttcaataaaatcaaataaaaatatgcaaaatgatgctagccatacgcagaaggtggaagctcgacccctacctttcaccatatacaaaaattaactcaaaatggatcaaagatttaaatttaagacctcaaactataaaaagtctagaagacaatctaggaaatattttcttgacatcagccttggctagtccccaaaagcaattgcaaaaatagacaaaacccaaaatagacaagtgggacctaattaaactaaagagcttctgcacagcaaaagaaactatcaacagagtaaagagacagcctacagaatgggacaagatattcacaaacwatgcatatgacaaaggcctaatatccagaatctatacagagtttaaacaaatcaacaagcaaaaaacaaataa

SEQ ID NO: 427664 - DNA, 600 bp, Homo sapiens
taaaaatcctcatcaaaatattagcaaaccaagtccagcagcatatcaaaaaattagtacatcacgatcaactatactttattccaaggatacaagcctggttcaacatatgcaaatcaataaatgtgattcaccacacagacagaattgaaagcaaaaactataacatcatctcaattgatacagaaagagttttcaataaaatcaaataaaaatatgcaaaatgatgctagccatacgcagaaggtggaagctcgacccctacctttcaccatatacaaaaattaactcaaaatggatcaaagatttaaatttaagacctcaaactataaaaagtctagaagacaatctaggaaatattttcttgacatcagccttggctagtccccaaaagcaattgcaaaaatagacaaaacccaaaatagacaagtgggacctaattaaactaaagagcttctgcacagcaaaagaaactatcaacagagtaaagagacagcctacagaatgggacaagatattcacaaactatgcatatgacaaaggcytaatatccagaatctatacagagtttaaacaaatcaacaagcaaaaaacaaataa

SEQ ID NO: 427665 - DNA, 588 bp, Homo sapiens
ttataaactttcttaagtaattcagatctatggagtattttcatgcttttactctcttcagagaaaaagctatggaggctgttagcaaacttaagtccaaaatcgacagctcctaaaatactagttttttaggatgactttgcacagcctcgtcttacactttgaaatgccagatattttcaggtggtatatctttcgttcccacaccattatgtttattcmggcatcagcaatactatgttcttttcctgtgaccctcaaaaccatatacaaatatactttcccattctataggaaaacagagtgtgaaagcacttctgaatgaatgaaagagattagggtaaaaacctcagattggaactttaaactgaagcacctgatacagatatactgtgctaacagccaaaagcaaatataaccctagtcagggagacataatctccccctagcacttataaagtgccaggcgggcaattcctgtgcctttaggtgtgtgctaactgatgctcacagcattctctctgctgaaaacaggcagacattatgttttttattctttcttttggaaattgcataaaaccatgttag

SEQ ID NO: 427666 - DNA, 601 bp, Homo sapiens
aataagacaaggagggcccctgctctctcccccgggggtgtaagtgggtcctgagaaagagaaggggctgagtccgctctgtgcagraagctctagaggtcaatgtcccagaaggaagatcaacccagtaaagaggctaaaggcagctaagaaaaagagcccaggaaagaggagaaagagaaaaggggagtggaaagtgagaagataaaactggctacctaggaaaaggaagaagagtccattgcaggatcagaccccaggaactagaaggggcccctggagtccccacggtcacagccccacctagtgggtgccctatgttctttatgctattcttttagtgatggcattcctcatggtgccaggcagctctgcctttctctgggtggctttatcggaaaagtcctaggttgagctgaaatcagcatcccggttctagacgcctccccaacccatttgttcagattccacgcctcaggaaaagtaccttacagccccacagagatttggaaacaatggccaggataccctgtgtttttcttcccctggattctcattccagcaataggtctcccggtgggcttttcagacgaaattgctt

SEQ ID NO: 427667 - DNA, 519 bp, Homo sapiens
tccaggctcatctcgaacctctgggctcgaggggatcctcccaccacagtctctcaaagtgcagggattacagaaataagccaccacatttggccaaagttgtaaattttgcttattagtatgtgaatgctattttcaaactactcttaggcaccttttcaaagaaaccagaccatattttttttatctttcatatttttgatgtgtttataattcaatgagatatacaattctacataaaaagataaacactattgggtcaaatcagaaaagtatattttaattaacattttaagactgataagamgcaaggtattcaaagctgctgtccttatacaacctcccttgctcctactcagggacacaaggatctattttgagttgaaaccagcaggagcagtgtctgttctgcagccagcgcaacctatcagctcaaacaattactccttcctgatccacctgaattccctaatcaggctggatacatcaaaaaaaagtactgaattctgacaatcgcta

SEQ ID NO: 427668 - DNA, 631 bp, Homo sapiens
attcatcaatagcgaaaggatttaaaacagacacaggctaactggtgtgtgtgtgtgtgtgtgtgtgtgtgtgtgtgtgtgtgtgtgtgtgtgtgtgtcataaagacactgtctcactatattgtcccgggtggtctagaactcctggcctcaagtgatcctcccccactgcctcccaaagtgctgggataacaggcatgagccaccacattcagcctaattttatgtatttaacatcgtacatcaacatactattttcagagtgaacacaatttttatcttcttcctgagtattttccagcaggtcacttgatagctttggcatatatgctttttacatrtgaaacaaacattcctaacaattaggaacaattacaaatcaactcaaagcaacagtgtccaaaacacacccatatgtattatacacacacaagaaaccaccacaggactaagcactgtaggaagtcagggagggcagagaatagggtggcctgcgataacctatataaattagctttcactgctactgatggcagtaactgcagtagtatgatcatcaccatcattgcttttgttgcaaatccatgcattggctgatgtgggaaaatctcaacattataaacagtgtagt

SEQ ID NO: 427669 - DNA, 631 bp, Homo sapiens
attcatcaatagcgaaaggatttaaaacagacacaggctaactggtgtgtgtgtgtgtgtgtgtgtgtgtgtgtgtgtgtgtgtgtgtgtgtgtgtgtcataaagacactgtctcactatattgtcccgggtggtctagaactcctggcctcaagtgatcctcccccactgcctcccaaagtgctgggataacaggcatgagccaccacattcagcctaattttatgtatttaacatcgtacatcaacatactattttcagagtgaacacaatttttatcttcttcctgagtattttccagcaggtcacttgatagctttggcatatatgctttttacatgtgaaacaaacattcctaacaattaggaacaattacaaatcaactcaaagcaacagtgtccaaaacacacccatatgtattatacacacacaagaaaccamcacaggactaagcactgtaggaagtcagggagggcagagaatagggtggcctgcgataacctatataaattagctttcactgctactgatggcagtaactgcagtagtatgatcatcaccatcattgcttttgttgcaaatccatgcattggctgatgtgggaaaatctcaacattataaacagtgtagt

SEQ ID NO: 427670 - DNA, 654 bp, Homo sapiens
accagcttgactgtgactgtcacttccccataagaacaaagaggtaaattcattgccgatggctaatgaccaacagttctttgcagcataaattcctataagctcttgtttggtctgtcaggatcagagcagattaatgtttttaaggagggagcagaattcctggtggtctctcacttgtttattcatttattcaataaatatttattgaggacttaatatgtagttaggtgataaagttacttgctttctggtcttaacgatmttacagggtaatggaagttattgaaatttaaacagacaattgcacagcagtgtgaaaagttttattattgtaaaaatgcaaaatgtagtgaaggaccttactagatttgggcatgagacttagcagtgtgggacagtagaaaaactttctggaagaaacagtgcctaataatgcctaatctgagccctggagagctagctgggagggagggttcagaagaatgaacagcatgctctgtggcctggcagtggagagaactgtaaggtctaggaactgaaatttcagtagagctggagcgtgaagcatgaagagggagctctgagtctcaagaagttctaggttctaggaagcctcccgtcttttggagctgtgctgtctgtgtggtgact

SEQ ID NO: 427671 - DNA, 568 bp, Homo sapiens
taaaacaaaccaagattttagttatgttacgcaatataacctcaggctaaatgaatcaaatttaactgagaggaacaacagtgaaactggagagccatgacatatcacagtgtttaatrtaatgcagatggccaggttcaaataaaagttctgccatttattactcttatgactgtgatcagttactcaacctctgtgcctcagatactttatctgtagaggaaaaaattagtacttccctaaattaatgtatgtaaaacattccctaagcacatactaaatacgaaaggtacagtagttaaacatgcacaagattaactgtggttctagataacataaatataacattgtcagtccataatctcagtgtagctgtttagcgggaaacaaaaaaatatggatctgtgatgaataatcctcttgaggtgcaaaaagcaagaaatagaagtggagagaaaagaaaactctccaggaactcaaagtccaggcaactgtggtctaaacagcaaaagatattccatagttcttaaaagctgccagctcaactatgaaaggcaggcagatcttc

SEQ ID NO: 427672 - DNA, 614 bp, Homo sapiens
aaaaaaaactactcagtttatgtataaytggagtactaaaaggtgaaaaaagagaaaaggggtgataatattggaagagatattgacagaaaattttccacaactgataaaagatatcaacctacagatcaaaaaattgcagcaaactctaaacagataaatataaataaaacatacctggctacatagcaatcaaaattctggaaaccaaataaaaagaacatatcttaaaatcagagaaaaaaaaagccacatttagtaaacaattatatgagttacaagtgacatctaacctgaaatcgtgaaggcaaataggtaatggaataatatctattaaatactacaagaaaaagcagccagcctaaaagtctacctcccaagaaaacaacttttaaaaaaagaggaaaaatagaaacactctcagtgtgataaaaatctaacagaatttgtccccaggagatccacatcataacaaatgccaaaataaagttcttcagaatgaggaaaatgaaatcacacgttaccaaggatcagcaggaaggaatgaagaactccaaaaatacctgggtaaatataaaatcattttttagtatcttcaacaaacagacacacag

SEQ ID NO: 427673 - DNA, 585 bp, Homo sapiens
taacattgtccattaaaatttaaatgcacagaaataatgactcagcaggctgacttcttataatctaacctaaatatttgaatctatggagaaggactatataacgactataatttcatttctgtttataatggagaaaatagttacctctggtgggaactggaattatmagaagccaaaattttatttgtaatgtcaaaatttttataacaaagcttaaaatttcaaacagtaatgaaaacgacatggtaaatccacagccactgggatactaagaattaaaacaagtagtatgaagggaaaacactaaggaaagttaaataaattgtgatatcatttgggtcccatacagcaagccataacaccagattataatacatagaaaagagctgaaaggccaactgacaaaacagcttaagtagttttctgtaaaaaatgaaatttgagattttgagagtgttggaaatgggagactttcttgataatatctagttcctttgtattaaagaaagcaaactcacagacacacacataaagaaattaaacctttttacaagaaacgtacaatttaaaattaatgtgact

SEQ ID NO: 427674 - DNA, 586 bp, Homo sapiens
attacccaaggcaatctacagattcaatgcaatccctatcaaaacaccaatgacactcttcacagaaacagaaaaaaataaccctaacatttgtatggaaccacaaatgatcccaaatagccaaagcaagcttaagcaaatatcaaagctagaggcatcacactactagacatcaaaatatactacaaagctgtagtaaccaacaacagcatggaactggcataaaaacagacacatacatcaagggaacagaatagagagcccagaaattaccccacatatctacagtcatacgatttggacaaaggtgccatgaacactcgttagggaattgacagtctcttcaatgaacagtgccggaaaaattggatatccacatgcagaagaatgaaagtagactcccacttctcaccctatacaaaaatcaacttaaaatgaatcaaagacctaaacctaagatctgaaacaataaaactatgagaagaaaacataagggaaacacttcaggacattggtctgggaaaygattttatgaataaaacctcaaaagcaagggcaacaaaagcaaaaataaacaaatgggata

SEQ ID NO: 427675 - DNA, 592 bp, Homo sapiens
tctctctgtaccattctggtgggctaaggtggaaagaaaccttctaatgcccattccaggaggattcattcataatttaagcctttcctgagtataaactcaggccccatgtgaggctgtagtgacacaaacaagtcagagtctttgtcctggaggcacggcagaatctctagagaaggtggtttcagaagcatttatttgatgcctttgttctcagggccaccatgatgcttttcacaggggcaaaggccaggctaagtggaaaacacctgatatctagatatcgaccaccaaaacacctttctaaaaagtccattagccggcaactagctctctgggttcctgctctgattcaatttctaaaggagcaagcacaagagatatataatgttcatcctgtcccttgaatttcggaggtaatacatgcctttccgtaccagcacctggtctatcttctacyattagcccctctgaactcatctccaaggctttagacacatgctttgcaaatagtggaaatcccaaggattcatcaacacgaacatttcctcatgcagcgtaattatcgtacttccagatttccccattatcc

SEQ ID NO: 427676 - DNA, 457 bp, Homo sapiens
aagttggcatcttttcatcttgaagtgtcacatgtcctttcttgtcttctcatcctacactggtgtagtgggtcastgaaattataatgtctgaagaaacgtaagaaattcctgtttcttctgaaatgatgttctgaaatatcattttggctctcttagccattcctgggcagacctggcactcggacgcttttgcttggagcaggagacatggagaagtgaaactttcttctttgcaagcatcagataccttaatgagttattttccattttgtttgtccctcgagtgggccttttagttaagtttgttcacctttccccatacatttctcaggaattagaagaaaatgcaaaatttggaaatccttaaattcaacaacttttaattataccttaaaaatgtcatgtttattacatatttggagaacagagcagtgtccttactgtatctgagaaa

SEQ ID NO: 427677 - DNA, 457 bp, Homo sapiens
aagttggcatcttttcatcttgaagtgtcacatgtcctttcttgtcttctcatcctacactggtgtagtgggtcactgaaattataatgtctgaagaaacgtaagaaattcctgtttcttctgaaatgatgttctgaaatatcattttggctctcttagccattmctgggcagacctggcactcggacgcttttgcttggagcaggagacatggagaagtgaaactttcttctttgcaagcatcagataccttaatgagttattttccattttgtttgtccctcgagtgggccttttagttaagtttgttcacctttccccatacatttctcaggaattagaagaaaatgcaaaatttggaaatccttaaattcaacaacttttaattataccttaaaaatgtcatgtttattacatatttggagaacagagcagtgtccttactgtatctgagaaa

SEQ ID NO: 427678 - DNA, 457 bp, Homo sapiens
aagttggcatcttttcatcttgaagtgtcacatgtcctttcttgtcttctcatcctacactggtgtagtgggtcactgaaattataatgtctgaagaaacgtaagaaattcctgtttcttctgaaatgatgttctgaaatatcattttggctctcttagccattcctgggcagacctggcactcggacgcttttgcttggagcaggagacatggagaagtgaaactttcttctttgcaagcatcagataccttaatgagttattttccattttgtttgtccctcragtgggccttttagttaagtttgttcacctttccccatacatttctcaggaattagaagaaaatgcaaaatttggaaatccttaaattcaacaacttttaattataccttaaaaatgtcatgtttattacatatttggagaacagagcagtgtccttactgtatctgagaaa

SEQ ID NO: 427679 - DNA, 457 bp, Homo sapiens
aagttggcatcttttcatcttgaagtgtcacatgtcctttcttgtcttctcatcctacactggtgtagtgggtcactgaaattataatgtctgaagaaacgtaagaaattcctgtttcttctgaaatgatgttctgaaatatcattttggctctcttagccattcctgggcagacctggcactcggacgcttttgcttggagcaggagacatggagaagtgaaactttcttctttgcaagcatcagataccttaatgagttattttccattttgtttgtccctcgagtgggccttttagttaagtttgttcacctttccccatacatttctcaggaattagaagaaaatgcaaaatttggaaatccttaaattcaacaacttttaattataccttaaaaatgtcatgtttrttacatatttggagaacagagcagtgtccttactgtatctgagaaa

SEQ ID NO: 427680 - DNA, 382 bp, Homo sapiens
ataaacttcagtccttgataggaggatctacaaagtcgtatgcacaggatgtggaaacggggaggagtgaagatttttgggcagtttggaaatttaccacagtgtacacgtgtgtwtacatatgtgtacgtagatgaaaagtgagagcatatacattctgcatttttatcaccagacatgctccaaatccaagttactaatccaaccctgtggatatattggggaaagtaagtaaatcttaaatgggaagtgcctcaacaagtatctagaacaataccttccattcaatcaatggaaggcttaaaaaaaaaaaaggaaatgtaatttctttaggccactgcttgaattctattggtgttacttcctggttggctttatttcc

SEQ ID NO: 427681 - DNA, 382 bp, Homo sapiens
ataaacttcagtccttgataggaggatctacaaagtcgtatgcacaggatgtggaaacggggaggagtgaagatttttgggcagtttggaaatttaccacagtgtacacgtgtgtttacatatgtgtacgtagatgaaaagtgagagcatatacattctgcatttttatcaccagacatgctccaaatccaagttactaatccaaccctgtggatatattggggaaagtaagtaaatcttamatgggaagtgcctcaacaagtatctagaacaataccttccattcaatcaatggaaggcttaaaaaaaaaaaaggaaatgtaatttctttaggccactgcttgaattctattggtgttacttcctggttggctttatttcc

SEQ ID NO: 427682 - DNA, 598 bp, Homo sapiens
aaaaaaaaacctttgaccttattaatattcatcttgtttgctcagatgatgctatgaagcctaaacagaaacagcagataagccatggtcaaagaggagtgtgctccgagactggaggatggtactgctggacaaacttgctaaacagatgaagtatgtgactcgtggatccaatcaaccatgtcagcagaagccaggaagagagaatgtggttatccaggagagagctgtgcaggactgtcttgcttgatgcttggatgtccaygaactacacagaagactgacaaggattttgagacttttataccagcagaaatgctgccagcctgaactgaaaggaacagagacagaaaaaaagaaaggaatgactccaaggacaagccacagatgcagaacgactgagtggacagaacctcactgggctattacaacagccctaacaaactacccttcaggaggtacagaaacatgccaccatgtgtcgtaagatttgttacttgaggattaaatcaaccagaaaacccacctatactaaatttttctaaataacctaaacccaccaacaattacaatctcagtaatggtataaaagataata

SEQ ID NO: 427683 - DNA, 574 bp, Homo sapiens
aattataaagcaatttaaggtatgggactagaaactcaatctttctgacccatgagagcactgttcaaatagacaaagaaaaactatgcaaaaagaaggggaatggattcaaatagtttgctccggggtctccaaaagattcagtagaaattatttttagaatttctgcttctcagcacttacctgaatatctgatagaaaggttgtggaagttcagagttasagatattaaacaatccactcctgctgtgccatgtaaaacagcatgaaattgaactctttagtattcgggggtagataaagttgttttgttctgaattcatgcactccatgtcacagtttatatggatgataaatctgaggaagatcagataaaaatagggctctgcacactcttagagatctaaattccttgtaaacataaatatttgtatgagtctatatgatcacatatgaaaacagacaggcagggtgcggtgggtcacgcctggaatcccagcactttcagaggccgaggcgggcagagcacctgaggtcaggagtttgagaccagcctggccatcatggtgaaact

SEQ ID NO: 427684 - DNA, 606 bp, Homo sapiens
agaatagcacagtatagtggtatccatttaggatggctgcttcagcagcaggcaaacaagattacaagagaaagaaaatgaatagagctgaaattatagctttggtcactgatatagatttggtcactgaagaaaggatgtgagaaatattgcattccaatcagyaggacttggcaattaattggttgggagaggcaacaaagagtcacaccttcagagctgcaggcctgagtgtctgagaagatgctggtacattcaaggaagcacagaaacagcagttcacgggctagaaaatatggtagtcagttcagtttcatgcatggcatattttaaacttttaatttaagtttaggggtacatgtgcaggtttgttacataggtaaacttctgtcatgggggtttgttgtatagattatttccttgcccaggtattaagactagtacccatcagttgtttttcctgatcctctccctcctcccaccctctaccctcctataggccccagtgtgtattcccctctatgtgtccatgagttctcatcacttagctccaacttgtaagaaagaacatgtggtatttggttttcccttcctgtgttagtttgc

SEQ ID NO: 427685 - DNA, 606 bp, Homo sapiens
agaatagcacagtatagtggtatccatttaggatggctgcttcagcagcaggcaaacaagattacaagagaaagaaaatgaatagagctgaaattatagctttggtcactgatatagatttggtcactgaagaaaggatgtgagaaatattgcattccaatcagcaggacttggcaattaattggttgggagaggcaacaaagagtcacaccttcagagctgcaggcctgagtgtctgagaagatgctggtacattcaaggaagcacagaaacagcagttcacgggctagaaaatatggtagtcagttcagtttcatgcatggcatattttaaacttttaatttaagtttaggggtacatgtgcaggtttgttacataggtaaacttctgtcatgggggtttgttgtatagattatttccttgyccaggtattaagactagtacccatcagttgtttttcctgatcctctccctcctcccaccctctaccctcctataggccccagtgtgtattcccctctatgtgtccatgagttctcatcacttagctccaacttgtaagaaagaacatgtggtatttggttttcccttcctgtgttagtttgc

SEQ ID NO: 427686 - DNA, 474 bp, Homo sapiens
tagtcagttcagtttcatgcatggcatattttaaacttttaatttaagtttaggggtacatgtgcaggtttgttacataggtaaacttctgtcatgggggtttgttgtatagattatttccttgcccaggtattaagactagtacccatcagttgtttttcctgatcctctccctcctcccaccctctaccctcctataggccccagtgtgtattcccctctatgtgtccatgagttctcatcacttagctccaacttgtaagaaagaacatgyggtatttggttttcccttcctgtgttagtttgctaagagtaatggcctccagctctatagcatacgtggcatttttaaatctgttttgaacatttaggttaaatccaacagatattggaaacatggagccagagttcaagagagagattgaagctagtaagaatcctggcagagggaggccatactgtttattaaagccc

SEQ ID NO: 427687 - DNA, 553 bp, Homo sapiens
gaggttgaaattttttttcctgatagggggtcagaagaaaaaaataatcttgtacctggctgctcttgcagataaccccaagagagaggaactggcctgctgtgcaaaygaggttcaagaggatgattctatcctcacttaactctttttgctagaataatttattttacaataaaagtaatatatgttgcttctcacggcctcctaccaactcatctgggaagcaagctccacgcttcagagtgggtgggctcttgaagcatgagaccatgaaagcaggaatttgtgagtgatatatttaatagaacttatttggatatttcctcaatgtaaaatagcactattcattataggcaatgcagaaaataaagtagagagatggaagcaagcatctactacctcatcatccaaatcatgttattttagcatttggggatgattgacaagtggatagaaactgcagccgtgtttttatccagtgaggtttctctttgggtctgcagtctaaggagtggatctgggcactcacaggacatttcagccattggcatat

SEQ ID NO: 427688 - DNA, 583 bp, Homo sapiens
ggatgaaaaagctattgacttacaaggtaagatttgtgatcctctgtatttatacaccgtctgtctgcaagttgagccctggctacgtatctgtaaccctgatagcagataacttacaatgaatgtaatagctccatttttcttcttgatcctaattgtttagaatgctggctatatatttaacacaattaataaaactgttaagaattaagagggtgaatattttatcaccattttagggcggaaattcattggctttaaccaactactttgaatcagaaataaaattaaaagcaagagcctgcgcaagaaagataaacttatgattcactgcatgttgcagcagccacaggaggttgaaattttttttcctgatagggggtcagaagaaaaaaataatcttgtacctggctgctcttgcagataaccccaagagagaggaactggcctgctgtgcaaatgaggttcaagaggatgattctatcctcacttaactctttttgctagaataatttattttacaataaaagtaatatatgttgcttctcacrgcctcctaccaactcatctgggaagcaagctc

SEQ ID NO: 427689 - DNA, 553 bp, Homo sapiens
gaggttgaaattttttttcctgatagggggtcagaagaaaaaaataatcttgtacctggctgctcttgcagataaccccaagagagaggaactggcctgctgtgcaaatgaggttcaagaggatgattctatcctcacttaactctttttgctagaataatttattttacaataaaagtaatatatgttgcttctcacggcctcctaccaactcatctgggaagcaagctccacgcttcagagtgggtgggctcttgaagcatgagaccatgaaagcaggaatttrtgagtgatatatttaatagaacttatttggatatttcctcaatgtaaaatagcactattcattataggcaatgcagaaaataaagtagagagatggaagcaagcatctactacctcatcatccaaatcatgttattttagcatttggggatgattgacaagtggatagaaactgcagccgtgtttttatccagtgaggtttctctttgggtctgcagtctaaggagtggatctgggcactcacaggacatttcagccattggcatat

SEQ ID NO: 427690 - DNA, 553 bp, Homo sapiens
gaggttgaaattttttttcctgatagggggtcagaagaaaaaaataatcttgtacctggctgctcttgcagataaccccaagagagaggaactggcctgctgtgcaaatgaggttcaagaggatgattctatcctcacttaactctttttgctagaataatttattttacaataaaagtaatatatgttgcttctcacggcctcctaccaactcatctgggaagcaagctccacgcttcagagtgggtgggctcttgaagcatgagaccatgaaagcaggaatttgtgagtgatatatttaatagaacttatttggatatttcctcaatgtaaaatagcactattcattataggcaatgcagaaaataaagtagagagatggaagcaagcatctactacctcatcatccaaatcatgttattttagcatttggggatgattgacaagtggatagaaactgcagcygtgtttttatccagtgaggtttctctttgggtctgcagtctaaggagtggatctgggcactcacaggacatttcagccattggcatat

SEQ ID NO: 427691 - DNA, 624 bp, Homo sapiens
gaaggatgccataactctaaggcaaacaagacactgaaatggaatttgaggtgaggggaaagaaactgagttacaccaatccactcattcattctttcttaattcattcaataacagcaacttctagcccaagcaccatgcgaggtgcctgggaatttaagagtaagcaaaatagacactgtccttgcaacatggaatttagtaggaaagaraaacattaatcaaaggagcacataaattagtcaatgattgatttaagccatgctaaattactgagaagtaaaatatagcataatctaggagcctggcaggagacctgatctgaatggggaaagaaggtctgtctaagatctgaatgagataaatgagttaaagggaagttgatgaggatgttagagaagagcattttagggggatggggctgcaggtgcagaatccccgaggctagacagaggggagtgcaactgtctcatcaactatgacattggaaagccaggaaaatgggaatgagagtcagacaagtaacaagatagagggttttgatcactagacattctagataaaccatttctcagaagaagaaaaatccaaagaatgtcatactgtagggagagctgtacttcc

SEQ ID NO: 427692 - DNA, 624 bp, Homo sapiens
gaaggatgccataactctaaggcaaacaagacactgaaatggaatttgaggtgaggggaaagaaactgagttacaccaatccactcattcattctttcttaattcattcaataacagcaacttctagcccaagcaccatgcgaggtgcctgggaatttaagagtaagcaaaatagacactgtccttgcaacatggaatttagtaggaaagagaaacattaatcaaaggagcacataaattagtcaatgattgatttaagccatgctaaattactgagaagtaaaatatagcataatctaggagcctggcaggagacctgatctgaatggggaaagaaggtctgtctaagatctgaatgagataaatgagttaaagggamgttgatgaggatgttagagaagagcattttagggggatggggctgcaggtgcagaatccccgaggctagacagaggggagtgcaactgtctcatcaactatgacattggaaagccaggaaaatgggaatgagagtcagacaagtaacaagatagagggttttgatcactagacattctagataaaccatttctcagaagaagaaaaatccaaagaatgtcatactgtagggagagctgtacttcc

SEQ ID NO: 427693 - DNA, 624 bp, Homo sapiens
gaaggatgccataactctaaggcaaacaagacactgaaatggaatttgaggtgaggggaaagaaactgagttacaccaatccactcattcattctttcttaattcattcaataacagcaacttctagcccaagcaccatgcgaggtgcctgggaatttaagagtaagcaaaatagacactgtccttgcaacatggaatttagtaggaaagagaaacattaatcaaaggagcacataaattagtcaatgattgatttaagccatgctaaattactgagaagtaaaatatagcataatctaggagcctggcaggagacctgatctgaatggggaaagaaggtctgtctaagatctgaatgagataaatgagttaaagggaagttgatgaggatgttagagaagagcattttagggggatggggctgcaggtgcagaatccccgaggctagacagaggggagtgcaactgtctcatcaactatgacattggaaagccaggaaaatgggaatgagagtcagacaagtaacaagatagagggttttgatcactagacattctagataaaccatttctcagaagaagaaaaatccaargaatgtcatactgtagggagagctgtacttcc

SEQ ID NO: 427694 - DNA, 603 bp, Homo sapiens
actggcagcacatttcagtgacacagtatgggtcacaaaacttgcttacttgtgtgacatattcaacctgctcaacaaattcaacctgtcactttgggggagaacaacarctgggttcaagttggcagataaagtggcagcattcaaagccaaactaaaattatgggggccactagtgaacgtggggatttctgacatgtttcaaacattaggagagactttgagagagaatgagccagggccttctttctttcagctggtgggtgatcacctatctcagctttcaaaagagtctgagcattacttcccaaccacaaaagacccccagactgggaaggaatggatacacgacccatttgtgaataagccaggtgaattgactttgtccacgctagaagaggatcaactgcttgacactgcaagtgacagtggccttaaaaggatgtttaagacaacttcaaatcctaactgtcaaggtggaatatccggcaattgccacaagagcactgaaaagcctgtttccatttctaacatcctacctttgtgaaacagggttttctgcagtgacagcaaataaaacgaggttacagagtagactgaatg

SEQ ID NO: 427695 - DNA, 603 bp, Homo sapiens
actggcagcacatttcagtgacacagtatgggtcacaaaacttgcttacttgtgtgacatattcaacctgctcaacaaattcaacctgtcactttgggggagaacaacagctgggttcaagttggcagataaagtggcagcattcaaagccaaactaaaattatgggggccactagtgaacgtggggatttctgacatgtttcaaacattaggagagactttgagagagaatgagccagggccttctttctttcagctggtgggtgatcacctatctcagctttcaaaagagtctgagcattacttcccaaccacaaaagacccccagactgggaaggaatggatacacgacccatttgtgaataagccaggtgaattgactttgtccacgctagaaraggatcaactgcttgacactgcaagtgacagtggccttaaaaggatgtttaagacaacttcaaatcctaactgtcaaggtggaatatccggcaattgccacaagagcactgaaaagcctgtttccatttctaacatcctacctttgtgaaacagggttttctgcagtgacagcaaataaaacgaggttacagagtagactgaatg

SEQ ID NO: 427696 - DNA, 603 bp, Homo sapiens
actggcagcacatttcagtgacacagtatgggtcacaaaacttgcttacttgtgtgacatattcaacctgctcaacaaattcaacctgtcactttgggggagaacaacagctgggttcaagttggcagataaagtggcagcattcaaagccaaactaaaattatgggggccactagtgaacgtggggatttctgacatgtttcaaacattaggagagactttgagagagaatgagccagggccttctttctttcagctggtgggtgatcacctatctcagctttcaaaagagtctgagcattacttcccaaccacaaaagacccccagactgggaaggaatggatacacgacccatttgtgaataagccaggtgaattgactttgtccacgctagaagaggatcaactgcttgacactgcaagtgacagtggccttaaaaggatgtttaagacaacttcaaatcctaactgtcaaggtggaatatcyggcaattgccacaagagcactgaaaagcctgtttccatttctaacatcctacctttgtgaaacagggttttctgcagtgacagcaaataaaacgaggttacagagtagactgaatg

SEQ ID NO: 427697 - DNA, 613 bp, Homo sapiens
aatgaactcatattggatggtgaatgcatatccagcacaaaagttttcttcctgatctttaacattaagatccatccaaaaaaaaaaaaaaaaacactcaaaaaggattttgaaaaggaatgtcctgtaaatcaagatgggaaataatgactgattgagaggttaccattttacagtcatgtggttgaccttcatcaaataagggtaacaaagtaggattgggagcatgatagcatttcaaatgargattaaacagtgagattaaaaggatttcataagagattggtctgctctcaaaaagatgttggacacagctagaattgagaagactgtactgcaagtggtgtgtggggatacacagcattacctaagatcagatttccagaagctacaaccagtttttccaacacatctagctttaaggcaatttgggtatgccctagtgactgagtttaattaagcactataataatccatggcccaagctttccaccatgtagctgtgtgaccattcccaaagtctggttattactctcttgcacaaacagggtggaaggttttgaataattgagcaatcccaaagcaggggagctttgttattttgtaatgccct

SEQ ID NO: 427698 - DNA, 586 bp, Homo sapiens
ttttgtcagaatctattaatatttttcaaactcaagaagtgagtttaccatgatattctatcaaaaaactgctgcctaaaaaatgccaaaaaacagaaaattttaacaatgccaaccaaataaaacctatcaatgtttccttaaattatatttcaactaggtttttttctgtgcatgacctgaaggcatataattaatggaggtaaatcaattggcaaataagaatgtaaatgaatatgggtatatatttatctcctatggtttstgttttaaatgatgattaaccatcagcctaaaggtgataaaagacttatttcacttcatggtaagaccatagatataatttcaggaacagaaaataaaaatgtcaatgtcaacaaataataatattaacatgtattacatacctgctatagtctagggactatgctatctgctttaaattgaattttcctcacttaaactttactgcatccatacagatgaggaaattgggctaaaagaaggtagatgacttgtccaaagccatatagctaataaaaggtaaaggcaggattcatacccaacaatatctgatgataaatta

SEQ ID NO: 427699 - DNA, 606 bp, Homo sapiens
ctttgctcagcattttgagagtgtagtttgagaagaacaattatcagaaaaagaaattcataatatgctcacttaattactgttcaatgcacatctagtacttgtgaattaccataagtttttagatggtttaactttcaaggagctgaatatcttgcaggtcaaatatgaaatcaagtagtcagtctactgagagccaaactgaagtccaaaattgcagaatatattttgctttakgtcatgtaccaaatgactaataggcagcgaaggttttcaggattataattttagcccaaggctctggtaactacatgaaatctttgagtggtttatgatatcttaagctgaaattatagctccccatgggcaaaagttgttgaaatgctttcagccattgagtactgtaattaacctgtcctctatagcaattataggaaaaactatattgaatgcctagtcatattgactaatgactttaagtatacaaattactttttaaatgagaatggcaggaaggaaattcattcacccatcaattccataaatatatatgtcaccatatgtattttgtctgtttgccattaagataaaggctaggaatacaat

SEQ ID NO: 427700 - DNA, 606 bp, Homo sapiens
ctttgctcagcattttgagagtgtagtttgagaagaacaattatcagaaaaagaaattcataatatgctcacttaattactgttcaatgcacatctagtacttgtgaattaccataagtttttagatggtttaactttcaaggagctgaatatcttgcaggtcaaatatgaaatcaagtagtcagtctactgagagccaaactgaagtccaaaattgcagaatatattttgctttaggtcatgtaccaaatgactaataggcagcgaaggttttcaggattataattttagcccaaggctctggtaactacatgaaatctttgagtggtttatgatatcttaagctgaaattatagctccccatgggcaaaagttgttgaaatgctttcagccattgagtactgtaattaacctgtcctctatagcaattataggaaaaactatattgaatgcctagtcatattgactaatgactttaagtatacaaattactttttaaatgagaatggcaggaaggaaattcattcacccatcaattccataaatatatatgtcaccatatrtattttgtctgtttgccattaagataaaggctaggaatacaat

SEQ ID NO: 427701 - DNA, 562 bp, Homo sapiens
tcccactaacaagacagaatattggcatttctgctatacaaaaaccactaaaaagaaaagggggagagggagggagagagaaaaacaaaaaattcagaaaaaataaaataaaataaagagtattaaagaaacaatgagccaactgtagattaacccacatgccagaaacagtgagaatactggagggaagggagccagaggaagaggtgtaaaatgagaataatttaggaaatcagagagtttaggggaaagccctgaaaaaataagaaatatacacatggaaaaatacaaatgtaaactatgtatagtaaataattcagataactggaggtctatggacattgtgaaatatcaaaattggctgtaagagttctraaagacaatccaaagagagaatagcttagggctcttgaatgaaaaagagcagaaaaaaaaaaaagactacataagtgtgaacttgtgacaaatgcaaaagtgtagaactctggagaatgtgagtttttaattagaagattcgtcgtagatatgaatcacattaagaaaagataggattactgaacat

SEQ ID NO: 427702 - DNA, 569 bp, Homo sapiens
gacagagaaaataaaaaatgataggatttttgaagtttcatcaatgtgcaatttacaatggacacacttaaaacagacgtaagctaaaaaattaaaagcttaattaacatagttcaataagtatagaaattattttgaaatgtattttgtcactttagagttcatcataaattcaaaaatagtaaaagtaatctattttctctgaaaagctctgtgctaagtargcattacaatgatattatgaaaataatgaaaaattctaggcatttttgcactaaatgcttcaatatagttataaaaagaaggaagctagtccttggcaattataattcttttaaatcttgctcagatgaaattcctgacacaagtggcatgtgatgactgaagttttaataaccattcatacttggaacattttatgcattaataatacttggagtaaaaatgaacagcattttccaaatacaataactcaaaaataaatggaaacatttgtgaaaatgtttcatttttgaaaatctccttgggctgagtcaaaccatggaaaattttagctcaaacgaaaattc

SEQ ID NO: 427703 - DNA, 569 bp, Homo sapiens
gacagagaaaataaaaaatgataggatttttgaagtttcatcaatgtgcaatttacaatggacacacttaaaacagacgtaagctaaaaaattaaaagcttaattaacatagttcaataagtatagaaattattttgaaatgtattttgtcactttagagttcatcataaattcaaaaatagtaaaagtaatctattttctctgaaaagctctgtgctaagtaagcattacaatgatattatgaaaataatgaaaaattctaggcatttttgcactaaatgcttcaatatagttataaaaagaaggaagctagtccttggcaattataattcttttaaatcttgctcagatgaaattcctgacacaagtggcatgtgatgactgaagttttaataaccattcatacttggaacattttatgcattaataatacttggagtaaaaatgaacagcattttccaaatacaataactcaaaaataaatggaaacrtttgtgaaaatgtttcatttttgaaaatctccttgggctgagtcaaaccatggaaaattttagctcaaacgaaaattc

SEQ ID NO: 427704 - DNA, 565 bp, Homo sapiens
tttaaattccatgtataggagcaagtaatcctgacaagtaaactcagtaaacctaacaagaattaggtgatcctggtaggaagggagtttgagrgaatgttactagtaataatattcttaaagattcctaatcaggcaaaagcaaaaaatcaaaatgaagttctcacagaaaaaaaaaattgatagagctttatgcagcatgagtaaatccctcattcctcgggggaaatatcaaatatgatgagatgatcatgggaaaagaacttcagcttagttttcaagatataagagaaagaggatattgatatgtttaatgatacaaagacagttcccagggggaaaaattaattttaaggccttgtagtacaaaatagatattcacatagacagatatgattaatggaaggcaataaatagggggaaaaagaaaaggtaatagggcaatttaaaagaaaaaaaagagaggtagatatacaaagagacaaattgatgagtgaaaaatgattgaagtagaaaataatatatggtctataaataactaggtcatgaaacaagacacttgagg

SEQ ID NO: 427705 - DNA, 580 bp, Homo sapiens
ccacaaattccatgtgctcacatggagaactctcctggcctggaaacaattataaggcaaggattaagttccagtgctcattttagtctttaccrgactgtgaaacaatggcaggacagcaatatagttttatggcagcttttgagctctggtgcttttgataagtcttcctcagaattaagaacaatggaaaggcatcaatttagttcaagagtagtatttaagttctggtttccattatgtcttcctctgatggggaaacaatgacagggcagtgagttaagttcaatgcaatgttttagttccagtgctcactataagttcttcccataatgggaaaaaaaaacagtccagtgtttaagtctgacattagaagtaaagttctaacaccaccaaacaacacccacaaaaactggaagagatggctgtctcctcaaatgtacaggcatcgaagtaaagattcaaggattgtgaaacttggggaaatactacatcaccaaaagaaactaacaaagctccagcagtgacaaaaaaggtcattacataatgataaatgtgtcaattcagcaaaaggatataa

SEQ ID NO: 427706 - DNA, 525 bp, Homo sapiens
tcaacattgtgccaggtctaaatcctacacgtattacctatttatcatatgtattctgtctccttcaatagaatataagctgcatagattgtggtcttacttcactactacacccccagcacctaggacagtgcctggcacatagtgagtattgtggaataaatagatgattgaatgtgtgatgtgttgctcattttatgatgaataaataagaaaatactttaattaggatgtcaacattttgcatgcaaatatggcttctaaaatayatattaaatatattaaatattgatcttgcttatactgtgaactgtctcaaaaacattttctaagtaatttgcaaagtgcagattttatctcagctgttatgcaaattacgtattcttaattagtgacatattgggagattttaataaagaaaaattcattagtaagcctcattcttttaaggagaatggtatcttgggaggtttgttgataaaaaagatgaatacctgaactactttgttaaacactcactaaaca

SEQ ID NO: 427707 - DNA, 525 bp, Homo sapiens
tcaacattgtgccaggtctaaatcctacacgtattacctatttatcatatgtattctgtctccttcaatagaatataagctgcatagattgtggtcttacttcactactacacccccagcacctaggacagtgcctggcacatagtgagtattgtggaataaatagatgattgaatgtgtgatgtgttgctcattttatgatgaataaataagaaaatactttaattaggatgtcaacattttgcatgcaaatatggcttctaaaatatatattaaatatattaaatattgatcttgcttatactgtgaactgtctcaaaaacattttctaagtaatttgcaaagtgcagattttatctcagctgttatgcaaattacgtattcttaattagtgacatattgggagattttaataaagaaaaattcattagtaagcctcattcttttaaggagaayggtatcttgggaggtttgttgataaaaaagatgaatacctgaactactttgttaaacactcactaaaca

SEQ ID NO: 427708 - DNA, 525 bp, Homo sapiens
tcaacattgtgccaggtctaaatcctacacgtattacctatttatcatatgtattctgtctccttcaatagaatataagctgcatagattgtggtcttacttcactactacacccccagcacctaggacagtgcctggcacatagtgagtattgtggaataaatagatgattgaatgtgtgatgtgttgctcattttatgatgaataaataagaaaatactttaattaggatgtcaacattttgcatgcaaatatggcttctaaaatatatattaaatatattaaatattgatcttgcttatactgtgaactgtctcaaaaacattttctaagtaatttgcaaagtgcagattttatctcagctgttatgcaaattacgtattcttaattagtgacatattgggagattttaataaagaaaaattcattagtaagcctcattcttttaaggagaatggtatcttgggaggtttgttgayaaaaaagatgaatacctgaactactttgttaaacactcactaaaca

SEQ ID NO: 427709 - DNA, 533 bp, Homo sapiens
atatgttttgctaagagcctacacttacatcatctgatttttcaaaatacctactgygttccactctacatttcaatttaatttcttttaatttgaaatgtgtcttgagtaactgccatggatttatcataatgcaatactttgtgtttcccacttttaaaattgtattaaaattattggaaaaagtaacctggagacagccttgactgaaaaaaacttgaatgacattaagtcagagttaccatatctggaatatttgttccaagttagatgtagcatgtgctttacataaattatttccaactcttgtaatgaaggaagtattttctctattttgctggtgacaaaactaaagcatagagttaagtaaattgttcaagtaaattgttcaagggccatgttagcaggtggctagaccaatattcaaatgggggtggatctgatgccaaagcctgggcttttattctaacacaaggccacaagccacattaatctttattattgccattaatatgccacaagcttatatgtta

SEQ ID NO: 427710 - DNA, 453 bp, Homo sapiens
aatttctcaattctctgagttcttatagttcttttcccttacctctctgatgacatgttttgttgtccatcttgtattattaattataattctttaatgcctcaattcactcactgatcagcaagctttctgagcaaagaccatctctgaatgtcccaatgctttacatgttaaaacatgattgaataaatgatgccctataaagaataattgagtaaatgttgtcttttcttcagtgtatggggaatggtcaaaccatcttatcacttcgtccaataccatgctctcccttgacctccctactccggtatgctccatatgctctcccttgacctccctactccagtcacactggcattctttcagttcctcctacttgttttgttcctcctgccctagggccyctttgcacatggagtttcttctacctggaacactcattccttcccagaa

SEQ ID NO: 427711 - DNA, 448 bp, Homo sapiens
gaggttcccccaagtccctttgaactgtttgctcttgaaccacatttgtttcttatgcatttggagtaattgatgcgctccgaaaggaagaaggaataagagggagcatgtgagattagtcttcaacagaaagaacaaatctagttgaaacaaaaggagaaaagtgagatcatccagaggcgactgtcactctcaacacacacaaaaggcttctttgggcacattgcagaccttcccccaaggtattctgcagaatagccgccaggcaccaacaacaaagatgtgactcrggcatgagatgatggataagagggaacagagtaacagaggttgtgttcttgagacctgtgtcatcttgaaaaacgccctgaattcagcattgtttatattcctcgggaatatgttagtgcctgtaggtgatccatgtaagaaattctgcgcggtatct

SEQ ID NO: 427712 - DNA, 611 bp, Homo sapiens
cactgccgtcttcctcactctgtatgaatggaagagtccatttggtttgacttccaaggggcgaaatagaagtaaagtcttctccttttcttcagccttgaacatctgttatgccctcttgtttggcagaacagtggccatcaaacctccaaaatgttggactggaaggtttctaatgaaccttgggccattttctgtatgttttgcctttccacatacacggcaaacttggctgctgtcatggtaggtgagaagatctatgaagagctttctggaatacatgaccccaaggtaatacttcattttactttagctttcttgattgtccattataattccrtatgttgtatcttctgctgtagtatgctcatgttcttccatctaacacaggaatattctctcagccaagtatagagactagtccaaaagtctgttgcctggtttaactaaatattccattgtttgtttcataaacgaaacaaaaagactgagaagttttggggagtgtcttttctagagtaggtctttctgatagaaatatctattaatgcatcttttccttgtattatttgaccatctgatagatagcacacctatcagggaatggtctt

SEQ ID NO: 427713 - DNA, 611 bp, Homo sapiens
cactgccgtcttcctcactctgtatgaatggaagagtccatttggtttgacttccaaggggcgaaatagaagtaaagtcttctccttttcttcagccttgaacatctgttatgccctcttgtttggcagaacagtggccatcaaacctccaaaatgttggactggaaggtttctaatgaaccttgggccattttctgtatgttttgcctttccacatacacggcaaacttggctgctgtcatggtaggtgagaagatctatgaagagctttctggaatacatgaccccaaggtaatacttcattttactttagctttcttgattgtccattataattccgtatgttgtatcttctgctgtagtatgctcatgttcttccatctaacacaggaatattctctcagccaagtatagagactagtccaaaagtctgttgcctggtttaactaaatattycattgtttgtttcataaacgaaacaaaaagactgagaagttttggggagtgtcttttctagagtaggtctttctgatagaaatatctattaatgcatcttttccttgtattatttgaccatctgatagatagcacacctatcagggaatggtctt

SEQ ID NO: 427714 - DNA, 611 bp, Homo sapiens
cactgccgtcttcctcactctgtatgaatggaagagtccatttggtttgacttccaaggggcgaaatagaagtaaagtcttctccttttcttcagccttgaacatctgttatgccctcttgtttggcagaacagtggccatcaaacctccaaaatgttggactggaaggtttctaatgaaccttgggccattttctgtatgttttgcctttccacatacacggcaaacttggctgctgtcatggtaggtgagaagatctatgaagagctttctggaatacatgaccccaaggtaatacttcattttactttagctttcttgattgtccattataattccgtatgttgtatcttctgctgtagtatgctcatgttcttccatctaacacaggaatattctctcagccaagtatagagactagtccaaaagtctgttgcctggtttaactaaatattccattgtttgtttcataaaygaaacaaaaagactgagaagttttggggagtgtcttttctagagtaggtctttctgatagaaatatctattaatgcatcttttccttgtattatttgaccatctgatagatagcacacctatcagggaatggtctt

SEQ ID NO: 427715 - DNA, 643 bp, Homo sapiens
tgcaaagtgacgtagtttaagaactggctctgcttgtatgactcaggataagtctctttccctttctggggtttagggctcccatcagtaaaacaagcaagctacagtgggggtctctgaggtcctgcctagctctaacatcacatgggtctgtgactcttctgaattcctctaggacatcctgggtgcttggccaaacatttaacaacccggaaatgaaaacctagctgaggcactgcacatatgtgagctgtaccttgtccatggcagggctcacaaatggagagtgcagctctacaccccttatggcagaaaggctttcacagccaccttctgtgatctgtgcaatgagctgggtgtgttgwagattccaccgctccctttctctcttgctcctgctgagttgctgaaatccatcattaggtgcatcactttgcccacaaagcacctctagcttttgtcctcccctgctgatgcatcttccaaagaccccgtccccatcccaagactggccactccctgactcacctataaagcccccacaggcctatgttatctcatcaactagctcagggccatctgagctggattaaatcctgagatgagtagcttctcaccccctggggataaaatctctgccctt

SEQ ID NO: 427716 - DNA, 644 bp, Homo sapiens
agtacaggctagtttttggtaagcagaaaggaaagggaccatggtatcaatctcaagttccaggaggcttacctgggaggcatcactgtcttcacacttgatcctacactcactgttgaactggaagccattagtacactggtagagcccatggaattttggtggaggtgggtcacaggtcacaggaacacaagctccctcctgccagctgccatcctgggtacactgagtcttgaaggcccgtcttcaaggaaaggatcaaacaggagacatctcaaggaccaaatggctagatccatgccctgcatgaacaccaccagctgggcccccatttcctatttcctagttttgattccccacctgacctattgggttctggtgggacccgtgcaggaattaaggataattcatccacagaactcctttagcaagagcaggcagaaatgtcatgcttccagctacatgtagattgagacaaaactcatgcccttcagccccaggttctctccccttttttgcagagtgttctgatgtgtgttggaaccatcatgttatgattacccaccatttactgaacaactactacgtgcaaagcattttgtgagcactttacrtgcacatcttcatttgttcttcataacaac

SEQ ID NO: 427717 - DNA, 551 bp, Homo sapiens
gttttcacattttacttttgcagatacaatccagacctcatctccccarttatcaaatggcttttctaattttttgtttaggtcttagctcaaccattaccttctcagtgaggacttttctaaacacactatcaacaaatagttttcaccttcactagagtgtctataccactagtctattttattcccttcatagcatgatctcacttcttcaaatgtttgcttgataattgtattctctctaaaacagaatggcaactccttgagagcagaaacataggctgttgtgtgcattgttgcagtcagatactagtacatagaagataatcagaaatatttgctgaacgaatgaacgttttaacactgcaaggttctctagacattctatatgattctaattcctgtgcttctctgtataaagtggcaactgaaacttagaaagattaagtaactcactgaatgctgcataaatgttagaggtcaagggttctgactggctgattaaggcttattatacaaatattgggaatattcaatgtcaaataaaaatt

SEQ ID NO: 427718 - DNA, 551 bp, Homo sapiens
gttttcacattttacttttgcagatacaatccagacctcatctccccaattatcaaatggcttttctaattttttgtttaggtcttagctcaaccattaccttctcagtgaggacttttctaaacacactatcaamaaatagttttcaccttcactagagtgtctataccactagtctattttattcccttcatagcatgatctcacttcttcaaatgtttgcttgataattgtattctctctaaaacagaatggcaactccttgagagcagaaacataggctgttgtgtgcattgttgcagtcagatactagtacatagaagataatcagaaatatttgctgaacgaatgaacgttttaacactgcaaggttctctagacattctatatgattctaattcctgtgcttctctgtataaagtggcaactgaaacttagaaagattaagtaactcactgaatgctgcataaatgttagaggtcaagggttctgactggctgattaaggcttattatacaaatattgggaatattcaatgtcaaataaaaatt

SEQ ID NO: 427719 - DNA, 551 bp, Homo sapiens
gttttcacattttacttttgcagatacaatccagacctcatctccccaattatcaaatggcttttctaattttttgtttaggtcttagctcaaccattaccttctcagtgaggacttttctaaacacactatcaacaaatagttttcaccttcactagagtgtctataccactrgtctattttattcccttcatagcatgatctcacttcttcaaatgtttgcttgataattgtattctctctaaaacagaatggcaactccttgagagcagaaacataggctgttgtgtgcattgttgcagtcagatactagtacatagaagataatcagaaatatttgctgaacgaatgaacgttttaacactgcaaggttctctagacattctatatgattctaattcctgtgcttctctgtataaagtggcaactgaaacttagaaagattaagtaactcactgaatgctgcataaatgttagaggtcaagggttctgactggctgattaaggcttattatacaaatattgggaatattcaatgtcaaataaaaatt

SEQ ID NO: 427720 - DNA, 551 bp, Homo sapiens
gttttcacattttacttttgcagatacaatccagacctcatctccccaattatcaaatggcttttctaattttttgtttaggtcttagctcaaccattaccttctcagtgaggacttttctaaacacactatcaacaaatagttttcaccttcactagagtgtctataccactagtctattttattcccttcatagcatgatctcacttcttcaaatgtttgcttgataattgtattctctctaaaacagaatggcaactccttgagagcagaaacataggctgttgtgtgcattgttgcagtcagatactagtacatagaagataatcagaaatatttgctgaacgaatgaacgttttaacactgcaaggttctctagacattctatatgattctaattcctgtgcttctctgtataaagtggcaactgaaacttagaaagattaagtaactcactgaatgctgcataawtgttagaggtcaagggttctgactggctgattaaggcttattatacaaatattgggaatattcaatgtcaaataaaaatt

SEQ ID NO: 427721 - DNA, 599 bp, Homo sapiens
acttaaatattttatgtttctcagtagagtttaaaatttttcctcatattgtgtctgcatgttacatttaacttcagatgttttattcttaatgtttaatatatttaattaccatttgtaaattctaaaatttccaagcaccatttcctgtgcttagaatgcttttcaaccacttctccatttggcaaattccacttgttcttcaaggccctatttaaatatcacttgytttgtaaagtcttccttggccccatatccaatcaggatgcactggtatccttcctctgttctcctgaacatcttgtatgtaacgccatcgtgccactggacacgttgtagtgcaacttctgcagacaggtctctcaccttcatcactctggaactctataaggaaaggagctaggatcccctgagcctggctcataccaagcactcagtgccaaatcatagagcatgcatcttcatatttcaatagtgtttttgcagtgctaacaatgataatgttgataaatggcataatttggaataatgtgattatggtttattttttcttccttaaacataagccatgtttaaaaatgcagaaaattatcccataa

SEQ ID NO: 427722 - DNA, 643 bp, Homo sapiens
gtgtacagcccattattcataatagccaaaattgcaaacaactcaaatatacatcaactggtgaatagataaacaaaatgtggtgtatccgtacaatggtatattattcaacagtgaaaaggaattaagtagagctcatgcatgctataatatggatggaccttgaaaacacactaagtgaaagagaccagcaccaaagatcagatattgtgtgattctatttacatgaaatatccagaataggtaaatgyctagggacaaaaagtagactagtggttgccatggcctggaggagggggaatgaggagtgactgcaaatggacacaaggttttattttggtgtgatgaaatattacagaattaggtagtagtgatggttgcacaactgcttgaatataccaaaaaccactaaattgtacactttaaaagggtgagttgatatgtacgttgtatctcaaaaacaaagtcgatgagaaagttgaaaaaatcatatagatatttaattgatttatgaataaaaccagtattattctttaaagatccatatacttgccattggttggctatgaacttagctctaatttgtgtaatttagggatcagttacataatccatcaatagtttcattaagtccagtggctcc

SEQ ID NO: 427723 - DNA, 581 bp, Homo sapiens
ctggtttcaccaaatcacaatgttatgaatggctatcatttattatggtaggaaatcgtcaaatggcttctgtgcacaatcaaatgcagactccccagcatggcctcagggccctcctggcccctggtttcctgatctccagttcctctggtcttgctactcttagacaaaggaggacttctcttggttttctgcctacccagccagaagatcccaggccatgggcctgtggagccaaagttcttaaccactgcactgtgtcamctttctatgatgtcaggcctcagcaaggcttatgaaggaacaggaacagccttgaaaatgaagttgggaagggataggccaggcctcccaggagcccaaagcttgcagagtccccttggtctcattggcacatggagaatggattgatcaagtccaccaatcaagttttgtgggtctaacagagcaactcctgccaagtgggaggagcttagggactttctataacctctcctggggcagaaatgatgggctgcagcagtgtccaatcctaactccatgatctcctgggagggcagggcttcatggcagttcctgtc

SEQ ID NO: 427724 - DNA, 487 bp, Homo sapiens
caacctgttgcttgctcctcagagccaccaggaaaagaaacaaatccccctgcccctggccacttccccaactggccagcttggggaagctgtgtttgtcattaagaaagaaaggctgcgtgcagacgggaataagaactgaaaccaaagatgggcagaagaagaggtgaaaagcgggaaaggagagtgggggtgggaagggtggctgagcatggctgggaccgcagcytgagcctggcttggaggcaggaggacagagctgattttgaccctgcgacagttttggtgtgtgaccttgggctggtcgctgtctctctctgggccatatttccccgctggtaacatcctcctctcagggaagagacactcccgtgccttctgagtttccctgaagggactgaaacacacctgcaccaccaggcctgtggcttttgcacatgatgtctgctcttttggaatgctttcttctcttctgtgttggaaaact

SEQ ID NO: 427725 - DNA, 604 bp, Homo sapiens
gctccgcgcaccacacgattccatttgacctcagcaatcctgtgaggcaggtcagtgattatccccattcctcagatgaggagccgaggcccagagaggttagtggctggctcaagggtgcagagctcggctggggcctggggccatctgaccccagcacccgagctcttatcttcatgatctcaccagcatagaatgaagggacagtgggtgaaaagatgctgtaattggggagcaagtgggtgagggcatgctgtctgcctgcgcattgttgggggagagaagccttgtacctgtcatgggatggctcgggtcccaaggtcacagcccagctgggctctcagagcttggggagaaggcagcgctgtgtccaggtggaaaccggggacatgaggggaaggcaagggcttggaggcttggaartgttgactgtctgcatactctgtaggtcggccaggtactttccaggaactaccaacagctgttggttagggacatgggtggggcagtgagggccttctgaggggcagggtgctggccctggggtggctgggggtggaggactgtgggcagcctgggtgagatgtcctacagtgtgtaggag

SEQ ID NO: 427726 - DNA, 542 bp, Homo sapiens
tgctcctggtactactgccgaaccacgtaagcttgccccagccaaaagcagattctgtttgctgggcaccccctgccagtccctgagctcagtgctttgcaaatataatgcaatttaatcttcactaaatccagtgattgcaattttccagatgaggaaactcagagaggttaagagacttgcccaaggtcacacagtgacctggattcaaaatcctcttgatctgattctggagcccagctcttcatcactcttccgttcagtccctttccacgcccctaaacaggatgtaatgtggcaggaagacaagttgagacctgtgtytgagctaaaaaaaaaaaaaaaaaaaaaacccacacagtcagcaagggggaaacagatggtgggtggctggttgcctgtcagctgagcatgagttaccagtgcagggctgcctagaaagccgatgtaaacttagggccatattaatagagatagggcaccgactagaggggaggggacagttttcttgttctttatatgggcagaggttacctggagaa

SEQ ID NO: 427727 - DNA, 622 bp, Homo sapiens
gtgctgctggcgcagctgaaatgctaatgctaccctagttatcagctggggtatatggaagagccactggccatggagtgggacagacctgggcttaaacctcagctccaccacttatctcygggactgtgggcctttggtttctcctccttcaactgggaagcacatgacagaatgtatacttctctgcagacatgaggggttgttattcttgtcgagggagttggtggccatgctgacattaatgaagaatcaaagcctgtgcatgctcagcctgagacagactccccgccttcagatgcctggaccagactcatttcttgccttttaataaccaaatgtggaaaggcatccaccacgaacatgcctggcctctctctgtccctccctgactcctgcccacggagctgatgggcgagtgtggggtgagggacctgttcagcttgcctcccactgggcatagcctatgtcctcagtgcagcctgcctgcagaggggcttatgttctgggtggttcttcagtagcagctgagctcagcaggctggctttgccccctggggaggtctgtgcttgtccagcactgccagggacagagaggatgagtctaattcaggggcggggg

SEQ ID NO: 427728 - DNA, 554 bp, Homo sapiens
ggatcttccaaccttcacttctgtcagagttggggcattttcagatacgtcagtaccattcatagcatctgagctgcacagaatcttggaattagaacatctttcgtacactcagagatgcttttttgtataatgtttgaattgccaggtctaagcatcttgtctttatacagaatcctggaattacaggatcacagatgccttcatggactcacaggcccacggaatcttagaatttaggaatctctacaagagtctttgaacatggaatcattcagagaaacttagagttgaaatagaaatctyggaatcacaagataaccttagtccaactccctcctgtaatgtgggaagctctctcttcactgttttgtaataacttaaacacttctagggacggggtgctcattacctgtcagggcaacttgtctcacttttgagcagatgtagctgtgaatgctgagcctaaatctgtcctcctgtgaattcccaccctctcttgctggcctcaccccttgccatcccccattcaccttaaagagccaagtgtataa

SEQ ID NO: 427729 - DNA, 539 bp, Homo sapiens
tttagtctatgttgcatatatttttctctaccaaggctactattttttgcatcagtagtattttaataagtaatgtccttctgaaaaatatatatggatttcttataaaccattactcatgattgaacctttaaatatgtaccatctttgtagacaggcatctgaggtattaactaggggaaactacttgctctcaagttcctgaaatcaacaagggaagacagaaaagcaaactaactttgcaagacaatgttttaactgtaaaaatagargtaaatatgtgcttagagtcaaaggctatggataattaattcaggcccaggagtcgagttgatgggtagtgtctgggtagatttcccagaagatgacaacactggaaataaattttgaagggattaagtgtgggtaaagaatgaggaatcctcagtgaaaaagtattgaaagattctgatctttatctattagagcatgttccaaatttgaagataaaagttgaaatagcaagaagaagggtcaactccttggacactgaggctaca

SEQ ID NO: 427730 - DNA, 539 bp, Homo sapiens
tttagtctatgttgcatatatttttctctaccaaggctactattttttgcatcagtagtattttaataagtaatgtccttctgaaaaatatatatggatttcttataaaccattactcatgattgaacctttaaatatgtaccatctttgtagacaggcatctgaggtattaactaggggaaactacttgctctcaagttcctgaaatcaacaagggaagacagaaaagcaaactaactttgcaagacaatgttttaactgtaaaaatagaggtaaatatgtgcttagagtcaaaggctatggataattaattcaggcccaggagtcgagttgatgggtagtgtctgggtagatttcccagaagatgacaacactggaaataaattttgaagggattaartgtgggtaaagaatgaggaatcctcagtgaaaaagtattgaaagattctgatctttatctattagagcatgttccaaatttgaagataaaagttgaaatagcaagaagaagggtcaactccttggacactgaggctaca

SEQ ID NO: 427731 - DNA, 560 bp, Homo sapiens
gggagaaggaggaaaggcatttggtctcctataaaattgtccaagaaagtttatgagaaagcctatatcactcaataaggtggctccagtaagtttaggcattcaaaaacattccattaattttagagttaccttaaagaattacagcagatcctcaatgcttttgtttctgtgattacggtaatggcatttcttgaaaagtatttttaaatgtaaggattctttattctactaccacctcctatctcctcagagatacacaaataaaggcccaaaaataacagttaaactttatagaatttcacacttcattggaaaggttagaaatgatcatttagatcactaatgacyccccaaaagataacaaaatttcacaggcctgattattcatacccctacccacactttgctggttttgctgaaaaaaaaaaaaaaatgacattttaaggtacctgagacctgaggaatgaatgttaatagctcacacagaatgagaagagctctgatcagtgaagtagtaaaaggtagagggcactcctaaattatcagaaaataacctg

SEQ ID NO: 427732 - DNA, 619 bp, Homo sapiens
attttaatgaaggtgaccagaaagcaactatatgattaccttttaaatagaatgctattgcaaatgtcaaactttaaaygggacatttggctttatacactaaaaaaaaaaaaaaaaaaaaaaaaaaaggcattagtagtttcccaccaagaccgctacaaataaattcagaacatttatagaaatccaacattcacacttccctgtaactctaacctattgaaattagatgtaaaaggaagaaaaaaaatagaatatttaggttataaaaatcggcgcaaattcaaattataaaaataaaaacattcttctatattatttgaaattacaaagtcctgtttccaaaagatttagaataatctaagctttctagataaaaagttcagataaaagatatttcagtgagaaatggtaaatagaaaaagtaagcagtttagtagtaagaaaaaagacataagttttcatctgttgcctgcttttagttatttacaacactaagttaatatagaatgttgttttctttcttttattatagtgaaatcaacaagaattcggtcttgttagactgggcttttataaaacaaagataatgtagtccaaaagtgaaagaaacactcct

SEQ ID NO: 427733 - DNA, 404 bp, Homo sapiens
ttaaaaaaacttccatatgcaatttacctattttaaatgtgcaatacaaagttaaaaacttagtaagtacatagtattaattgatgagtaacagaaatagaaatattcactgttcaattacctttaaatgtaatgtgatgctatttatagacttacagctttaactgtaaatgcaactcaacttttagaaccttaagcaacttgtgattcagaaaaatataaaaagtcagaaaaatttggagatctataaactattaaaaagaaaaacccacataggctagaactggcaagtaagtttaaataataatacctaaycaagaaggctaagtttgagacattttaaaataaaagtatgaaacagtaacaatattttaaatttagatattttgtaacaaatcaaaacc

SEQ ID NO: 427734 - DNA, 557 bp, Homo sapiens
ctaaatatttgtgttcaaaataagttttgatatcttcaaagatcacaaatcacaaactctctaaatttggacgactctgtggatttatatcttatctaccatataaactcaaatgctgtctctcttttcctatttaactcataagggctgttctaaagatacctgcattgaaagtgacaaactgaacctggattttttttcccagatactcaggtaactgtattttccacttttcatcttaatgttctctacctgaaaaatasctgttaagtcagtgagggaaaaattgtatttattttcattttattcaaactaagctgctttttcataaaaatctcaaatcaaacatatgaagacattccatacctcatatttatctgaaccacattacagtatgacaccaatataaaagtatctaaacttcacccttatgttaaactctgatttctaaacatctttacattttatttaacttcaactgttaattgattcattcctggtttatctacctaatatccaatatagaaatatcaaatttcagtttttagtattttgat

SEQ ID NO: 427735 - DNA, 466 bp, Homo sapiens
ttaaaattagagacagtgagtagaagaaagagggaaattcattaatttttaaaaatccagatatttcattacaagctgagatagttattttgaaggaaatatggaaagagttctcagaagctgtaactattctaaagagtcaaaaaatgctatttgagcagaaatccaaaggataggtgagagttggtcaggtgaagaaggtggggagggagggtgggaaaggcattctgggtagactgaatggtctaccattcagaatgcaaagaccctgaggcagagaggctttggagaaacccaaagaaggctagtatggctggctccctactcatctctaagctatttccaagtcttctcttsgaccaaacagtatttattataatattcagcattttaaacaatgaatttaaaaacccaatgggttgtttgaaagccaattagctttagctgaagaaaagccaccctgatg

SEQ ID NO: 427736 - DNA, 493 bp, Homo sapiens
cagccaccatttgccaaatgtaagacaattgggtctacgatctcattagattcttaaggcagccatgtgatacagatgttactccaatctgaatatgaagccatggaagcccagtgggataatgtgactcgtgcaaagttccaaagccaggaacaagaggaggtaggactcagtcctgcttgtgtaacatctttgcagtctgtgctgcttcactttcagaatggactggtggcattcytgagaaggttttgagtggtcatattggactctgtgcatctgaaaggtcttgggagaacagtaagatggaatggaagaagcaaacatactgatttgaatgggacaacccctaaattcatgtccactcagaacctcagaatgtgatcttatttggaatgaggatctttgcagatgtagttggttaagatgacgtcacttaatctccatgtgcctcagtttcctcagctataaagtaggcttgatgactgtctgctac

SEQ ID NO: 427737 - DNA, 541 bp, Homo sapiens
ttggttgcaacatatttaccaagactagtcttctggtgaatgcatctggaaattcagggtcaagaggatttttctctctgggttgagtacagggattaatggaaggcaaagatgatatcatttatcaaagtaatatagattaggtgtgggagatttttgactgatgtccgcttgtgttrctttttattaattggttcatcttacacttcactgctgaagcttatacagagggtggtggtcaaagtttggctaaaaagagcctaattttcaggttgaggggtggatagtcagccatttttcattcagttgggcagaaagagcagaggatagatgacccaaagtcctgatttctatttcaaattctccatcaactagcttatgaccttgcataagatcacccaatatccacaagtctcagttttctcttctgttttatgaaagtaccaagcaacatgatgtgtagaacacctgtatgtactatgaataaaataccccttttccagttaaataaagaagccaaacatgataacggtgtttcaag

SEQ ID NO: 427738 - DNA, 586 bp, Homo sapiens
cacaccatattgtcttcaccaatacaacattttattttattttttattaaattgaatctagttgagaacaacatattttggcttctgtttgtacgtttatttgctgatatggtttggctgtatccccacccaaatctcattttgaattgtagctgtcataattcccacgtgttgtgggagggacctggtgggggctaaatgaatcacgggggcggttttccccatactggtcttgtggtagtgaagtctcatgagagctgatggttttataaggagaaaccccttttgcttggatctcatttgctctttgcctgccaccatgtaagacatgcctttcgccttccatcatgattgtgaggcctccccagccacayggaactgtgagtccattaaaccaattttttctttataaaatacgcagtcttggctatgtcttgatcagcagcgtgaaaatggactaatgcatttgccaagacaaataaacatgaaagtttactacagcatgaaaacattgaaattatctgactgtggggcttactggacactcctttctcaggtctgaacaatggttgtcaatcctgggtgt

SEQ ID NO: 427739 - DNA, 537 bp, Homo sapiens
cagcatatagttggatcattaaaaaattcaatctaataatctgcatttttattggatcatttaactcattcacattaatactatgttttgttttgctttgttgtaccatgagaaaaggaattttttttaataaatgggaagacrgagaattttagcctttattctttttattatttatttgtttacttatttagagacagcatctggctctgtcacactggctagagtgcagtggtttaatcatagttcactgcagctttgaactcctgggctcaaacaaatactattaatactattaatatacttgtatttatgccagccaatttactttttattttctatatgtctcatatcttttctctttctgtattcctccttagctactttctttggcattaaattagtattttctaatgtagcattttaatttcttaatacatttttcattatatttaaaatttttttagtgatagtgctagagcataccatatacatcttaatgtatcagaatcgacttcaggttatatcaatttaatt

SEQ ID NO: 427740 - DNA, 479 bp, Homo sapiens
ttagtaaaataaccagtgtctcaaattcttttgttttaaaagatgctttttgaatttatgcaaatgactatactgtcataaaatcacaatccaaattttagaactcaaagagaaatataaatttgcttacaaaaacatacttcactcaaataactcaaaagaaaaagattttgttgaccctgctttaaccagagccagagctttcaaacaatgtttatttgggaaatgccatttayaagccaacagctcatgaaagctgtctatcaggcatggtagaatctaggaaagaggccccctacttatcagtattttctcctaatatccccaggtagcaagattctatgtaaatcatttttatttttttatggaactcttttgggcaccatcatttttattagcttaggggtggcttcagttaaaattccatagcaaggcagtacatggctctcaggtggaaattctctgttcaatattgtcat

SEQ ID NO: 427741 - DNA, 549 bp, Homo sapiens
caattctgtgatgggtgagagaggtgaagaagctacagaagaaatgttggaagctagcagaggttggttcatcaggtttaaggaaagaagccttctctctaacataaaaatgaaagatgaagcagcaagttgtgatgtagaaactggagcaagttatccagaagatatagctaagatagctgaaggtgtctagatgaaacagctttgtattggaaagacatgtcatctaggatttttatacctagagaggaaaagtcaatggctggcttgaaagcttcaaaggacaagctgactctcttgttagggactaatgcagctgatgactttaagttaaagccagtagtcttttatcatttcaaacgtcctagggaccttaataattatgctaaatgtacctgccaatrctctatgaatgaaacaatgacgtctagatgaaagcacatttgtttatagcattgtttactgagtattttaagcccattgttgagaaacactgctcagaaaaaaaaaaggtctttttttcaaaatattacagctcattgacaatgc

SEQ ID NO: 427742 - DNA, 604 bp, Homo sapiens
ggaatgatatcaatctggatacttcaacccctcattttattaactatttctaggtgatcatgttgctctgaaagcttaaaggcatagctggtaattctgaggtcagaagactaagccatgaaaagagaatccctgttgccccaacccataaccaggggtcacttttttttcagaggcttctaaagcagtatgctttcagggtgcaggctctcagtccctattgttcaattacatgattttgtttcaaagccttctccagtcactctrgagtcttcagtttatattattgggtataatttccttttcagaccacagatgtaatccatgtcctaagatgtggcaatggtaccaaaatagttgctactattttacaacaaatgaggagaaaacctgggctaacagtagaaaggactgcatagacaagaactccaccctagtgaagatagacagtttggaagaaaaggtaggattgagtctcattctctagttatagacattatccatacaatgagagagaaataaataaaacatctgattcacatgatggaaattcagtgcatcttgaattagaattaatacatgaatttaatgaatgtcctcatct

SEQ ID NO: 427743 - DNA, 481 bp, Homo sapiens
ttctactcattcaggtgtattaattttactttttgcttccacagtttgaggcccgtaagttagcttcccccctccccagaatgaggatgaattaacttcccctgtctgtaaggaagatcatttagtgatcaagcagtgcatacttttttctatttccctggcttctattttgagaaatggaaccactagcttcycataatctatattaatatcctgccaaaaacaatgcataaaatgtagctataaattctgcaatcaaggtagagtgctggagatctgcatgtaatttaggtttcgaggttagggtaagaaatggaggctttcctttacctatgaaaacacccaagctaggaaagtgaaacttgccataaaggacaacacataagtgaaacataagaattagtgaaacctttgtttcatttcatttacatccagtgctgaagaatatggaataataatgaaagcacattgtttggagatt

SEQ ID NO: 427744 - DNA, 582 bp, Homo sapiens
tcttgaattttaaacaaaggtaaactgaggcaaacacgttctcttcttaacttactcttgtgcatgtcaggccactggtgggtgcggaaagtgtaggcttcagtacactctctaatgctctcccatcaatgaaaggccaaaggaacaacaacaaaaaaaaacaaaaacaaaaggcaaggtcccaggtccaaagaggaaaggatcaaactgcttagacttgcatccagttcaggataaagggaacacttgtgactcacatgtggtatrtaccaattccatatatatacataaatattgatatgtgatgccaaaccctcactaaaaactgtaactttgtctaaatattctctttggcatctattttttgagggtcttttggggggatgatgtggaggaatctatggaggaagccagttatagactcagaatctttaccacgctttacacatttaatagtaaatacatgttagtaaggcttaccaattgctgaatgtagctccgtctgcccacatccacgttttgtttgcattgtgcttgctcagttcaaaccaatataaagacggccccagataatgcatcaaa

SEQ ID NO: 427745 - DNA, 582 bp, Homo sapiens
tcttgaattttaaacaaaggtaaactgaggcaaacacgttctcttcttaacttactcttgtgcatgtcaggccactggtgggtgcggaaagtgtaggcttcagtacactctctaatgctctcccatcaatgaaaggccaaaggaacaacaacaaaaaaaaacaaaaacaaaaggcaaggtcccaggtccaaagaggaaaggatcaaactgcttagacttgcatccagttcaggataaagggaacacttgtgactcacatgtggtatgtaccaattccatatatatacataaatattgatatgtgatgccaaaccctcactaaaaacygtaactttgtctaaatattctctttggcatctattttttgagggtcttttggggggatgatgtggaggaatctatggaggaagccagttatagactcagaatctttaccacgctttacacatttaatagtaaatacatgttagtaaggcttaccaattgctgaatgtagctccgtctgcccacatccacgttttgtttgcattgtgcttgctcagttcaaaccaatataaagacggccccagataatgcatcaaa

SEQ ID NO: 427746 - DNA, 582 bp, Homo sapiens
tcttgaattttaaacaaaggtaaactgaggcaaacacgttctcttcttaacttactcttgtgcatgtcaggccactggtgggtgcggaaagtgtaggcttcagtacactctctaatgctctcccatcaatgaaaggccaaaggaacaacaacaaaaaaaaacaaaaacaaaaggcaaggtcccaggtccaaagaggaaaggatcaaactgcttagacttgcatccagttcaggataaagggaacacttgtgactcacatgtggtatgtaccaattccatatatatacataaatattgatatgtgatgccaaaccctcactaaaaactgtaactttgtctaaatattctctttggcatctattttttgagggtcttttggggggatgatgtggaggaatctatggaggaagccagttatagactcagaatctttaccacgctttacacatttaatagtaaatacatgttagtaaggcttaccaattgctgaatgtagctccrtctgcccacatccacgttttgtttgcattgtgcttgctcagttcaaaccaatataaagacggccccagataatgcatcaaa

SEQ ID NO: 427747 - DNA, 570 bp, Homo sapiens
tgtatcagatgaaagaaacctacaaaaagataattataaaatttagataaaatgtataaaacaactgagaaggcaaaatttgaggggctccaattaatcaaggtttaccgcttatattctgtgtgactgccagaaaaaaagaaacaaaactttttggtaggaagatcatttaaaatttctgtttttaatacataaggcctgttatttaataaaaaattatgagacaacctaaaaaaaaagaattaaatatcaaaacaccaattgacaagccaaatgataaaaactggcctacatatggttcagaaaatgatttcaataaatctactcttcaccattctaatccctttgcagtgccctaggatgktgactgactctcatgtataatatccctggacactattgtcctgaagctctaggtatgtttgtgctaataggaagaataggcaaaagatttaaaggtgggagaatccttccctacagcactaggaaatggatatggagttgttctcgctgagtgtacctccagggaggcagccttcatcagctatagtttctgctgcttcagttaat

SEQ ID NO: 427748 - DNA, 570 bp, Homo sapiens
tgtatcagatgaaagaaacctacaaaaagataattataaaatttagataaaatgtataaaacaactgagaaggcaaaatttgaggggctccaattaatcaaggtttaccgcttatattctgtgtgactgccagaaaaaaagaaacaaaactttttggtaggaagatcatttaaaatttctgtttttaatacataaggcctgttatttaataaaaaattatgagacaacctaaaaaaaaagaattaaatatcaaaacaccaattgacaagccaaatgataaaaactggcctacatatggttcagaaaatgatttcaataaatctactcttcaccattctaatccctttgcagtgccctaggatggwgactgactctcatgtataatatccctggacactattgtcctgaagctctaggtatgtttgtgctaataggaagaataggcaaaagatttaaaggtgggagaatccttccctacagcactaggaaatggatatggagttgttctcgctgagtgtacctccagggaggcagccttcatcagctatagtttctgctgcttcagttaat

SEQ ID NO: 427749 - DNA, 524 bp, Homo sapiens
ggaggtaattgaatcatatggtaggggtgtttctcgtgctgttcctgtgatagtgaataagtgtcatgagatctgatggttttataaaggggagtttccctgcacaagttctttcttctcttgtctgctgccatatgaggtgtgcctttcaccttccaccatgattgtgaggcctccccagccacgtgaaactgtgaatccattaaacctctctttccttataaattgcccagtcttgggtatgtcttattagcaatgtgaaaatggactaatacacatgctaaccctaaaratggtgttttgctttttatcactatgagatactgcctacaaatgtgcatatctaccaactttctctaaagaaaaatttcagaaatttttgcaatagattttagcttagaaatgtatacttaatttatccatgggtcatcaaattccctagtactagctagtcaaacttctgttctctttcacatgtcatactgtaacagatttcttactgataaaacaactctgttattttg

SEQ ID NO: 427750 - DNA, 384 bp, Homo sapiens
tagctgtgaaaacaggaacttgtacatcttgctcactttgatattgttagcacccaggataatgtctaataaatacaaggcactcaaaagataacttttgaataattgaactttttaataattgaataagttcattgaataaataaacttgaataattgaatacayatataaataagaaaataattttaagaaagatagcactggcatttataattctaatcttagataaaatcttgaacatatagttctttcagtagtaactattttctaaagtctacagaagttaagttttactatttattagtaattgtctctggatttcacaatattattgcaccatcaactatgagatgtaagacatagctcagaagtatagtgagatt

SEQ ID NO: 427751 - DNA, 592 bp, Homo sapiens
ttctttattttcttcccaccctcctactttttggagtctccaatgtctattattccactttttatrtgcatgtgtacatattatttagctcccacttaagtgagaatatgcagtatttaaatttacgttcctgagttatttcatttaagagaatggtctccagctccatccattttgctgcaaagtcatgatttccttcttttttatacttgagtagtatttcatggtgtatatactctaaaagaaagcatggtttcatgttttcttatgcaataatccgttgatggacacttaggacagttccatgactttgctattgtaaatagttctacaacaaacatttaagtgtaggtgtcttttttttaatataataattcctttccctttggttagatacccaatagtggaattgctggatcaaatggtaattctatttttagttctttgaaaaattgccatagagtttacactaacttccattctgaaatgggcatttttgaatgaaaaatttaaagactggtttagaagagcacttcaggtgaaagaatataaacttcagcttaatatatcacatatatagtatagataaaat

SEQ ID NO: 427752 - DNA, 592 bp, Homo sapiens
ttctttattttcttcccaccctcctactttttggagtctccaatgtctattattccactttttatgtgcatgtgtacatattatttagctcccacttaagtgagaatatgcagtatttaaatttacgttcctgagttatttcatttaagagaatggtctccarctccatccattttgctgcaaagtcatgatttccttcttttttatacttgagtagtatttcatggtgtatatactctaaaagaaagcatggtttcatgttttcttatgcaataatccgttgatggacacttaggacagttccatgactttgctattgtaaatagttctacaacaaacatttaagtgtaggtgtcttttttttaatataataattcctttccctttggttagatacccaatagtggaattgctggatcaaatggtaattctatttttagttctttgaaaaattgccatagagtttacactaacttccattctgaaatgggcatttttgaatgaaaaatttaaagactggtttagaagagcacttcaggtgaaagaatataaacttcagcttaatatatcacatatatagtatagataaaat

SEQ ID NO: 427753 - DNA, 571 bp, Homo sapiens
gtctcaacctgctggacactattggaagtccatcatttaacatgtttttagtatatacttttagcaggagacagctctgagtcaactgtgttgaggtgccaccacagcgagtttaggcactcagatccctgcatactcatmacattgggccataatggcaaatagaattttttgttttgttttgtttgtttgctttttctttcacatagaaatagtaagtgtaggagtgtgggtcagaaagaaaaggtggccctacctctgatggttggcaatgataggatacaatgggagataagctatctacaaatggagtggagaaggatatatatttcaaaggcctaatttgtagtgaaagactagagacaaaggtaatgtgtgtgtcaggagagagtacagatggaatcttgttttgcaaacgtagaatatgtatgtgtttgtaattattgcaaatggaatggtaatctataatggaatggaaaacattgtagatattttcagttatcaaaaagaaaactaaaaaagtatataataattgtatgtatgatatatatatgtgtgtgtgtgtgtatat

SEQ ID NO: 427754 - DNA, 524 bp, Homo sapiens
ggggcaaggccactgattcccacaggatgctttagtaaagctcttgactaggcctccaaattaaacatatggctgaggctagccccttctcactcaatggactccagtatttggtgaggaaatgaggaaaagagaggtcccgaagcaagtaattgtatgaaatatcaggatccagttttgacaagactgtttgtggatataccagaagagcaggagagagttccagaagacccaaacatccagcatccagaaggtcttttgwaactggtaattaaattatgaagtgaggactgatgggcatcattgagaacatgatttgggagctgtttaaccccttgctcactagtcagttcatcctcttgttttctacaaaaatgtagttatctgcttctcataggagaatctgttgtgggagccacacagggtggtaacagtcagcggtaatctggtgaaaacaattttgtagaagggattgtccctccttcacatatttccatatataaatcctcacagtcagaaaaata

SEQ ID NO: 427755 - DNA, 524 bp, Homo sapiens
ggggcaaggccactgattcccacaggatgctttagtaaagctcttgactaggcctccaaattaaacatatggctgaggctagccccttctcactcaatggactccagtatttggtgaggaaatgaggaaaagagaggtcccgaagcaagtaattgtatgaaatatcaggatccagttttgacaagactgtttgtggatataccagaagagcaggagagagttccagaagacccaaacatccagcatccagaaggtcttttgtaactggtaattaaattatgaagtgaggactgatgggcatcattgagaacatgatttgggagcygtttaaccccttgctcactagtcagttcatcctcttgttttctacaaaaatgtagttatctgcttctcataggagaatctgttgtgggagccacacagggtggtaacagtcagcggtaatctggtgaaaacaattttgtagaagggattgtccctccttcacatatttccatatataaatcctcacagtcagaaaaata

SEQ ID NO: 427756 - DNA, 524 bp, Homo sapiens
ggggcaaggccactgattcccacaggatgctttagtaaagctcttgactaggcctccaaattaaacatatggctgaggctagccccttctcactcaatggactccagtatttggtgaggaaatgaggaaaagagaggtcccgaagcaagtaattgtatgaaatatcaggatccagttttgacaagactgtttgtggatataccagaagagcaggagagagttccagaagacccaaacatccagcatccagaaggtcttttgtaactggtaattaaattatgaagtgaggactgatgggcatcattgagaacatgatttgggagctgtttaaccccttgctcactagtcagttcatcctcttgttttctacaaaaatgtagttatctgcttctcataggagaakctgttgtgggagccacacagggtggtaacagtcagcggtaatctggtgaaaacaattttgtagaagggattgtccctccttcacatatttccatatataaatcctcacagtcagaaaaata

SEQ ID NO: 427757 - DNA, 524 bp, Homo sapiens
ggggcaaggccactgattcccacaggatgctttagtaaagctcttgactaggcctccaaattaaacatatggctgaggctagccccttctcactcaatggactccagtatttggtgaggaaatgaggaaaagagaggtcccgaagcaagtaattgtatgaaatatcaggatccagttttgacaagactgtttgtggatataccagaagagcaggagagagttccagaagacccaaacatccagcatccagaaggtcttttgtaactggtaattaaattatgaagtgaggactgatgggcatcattgagaacatgatttgggagctgtttaaccccttgctcactagtcagttcatcctcttgttttctacaaaaatgtagttatctgcttctcataggagaatytgttgtgggagccacacagggtggtaacagtcagcggtaatctggtgaaaacaattttgtagaagggattgtccctccttcacatatttccatatataaatcctcacagtcagaaaaata

SEQ ID NO: 427758 - DNA, 618 bp, Homo sapiens
ccatgtgtctaaaatcatgaagaactgcagctgcagacctcactctatggtatatatcaaataattcaactttttcctgtaatgccaggacttttctctgctccttgggagcacttcagcatcactagtggcactttgtatagatcccatgatgttattcaaggtttacaacataacgctaaacatgaaaaatatacgagaaccataagagatcactttttactgcaatacacaatttatgatgattagcatcaggaggcattttacgcacatacttgcaacactccgacttaccacagcagcaacagaaggwggctatgaagttattacagtaatgtcctatgtattatagctattcaatgcagttgtgactcaatactgtatctttatgtttgtttacatgtctctccactgtgaatggcattatgtatggtctgtaagtgcataacttttcataagttttaattttttataacagatttgtgtatattttatggtagtgaattataaaaacagactagtatctacatatgttttatgagttcatgacatacctaactttaacaaagttttcaatatttctaggctatatgattcgtctgtgggcttttgcaaact

SEQ ID NO: 427759 - DNA, 618 bp, Homo sapiens
ccatgtgtctaaaatcatgaagaactgcagctgcagacctcactctatggtatatatcaaataattcaactttttcctgtaatgccaggacttttctctgctccttgggagcacttcagcatcactagtggcactttgtatagatcccatgatgttattcaaggtttacaacataacgctaaacatgaaaaatatacgagaaccataagagatcactttttactgcaatacacaatttatgatgattagcatcaggaggcattttacgcacatacttgcaacactccgacttaccacagcagcaacagaaggaggctatgaagttattacagtaatgtcctatgtattatagctattcaatgcagttgtgactcaatactgtatctttatgtttgtttacatgtctctccactgtgaatggcattatgtatggtctgtaagtgcataacttttcataagttttaattttttataacagatttgtgtatattttatggtagtgaattataaaaacagactagtatctacatatgttttatgagttcatgacatacstaactttaacaaagttttcaatatttctaggctatatgattcgtctgtgggcttttgcaaact

SEQ ID NO: 427760 - DNA, 358 bp, Homo sapiens
gaattgcatctggaaatttagaagctggaattctctaatgatagagactgcctcttaattcttgtctggccaagactagcattgtcttcagtcaagatgcaaatgtatacttcctcgcccgtttgtcgataagctcaatcacatgtagataagtcaacttatcacgtaatataaatggttgcaaaagaagggtaccagggctttggaattaggcagaacttagtttaaattttactctgctatatcctggatgtctgactttgggcaattttaatggtctctctgaatctcaacattttaacctacacaatatgttaagcaagtcttatatsaacaaataattgaataacattaaaat

SEQ ID NO: 427761 - DNA, 569 bp, Homo sapiens
caaagggaaccccatcaggctaatggcagacttctcaacagaaaccttgcaagccaygagagattgggggcctagtttagccttcttaaagaaaagaaattccaaccaagaatttcctatcctgccatgctaagcttcataagcaaaggagaaataaaatatgttccagacaagtaagtgctaaggcaatttgctaccactagaccagccatacaagggatccttaagtgagttctaaacatgtaaatgaaatatgatacctgccaaaaaacacacttaagtacatagctcacagaccctataaagcaaccatacaattgaaagtacaaagaaaccagctaacaacttcacacttttctcaaaacctcacatattaatgttgaccttgaatataaatgatctaaatgcccccacttaaaaggcacagagtggcaagttggattaaaaaaagatccgtccatcttctgtcttcaagagactcatctcacacttaatgatgttcataggctcaaggtaaagggttggagaaaggtctatcacataaaagggaaacaagcaagagcaggagt

SEQ ID NO: 427762 - DNA, 462 bp, Homo sapiens
ttatgctaatgtgaaaagatgatttgatttgcaaatttgaataaatggtcagtcaaatcctgagattacttttgctaagtaaccttccatttaaatttatctctggaataagttgagatataaataaaataagagtgatccaggattactaaagcatatatggatatataccttatataacttgcagcytaatttgcttatgagcccttgaacaggatacatttagtattggctgttttagagttgtttttatatgaaagtcagataatatgttatattttgatttaaatcttccatttgtctcactcagcagtatgtcctgaacattttctgtgcctacacatacagatcaatatttttctgacagctctctgatattgtatggcacaaacctacatcatttaacactcctattgttgaacattatgctatctccaattcttccacataataaacaatgtc

SEQ ID NO: 427763 - DNA, 635 bp, Homo sapiens
ttctaccctggcaaatcctgccctatctctcaaggcccagctcagatgcagcctccttcatgaggccttccctgatttcatgctccccaccccaacagatgtggctaagggatggaggacctgaaggcaacaaaactgggatgcggaggagtatttggagggcagatcactgggatcattagagctgggctgtaggtagaagaaaatatctgaggtttgaactttggaatttgtgcatctgagtgggaagtgcataaatggtggaagctgagagacaactgtaaaagaattaaaacagactacagttyttccttgcttgaaactttgtctccttttattttatcctcttgtttgcctttttttccttcctatgtctccacttcctgtaccttaactggcattagacaactcaccagcttacaaagatcacatttgaaagaactgtcctgacagtagccaaaatgagattgcaccaatgatcccgagaaaccagaacaatttccaaccattccaactggaagttttgcagcggttacagataaagaaaactgcaagctgggacaagaccacagtcacagaagagatgaggagtctccgctgcttgtcctataaaaacccgatcctactttggctca

SEQ ID NO: 427764 - DNA, 625 bp, Homo sapiens
atctttctcttctgtcttccaccctccctaacctatacagatggaccttttggctcaatggggaactactattaaatgtatatccaaaggcctttttcttgatctctcagtctctcatgacccagtacaccatcctatggggcttccctcaactcctatgcacccactcttaagtcctctattcacttcattcattgcattcacattgcaagccccctcacacttstctcagcttctcaatcataatctcaaagacttacaatttccctggtcctctgccttgatcagatagtaagtaacttgctcttatgttcacctgatttaacctcttctcaagaagactctatatcagaaactttgtttataaaaggaaatattgtaaggacaaatttgtaataataatttactgtttaaattactgtataaaagataaatttgtaagaataaattactgtttccttaggcccaagttcactatctaagccatggtatatcctagggaggcaaattcctcctggtgaataggagtacggtcattcaaaattgcccttgccctactaccaaaagacaatttagaggatttctgggacttataggatattgcaggtggtagatttccaacttt

SEQ ID NO: 427765 - DNA, 584 bp, Homo sapiens
tctagtgaggaaggaattattacccttatattacagatgaggaaattaagattcaaggaagattaagtaacttttataaattgtttaatacaagtatttaatattgttagtaagtggtagagtctgaattgggtgaacatcatctagctattcataaatcctatgttcgtcccagtactctatcttgtctgactcctagatttcctctaggccatcctgcctttctatttatggagaaaagaggtagggcatacaggtctttctaaacagggtctcttagaatgcaggaaagattttaaaaactaagagttaagaaaataatactttttaaaagttggcttaaagtcaaattggaaaaggctgaacctcactctggactaaaaagaagactcacaraacttctggttcaagaaaaagtcaccattcaacacagaagaaaagtggccaagtaccgtggaaaaatatcaaggtaaaggccagcttcagatcatacacataattcaattacagatggattttaagagttaaatgcaaaacaataacactaaccctcaatcaaaaccaatgaaacgttaaaataacct

SEQ ID NO: 427766 - DNA, 576 bp, Homo sapiens
aatagaattctttttaggggataatattttgcttaattggggctcagaattagtgttccctattgtcaaaattgattttaagtgttcatctgttaatgctgatctgttaggaaatttttacctatttaatctttgaaaatgtcattttacatagataggtactgccaaatactgatatcaattcataaacatatacttttttatttttatttttatttaattttycaaaaatttcagaatagttgtagatttatagaaaagttgcaaggttagtagagttcctgtataacactcactcaaaatgaggcacattttacatatcataaaattcactgatttcaagtgcataattaaatgatttttggtaactttactgaagtggggcaaccatcaccataaatcagttttagaactttttgatccctccagtaaggtccctcatgcctatttatagttaatcaatcctctgtcccattcccagccccagacaaccactaatctacttttttgtttctataaatttgcctattctggacattttatataaatgaaatcatacaatatgcagtctttgtg

SEQ ID NO: 427767 - DNA, 538 bp, Homo sapiens
ggccatagcaagtaatttttagtttttcaaacgaagcatcttctctcttcctctgtggcccttgcacaggctcctctgtgcatgcacggatttctcctcatcccctcctgctctctccactcccattcttttcattcacctaactcctatacagtttctattcccttttcatgacagtgctcaaacatttcttcctcttgtatttcctgattctccagaccccacctcaagctaggctgaattgtgcaacctttttgtgtccccataacaacttgtgcatatgtctgrcggtacttttcacactgtattgtaatctgtgattttctcgtcatttttctccatcaactggggattcctggagggtttagtctgtgtcttaattatctttgtgttttcagcatctagcacagtggtaagcacccaatatattaattattgaatgaattgaaataatttattacatcagcaaggtgctaacaagtacctctaaagatatctcttattttttttgtttgtttctgaaatgtattttttctcc

SEQ ID NO: 427768 - DNA, 603 bp, Homo sapiens
atgcctgtaatcccagctacttggcaggctgaggcaggagaatcgcttggacccaggaggtggaagttgcagtgaggcaagattgcgccactgcactccagcctaagtgacagagtaagactccatctcaaaaaaaaaaaaaaaaaaaagaagctgtgacacaaactcatgcatcaaacagctacacacacacacacacactctctctctctctctctttctctttctcccttcctagttccatctgctatatgctgagtgagctgagtgaggcctaraagcaaggtcactgagtacccttaatgctcagatcttggtttctaaatatcattctccactaaaaacaaccaggtgccctggagaagcagctgattcaggggcaggaaaagcacaagttgagctggggttttcttcttgtgcttcttgtgaaagagagcaagaaagtgctcaaagaatgatgggaacttttcaaaaggacacagggtccagcttgaaagggcttctacaggccaaatctgggacagtctgaatgtcaaaattagtaataacagtgacagattataatgcactgaataaaataagaatccatcagtctgtattaat

SEQ ID NO: 427769 - DNA, 517 bp, Homo sapiens
ataactagaaactttggatctcagaagagattctccttagaaaatggtaggaatggggtaaagaggtaaaaatgaaataaraagcaaaacaaaacactccccagtggaccccatagccaaggctggccatgacctgtatgtaaatcttttgtaactaattctgaatgatgactgatttcccatatcataataagtatctttttaaaaatttaagtcacaggcacagaaatatccttttgtccacggaaagcagtgtctcaaaggaccaaattaacaaattaacttgtacaattaagatgcttggtctcaatttctattaactgatctcaaaatagaaagaactcagatgtcattcaatttggttacttcctgccaactttagagtctcagagattgatctggttcatgctgccgtttttaggtaaatcatgccattccaatctgactggcctatgcagcaaagagccaagacttttttggtagtgggacaatacgggtgtatttcagccacatttac

SEQ ID NO: 427770 - DNA, 602 bp, Homo sapiens
atgctcaatcttagcatctattcttggcatatgcagtaaatcctcagttaatgtcattgataggttcttggaaacttcaactttaagcaaaatgatgtacagtgtgatagaaccaattttaccatagactaattgatataaacaagagttaaattgctacagcatacagtatgtcattttgcttaaagtcacagtttccaagaacctatagacgacattaagagaagacttagctgtgttttcttctattaattatatttgtatatgtggcaggctggctagctgctcaccaaacttagagctgtgtttcccagcttcttctgaagtaaggtgtaccatgaaatggattctctccaggggaatgtgaatggaattgatgaatgtcactttctagctgtggyggttaagaaataagtgtgtgtcttctttcttctttcattttcctcgtctgctgacagaatgaagaggaccctgaagccctaggagacaagaacagaaccacaagatggaaagagtttgggttcccagaaggtggcccaccaactgtcaatatctgtgttggatgttcacctgaatgaaaaaacttttattgtattgaacca

SEQ ID NO: 427771 - DNA, 543 bp, Homo sapiens
ctttctgcaggctttagaggagaatccattttcccctcttttccagtttctagtggtcacctgcatttcttggctcatggcctcttcctccatcttcaaagccagtaatggtgggttgagtccttctccacattgcatcactttgcccctctcttctgcctcttcttccacttttaaggactcatatgattagattgggcccactgggttaatctcgcttattttgaggtcagttgattaaccaccttaattgcatctgaaattttaattcccttttgccatgtaaagtaacatattamtcatcattctgcctactcccagctcttcctctgtgccagatgtagtgctaggagatgctggggaattggagagatgggtacaaagatgaagttcatggttagatattgagatcagctctggaagagaatgcgtacaacaccatggagacagtgcttaggctcacaataaattaatagatgatttgcagagacttgggagagaagcatggttccttctgggcaactcgagggaggtatcattgtg

SEQ ID NO: 427772 - DNA, 496 bp, Homo sapiens
tcagcctcaggaggtcagaggctgtcttagcctgttcaggctgctataaccaaaaactataaactgggtggtttatcaacaatagaaatttatatctcacagttctggaggctaaaaggcacaaggtgccagtagatttcatgtctagtgatgacctgtttcctggttcatagattgtgccttcttactgtgtctttatgtggtggaaggagtgagggtctttccgggacctcttttataagacaccaatctcattcatgaggaccctacccccatgacctaatcacctttcagaggccccttcctaataccatcrccttgggagttaggatttcaacacatgaattcagatcacagaaacattcagaccatggcagaggccaaataacactcatcagaaagagagagtgaactgcaggatcatatctcctcccatgaagaagactctggtgctctcatcaccaagttcatgaaaaagaacaaatagagggggtga

SEQ ID NO: 427773 - DNA, 412 bp, Homo sapiens
ttcacagcagcattacttgtaatagccaaaaactgtaaactctcattttatattaagaagtcaaaaagaaccaaacaaactgtaaacaactcaaatatccatcatcagttgtagggaaaataaagaaattgtggtacatttagtcaatagaatactcttcaacaatgaaaataaatgaactatagctacaggtaacaacataaatgaaatattaagtgaaagaaaccagacacaaaacaatacatgttgtacaaagttcaaagtaatcaaaactaatctacagcaatagaaggcagaatagtggygctttgggaagcgtgtgttaataaatgggaggggcatgaggggctttctagtgatagtctatttcctggtctaagtggatgtgaaaatccatccaactgtacactta

SEQ ID NO: 427774 - DNA, 429 bp, Homo sapiens
agtctgacccccagtagattcaagaggaggtgattgcagatttcacaatgggtagatgactgaaccagctgtggcattgcatctttggggctatagggcatgagagtacgtgaaaagactgggtactaaaagttatggcctttccttaaaggccagtttcggcttttagacactgggcaagcaagactcttctgcaggaaatagtagcagcactagacagctrgtgggatgcatggtatggatcatgctggcactggatggatggtagagactctggatggatggtggggacactgcatagtggggtatactagtagatagaaggggcactggatgggtggtaggggcactgcacagtgggggatactagacagatggagggggcactggataaatgtggggggcactggatggatggtggggtcactg

SEQ ID NO: 427775 - DNA, 514 bp, Homo sapiens
gcgcgcatatgtggttggcgttcagcttggagattagtttgttttccatatgctgcaagtgagtcctggcacaacagtttgtcttcttgactctctggaactttgggaaagcaggacacatgagagagtgagcattagatggacccaacttggcaggtcaacagaggatggttccagtctgtcttcagctgctgaggaagagacccagcttccatctaggctcctacagctcttacagctrggaccaagtgaaataaaaagaaacaagggataattgttgagagattttacgtactttgagatttttctctctgtggcaaaggaggtatatttaatgtttctgtggactgataaaaataggagaggataggcaatgataacttaatagggtggtggcaaattggggtgttgcggttacaatcatagtccattgctcttggatgttcattatgtagtctttggcttgttagccacatggttaatatgagagaacgtgactttttagctaagtgta

SEQ ID NO: 427776 - DNA, 525 bp, Homo sapiens
gatgcagaacagggaatggggagtgagtatctgtcagacagaagtggaaggagagcattccagacagggtatggaatctccttcctcaagggcaaggactttggagtatctgggatgttgatggtctggtgtgaccaaaactcagtgggagatgaggctgaagggtaagccagggcttgatcatggaaggaagtcttagtgtgtgtgccgaagggtatgggctcaaatttgagggcactaaacaggcacggaaggttccaagcctggaactcacagctgcagctcactctggtgggtttattcatggggccctgctcaaatcttccctagcaaagctgctttctctctagatyggggtttctcaacagcaacactatcatttgaggctggattattctttgttgggggtgggggctgttctgtgcatcagaggctgttcagcaacagcatccttagcctctattcactagattctggtagcacttccccagtttccacaaccaacaacgtcttcaaacattacca

SEQ ID NO: 427777 - DNA, 568 bp, Homo sapiens
atggagagaaggggagagagagaaggagagaggcccggtacaagtgtgaaatcagaagaacagactgaggatggtgagatgcatgtgaacagtgtgacgtgggcaacccccacaaatagaccttctgttaaaaatagcckttgtctaaatgtggaaagggtgtaaatatagtagcggtttcggcttactacggagccgcccctgctccaagtaacagaggcttattataggaagcgtgcgtcagcagcgggaggggaggagagggatagagaagccccgggccgtgggtacagtaccccccagcaggaggggggtcagccagccagcgtagccctattgggggcaagcggcccggatggctctgaaacgctctcacagagttcctctgggcagaaaactctagccgagctgtgggaggaaaggaggaaggaagggatcgctgtgctgaaaaggatctagccttgtctcggcgatgccgctcactttcatctgggatttcagcaggcattgcgtcctgtgtgcagcaggctgctcgctcctggacaccgcaggaagttttcaaaggaac

SEQ ID NO: 427778 - DNA, 527 bp, Homo sapiens
gcctttgcagggaccatgctgtttccttaggctacaatacttctcctccaagtctctgcacatcaggatcctacccatccttcagggccccagttccagaaggctgcccacttcttctaggaagccttcttggatctatctcccctcccacagcaactaccttttattttttttttcacwccttctgcaaacccaagtcatttttgtatatttggaaaatgaatcaagaggcccactactgcatctgggtgtggtgccctcccctgccttccaacagagcctgcaagtccctccaccaccagaatgcttgttactctgtgttggagttgcctgtttatccaacggtctccccactggagtctaacttcttagggaagggtctggatgaccttgttcaggccatatccccagtgcctagcacagcaccaggcttattacactaaatgaactgggcctccagggctgtatacttctgctatgtagtgaatgtttgcattcctcccaaatttatgttgaaaccctaatcc

SEQ ID NO: 427779 - DNA, 635 bp, Homo sapiens
aaaatgtttttgaaaaattgtttgcagcaatatccagaaaggtcataggactgcaatgcttttccatgaaggtaaccctttaaccctatgaaataagatatgatggtccccatttaacaggataaaaagttagtgatttattccagtgaaaattataaaaagataaggatgcaaaaatgccttccaaaatctagttaacttttaaaactggtggttattctggggaaaatggggaatattatcccattaatgaatcttgagatatttctttgtaagaagaattatatcactgcttctcatgaatctcaccagyattgacctatgacccccatctcttccatttcagttcttttaaattttacttattcactttgttcttgttgttctttttattttttgtttttttaaattattcttttttccttttcctactctatttctcatttccatttcttttctctgtaatatataattgagtatgattttatgtatttgagattttatgtttttcaatcttaagttaacttcacttttttcatttgtagaataggagatattgtctactctgtccacctaacagggtcgttgtaagttttaaacaatacttgttatagctccagaaaactataaactag

SEQ ID NO: 427780 - DNA, 635 bp, Homo sapiens
aaaatgtttttgaaaaattgtttgcagcaatatccagaaaggtcataggactgcaatgcttttccatgaaggtaaccctttaaccctatgaaataagatatgatggtccccatttaacaggataaaaagttagtgatttattccagtgaaaattataaaaagataaggatgcaaaaatgccttccaaaatctagttaacttttaaaactggtggttattctggggaaaatggggaatattatcccattaatgaatcttgagatatttctttgtaagaagaattatatcactgcttctcatgaatctcaccagcattgacctatgacccccatstcttccatttcagttcttttaaattttacttattcactttgttcttgttgttctttttattttttgtttttttaaattattcttttttccttttcctactctatttctcatttccatttcttttctctgtaatatataattgagtatgattttatgtatttgagattttatgtttttcaatcttaagttaacttcacttttttcatttgtagaataggagatattgtctactctgtccacctaacagggtcgttgtaagttttaaacaatacttgttatagctccagaaaactataaactag

SEQ ID NO: 427781 - DNA, 635 bp, Homo sapiens
aaaatgtttttgaaaaattgtttgcagcaatatccagaaaggtcataggactgcaatgcttttccatgaaggtaaccctttaaccctatgaaataagatatgatggtccccatttaacaggataaaaagttagtgatttattccagtgaaaattataaaaagataaggatgcaaaaatgccttccaaaatctagttaacttttaaaactggtggttattctggggaaaatggggaatattatcccattaatgaatcttgagatatttctttgtaagaagaattatatcactgcttctcatgaatctcaccagcattgacctatgacccccatctcttccatttcagttcttttaaattttacttattcactttgttcttgttgttctttttattttttgtttttttaaattattcttttttccttttcctactctatttctcatttccatttcttttctctgtaatatataatygagtatgattttatgtatttgagattttatgtttttcaatcttaagttaacttcacttttttcatttgtagaataggagatattgtctactctgtccacctaacagggtcgttgtaagttttaaacaatacttgttatagctccagaaaactataaactag

SEQ ID NO: 427782 - DNA, 456 bp, Homo sapiens
ctgtttttaacttttctgtgctttaatactgcgaaaaaaaattatcctaatgtcacctaatttgtggcagaccttttattgtttccagtgaatgttctaaatcagaagtatatgacatttccaaattaataagtttctattactyaatattcttacaacattgactctgtagagaaggggttggcaaagtacagcttacaggccagatcaggccagctatctatttttgtaagtaaagttttattggaacacagtcacccttatttgtttacatattgtctgtggttgtttttgcactacagtagcagagcttagtagttgccacagactatatggcccgcaaagccaaaaacatttactatttggcctttgtattcgttcattttcatgctgctgataaagacatacccaagactgggcaatttacaaaagaaagaggtttaattggacttacag

SEQ ID NO: 427783 - DNA, 529 bp, Homo sapiens
ggtaggctggcactaggcaggtgggttattctaagtaaaacccagtatttgtccctctgactgctttttggctcaagcccgcagtctcacgttttaatcctttaggagaaaggctctactaaaaggccaactgaaatccaaaaagaactacttcagtaactctccatgggatatagaggagaaaggcactggaggcttcggtgccagcagtttaaagactgactggagagagggcggaggtggakcaagatggctgaatagaaccccccccgagatagttctccacacaggaacaccaaatagaacaactatccacgcaagacagcaccttcataaaagccataaaatcaggtgagtgatcacagtgcctacttttaccgtaatgataaggaaagaggcattgaagatagggtgggggtaggggggaagatctccctgtattgcctataccacccctcctccaaccacaggctgcacagcaggaaagagaatccgtgtgcttggaggagagagagcaaagtgagtgtgg

SEQ ID NO: 427784 - DNA, 529 bp, Homo sapiens
ggtaggctggcactaggcaggtgggttattctaagtaaaacccagtatttgtccctctgactgctttttggctcaagcccgcagtctcacgttttaatcctttaggagaaaggctctactaaaaggccaactgaaatccaaaaagaactacttcagtaactctccatgggatatagaggagaaaggcactggaggcttcggtgccagcagtttaaagactgactggagagagggcggaggtggagcaagatggctgaatagaacccccccmgagatagttctccacacaggaacaccaaatagaacaactatccacgcaagacagcaccttcataaaagccataaaatcaggtgagtgatcacagtgcctacttttaccgtaatgataaggaaagaggcattgaagatagggtgggggtaggggggaagatctccctgtattgcctataccacccctcctccaaccacaggctgcacagcaggaaagagaatccgtgtgcttggaggagagagagcaaagtgagtgtgg

SEQ ID NO: 427785 - DNA, 529 bp, Homo sapiens
ggtaggctggcactaggcaggtgggttattctaagtaaaacccagtatttgtccctctgactgctttttggctcaagcccgcagtctcacgttttaatcctttaggagaaaggctctactaaaaggccaactgaaatccaaaaagaactacttcagtaactctccatgggatatagaggagaaaggcactggaggcttcggtgccagcagtttaaagactgactggagagagggcggaggtggagcaagatggctgaatagaaccccccccgagatagttctccacacaggaacaccaaatagaacaactatccacgcaagacagcaccttcataaaagccataaaatcaggtgagtgatcacagtgcctacttttaccgtaatgataaggaaagaggcattgaagatrgggtgggggtaggggggaagatctccctgtattgcctataccacccctcctccaaccacaggctgcacagcaggaaagagaatccgtgtgcttggaggagagagagcaaagtgagtgtgg

SEQ ID NO: 427786 - DNA, 596 bp, Homo sapiens
tgtaatagataatccctatttcatccccctccataggatgacaataatctgttaaaacagcaacttaaagatttccagaatcaccttaaccatgtggttgatggtttggttcgtccagaagaagtggcagctcgtgtggatgagctaagaagaaaactgaaattaggaactggggaaatgaagtaaggaaaaagcaagacctccaagtctagagtgggcctcacaacttgagagttgtgagtgtgaggttcaatgataaactcacctttctaagttctgttaatggcaaatttcttttgtaaggttctccttatgaagttttcatgactgagacaaaagattgtttaatttatttgtctgccactgattgtttttacattttggatcttttttttggtatttaagagtaatatttggtatttaagagttattgtttcttgaaagttaattatatatggtcaggaagtagagccacattatacattttaaatagagaagaaacatcaaaagaaaacataattatttcaaatatatgaaatggrcatttattcttggagcaaatattgttagcctgatatgagcctatgttttcagag

SEQ ID NO: 427787 - DNA, 511 bp, Homo sapiens
ggttttttttgttcatcttgtaggcatgcaataaaaatgatgtagcatctatacctaaagattccatattgatatttacttcgtgattctttataattgctattagaaatacaagtagactataaaatacagaaaatgtcatgtcttcagtgatctaattcttatgtcttacttgacattagaatctaaaattattagacattagagtctaaaattattagaaacatgtattcctcaatgaaaagaaaggtggtcttgtccattaaatttcagaaattataagctaataatatgtgattatacgttgcatttttcaatataagaatgaatccaktcaatatattacctttaacattcatttgtgattactcatattcatgtattcatttatcaattatttattgaacacaggatatcctggatatgcttatagcggccaggtatataactgtgaacaaggcagttcaactctttgcattcaggaagcttgcaatctggtgggaatgtaaag

SEQ ID NO: 427788 - DNA, 325 bp, Homo sapiens
aatgagaattttacttatataagacaaatggttatattttctatatattatatataatagaaatagaaatatatattatatattatctttatatatatctttatatatagatatatatgtatatatatctatatatatagatatctttatataaagatatatatgtatatatatctccatatatagagagagatagatatgtttctctctctatatatatatatatatataatatgtatatatgggtatctatttattgtttgtctcttcttctgtaaygtaaattccatgaggcctggaactacatctggtcacagctgtatcc

SEQ ID NO: 427789 - DNA, 541 bp, Homo sapiens
ttatattgtgtagccatctttcctcagtgtattatttgaaggaataaggtttttattcctttttacattcactgcactgtgtaaaaggcagaggtgaaacattctggataaatattcattaaataaaataaggaatgatgttacataactgggtgcatttcatgcagtagagtttttatccctcaaattggtctgcttcagaatggggctgactccctttgattcttggtaatggggaattcttatctaatcaggtgatctcaaatgactaatatgtaaccttctttacttgcagaaagaagttttatatgattcaaagtaatgccacctaaccatagaatcaacctgatcctcatgtggctagtgactaaatccatattgtggatayatacattatgcatgattatatctttgctatacgatagaaaatgcactaaactcttaggatacagctgtggccagatgtagttctgggcctcattgaatttacattacagaagaagagacaaacaataaatagatacccaaataaataatttaa

SEQ ID NO: 427790 - DNA, 541 bp, Homo sapiens
ttatattgtgtagccatctttcctcagtgtattatttgaaggaataaggtttttattcctttttacattcactgcactgtgtaaaaggcagaggtgaaacattctggataaatattcattaaataaaataaggaatgatgttacataactgggtgcatttcatgcagtagagtttttatccctcaaattggtctgcttcagaatggggctgactccctttgattcttggtaatggggaattcttatctaatcaggtgatctcaaatgactaatatgtaaccttctttacttgcagaaagaagttttatatgattcaaagtaatgccacctaaccatagaatcaacctgatcctcatgtggctagtgactaaatccatattgtggatacatacattatgcatgattatatctttgctatacgatagaaaatgcactaaactcttaggatasagctgtggccagatgtagttctgggcctcattgaatttacattacagaagaagagacaaacaataaatagatacccaaataaataatttaa

SEQ ID NO: 427791 - DNA, 494 bp, Homo sapiens
atttcatttgatgtttaacaccttttttcctatggataatacttacrattggttattattagagctaacatttattgaatgcttactaaattctagtctctctgctaagtatttcaaatgcatttctacctctattcctcacacttcctaaagaataggttccaacattattttacttttaaagaggaagaaactaacttatcaaagttaagtgacatgactaaggtcacagtgatcaataggcaggactcaaacccaggtttgctggtgtctgcagcaaattttcttaagtccaaagcctctgccttccttttgtcattatagtatgttatttgtcaaagataaattcaatataatattttaatttctaactataaatataaattacttcaaaatgcatgtgtttattagttgtactgattagtaagatcatttaggcaccattagcttttttttttttttttgctaattatccatttagacattcattccac

SEQ ID NO: 427792 - DNA, 479 bp, Homo sapiens
aatttaagatcaatgcttgagacaactctaaaaagaagacaaaattgctgggcacagtggctcactcctgtaattccagcactttgggaggccgaggcaggcagagtgcttgagccaaggagtttgataccagcctgagcaacatagtgagaccttttctcaaaaaaaaaaaaaaaaaaaaaaaagacaaaatctttttttttttttaaatcgtwttcaacaggtatcagtaatgactagctcagctgtaaatgacagaaatggtctcaaatgtgctaagctgtcatgatgcaaggtgagtcctcttgaagctttcatttgtcatgtaccaagttctcagagtgaattgtacaatgacacaaagtatggtttaagtaataggctttactggggaaatgtattattcaaagttgagcaagaggagaagacctggtgaagtggatccacaatgtaatttcccagggaggaaaggcgaggcc

SEQ ID NO: 427793 - DNA, 585 bp, Homo sapiens
ttttttctctatttccagcttctggaggctacccccattccttgactcatggcccccttccacatttgaaccagcaatgactgatggagtgtttgccatattgtattactctgacactgactctcctgcctccctcttccatcttgtaatgacctttgggattacattggacctgagaggataatctttctatcttaatgtcattttattagcagccttaattccacctgcacccttaattcaccctacacctaatataacatactcacagcttctagggtgtggctatttttggggatccattgttcttcctaacacagaattgtagaattgtctctcttctctcttcttttatttgtctctctctctctctgttttttgtttgtttgtttgttttgttttgttttgwttttttggtctttgggctttgttcttaatttctaaaaggcagcaaaatgacttctatcagctaatggtctacaacctcctaaattcaggttcaaccagagacagaaaagtgtctttccctccattagcgtgaagttggttactagacctgtcattttctggtttgtttcatgtgca

SEQ ID NO: 427794 - DNA, 602 bp, Homo sapiens
aaagagattaatttgctcaagcccacacagctgttaagtggaagtcaggactctccgagaaaaaagcccttcatattccacaataacatctttcattttcaggaaagagaatatactcacacttggagcttatattctttgaacttacttacattaagaatcactgaaatgtatactcttttttattggtctctcagtatatagatacattttttgctgaataaatgaatgagatatgttatattctcatcattcacagattggaaccctccactgtgaagaatacatgctaaagcctacaagaaaaaataaccattaattagactctaatagtccttaaggagcttaaagtttagtgggagagataagacacacatacacactgcatatataaccagaacatgaggatatgtatgatattttcccagtcagaggcacaaagagctttaaaaattwaaaagggaataaacttacttttggctggagtaataaactttttggaaaaaaaacaagtagtatttgtggttagctttgaagaacctaatactacaatatgtaaaaatgtgagaggggactaatccaaattgaaaaataacccgtaa

SEQ ID NO: 427795 - DNA, 591 bp, Homo sapiens
tcaacactataactctggtaatactgtgctttgatgatctgataaggtgtcatccattttcaacctgaaattaaaaaaagaaaagtgagttaaaataagaacagctgaagatgtcaactgaattgtcttccaaaaacttactcctttccatttgaagtaaaacataagccttatcaascacattagttccatgcatttattgcagaagaaaggagcaaaggaagcatgacatatagtcccatcctttgaaatgtgtcataactgaaatgagaacattagggcctgagcatagagcattatctattaaaggtgattttaattaaaggcattctctttttaacctaaaattgcttggttattaaagagtatagtggtccttgatgtttaactagtgtttgaaaacagttacattttatctgataagaatgtttgtaataactgaacagaaggtatttaaattgtgaataatgcctaacagccaatacctgtaagttcatggtttctatcattttaaggtaaaaatataaagacaagctaagtgaatatgttcacaatatgtttccatgtcccttctttgtatgactatttaaa

SEQ ID NO: 427796 - DNA, 527 bp, Homo sapiens
gctcctgcctgtattctcagccactctgatgactgaggcaggaggatcgcttgaggccagcatttccagcttgctgtgagtaatgcttgygccaccgcattctagcctgctagcctgggcaacagagtaagacctcatctctaaagataaaaaagaaaatataaacaacaatgaatagtcttagattttctaccaagattttgagtatataaatagaaataaaatacattaactaaaaaagaatcagacaaaatatattatctataacaacactcagatatttggtaatctctacacacatttgtgagaaatgtaccacatagttcaaactacattatgtttctctaatatttttgatcataaataagttagaaagacataaaggttttaaggcacaaccatcaaactaatgcagaaatttttacttatactttttaaggaaatattctttttgaactgttatactttttaacagaatacaaatgactagacataaaaatgtatttctttaaatacttacagtagaa

SEQ ID NO: 427797 - DNA, 543 bp, Homo sapiens
aatattcacaattcctattaaagcaataatgtgccagtttttaaattactgaactattctttttgttatttccaagggaatctgattagcaaagatagaacatactaacatggttttgctttgggattcatcgcatgtctgattaaagaatatttaaaaatacatttcagatatcttctcctcacttgctataaagaggctgaaatgacaattaggtagtctcayggttattaaattcagaggacatgaaggtaccttgtaacttgggaaattgaaccagaaatgcacataataacgtagacagtaaaaagaaataaaaggatcagacttatagttttaaaatagatccagttctgcatgcatagaattatcccccaaagcattctgtatataattttaagcatacaaatcaccttggtcaagcaacatgataatgcaagtacaagcctctacttagaaatttagttacttgccccagtaagaagtggtctgaaaatatctatgttgccatgtagaaaaagtaaattgtctatttttttcaga

SEQ ID NO: 427798 - DNA, 543 bp, Homo sapiens
aatattcacaattcctattaaagcaataatgtgccagtttttaaattactgaactattctttttgttatttccaagggaatctgattagcaaagatagaacatactaacatggttttgctttgggattcatcgcatgtctgattaaagaatatttaaaaatacatttcagatatcttctcctcacttgctataaagaggctgaaatgacaattaggtagtctcatrgttattaaattcagaggacatgaaggtaccttgtaacttgggaaattgaaccagaaatgcacataataacgtagacagtaaaaagaaataaaaggatcagacttatagttttaaaatagatccagttctgcatgcatagaattatcccccaaagcattctgtatataattttaagcatacaaatcaccttggtcaagcaacatgataatgcaagtacaagcctctacttagaaatttagttacttgccccagtaagaagtggtctgaaaatatctatgttgccatgtagaaaaagtaaattgtctatttttttcaga

SEQ ID NO: 427799 - DNA, 618 bp, Homo sapiens
caagttctggcgggtggaaaagaacaagcacggaccagagtgcttgtctttttgcattagcctttccctgaaagagtatcaagggaagagccaactggactagttatgktgtttatcaagagcagccaaatatttatatgcacatttaacccctagataatgcactatcacttaaatcaaatacaattataattcttacattgcacctgcctgcaaattcaaacttctgtattttgacacaattgcctctacttgtttatgcattaaggcctatagcatcaactaattcaagagtcattttgatgaccagaaagggaaattttttaataactaataactatgttggtatttgcaaagaggaccctcaaaagggctttcctaaggattcctacttatacataacttatacataactactttatctatctcacagctaaagaggcatgcatagtatttgtactaaattaaggcctgaaaatgttgatataaacagatatttcgggggatgatctgaccaaacaccaaccaggtagatatgcctgtgattgatgtgaactcaacaacctaaaggaacatgatgataatgtaaataaatgaagtggatagggaataaaatat

SEQ ID NO: 427800 - DNA, 618 bp, Homo sapiens
caagttctggcgggtggaaaagaacaagcacggaccagagtgcttgtctttttgcattagcctttccctgaaagagtatcaagggaagagccaactggactagttatgttgtttatcaagagcagccaaatatttatatgcacatttaacccctagataatgcactatcacttaaatcaaatacaattataattcttacattgcacctgcctgcaaattcaaacttctgtattttgacacaattgcctctacttgtttatgcattaaggcctatagcatcaactaattcaagagtcattttgatgaccagaaagggaaattttttaataactaataactatgttggtatttgcaaagaggaccctcaaaagggctttcctaaggattcctacttatacataacttatacataactactttatctatctcacagctaaagaggcatgcatagtatttgtactaaattaaggcctgaaaatgttgatataaacagatatttcgggggatgatctgaccaaacrccaaccaggtagatatgcctgtgattgatgtgaactcaacaacctaaaggaacatgatgataatgtaaataaatgaagtggatagggaataaaatat

SEQ ID NO: 427801 - DNA, 587 bp, Homo sapiens
acataacaggaatgagaatcaaaatgcaatcagctgttttaccagcaacagtgagaggtacaaggcagtaggtatgtaattctgagacatacaccatatgctcccaaaatattccaagaaaatggtttctatactaaatttatatgctcagccaactttctaatcatgtaaatgatcaatttcctttatgctatatttccaaatgtgcacatttacttcatgtgtatatttgtcaggaagatgttctgagatgatctccaccaaaatggagtagtgtgacaagagggagagttgggttaagggaattgaatattcattacaggagaaaagagaagaagtttccaagataatgataactggaattctgaagaggactcaacagacagataaataacttgttcagtttggagcaggaggacaaagtgctctggtagctaataccagatatcattttaaatggtatcaaaaggtttgtgacaatattaatttgaaaagtaagatgtaaaaatagagcraaacagtgaggaaaaagttgtacaagaaaataaacataatactaatatgcagttcaactcagttatatagcc

SEQ ID NO: 427802 - DNA, 634 bp, Homo sapiens
gcttgtgaacatgcgttctaatacttcctttcactgattacattcastacatttttaatgagaagaaaaagataagtgaggcttttcaacataagaactgtgaaaataaataatgttctcaaatatgtgacttaacaacgtcctactgataagcaaaccatcaaataagtgatggttcaagtctcttgtttcagtctttgttccattgtgagctgtaagacctcattcaatgtactggatctttctctgtcccagtttcaacatctgtagaaaagggataataatagtgcctgcatcataatatggctatgacagtttgatgaaataatatatgtatagtattaggacaatgcctcgcatataattaagcacaagctcactacttgttctcattattgttctttttttgacactatgtttctatttaatatgacatgctatttatgctttcttaaaacttaaccgagagataggtattttttattcattaaaaaattctaatgtgctgtgtagctcacttaatgctattcttttggaaagtattgaagattagctttcaagacttactgtctgatccagaagccgtcagtctggtgaaatattcagtgtatagaaaaagagaatggggcgacta

SEQ ID NO: 427803 - DNA, 580 bp, Homo sapiens
ctaaactccttattttatcattaaataaatggaccctaagaggaaaaataatttgcataagttttattagctagtaaatggagaaacaagaactagtctatacatcttttgacttcaaatttagcacaatttttttaaccatggtgcatgcctaagttgagacacttggcactgtgtttttgttttgcttaattttatcaaacataatwaaaaaaaacacatattccccagaacagatatgactgaagccattaaaatgggtaaaatagctctgtcctgtgtgttttgctgcttaatcatatcctctggctacttcatctttttaagctcaagaaaatcactaatttagttaggtaaaaatgttgatgaaaggtccttctatgaatcagtaaatttttgtatcatgatttgccatatgtctttccattagcattccaaaataggtctaattatgcccaggctgagttttgtaatattaacatcatcatatgtttaagaaaagattatgctagacttgatcataagtctttttagttccttcccataagtgagattaatatctagtaatcacagcctacct

SEQ ID NO: 427804 - DNA, 557 bp, Homo sapiens
gatggaagaagaataggaatgagaatggtcaaaacattcaatcgagtataagaatctgcccaattgaagtgatgtactaatattgagtcaagtacttctagcgatgaaacaaggacccagatcagcaggagtgtttgtataattaaaataatccattgatattaaaacaggataaagtaattttatgtattttgattttagtacagtgatttcttaaaaatccagtgargaaaactcaatttagtttcaaaaatgaggtgaaaatgaactgcctgccaaaggttaatgagataaatatgatttgctttagaactacaagcagagtccagagattggtgaataagaagccactttattcagttctctttccaccacttgtggttctcaaaatgaagcttaatgaaataggatttacctatcaatgcctccacagttaattggcatacatagctaatactgactcaaaactcggtctgtttttagggcacattttcctaaggaggtttgctaacacatctatgcccatctccatttgtgacccatcccctttcactatc

SEQ ID NO: 427805 - DNA, 557 bp, Homo sapiens
gatggaagaagaataggaatgagaatggtcaaaacattcaatcgagtataagaatctgcccaattgaagtgatgtactaatattgagtcaagtacttctagcgatgaaacaaggacccagatcagcaggagtgtttgtataattaaaataatccattgatattaaaacaggataaagtaattttatgtattttgattttagtacagtgatttcttaaaaatccagtgaagaaaactcaatttagtttcaaaaatgaggtgaaaatgaactgcctgccaaaggttaatgagataaatatgatttgctttagaactacaagcagagtccagagattggtgaataagaagccactttattcagttctctttccaccacttgtggttctcaaaatgaagcttaatgaaataggatttacctatcartgcctccacagttaattggcatacatagctaatactgactcaaaactcggtctgtttttagggcacattttcctaaggaggtttgctaacacatctatgcccatctccatttgtgacccatcccctttcactatc

SEQ ID NO: 427806 - DNA, 557 bp, Homo sapiens
gatggaagaagaataggaatgagaatggtcaaaacattcaatcgagtataagaatctgcccaattgaagtgatgtactaatattgagtcaagtacttctagcgatgaaacaaggacccagatcagcaggagtgtttgtataattaaaataatccattgatattaaaacaggataaagtaattttatgtattttgattttagtacagtgatttcttaaaaatccagtgaagaaaactcaatttagtttcaaaaatgaggtgaaaatgaactgcctgccaaaggttaatgagataaatatgatttgctttagaactacaagcagagtccagagattggtgaataagaagccactttattcagttctctttccaccacttgtggttctcaaaatgaagcttaatgaaataggatttacctatcaatgcctccacagttaattggcatacatagctaatactgactcaaaactcggtctgtttttagggcacattttcctaaggaggtttgctaacayatctatgcccatctccatttgtgacccatcccctttcactatc

SEQ ID NO: 427807 - DNA, 594 bp, Homo sapiens
atgcaaacaggggaggtaaactttttttcatttttcaatagcatatactaaaaggtacatttttaatacagagaagacaagttttatgctttatctgaccaagggaatattactcagaagaattcagaggctgcatccttgcttagagggaaggagttttgactgagtgttgatgtgcaccacgtaaggggcagtgttttaccgcttgcagcatatgcttgtcaaccctgttttaaatcattttggttgtttttgtccctctaaatgctgttttctaacattcattttacctaaaattaaacagcactcttagaaacttagataacaacatttcatattgagaaagtagatcattggcataggtgaatggatattttagagtttatagttagaagctcwgaccaatcctaacattgccttaaaaaaagtaatcctacgtaagccaggaaggataactgggaaggagagaggaagagaagttgattaatgggtacaaatataaggtttgacataaaataagatttagtgcttgatagataaatagtgtgactatagttcacaagaatctattgtacattttgtttttttagacga

SEQ ID NO: 427808 - DNA, 555 bp, Homo sapiens
atggatagaaatcgagcattaaatttcaggcaactgtctcaggaatcagtcctctgcttgctagaatgttactcattagcagaaaaggtgaggctgtgcaggcactgagctatagcacttactatacatgactcctggtagccaattgtgctgagaactggcaatgaacatggtttctcagcactgtttcctaacataactttgatactgctagcaagacccagtggtattccatatataatctttttatgcattttcagttggtctttggactcaaaatagaatgaagctcatatgataygaataaacttacttcatgactctttaatacctgatatggagaaatgagtgaaaaagtttgcgtttttcccaacaagataaatttaaaaaaaattttatattaggaaagtgttaagaaaatgcaattgctgaaaacgtattttaacataaaagatataatatgggaaacagcttggcaaggagatcaaaagcatggattctgaaaaaaatgttatacgggtaaaattgtgggttccaccatttgctatttgtata

SEQ ID NO: 427809 - DNA, 566 bp, Homo sapiens
gtgtgaccttgaaaaacttactttattttttcaggtctcggttttctcattcataaagtgaggttagtattagtacctactgagttttattttacatataggatttagaacatggggtgtaggtagtacacgttatatgctgcatgtagtatgtcatactatgtgaattccctcaatattattttctaaaaagagtgtacacttcaatttagagacatatgggttcgaaagtcaaagatgtttttttctctsctcactaatctgaacctcagttgtatgatcagggaagtgaagataattcctactgctgaaagctgttttgaggattagaagaaagttcatttatatatgggcaggagatccttgctgaatgtcaagcctctttgctctcctcttcgaaaccctgttgaaattcttcatagtcttcttatattatctcagctggtgaaacattttaagactcctgacatctctcatggtatttatggtatattaacttctgcaatattatagtttctttctcctaagacattctggatgattagaagccattgttgatttaatag

SEQ ID NO: 427810 - DNA, 498 bp, Homo sapiens
actgccatgagagtaagtattttatttagggttcgtattagctctaaataaaattgattgttttctttttcatttcctgctgaactgcaagatttacagaatagtatgctatcatatatatatatatatatatatatayacacacacatatatgtgcacaaatgcacacacatatatatctgtaatatatttatatatgtaatgtacatgatatatgtgcatgtttaatgtcttcagtgcctcttaattgtctagtagagaatcagttaatttatcaaacaaattaaacaaccacaaaaaaattacaagatcgtttgaacatagattgtcagatgtgcagatgtttcctatcaaagtgttcactgaagtttttgttctcatagttctattgtattccaaataaattttaggttcaaagaatgcacattgccttaaagagcttgtcttattgatatctcatgatcataaatagaaaattgtcaaagtacattttaaaag

SEQ ID NO: 427811 - DNA, 498 bp, Homo sapiens
actgccatgagagtaagtattttatttagggttcgtattagctctaaataaaattgattgttttctttttcatttcctgctgaactgcaagatttacagaatagtatgctatcatatatatatatatatatatatatatacacacacatrtatgtgcacaaatgcacacacatatatatctgtaatatatttatatatgtaatgtacatgatatatgtgcatgtttaatgtcttcagtgcctcttaattgtctagtagagaatcagttaatttatcaaacaaattaaacaaccacaaaaaaattacaagatcgtttgaacatagattgtcagatgtgcagatgtttcctatcaaagtgttcactgaagtttttgttctcatagttctattgtattccaaataaattttaggttcaaagaatgcacattgccttaaagagcttgtcttattgatatctcatgatcataaatagaaaattgtcaaagtacattttaaaag

SEQ ID NO: 427812 - DNA, 622 bp, Homo sapiens
gaaagtaattgcggtgtcttctgttactataactaaggttgcattttccaaatgtcaaaggacctttacatttatagtagaggacaatatgctaaattattaaattattgggaatagtatacttttcttatattttgtataatagtgcacagtcgtctttatcatatatgtgtgtgtgtctatatatatgtatatmtatgtatatatacatagatatacatatatacatatgtatgtgtatatatgtatatatatatatatagacacatacacataaattaccttagcatcatatatatatatattacaacaccattataaatttaaaacccaaaatactatgttcagctcactttgtgtcttaaactatctcttattttcttatgaattccacagtggctaatctggatccaaaagcgattccaagttttatgataaacctagagaaaatcattatgaaattgatgcagcatgaaactttcatgagaaagactcatttcttaaaatatactactataaatggcataagccaccaactaacaaatgagccactctctggggatcaaccagcttgagtgcaaaattggtagaggctgccaaaggaaggttaattcttctcaat

SEQ ID NO: 427813 - DNA, 622 bp, Homo sapiens
gaaagtaattgcggtgtcttctgttactataactaaggttgcattttccaaatgtcaaaggacctttacatttatagtagaggacaatatgctaaattattaaattattgggaatagtatacttttcttatattttgtataatagtgcacagtcgtctttatcatatatgtgtgtgtgtctatatatatgtatatctatgtatatatacatagatatacatatatacatatgtatgtgtatatatgtatatakatatatatagacacatacacataaattaccttagcatcatatatatatatattacaacaccattataaatttaaaacccaaaatactatgttcagctcactttgtgtcttaaactatctcttattttcttatgaattccacagtggctaatctggatccaaaagcgattccaagttttatgataaacctagagaaaatcattatgaaattgatgcagcatgaaactttcatgagaaagactcatttcttaaaatatactactataaatggcataagccaccaactaacaaatgagccactctctggggatcaaccagcttgagtgcaaaattggtagaggctgccaaaggaaggttaattcttctcaat

SEQ ID NO: 427814 - DNA, 613 bp, Homo sapiens
gcaaggaagtagagttaggaggtacaaatctatattatcttgtcccacagccctgaagaaacttatgaccaagcactcaaataccagagaaaacctgcaattctgaaaggatgagtgtgatacttggctgtataataatgtcaaaagagaaaacttggaatttgaagacataacttctaatcctgcctcaaccattcattcaaaatagtctatcaatagtggctagtggatagtgttgatcactgttgtwctcttgcaagtttccccccttggcttgtgtcatgatgtatactcatgattatttatttatctgtatcatctattatctctatctaatctataacctatttataatttctcactgacacaatgaaaactactatcaaatatgtatttcagccttgagctctctcccaaacttcaggaatgcatttccaattgcctcacagtcccttctaatatgatgtgccaacataaactcaaattttctatgacaaatctaaactcatcgtccactgcctactcaggagttcctgattcttatttgtttacttgttcctgctatatttcttttcatcaagattcaaaatcccaaagtcatcttctcacttct

SEQ ID NO: 427815 - DNA, 537 bp, Homo sapiens
tggctaacacctgaaaagtacaggcaatataaacaaaaatagacaaataaaactatattaaactaaaaactctgcacagcaagggaaaaaaaatcaagaaagtgaagagacaacctgttgaatgagaaaaaatatttgcaaactattcatcctgtaaggaactaagatccagaatacaaggaactcaaacaattcaacaacaaaaatcaaataatcccaataaaaacagggcaaatgatatgaatagatatttttcaaaataagacatacaaatggcacaaaattaaatgaaaaaagcgtttagcatcaccaaacattaaaaaaatgccaacccaaaccacaatgatatatcattctaccccagttagaatggctattatcaaaggacaaaaaataagagatgctggcaaggatgtatcttttacatccagwatttaagggaactgttatacactgttggtgagaatgtaaattagtacatccattatggaaaacagtatggatatttctcaaacaataactaaaaatagaactacc

SEQ ID NO: 427816 - DNA, 591 bp, Homo sapiens
agctgacataatccgaagtaaacattcaagcagatacttactgtaccaaaattcctgtcattttscagtagctgtaattaaagagctagagttgaaactcatagttttacttttagtacagagccaagaattagtcacattactccatatgaatatgatttgtaaattgagtgattattgattcatttctgtattcacacattattttatcctagagtgtacaccagcaacttgcatatttttagggaaaaaaaaaaaaacacaactcattacagagatgtgccatctctaaactctaagcatcactgttactcaggctcaccctgggaattcactttccctactggaagaaatacttgctggaagaaaaacccaggccaaacagagtatgtttgcctaacctctgctttttcttagaatcatgaggcaagtgaaagaagatagtctaagtctatgcctcccacacttggtgtgcaaagggatatacaaaattgaaggacaaaatggtacagtttcttgtaatttatttttatttatatgattcaaatacttaaaaaaataatgttatagatggtgccacaaattaaatta

SEQ ID NO: 427817 - DNA, 591 bp, Homo sapiens
agctgacataatccgaagtaaacattcaagcagatacttactgtaccaaaattcctgtcattttccagtagctgtaattaaagagctagagttgaaactcatagttttacttttagtacagagccaagaattagtcacattactccatatgaatatgatttgtaaattgagtgattattgattcatttctgtattcacacattattttatcctagagtgtacaccagcaacttgcatatttttagggaaaaaaaaaaaaacacaactcattacagagatgtgccatctctaaactctaagcatcactgttactcaggctcaycctgggaattcactttccctactggaagaaatacttgctggaagaaaaacccaggccaaacagagtatgtttgcctaacctctgctttttcttagaatcatgaggcaagtgaaagaagatagtctaagtctatgcctcccacacttggtgtgcaaagggatatacaaaattgaaggacaaaatggtacagtttcttgtaatttatttttatttatatgattcaaatacttaaaaaaataatgttatagatggtgccacaaattaaatta

SEQ ID NO: 427818 - DNA, 591 bp, Homo sapiens
agctgacataatccgaagtaaacattcaagcagatacttactgtaccaaaattcctgtcattttccagtagctgtaattaaagagctagagttgaaactcatagttttacttttagtacagagccaagaattagtcacattactccatatgaatatgatttgtaaattgagtgattattgattcatttctgtattcacacattattttatcctagagtgtacaccagcaacttgcatatttttagggaaaaaaaaaaaaacacaactcattacagagatgtgccatctctaaactctaagcatcactgttactcaggctcaccctgggaattcactttccctactggaagaaatacttgctggaagaaaaacccaggccaaacagagtatgtttgcctaacytctgctttttcttagaatcatgaggcaagtgaaagaagatagtctaagtctatgcctcccacacttggtgtgcaaagggatatacaaaattgaaggacaaaatggtacagtttcttgtaatttatttttatttatatgattcaaatacttaaaaaaataatgttatagatggtgccacaaattaaatta

SEQ ID NO: 427819 - DNA, 538 bp, Homo sapiens
taatttcttactctatgcatatattataatgtatgtcattggaatctgtaatttttaaacatatggaggaaagtaaaagagaagctttccagaattaagctgcactgtgatacaactacagctttctcatgtagtaccataatcctgaaagcaaatgtctgacattctttttcttcagtcggaacctgatttatgggtttacatgtgcatcaatgcctcctttagatcgttgcagtatgaaaaagagtaaaagaagcagcttaagattgtctttgtcaacagttctgggaaataataatcagcctgtcatacaaagggaacaggatagaagagtactgagggaagaaatacaytgactactattgaataaatgaacagtattttgggtaccttctgatatgcagtttgtggatagcagcaaccacccactcacaatcaccatttaatgtagttatttttacacacctttggggaagctcctggataatgatttgagtattaaaatttcagtaatgtattatggtcatcctgtcagatt

SEQ ID NO: 427820 - DNA, 585 bp, Homo sapiens
ccaccctcacccaccccccacccccaattttttctgcagttgattctgtgtttccaagtcttccaacaaaggtttgtggtcaaartttttaaagtattttagaaaaaatttttgaattcttaattgattcatattcatctcccaatcttaagactaggattgctctagtcattattgaatttgaggctttgcaagttattcaaacttcttaaaacataaatcatgcaacatatgtataggagaaataaaaattaggggttggagtcagaatgtctcttaggagagaaaaccccctctgtctggcaaaacactatgttggtcattttggctgaagaatcgctctggaacgattggacaataatttctttcctgcctaaggaatgcttctaaattgggatagttgctagttaatgtattaaagaagaaaggaaaggagatcaaaggtgggagagagagtgcatagcaatatggcagaacctgaagcctaaacagaaaggataagcaagaaaatcctgcccagtagaagagagaacagactccacctggaactatgaggcttcctggttgagcttgtgttattgcatt

SEQ ID NO: 427821 - DNA, 585 bp, Homo sapiens
ccaccctcacccaccccccacccccaattttttctgcagttgattctgtgtttccaagtcttccaacaaaggtttgtggtcaaaatttttaaagtattttagaaaaaatttttgaattcttaattgattcatattcatctcccaatcttaagactaggattgctctagtcattattgaatttgaggctttgcaagttattcaaacttcttaaaacataaatcatgcaacatatgtataggagaaataaaaattaggggttggagtcagaatgtctcttargagagaaaaccccctctgtctggcaaaacactatgttggtcattttggctgaagaatcgctctggaacgattggacaataatttctttcctgcctaaggaatgcttctaaattgggatagttgctagttaatgtattaaagaagaaaggaaaggagatcaaaggtgggagagagagtgcatagcaatatggcagaacctgaagcctaaacagaaaggataagcaagaaaatcctgcccagtagaagagagaacagactccacctggaactatgaggcttcctggttgagcttgtgttattgcatt

SEQ ID NO: 427822 - DNA, 541 bp, Homo sapiens
atatttctgacccacaagaactatgagataataacatagtattattttaagctgctaagtttgtagtaattttctacagcaatagaaaactattaagtgatctcttacagaaaaaagatagaatgtttcccaaataaaagcattttccaactttgataattttmtatcatatgcacatacatggtttttctactatgcttgagacatcagtttttgtttataggttgatcctaacattaaaaacaaacttttatagtagtttgagtatatgaatactattggcttcaatagtgtttaatcttatgcacctttcctgaatatttaaggctaagaaccatttgcatcagagatttttatttttttgttaattttttaatgtttttattttgagatggggtctctgtcacacaggctggagtgccaaatatgtgcacatgtacatgcaagactaggacacctaactccacagaatttgtaggaaaaatccaatctcaacaataaattgtaagtaattctaataatcacagaatgtcagagataa

SEQ ID NO: 427823 - DNA, 536 bp, Homo sapiens
ggtatctttttataaataagaaaagaacaagtttcctttacttaagaaacttctttcagaaaaattatcagaatttaaagtttttttgtaaaaagaaaaaagatacttcgctgccacctacaggaaggttttgctgtaatttgggaatctataatcactgtaatacagtgtccttttagatgtgctatccttgtgaagacaagagtttgcacaaacatacatagcagccctattgaaatgtgaaaactagtgccctgatttccaagcccttytacttaactgtaccataaactcagaaatatgtatgcaatacctagttacatgatatatgtaaattttctaggtagaactgttcaatgctttgtggctccatccctagtcactacaatacacccataccatctattccaccgtcattattcctgagggcacatttccattgctgctgtctagatcctgaatgtcctaaggacaaaagggattttagaaggagaggtgtcagaaaataaatggagttacagaaaaatgtaaatgta

SEQ ID NO: 427824 - DNA, 605 bp, Homo sapiens
aattctgttaggaggatacaaacagaagtagtatgtccatcttgtgacacaaagcatgaggattttaaaaactacattacatagctattgttacactgagttagctaaaaacttttgttttcaaaaagaagcacagtgtattgttaaataaatatttgtagctccaaaaatgctctattatctcaataaagtacatcaasatataagcaaggccattgtgttttaacctttatggtatgctactacctgataaccatagtctacactgtgacatttaatactgattatacaaacttgactacacaccagaaatcagaagtatttttctgacagcttagtgcaccattcccttcttagtggttctttgaataaagaagtcattctctatttctatcaatttctgtactgtggattgcatatgtccttggagaaattctgatatacacttaggaatcaccctaagatatttttaacaaaataaatgcatttctactgcctcagaatttttggcttggacttcagtcaggttaaacattagttggtacttgactacttttttctttctttaaatttttatctaactctaatataccatatctaatgta

SEQ ID NO: 427825 - DNA, 605 bp, Homo sapiens
aattctgttaggaggatacaaacagaagtagtatgtccatcttgtgacacaaagcatgaggattttaaaaactacattacatagctattgttacactgagttagctaaaaacttttgttttcaaaaagaagcacagtgtattgttaaataaatatttgtagctccaaaaatgctctattatctcaataaagtacatcaagatataagcaaggccattgtgttttaacctttatggtatgctactacctgataaccatagtctacactgtgacatttaatactgattatacaaacttgactacacaccagaaatcagaagtatttttctgacagcttagtgcaccattcccttcttagtggttctttgaataaagaagtcattctctatttctatcaatttctgtactgtggattgcatatgtccttggagaaattctgatatacacttaggaatcaccctaagatatttttaacaaaataaatgcatttctactgcctcagaatttttggcttggacttcagtcaggttaaacattagttggtacttgactacttttttctttctttaaatttttatmtaactctaatataccatatctaatgta

SEQ ID NO: 427826 - DNA, 683 bp, Homo sapiens
gtattaaaacaattttcttataggcttggaaaaatatattcttcacaatattccttcatttatttactcaattaatatttacaatctaatatgtaccccatggtgtggcaatatgaaatcagagatctataaactgaggagccaaagagggacacagatgctagaactatatttggtctaaaagggcatttccaagctctcatgtgtatcataaatccttagtgatattcccttgtgggattatgtattgtcacattacaggtacatcayctgcaaaaggtaagttcttctctgaatatcagaactggaaattagaggaaaacagctgcatacacattgtgccaatcatcagagcatttctgggaaaagccaatttttcctgtgggtttgctcatcaaatctttctatgtttgacagtgacatcaggcatttttcatctctactgaattgagacagaatactgatggacaacatttcaattgctcaccccacagaagaaagacatttattaaaagttaagataaaagtcttcaaaaattcacacatgtgtggtattctctcagttctcttaaccatatattagaattttaaaaaggcaaacatttctgtttatagaaaaatgtcaagttgaatacagcttaatttactgactccctaaacaggttctcaaatgaaaatagtgg

SEQ ID NO: 427827 - DNA, 683 bp, Homo sapiens
gtattaaaacaattttcttataggcttggaaaaatatattcttcacaatattccttcatttatttactcaattaatatttacaatctaatatgtaccccatggtgtggcaatatgaaatcagagatctataaactgaggagccaaagagggacacagatgctagaactatatttggtctaaaagggcatttccaagctctcatgtgtatcataaatccttagtgatattcccttgtgggattatgtattgtcacattacaggtacatcatctgcaaaaggtaagttcttctctgaatatcagaactggaaattagaggaaaacagytgcatacacattgtgccaatcatcagagcatttctgggaaaagccaatttttcctgtgggtttgctcatcaaatctttctatgtttgacagtgacatcaggcatttttcatctctactgaattgagacagaatactgatggacaacatttcaattgctcaccccacagaagaaagacatttattaaaagttaagataaaagtcttcaaaaattcacacatgtgtggtattctctcagttctcttaaccatatattagaattttaaaaaggcaaacatttctgtttatagaaaaatgtcaagttgaatacagcttaatttactgactccctaaacaggttctcaaatgaaaatagtgg

SEQ ID NO: 427828 - DNA, 598 bp, Homo sapiens
ggttgcatcctttcatgatgaactgggaaatcctgttcctaactggaaagtcaactacaagttatawttcctttactacaagaggattaaaggattttggttgccaagtagtagtatccttcaaaattggtctgggatacaatttcttctcattaggtgatttagaggcctattgaaaaatacaaaatataccagtttaaaagccttagaagttcacttagaattttacatcattcaaattctttgtcatggcagtctactgttaatctcattctgaacaataatgtaaatagtaaaagtaaataaatttaaaaaggtaacaggcaaacatttgctgatctcttagcatgtgccaggctccgtactagtgcctgactcaaattttcttatttattcctaaatgaaggtaataaaactcagccccatattattgataaggaactgatgcctggaaaagctaactaacatggagggtaattcatgtggtaagtttagctgtgatttaaacgtaggcagactgattccaaacacactagtcttaaccactcattcatattatcagtaaaacagtgtgtgaaatttagttggttttggcatt

SEQ ID NO: 427829 - DNA, 598 bp, Homo sapiens
ggttgcatcctttcatgatgaactgggaaatcctgttcctaactggaaagtcaactacaagttataattcctttactacaagaggattaaaggattttggttgccaagtagtagtatccttcaaaattggtctgggatacaatttcttctcattaggtgatttagaggcctattgaaaaatacaaaatataccagtttaaaagccttagaagttcacttagaattttacatcattcaaattctttgtcatggcagtctactgttaatctcattctgaacaataatgtaaatagtaaaagtaaataaatttaaaaaggtaacaggcaaacatttgctgatctcttagcatgtgccaggctccgtactagtgcctgacycaaattttcttatttattcctaaatgaaggtaataaaactcagccccatattattgataaggaactgatgcctggaaaagctaactaacatggagggtaattcatgtggtaagtttagctgtgatttaaacgtaggcagactgattccaaacacactagtcttaaccactcattcatattatcagtaaaacagtgtgtgaaatttagttggttttggcatt

SEQ ID NO: 427830 - DNA, 506 bp, Homo sapiens
catgccaccattatcaaaataggtcatgaatttaaacatactgatatagaaaccctatcatcagtaaactaagttcactaaacagaagagtattggccaaatcactgggaatttctggcaactttctaaaaagttgtaaaccttatgacttagagtttaacctttcttctacctaaggaaaactttggtgtgccgaaagctgtttgcagctgatttctattaggaatggtgctagccaaccaactatattagtaggtaggatatatattttcatccatttttcaaaatctcatacttagaatacatggaagtttataataaaatgaaactcaacataagaattatgatgaaaacgargatattctcgcaaagatattcacatctgtgtgtcttgagtggcatttcttatgtgtatatataacattcatccaattatcacaccatattcattttaaatccatagcctaagacattattgggtataatgacataatcatatagaacaa

SEQ ID NO: 427831 - DNA, 506 bp, Homo sapiens
catgccaccattatcaaaataggtcatgaatttaaacatactgatatagaaaccctatcatcagtaaactaagttcactaaacagaagagtattggccaaatcactgggaatttctggcaactttctaaaaagttgtaaaccttatgacttagagtttaacctttcttctacctaaggaaaactttggtgtgccgaaagctgtttgcagctgatttctattaggaatggtgctagccaaccaactatattagtaggtaggatatatattttcatccatttttcaaaatctcatacttagaatacatggaagtttataataaaatgaaactcaacataagaattatgatgaaaacgaggatattctcrcaaagatattcacatctgtgtgtcttgagtggcatttcttatgtgtatatataacattcatccaattatcacaccatattcattttaaatccatagcctaagacattattgggtataatgacataatcatatagaacaa

SEQ ID NO: 427832 - DNA, 595 bp, Homo sapiens
acatgaataaagccctgtacctacaaccatctgatcttcaggaaagtgaacaaaaataaggaatggggcamagattccctattcaataaatactgtgaggataactggctagccatatgcagaagaatgaaagtgaatccctatctatcaccatacataaaattaacttatgacagattaatgacttaaatgaaagaactataaatacaaaattctagaagaaaatccagaacatactttcttgatatcagccttggcaaataattaatggccaagtcctcaaaactagttgcaacaaaaacaaaaattaacaagtggggcctaactaaattaaagagcttcttctcagcaagagagtttctcttgatgtgaagaagctctgacaatctgtgctcagacaatctgtgaagacaaaccatctgcagaatgggagaaaatattcagaaactatgtcatatccagaatctataaaccccaatatccagaatctataagaaatgtaaattaatcaataagcaaaaaacaaataaccccatgaaaaagtggagaaaggacatggacagccacttctcaaaagaagacatacaagcagaaa

SEQ ID NO: 427833 - DNA, 572 bp, Homo sapiens
actgctaactcctttaaagtcattttggagtcggccaggcagaatatgactcaacctagcttggaaaatgaggaaatagtgacaaatgcagaaagaccatctgaaccctaggcattctcctctaacccagctactccatacaatgagtgttaggatggtgattaaaactgagggagaccagtcttggtaaacagcaccacccaggacacatgaatacaccaacttttatggaggaggaaggcaaacaaagggtggcagaatccagttatttcctaaggagtccttcattctaaacacttctggtgggtcaatcttgagcctgattttagtgccatgtattcttaatcagcataataaatcttactaggaaaaaataggcctcaaaggaattcaatgactctaaaataaaatacatgtatatcgaagacaaccagatttacaaaaattaacaatagtttaaaatatgtgaccatgtgtgktggtttacgtctgtaatcccagcactttgggagtccaagacaggagcattgcttgaagctaggagtttgagatcagctcgggcaaccaagaga

SEQ ID NO: 427834 - DNA, 525 bp, Homo sapiens
attctcaacaaaaatacacaggaacagaaaaacaaatatcgcatgttctcactcataagtgggagttgaaaaacgagaacacatggacacaggcaggggaacatcacacactggggcctgttgtggggtggggagctaaataaatataaatataatttaaatatatacataaatataatataaaatgttatgactaaattctttgttaaataaaaagtgaatgaacaagtaaacaaatgaatcaataaaggtagatcagtaagattggacctgttacgtttctgatacacttctgtcagcatctatgccaagctttgcctaaycaccttaagctcccaatggtcccaatttctttattcttgacaaatgaactcacttctactttattgaaaccatcagtgaccatctataaagagctcctttatgtacctataaatcatcctagctcacattttcctacatttgaaatcacccattcttgaattttcagtgcccattgtccagactaacttttccactagaact

SEQ ID NO: 427835 - DNA, 525 bp, Homo sapiens
attctcaacaaaaatacacaggaacagaaaaacaaatatcgcatgttctcactcataagtgggagttgaaaaacgagaacacatggacacaggcaggggaacatcacacactggggcctgttgtggggtggggagctaaataaatataaatataatttaaatatatacataaatataatataaaatgttatgactaaattctttgttaaataaaaagtgaatgaacaagtaaacaaatgaatcaataaaggtagatcagtaagattggacctgttacgtttctgatacacttctgtcagcatctatgccaagctttgcctaaccaccttaagctcccaatggtcccaatttctttattcttgacaaatgaactcayttctactttattgaaaccatcagtgaccatctataaagagctcctttatgtacctataaatcatcctagctcacattttcctacatttgaaatcacccattcttgaattttcagtgcccattgtccagactaacttttccactagaact

SEQ ID NO: 427836 - DNA, 384 bp, Homo sapiens
tacatttgaaatcacccattcttgaattttcagtgcccattgtccagactaacttttccactagaactttaaattcaatcaattccttttatctctagcatcaaatattctctatcagctttaagctgttaatcctctgtggttcctcctgtactaatgcagactcatgctagtccattccaaaagacctccttgatatggctactattacatagtccttcctttattaaaaatatttcatctctaactccctattgtaacaatgtgttgttatgcttcctgttaagtttcttcctaaaatttttcattaataayctactaagaaataaaatatactaacttatagtattctgtgactaagatatctaaagtttggtttgatag

SEQ ID NO: 427837 - DNA, 405 bp, Homo sapiens
aaggacaggacagtctactaaatgtattgtaatrtaatgaaaataactaagccatgttattctattattttgtaaagtatctctggtttttcattcattaaaaaacatgcctctcttttggggacactccattgtccttttcttctagtcacattgaagtctgtttgcctttgaaggcagccacattaactcactgtctacagggaaaaatcacacccctttttatgggaggaagtacagatttttgattcctgagtcctgtaaatacaagtagcacctcagactttacctagattgatatccctctttctccatttctcagcttgcaaaatggagtgggcaattgtttaaggggaaaagtgtatgtgctttcaaattccagttcacttctcattagtgaaatct

SEQ ID NO: 427838 - DNA, 618 bp, Homo sapiens
ttgtcatttcactgtggctcttatttctgaaggacaggacagtctactaaatgtattgtaatgtaatgaaaataactaagccawgttattctattattttgtaaagtatctctggtttttcattcattaaaaaacatgcctctcttttggggacactccattgtccttttcttctagtcacattgaagtctgtttgcctttgaaggcagccacattaactcactgtctacagggaaaaatcacacccctttttatgggaggaagtacagatttttgattcctgagtcctgtaaatacaagtagcacctcagactttacctagattgatatccctctttctccatttctcagcttgcaaaatggagtgggcaattgtttaaggggaaaagtgtatgtgctttcaaattccagttcacttctcattagtgaaatctgtggattggtgaatacaattaatctcctgaattatactttgcaaaaacaaccaacactttttcttagacacaatacaatgcaatttcatactaaagaaagaatattacctattagcataatcatgcccattattttaataacaataaatggatattcattatccatttttgtgctgagaatcat

SEQ ID NO: 427839 - DNA, 405 bp, Homo sapiens
aaggacaggacagtctactaaatgtattgtaatgtaatgaaaataactaagccatgttattctattattttgwaaagtatctctggtttttcattcattaaaaaacatgcctctcttttggggacactccattgtccttttcttctagtcacattgaagtctgtttgcctttgaaggcagccacattaactcactgtctacagggaaaaatcacacccctttttatgggaggaagtacagatttttgattcctgagtcctgtaaatacaagtagcacctcagactttacctagattgatatccctctttctccatttctcagcttgcaaaatggagtgggcaattgtttaaggggaaaagtgtatgtgctttcaaattccagttcacttctcattagtgaaatct

SEQ ID NO: 427840 - DNA, 618 bp, Homo sapiens
ttgtcatttcactgtggctcttatttctgaaggacaggacagtctactaaatgtattgtaatgtaatgaaaataactaagccatgttattctattattttgtaaagtatctctggtttttcattcattaaaaaacatgcctctcttttggggacactccattgtccttttcttctagtcacattgaagtctgtttgcctttgaaggcagccacattaactcactgtctacagggaaaaatcrcacccctttttatgggaggaagtacagatttttgattcctgagtcctgtaaatacaagtagcacctcagactttacctagattgatatccctctttctccatttctcagcttgcaaaatggagtgggcaattgtttaaggggaaaagtgtatgtgctttcaaattccagttcacttctcattagtgaaatctgtggattggtgaatacaattaatctcctgaattatactttgcaaaaacaaccaacactttttcttagacacaatacaatgcaatttcatactaaagaaagaatattacctattagcataatcatgcccattattttaataacaataaatggatattcattatccatttttgtgctgagaatcat

SEQ ID NO: 427841 - DNA, 618 bp, Homo sapiens
ttgtcatttcactgtggctcttatttctgaaggacaggacagtctactaaatgtattgtaatgtaatgaaaataactaagccatgttattctattattttgtaaagtatctctggtttttcattcattaaaaaacatgcctctcttttggggacactccattgtccttttcttctagtcacattgaagtctgtttgcctttgaaggcagccacattaactcactgtctacagggaaaaatcacacccctttttatgggaggaagtacagatttttgattcctgagtcctgtwaatacaagtagcacctcagactttacctagattgatatccctctttctccatttctcagcttgcaaaatggagtgggcaattgtttaaggggaaaagtgtatgtgctttcaaattccagttcacttctcattagtgaaatctgtggattggtgaatacaattaatctcctgaattatactttgcaaaaacaaccaacactttttcttagacacaatacaatgcaatttcatactaaagaaagaatattacctattagcataatcatgcccattattttaataacaataaatggatattcattatccatttttgtgctgagaatcat

SEQ ID NO: 427842 - DNA, 519 bp, Homo sapiens
agatttttgattcctgagtcctgtaaatacaagtagcacctcagactttacctagattgatatccctctttctccatttctcagcttgcaaaatggagtgggcaattgtttaaggggaaaagtgtatgtgctttcaaattccagttcacttctcattagtgaaawctgtggattggtgaatacaattaatctcctgaattatactttgcaaaaacaaccaacactttttcttagacacaatacaatgcaatttcatactaaagaaagaatattacctattagcataatcatgcccattattttaataacaataaatggatattcattatccatttttgtgctgagaatcatttggtgttttattcctttcctatagacctgaaggtatcaaaatgatagcagtagtaaatagtaatctttgttgttagagaaagaggcaatggttttgattacattctggtttgaggtaatctgattgtgatagcatgtttggtgagagaaatttgtaatcaatttctt

SEQ ID NO: 427843 - DNA, 419 bp, Homo sapiens
aaatggagtgggcaattgtttaaggggaaaagtgtatgtgctttcaaattccagttcacttctcattagtgaaatctgtggattggtgaatacaattaatctcctgaattatactttgcaaaaacaaccaacactttttyttagacacaatacaatgcaatttcatactaaagaaagaatattacctattagcataatcatgcccattattttaataacaataaatggatattcattatccatttttgtgctgagaatcatttggtgttttattcctttcctatagacctgaaggtatcaaaatgatagcagtagtaaatagtaatctttgttgttagagaaagaggcaatggttttgattacattctggtttgaggtaatctgattgtgatagcatgtttggtgagagaaatttgtaa

SEQ ID NO: 427844 - DNA, 519 bp, Homo sapiens
agatttttgattcctgagtcctgtaaatacaagtagcacctcagactttacctagattgatatccctctttctccatttctcagcttgcaaaatggagtgggcaattgtttaaggggaaaagtgtatgtgctttcaaattccagttcacttctcattagtgaaatctgtggattggtgaatacaattaatctcctgaattatactttgcaaaaacaaccaacactttttcttagacacaatacaatgcaatttcatactaaagaaagaatrttacctattagcataatcatgcccattattttaataacaataaatggatattcattatccatttttgtgctgagaatcatttggtgttttattcctttcctatagacctgaaggtatcaaaatgatagcagtagtaaatagtaatctttgttgttagagaaagaggcaatggttttgattacattctggtttgaggtaatctgattgtgatagcatgtttggtgagagaaatttgtaatcaatttctt

SEQ ID NO: 427845 - DNA, 562 bp, Homo sapiens
gtaaatgagtatactaaaaatacatcataatacctatcctgagctccagtctcaaatttccaacttttttctggccattttcatttttactttgttttatgtataaagaaaacaaacaaaaastagcaaaaacataaaactggctccagctcttatgccaggtgctatgagtaaaggacaaagttcctgactcaagtttctcctatttatgttaaaggtactattgtcaaactgatcaaaaatttgtggtcacagacattgtcattaccttggtttgcctatgcctactcatatacttaaattctttttttcaatgatttctcaaatttatttctactttctttaccttctgtgacccttacacttaaaaggtgaaagtggaagacagtcttttgattttttttttgaatgcacaaaatacatgttattccctgactctccttttgatggatagcccttttttgagcaatttacaatcattttctttttttgattatttatgaataaagttcaaattctcacatctaatattctaaatccttcataatttgtcccaacattt

SEQ ID NO: 427846 - DNA, 562 bp, Homo sapiens
gtaaatgagtatactaaaaatacatcataatacctatcctgagctccagtctcaaatttccaacttttttctggccattttcatttttactttgttttatgtataaagaaaacaaacaaaaagtagcaaaaacataaaactggctccagctcttatgccaggtgctatgagtaaaggacaaagttcctgactcaagtttctcctatttatgtyaaaggtactattgtcaaactgatcaaaaatttgtggtcacagacattgtcattaccttggtttgcctatgcctactcatatacttaaattctttttttcaatgatttctcaaatttatttctactttctttaccttctgtgacccttacacttaaaaggtgaaagtggaagacagtcttttgattttttttttgaatgcacaaaatacatgttattccctgactctccttttgatggatagcccttttttgagcaatttacaatcattttctttttttgattatttatgaataaagttcaaattctcacatctaatattctaaatccttcataatttgtcccaacattt

SEQ ID NO: 427847 - DNA, 562 bp, Homo sapiens
gtaaatgagtatactaaaaatacatcataatacctatcctgagctccagtctcaaatttccaacttttttctggccattttcatttttactttgttttatgtataaagaaaacaaacaaaaagtagcaaaaacataaaactggctccagctcttatgccaggtgctatgagtaaaggacaaagttcctgactcaagtttctcctatttatgttaaaggtactattgtcaaactgatcaaaaatttgtggtcacagacattgtcattaccttggtttgcctatgcctactcatatrcttaaattctttttttcaatgatttctcaaatttatttctactttctttaccttctgtgacccttacacttaaaaggtgaaagtggaagacagtcttttgattttttttttgaatgcacaaaatacatgttattccctgactctccttttgatggatagcccttttttgagcaatttacaatcattttctttttttgattatttatgaataaagttcaaattctcacatctaatattctaaatccttcataatttgtcccaacattt

SEQ ID NO: 427848 - DNA, 621 bp, Homo sapiens
tatttctactttctttaccttctgtgacccttacacttaaaaggtgaaagtggaagacagtcttttgattttttttttgaatgcayaaaatacatgttattccctgactctccttttgatggatagcccttttttgagcaatttacaatcattttctttttttgattatttatgaataaagttcaaattctcacatctaatattctaaatccttcataatttgtcccaacatttacttctaattgtatattcaaatattctgaaacaatcacattattctgtctaatgtatgcattctatacttctgaatatgttttctatgcttatcaccaaatttgcacttgtcttttgaataatccataatgcatttttcctcttccccatattattgaagagtatcacataatagaagctctattaacctttctttgatcatcatagtccacgatggcatctccctccttagaagatccccaatatatattgcatagcacttttctgaaagttgcttttttgtgtttatgtttcttatgttcagacttggatattaagtgacctgaagataaaagatctgtattctacatcttctgttcacacatagcacttactgaggaactatac

SEQ ID NO: 427849 - DNA, 621 bp, Homo sapiens
tatttctactttctttaccttctgtgacccttacacttaaaaggtgaaagtggaagacagtcttttgattttttttttgaatgcacaaaatacatgttattccctgactctccttttgatggatagcccttttttgagcaatttacaatcattttctttttttgattatttatgaataaagttcaaattctcacatctaatattctaaatccttcataatttgtcccaacatttacttctaattgtatattcaaatattctgaaacaatcacattattctgtctaatgtatgcattctatacttctgaatatgttttctatgcttatcaccaaatttgcacttgtcttttgaataatccataatgcatttttcmtcttccccatattattgaagagtatcacataatagaagctctattaacctttctttgatcatcatagtccacgatggcatctccctccttagaagatccccaatatatattgcatagcacttttctgaaagttgcttttttgtgtttatgtttcttatgttcagacttggatattaagtgacctgaagataaaagatctgtattctacatcttctgttcacacatagcacttactgaggaactatac

SEQ ID NO: 427850 - DNA, 605 bp, Homo sapiens
ttcttaagcttgattgatgtcttataaatatgtagtcattaatatgtgggtctagatttgcaatacttctgaacttccacaaatgttagggacaggcctgaatagctaacttttttcttttatttcaagttgacttaatattataaaaaacattttattttttcctttaatagagtcaagtatacagtttctgttttcatccagtaactttagcagagactttttctctctgctagtgaaagagaggactcaggtttagaggaaatttgctttttcagaacatttgatcttcgtaacacatcaagatgtatttagagaaaagaaaacacrgacttagtactatttataaatagcttctttacccttactcctaaattaaaacaaaactaaaacctaggaaaagcacttgcattatacaaaatttatactttagctatttctacatttaaaaataaaataatataaatcaccaattttacgttttaagcaaaagtgtattctcaaactttatattattcagcaatacctattactctccaagtatatgcatgtatcatttctctcatttaaagtctctgaccacatctagaaaaagtgaaaaatgg

SEQ ID NO: 427851 - DNA, 373 bp, Homo sapiens
gaggctctgttcttttttttttttttttttcttcattttcagtctatattccctctggtctttggattagtaaatttttaatgtcctattttcaagttcacttattcttttctctatttcctccattacgctgttgagccatcaagtattttttaaagtttcaattatatttttcggkgccaaaatttctatttgtctcttggcatcttctatttatttgtaaagctttccattgtttcatttgtttcagcaatattcgcaattgctcattaaaacatttttatggtggtggctttaaaatccttgtgaataaatctaatttatgtgttatcactgtgttggcatgtgttatctcattcaagatgagattttt

SEQ ID NO: 427852 - DNA, 448 bp, Homo sapiens
tgctcattaaaacatttttatggtggtggctttaaaatccttgtgaataaatctaatttatgtgttatcactgtgttggcatgtgttatctcattcaagatgagatttttttctggtgcttgatatgctgagtaattttcaaygtatctagggtaatttggatattatgctatgaggttctgtattttaactattggaaataaacctcctgtgacaccacacatggtgaaagtgggggtgccttgttattgctaggtggtgataaaaatttatccctgctcaaccacctttggagagtgagggatttttttcttgtttctgctcccactatggcctacactgaagggaaggcaaacatcaggaggccttggacctttttaccactagatgatagtgaaagttccaacttctcacttagtttactttgacacctaaggaatctggtgga

SEQ ID NO: 427853 - DNA, 448 bp, Homo sapiens
tgctcattaaaacatttttatggtggtggctttaaaatccttgtgaataaatctaatttatgtgttatcactgtgttggcatgtgttatctcattcaagatgagatttttttctggtgcttgatatgctgagtaattttcaatgtatctagggtaatttggatattatgctatgaggytctgtattttaactattggaaataaacctcctgtgacaccacacatggtgaaagtgggggtgccttgttattgctaggtggtgataaaaatttatccctgctcaaccacctttggagagtgagggatttttttcttgtttctgctcccactatggcctacactgaagggaaggcaaacatcaggaggccttggacctttttaccactagatgatagtgaaagttccaacttctcacttagtttactttgacacctaaggaatctggtgga

SEQ ID NO: 427854 - DNA, 448 bp, Homo sapiens
tgctcattaaaacatttttatggtggtggctttaaaatccttgtgaataaatctaatttatgtgttatcactgtgttggcatgtgttatctcattcaagatgagatttttttctggtgcttgatatgctgagtaattttcaatgtatctagggtaatttggatattatgctatgaggttctgtattttaactmttggaaataaacctcctgtgacaccacacatggtgaaagtgggggtgccttgttattgctaggtggtgataaaaatttatccctgctcaaccacctttggagagtgagggatttttttcttgtttctgctcccactatggcctacactgaagggaaggcaaacatcaggaggccttggacctttttaccactagatgatagtgaaagttccaacttctcacttagtttactttgacacctaaggaatctggtgga

SEQ ID NO: 427855 - DNA, 496 bp, Homo sapiens
aacctcctgtgacaccacacatggtgaaagtgggggtgccttgttattgctaggtggtgataaaaatttatccctgctcaaccacctttggagagtgrgggatttttttcttgtttctgctcccactatggcctacactgaagggaaggcaaacatcaggaggccttggacctttttaccactagatgatagtgaaagttccaacttctcacttagtttactttgacacctaaggaatctggtggagaaggacggggcacattgtaactacctggtagagaagaaagttctagattcccacacggccttctctgatatcacccagacattgataggcggcagggcctgttagtttgtgtgtgtgtttaaattacacattaccaatagtatcactttgcataaacctatactaaactaaaagcacggaccccacagaagatatgtaattaaagttatcttgtagtatgcaggtctttttcacagatgcattcagtgt

SEQ ID NO: 427856 - DNA, 496 bp, Homo sapiens
aacctcctgtgacaccacacatggtgaaagtgggggtgccttgttattgctaggtggtgataaaaatttatccctgctcaaccacctttggagagtgagggatttttttcttgtttctgctcccactatggcctacactgaagggaaggcaaacatcaggaggccttggacctttttaccactagatgatrgtgaaagttccaacttctcacttagtttactttgacacctaaggaatctggtggagaaggacggggcacattgtaactacctggtagagaagaaagttctagattcccacacggccttctctgatatcacccagacattgataggcggcagggcctgttagtttgtgtgtgtgtttaaattacacattaccaatagtatcactttgcataaacctatactaaactaaaagcacggaccccacagaagatatgtaattaaagttatcttgtagtatgcaggtctttttcacagatgcattcagtgt

SEQ ID NO: 427857 - DNA, 496 bp, Homo sapiens
aacctcctgtgacaccacacatggtgaaagtgggggtgccttgttattgctaggtggtgataaaaatttatccctgctcaaccacctttggagagtgagggatttttttcttgtttctgctcccactatggcctacactgaagggaaggcaaacatcaggaggccttggacctttttaccactagatgatagtgaaagttccamcttctcacttagtttactttgacacctaaggaatctggtggagaaggacggggcacattgtaactacctggtagagaagaaagttctagattcccacacggccttctctgatatcacccagacattgataggcggcagggcctgttagtttgtgtgtgtgtttaaattacacattaccaatagtatcactttgcataaacctatactaaactaaaagcacggaccccacagaagatatgtaattaaagttatcttgtagtatgcaggtctttttcacagatgcattcagtgt

SEQ ID NO: 427858 - DNA, 558 bp, Homo sapiens
gtaattaaagttatcttgtagtatgcaggtctttttcacagatgcattcagtgtgtggtttaaaaggaagttaaaagtttagttctagttaccatgctagaagaacttaatatgtaaaagatgacatcatcaaagacagtgaaagtcctctttaatgtctcaaggcttttcattgtgtatcacgaaattttgattatctgtttcttttcagtaaatatttagtctatttttctaagtttaatatattaggattttcattttcattaatccttagtgtttgtactactgatatttgcacatacagtatgagaacatacatttcaaatgatcattttttaaaaatttctttgagatatattaaaagttctataccatataaaggaaagttattctactattctaaagcagctcataaaatacaatgtacaaataggacaaaatacatrcaagaagcgggagaaacgttcctaaacagctccactgatacagtggagatataatctctcctctctattgaatgaatttgctgagggtcggtgcatatagtggtcaatggaa

SEQ ID NO: 427859 - DNA, 462 bp, Homo sapiens
tgtctatgcagatcattatgtattcttcaccacaggtcagttgcttagcgaccagagaagtagagaactactaattgaaagtattctgtattgctggcaaggcttgctgcaggacrttgaacttggaaacagcagagactgtgtcagataaaaatgttgcagaggatgaaagaaaaatagttgcagcattatcatactaggaatggttattatttactttatgataaattctgcaaaatgctttgctgtgcttctgttttataagaaatattaaaattgattttactattaaggatcatttacgcaatcagattaaaaatcagagttgtggcatctatttttaaaaagtaaaacagaacacaaaggagaaaaagaagaggaggacaaaagagaagaaacagaagcaacagcactaagttagatccaggtccctaaagataagtaacaatatctgtatgaact

SEQ ID NO: 427860 - DNA, 462 bp, Homo sapiens
tgtctatgcagatcattatgtattcttcaccacaggtcagttgcttagcgaccagagaagtagagaactactaattgaaagtattctgtattgctggcaaggcttgctgcaggacattgaacttggaaacagcagagactgtgtcagataaaaatgttgcagaggatgaaagaaaaatagttgcagcattatcatactaggaatggttattatttactttatgrtaaattctgcaaaatgctttgctgtgcttctgttttataagaaatattaaaattgattttactattaaggatcatttacgcaatcagattaaaaatcagagttgtggcatctatttttaaaaagtaaaacagaacacaaaggagaaaaagaagaggaggacaaaagagaagaaacagaagcaacagcactaagttagatccaggtccctaaagataagtaacaatatctgtatgaact

SEQ ID NO: 427861 - DNA, 462 bp, Homo sapiens
tgtctatgcagatcattatgtattcttcaccacaggtcagttgcttagcgaccagagaagtagagaactactaattgaaagtattctgtattgctggcaaggcttgctgcaggacattgaacttggaaacagcagagactgtgtcagataaaaatgttgcagaggatgaaagaaaaatagttgcagcattatcatactaggaatggttattatttactttatgataaattctgcaaaatgctttgctgtgcttctgttttataagaaatattaaaattgattttactattaaggatcatttacrcaatcagattaaaaatcagagttgtggcatctatttttaaaaagtaaaacagaacacaaaggagaaaaagaagaggaggacaaaagagaagaaacagaagcaacagcactaagttagatccaggtccctaaagataagtaacaatatctgtatgaact

SEQ ID NO: 427862 - DNA, 462 bp, Homo sapiens
tgtctatgcagatcattatgtattcttcaccacaggtcagttgcttagcgaccagagaagtagagaactactaattgaaagtattctgtattgctggcaaggcttgctgcaggacattgaacttggaaacagcagagactgtgtcagataaaaatgttgcagaggatgaaagaaaaatagttgcagcattatcatactaggaatggttattatttactttatgataaattctgcaaaatgctttgctgtgcttctgttttataagaaatattaaaattgattttactattaaggatcatttacgcaatcagattaaaaatcagagttgtggcatctatttttaaaaagtaaaacagaacacaaaggagaaaaagaagaggaggacaaaagrgaagaaacagaagcaacagcactaagttagatccaggtccctaaagataagtaacaatatctgtatgaact

SEQ ID NO: 427863 - DNA, 327 bp, Homo sapiens
aacactctaacagagcaatagtataaacaaatttattcaaagcattaattttatattagtctgtatcaggctttctaacctgtacattatrtaaaattaggattattttctctcttctttccatgtaatgtacaattcatgtatccatcaaaaatagatgagtggtcattgtgtgacatctttcacttaatagaaaagactaggtcagaaaagagaaaatgtccttcacaagaccaatactaagttggctcaattttcctgatagcttatttgctacaagaattctgatataattctgtatttacaggctcattctcactctctcac

SEQ ID NO: 427864 - DNA, 327 bp, Homo sapiens
aacactctaacagagcaatagtataaacaaatttattcaaagcattaattttatattagtctgtatcaggctttctaacctgtacattatataaaattaggattattttctctcttctttccatgtaatgtacaattcatgtatccatcaaaaatagatgagtggtcattgtgtgacatctttcacttaatagaaaagactaggtcagaaaagagaaaatgtccttcacaagaccaatactaagttggctcaattttcctgatrgcttatttgctacaagaattctgatataattctgtatttacaggctcattctcactctctcac

SEQ ID NO: 427865 - DNA, 619 bp, Homo sapiens
cagaattttaatataactttccttttgtgtatttatgcctactgtttctatttacttacaggtggcttgaattttttatccagagataaagttaatgcaagaaagaatttaaaaatgtatggtagattatcaaaattcttaattgaaaaaaaggtcaaatccacctttgctacagcacacaacctaatcttatatctgttcatcttttttgtctttgttttaaaaacacatacttgataatcatattagatggttacagctttctattgctgcataataaaccagtctaaacatagcagcttaaaacagctaagtagcacagatggacctgctcatgattcttcaatctgggctgaactcagctgggtggctcatctcttccctagatggtgtcttctgctggactmtttaatatgtttgtatttagaggcagctccatagggactggaggatcctagctggccccattcatatgttgtgctggaatgactagaaactgggtcttcctctctatcttcccagtctttcattcctcctggtctttttcatcataaggtgtctcatccacaaggacgctaacctagacatctttgcacagtggctcaaggtaaaagacaga

SEQ ID NO: 427866 - DNA, 600 bp, Homo sapiens
ttgcaacaataatcttaggaacttaactatttgttttgtgaatatctagcactaaacaatgagctagaaatttgataaaacagttcaaataatttttaaatctctttgactcaattagtcatgactgaattcatttataccattaggatattaacacrtcttttaaaaaacagtgttaaatggagctggtcaagctatgcattttaagaagaaaaagtactctctttttaataggctctgcataagtaaggctatcctctttttcatagtttttcagaaacaataactttgtcattttctatacttattgataatttccccaacatattaacaattaagaaataaagttatggcaacctaattagtcgagtcaatacaggaagtaaattgttaagacagtgggcataccatcttagttagtaagatatggacattcaaccactctctttccctaccctaagacacacacactgtcagagaaaatgttatgatgtgactgagaactttatgctcaaagcttttcaaaatttcatatataaatattgtacttttatcaatataagatttcacactgtaagaaaacattggcataggaatcat

SEQ ID NO: 427867 - DNA, 489 bp, Homo sapiens
aaacaatgagctagaaatttgataaaacagttcaaataatttttaaatctctttgactcaattagtcatgactgaattcatttataccattaggatattaacacatcttttaaaaaacagtgttaaatggagctggtcaagctatgcattttaagaagaaaaagtactctctttttaataggctctgcataagtaaggctatcctctttttcatagtttttcagaaacaataactttgtcattttctatacttattgataatttccccaacatattaacaattaagaaataaagttatggcarcctaattagtcgagtcaatacaggaagtaaattgttaagacagtgggcataccatcttagttagtaagatatggacattcaaccactctctttccctaccctaagacacacacactgtcagagaaaatgttatgatgtgactgagaactttatgctcaaagcttttcaaaatttcatatataaata

SEQ ID NO: 427868 - DNA, 600 bp, Homo sapiens
ttgcaacaataatcttaggaacttaactatttgttttgtgaatatctagcactaaacaatgagctagaaatttgataaaacagttcaaataatttttaaatctctttgactcaattagtcatgactgaattcatttataccattaggatattaacacatcttttaaaaaacagtgttaaatggagctggtcaagctatgcattttaagaagaaaaagtactctctttttaataggctctgcataagtaaggctatcctctttttcatagtttttcagaaacaataactttgtcattttctatacttattgataatttccccaacatattaacaattaagaaataaagttatggcaacctaattagtcgagtcaatacaggaagtaaattgttaagacagtgggcataccatcttagttagtaagatatggacattcaaccactctctttccctaccctaagacacacacactgtcagagaaaatgttatgatgtgactgagaactttatgctcaaagctttycaaaatttcatatataaatattgtacttttatcaatataagatttcacactgtaagaaaacattggcataggaatcat

SEQ ID NO: 427869 - DNA, 574 bp, Homo sapiens
ttttcacatcacgactatctgttccattacttcctccatgttaatgaattcaagtcttgattttctccaaagaaaatggggcaatgaaaattgcatttcctaaaattctccttgaattatgttttaacatttcaagtgtgttaatgtaatgctttaagaagctaaagggaaygattatataggaagctaaagtcatctatgtctatcctcgggattgattaagtttgctatttatacatgtttcccccacaacattgctgtgttggaatttatcaggataggaaccatctaaattgaaaatgccccttcgtatatttttgtcacagtgaaagtcaaagcctagaataacaaaaaggcactaaattaatatcatcaggaaacaatttactcagctaattagcataacattcttatataaaaagacagatggattaagggatcaggtcattcatagcctgcagcaaactgcttcagtctttaatcccctgctgttacctatcaactggtactctttttatggatttggacagatccctgggaagatttagattctcccattggactgattcacctt

SEQ ID NO: 427870 - DNA, 574 bp, Homo sapiens
ttttcacatcacgactatctgttccattacttcctccatgttaatgaattcaagtcttgattttctccaaagaaaatggggcaatgaaaattgcatttcctaaaattctccttgaattatgttttaacatttcaagtgtgttaatgtaatgctttaagaagctaaagggaacgattatataggaagctaaagtcatctatgtctatcctcgggattgattaagtttgctatttatacatgtttcccccacaacattgctgtgttggaatttatcaggataggaaccatctaaattgaaaatgccccttcgtatatttttrtcacagtgaaagtcaaagcctagaataacaaaaaggcactaaattaatatcatcaggaaacaatttactcagctaattagcataacattcttatataaaaagacagatggattaagggatcaggtcattcatagcctgcagcaaactgcttcagtctttaatcccctgctgttacctatcaactggtactctttttatggatttggacagatccctgggaagatttagattctcccattggactgattcacctt

SEQ ID NO: 427871 - DNA, 263 bp, Homo sapiens
tggaatttatcaggataggaaccatctaaattgaaaatgccccttcgtatatttttgtcacagtgaaagtcaaagcctagaataacaraaaggcactaaattaatatcatcaggaaacaatttactcagctaattagcataacattcttatataaaaagacagatggattaagggatcaggtcattcatagcctgcagcaaactgcttcagtctttaatcccctgctgttacctatcaactggtactctttttatggatttgg

SEQ ID NO: 427872 - DNA, 263 bp, Homo sapiens
tggaatttatcaggataggaaccatctaaattgaaaatgccccttcgtatatttttgtcacagtgaaagtcaaagcctagaataacaaaaaggcacwaaattaatatcatcaggaaacaatttactcagctaattagcataacattcttatataaaaagacagatggattaagggatcaggtcattcatagcctgcagcaaactgcttcagtctttaatcccctgctgttacctatcaactggtactctttttatggatttgg

SEQ ID NO: 427873 - DNA, 263 bp, Homo sapiens
tggaatttatcaggataggaaccatctaaattgaaaatgccccttcgtatatttttgtcacagtgaaagtcaaagcctagaataacaaaaaggcactaaattaatatcatcaggaaacaatttactcagctaattagcataacattctyatataaaaagacagatggattaagggatcaggtcattcatagcctgcagcaaactgcttcagtctttaatcccctgctgttacctatcaactggtactctttttatggatttgg

SEQ ID NO: 427874 - DNA, 480 bp, Homo sapiens
aataatcaaagttacaatttattttgaacatattatttgccagaatttatatggcatactttcaattcactaacctattttatctttaatatctaaatgggataattattattatttatttttcaaagatggggtaacaaaggcttctgttacccctcaatgttgcccattctccacagactgtataatagaagttaaaattatttttgcccaacatcaaatatcttgcatcatactgcattcctttcagcaacctgcaatttccctataacctggaaattttgaacctccatgycttcgtgtgtaatattttctgcatgaaaaatgtgtcatttcaacttatctaactcttgcttactatctaaggtaaggtagaagtgccaacttttacaaggttttagataaaaggtgaaaataacagtctcttggtccacactcacatagccctttgtttatattaaacaccatattatattatgc

SEQ ID NO: 427875 - DNA, 480 bp, Homo sapiens
aataatcaaagttacaatttattttgaacatattatttgccagaatttatatggcatactttcaattcactaacctattttatctttaatatctaaatgggataattattattatttatttttcaaagatggggtaacaaaggcttctgttacccctcaatgttgcccattctccacagactgtataatagaagttaaaattatttttgcccaacatcaaatatcttgcatcatactgcattcctttcagcaacctgcaatttccctataacctggaaattttgaacctccatgccttcgtgtgtaatattttctgcatgaaaaatgtgtcatttcaacttatctaactcttgcttactatctaaggtaaggtagaagtgccaacttttwcaaggttttagataaaaggtgaaaataacagtctcttggtccacactcacatagccctttgtttatattaaacaccatattatattatgc

SEQ ID NO: 427876 - DNA, 451 bp, Homo sapiens
ttagtttcaccaattctttccccaaacatgtctggtctactaatgaaaccattgaaagcattttaaaaaaatctattggmgttattttaatttctaaccttttcttttggttctttgttagaattttcatctgtctgcttatactaatcatcttttattgaatattttctacattttccactagtgtccttaacatcttaatcatagttatgtaaaatttcttgattgctatttccaaaatatgcatcatcatcactgagtcttgttctgatgatcatcctgtctcttcagattgttaatttttttcttgccttttaccatgttttgtaattttgttgccattgttgagagccagacatgtggtatccataatagatactgagataaattgatgctgagataaattgatactgagataaagttaattgaggatatatgttaatctgtcttg

SEQ ID NO: 427877 - DNA, 451 bp, Homo sapiens
ttagtttcaccaattctttccccaaacatgtctggtctactaatgaaaccattgaaagcattttaaaaaaatctattggagttattttaatttctarccttttcttttggttctttgttagaattttcatctgtctgcttatactaatcatcttttattgaatattttctacattttccactagtgtccttaacatcttaatcatagttatgtaaaatttcttgattgctatttccaaaatatgcatcatcatcactgagtcttgttctgatgatcatcctgtctcttcagattgttaatttttttcttgccttttaccatgttttgtaattttgttgccattgttgagagccagacatgtggtatccataatagatactgagataaattgatgctgagataaattgatactgagataaagttaattgaggatatatgttaatctgtcttg

SEQ ID NO: 427878 - DNA, 451 bp, Homo sapiens
ttagtttcaccaattctttccccaaacatgtctggtctactaatgaaaccattgaaagcattttaaaaaaatctattggagttattttaatttctaaccttttmttttggttctttgttagaattttcatctgtctgcttatactaatcatcttttattgaatattttctacattttccactagtgtccttaacatcttaatcatagttatgtaaaatttcttgattgctatttccaaaatatgcatcatcatcactgagtcttgttctgatgatcatcctgtctcttcagattgttaatttttttcttgccttttaccatgttttgtaattttgttgccattgttgagagccagacatgtggtatccataatagatactgagataaattgatgctgagataaattgatactgagataaagttaattgaggatatatgttaatctgtcttg

SEQ ID NO: 427879 - DNA, 451 bp, Homo sapiens
ttagtttcaccaattctttccccaaacatgtctggtctactaatgaaaccattgaaagcattttaaaaaaatctattggagttattttaatttctaaccttttcttttggttctttgttagaattttcatctstctgcttatactaatcatcttttattgaatattttctacattttccactagtgtccttaacatcttaatcatagttatgtaaaatttcttgattgctatttccaaaatatgcatcatcatcactgagtcttgttctgatgatcatcctgtctcttcagattgttaatttttttcttgccttttaccatgttttgtaattttgttgccattgttgagagccagacatgtggtatccataatagatactgagataaattgatgctgagataaattgatactgagataaagttaattgaggatatatgttaatctgtcttg

SEQ ID NO: 427880 - DNA, 529 bp, Homo sapiens
atgtaaaatttcttgattgctatttccaaaatatgcatcatcatcactgagtcttgttctgatgatcatcctgtctcttcagattgttaatttttttcttgccttttaccatgttttgtaattttgttgccattgttgagagccagacatgtggtatccataatagataytgagataaattgatgctgagataaattgatactgagataaagttaattgaggatatatgttaatctgtcttggagttgaactgcatttaatatttgttatagctcaagtttctgaaggtttcaaattcctctagtgtccttgtttttgtctcctcccttaactttgggtttccttaagtactcatcttcaaacagtgtctgtttcttgtagctcttttgtctgtctccttatattggagtcatgttggtttaaattttatggtatgagcagagaaatatgttctgtagtgctctgattgaatatccgcctttcagtgggcctatgtcttaggttatgacttttacgagtgttttgccag

SEQ ID NO: 427881 - DNA, 518 bp, Homo sapiens
aaaaccttgaaatatgagctagaatgaggggcactagargtacttggctttaaaaagacataggtgcagtgacatgatgttagttacatagcctttgaagccatgttgtgtgaaagagcagttggatattgacgttggctaccaaaaccaatgggtaggcatttagattttggttcactagaaaacctgaactatctattgattaagctctcaaaaactaaatagactgctgcctcctaaataaaatatgtctcccactgtggaaatgtcattgattttcaatttgtatagcttttattattattataattgtaaggtcaggagtgacaacttctgagcccttcacatgttggtgataaatccaaaagtcctgtaatgtgtttgttttctcattttttaaaaccaaatatttgaagctattttattaagggtttccttttcctcaaaaagtaaatgcattaaatataatctagatattctacactcatgagaaagatatttcattgtatataaccaga

SEQ ID NO: 427882 - DNA, 518 bp, Homo sapiens
aaaaccttgaaatatgagctagaatgaggggcactagaagtacttggctttaaaaagacataggtgcagtgacatgatgttagttacatagcctttgaagccatgttgtgtgaaagagcagttggatattgacrttggctaccaaaaccaatgggtaggcatttagattttggttcactagaaaacctgaactatctattgattaagctctcaaaaactaaatagactgctgcctcctaaataaaatatgtctcccactgtggaaatgtcattgattttcaatttgtatagcttttattattattataattgtaaggtcaggagtgacaacttctgagcccttcacatgttggtgataaatccaaaagtcctgtaatgtgtttgttttctcattttttaaaaccaaatatttgaagctattttattaagggtttccttttcctcaaaaagtaaatgcattaaatataatctagatattctacactcatgagaaagatatttcattgtatataaccaga

SEQ ID NO: 427883 - DNA, 518 bp, Homo sapiens
aaaaccttgaaatatgagctagaatgaggggcactagaagtacttggctttaaaaagacataggtgcagtgacatgatgttagttacatagcctttgaagccatgttgtgtgaaagagcagttggatattgacgttggctaccaaaaccaatgggtaggcatttagattttggttcactagaaaacctgaactatctatygattaagctctcaaaaactaaatagactgctgcctcctaaataaaatatgtctcccactgtggaaatgtcattgattttcaatttgtatagcttttattattattataattgtaaggtcaggagtgacaacttctgagcccttcacatgttggtgataaatccaaaagtcctgtaatgtgtttgttttctcattttttaaaaccaaatatttgaagctattttattaagggtttccttttcctcaaaaagtaaatgcattaaatataatctagatattctacactcatgagaaagatatttcattgtatataaccaga

SEQ ID NO: 427884 - DNA, 518 bp, Homo sapiens
aaaaccttgaaatatgagctagaatgaggggcactagaagtacttggctttaaaaagacataggtgcagtgacatgatgttagttacatagcctttgaagccatgttgtgtgaaagagcagttggatattgacgttggctaccaaaaccaatgggtaggcatttagattttggttcactagaaaacctgaactatctattgattaagctctcaaaaactaaatagactgctgcctcctaaataaaatatgtctcccactgtggaaatgtcattgattttcaatttgtatagcttttattattattataattgtaaggtcaggagtgacaacttctgagcccttcacatgttggtgataaatccaaaagtcctgtaatgtrtttgttttctcattttttaaaaccaaatatttgaagctattttattaagggtttccttttcctcaaaaagtaaatgcattaaatataatctagatattctacactcatgagaaagatatttcattgtatataaccaga

SEQ ID NO: 427885 - DNA, 561 bp, Homo sapiens
ctacactcatgagaaagatatttcattgtatataaccagagctataggcctacaaacatttggactttatcagaggtaaataataagagatcatactattmgttaaaattaaagtataaatttagataattatttttaattggttattttttaaagctgacataactttaatttacaatgtaaactcaggagtgaaagagcattaagtaactcatgatctgtaaagaaaatttcaaaatttaaggtaagtaatgagatttccccatatttctgtgtttaattcatcaatgtttttaaaatacttaaaccagctaagaagtgtgttcaggtttctatttattttaagagtgacttatgtatttttctcacaagggaggatgattttagaggagtttagagcctgcatcgtggttccaagttagcatcaccgttcctggtccttccatctttctgcttagtcatatttaacttgtgtttatttcttcatgatcagaatatgtgtctttctcaactatcatatgtatgttctaggtagaaaggagaaaaacaagagtttatgtt

SEQ ID NO: 427886 - DNA, 285 bp, Homo sapiens
catttggactttatcagaggtaaataataagagatcatactattagttaaaattaaagtataaatttagatmattatttttaattggttattttttaaagctgacataactttaatttacaatgtaaactcaggagtgaaagagcattaagtaactcatgatctgtaaagaaaatttcaaaatttaaggtaagtaatgagatttccccatatttctgtgtttaattcatcaatgtttttaaaatacttaaaccagctaagaagtgtgttcaggtttctatttatt

SEQ ID NO: 427887 - DNA, 561 bp, Homo sapiens
ctacactcatgagaaagatatttcattgtatataaccagagctataggcctacaaacatttggactttatcagaggtaaataataagagatcatactattagttaaaattaaagtataaatttagataattatttttaattggttattttttaaagctgacataactttaatttacaatgtaaactcaggagtgaaagagcattaagtaactcatgatctgtaaagaaaatttcaaaatttaaggtaagtaatgagatttccccatatttctgtgtttaattcatcaatgtttttaaaatacttaaaccagctaagaagtgtgttcaggtttctatttattttaaragtgacttatgtatttttctcacaagggaggatgattttagaggagtttagagcctgcatcgtggttccaagttagcatcaccgttcctggtccttccatctttctgcttagtcatatttaacttgtgtttatttcttcatgatcagaatatgtgtctttctcaactatcatatgtatgttctaggtagaaaggagaaaaacaagagtttatgtt

SEQ ID NO: 427888 - DNA, 561 bp, Homo sapiens
ctacactcatgagaaagatatttcattgtatataaccagagctataggcctacaaacatttggactttatcagaggtaaataataagagatcatactattagttaaaattaaagtataaatttagataattatttttaattggttattttttaaagctgacataactttaatttacaatgtaaactcaggagtgaaagagcattaagtaactcatgatctgtaaagaaaatttcaaaatttaaggtaagtaatgagatttccccatatttctgtgtttaattcatcaatgtttttaaaatacttaaaccagctaagaagtgtgttcaggtttctatttattttaagagtgacttaygtatttttctcacaagggaggatgattttagaggagtttagagcctgcatcgtggttccaagttagcatcaccgttcctggtccttccatctttctgcttagtcatatttaacttgtgtttatttcttcatgatcagaatatgtgtctttctcaactatcatatgtatgttctaggtagaaaggagaaaaacaagagtttatgtt

SEQ ID NO: 427889 - DNA, 561 bp, Homo sapiens
ctacactcatgagaaagatatttcattgtatataaccagagctataggcctacaaacatttggactttatcagaggtaaataataagagatcatactattagttaaaattaaagtataaatttagataattatttttaattggttattttttaaagctgacataactttaatttacaatgtaaactcaggagtgaaagagcattaagtaactcatgatctgtaaagaaaatttcaaaatttaaggtaagtaatgagatttccccatatttctgtgtttaattcatcaatgtttttaaaatacttaaaccagctaagaagtgtgttcaggtttctatttattttaagagtgacttatgtatttttctcacaagggaggatgattktagaggagtttagagcctgcatcgtggttccaagttagcatcaccgttcctggtccttccatctttctgcttagtcatatttaacttgtgtttatttcttcatgatcagaatatgtgtctttctcaactatcatatgtatgttctaggtagaaaggagaaaaacaagagtttatgtt

SEQ ID NO: 427890 - DNA, 508 bp, Homo sapiens
tctttctgcttagtcatatttaacttgtgtttatttcttcatgatcagaatatgtgtctttctcaactatcatatgtatgttctaggtagaaaggagaaaaacaagagtttatgttgttctgtcaaattatagaaagtttatttgataataaatcaactgttaaaaagtaccctttaaaagtataataagtatacaatattaaaagaaagcatgggactttgcacaattgtgaaatctattgagaattttgtaartttttaaattttgatctgtgctgtcatttattaattcagtcaaaatttgcttcaaaaacacgtagttgtcagaatatgtaagtgccttagaagagtgcaatctataagtaaaataattctgaatattcatctgaaatagtttgaaaaggttttgaaaatctaccgtctctcttatttcttgtaatcaacatatttttcaataggaaaattcaccatttgccatcaaaatgtatcatctgaaacttccactgga

SEQ ID NO: 427891 - DNA, 508 bp, Homo sapiens
tctttctgcttagtcatatttaacttgtgtttatttcttcatgatcagaatatgtgtctttctcaactatcatatgtatgttctaggtagaaaggagaaaaacaagagtttatgttgttctgtcaaattatagaaagtttatttgataataaatcaactgttaaaaagtaccctttaaaagtataataagtatacaatattaaaagaaagcatgggactttgcacaattgtgaaatctattgagaattttgtaagtttttaaattttgatctgtgctgtcatttattaattcagtcaaaatttgcttcaaaaacacrtagttgtcagaatatgtaagtgccttagaagagtgcaatctataagtaaaataattctgaatattcatctgaaatagtttgaaaaggttttgaaaatctaccgtctctcttatttcttgtaatcaacatatttttcaataggaaaattcaccatttgccatcaaaatgtatcatctgaaacttccactgga

SEQ ID NO: 427892 - DNA, 508 bp, Homo sapiens
tctttctgcttagtcatatttaacttgtgtttatttcttcatgatcagaatatgtgtctttctcaactatcatatgtatgttctaggtagaaaggagaaaaacaagagtttatgttgttctgtcaaattatagaaagtttatttgataataaatcaactgttaaaaagtaccctttaaaagtataataagtatacaatattaaaagaaagcatgggactttgcacaattgtgaaatctattgagaattttgtaagtttttaaattttgatctgtgctgtcatttattaattcagtcaaaatttgcttcaaaaacacgtagttgtcagaatatgtaagtgccttagaagagtgcaatctataagtaaaataattctgawtattcatctgaaatagtttgaaaaggttttgaaaatctaccgtctctcttatttcttgtaatcaacatatttttcaataggaaaattcaccatttgccatcaaaatgtatcatctgaaacttccactgga

SEQ ID NO: 427893 - DNA, 572 bp, Homo sapiens
aaagatggataagaattaaaactttgatttttcaactgagawatttagttgagatatttgaaattactggaaagcaaaaggaaattttaatgtactgcggagtagcctagggtagtatgtgtatgtatttctactaaatgcaaaagaaagtaccagataaaaatgcaataggcttctacttctagttcaggatgggaaaagatggggaagaccaaaaaagatctgcataatgcacaaatccatgtgatttctgaagggagtggacacgatcagtcttgataaactgataaccagttagtggatctgcaggtttcatctgtggtattttcttttagatgatttgtgtagtgactaaaaaacagtcaatacatttaaataaactgcacatggtgcacatgtactctaaaacttaaagtataataaaaaaataaataataaaataaataaataaactttctggtttagtaattgaggttggccaatgtctattattaattgttaactatttcctaatcaataatctgtcttatattaaactgtacatacacattacaagaaatttgagttacact

SEQ ID NO: 427894 - DNA, 658 bp, Homo sapiens
tagggtagtatgtgtatgtatttctactaaatgcaaaagaaagtaccagataaaaatgcaataggcttctacttctagttcaggatgggaaaagatggggaagaccaaaaaagatctgcataatgcacaaatccatgtgatttctgaagggagtggacacgatcagtcttgataaactgataacyagttagtggatctgcaggtttcatctgtggtattttcttttagatgatttgtgtagtgactaaaaaacagtcaatacatttaaataaactgcacatggtgcacatgtactctaaaacttaaagtataataaaaaaataaataataaaataaataaataaactttctggtttagtaattgaggttggccaatgtctattattaattgttaactatttcctaatcaataatctgtcttatattaaactgtacatacacattacaagaaatttgagttacactcacacataactgaataacatatttaatgcttatataggcatgcatataatgttaaaatctagatataaaaataagaaaatgaaaccatgatttttaagtaatggaacttgttccaaaaaatcaaatgtggttatgcattggtatgacaattctgaatcctgccctcaggcagcatctgaacactgttttatta

SEQ ID NO: 427895 - DNA, 658 bp, Homo sapiens
tagggtagtatgtgtatgtatttctactaaatgcaaaagaaagtaccagataaaaatgcaataggcttctacttctagttcaggatgggaaaagatggggaagaccaaaaaagatctgcataatgcacaaatccatgtgatttctgaagggagtggacacgatcagtcttgataaactgataaccagttagtggatctgcaggtttcatctgtggtattttcttttagatgatttgtgtagtgactaaaaaacagtcaatacatttaaataaactgcacatkgtgcacatgtactctaaaacttaaagtataataaaaaaataaataataaaataaataaataaactttctggtttagtaattgaggttggccaatgtctattattaattgttaactatttcctaatcaataatctgtcttatattaaactgtacatacacattacaagaaatttgagttacactcacacataactgaataacatatttaatgcttatataggcatgcatataatgttaaaatctagatataaaaataagaaaatgaaaccatgatttttaagtaatggaacttgttccaaaaaatcaaatgtggttatgcattggtatgacaattctgaatcctgccctcaggcagcatctgaacactgttttatta

SEQ ID NO: 427896 - DNA, 555 bp, Homo sapiens
tatctttaggaggatgaatgggaagtcacagatctagaacaataatcaacttgaactcatgctgctagcccaggtatggatttttaatataatctcaggcagggaagtgcttgcaggcatgttttctcagtcaacagttgagagcatatgcacgatggcrgacacaaggtaactagcctttggctggttgaaagatgtagtcattataaagctggattttaaaccaaatgtagtgctggctgctgtctggacttacctaaaacatacactatattttaaaaagaaggctgagagtcacagaagtaaaacaaataaattccaaagttggtgttttacattatcatttatctgcaataagtgataattgatattccaaaaatatactttgctttgaattcaaattgtttattttgaacaattagtgagttcatctctgcacatgcctaaagaagataaatcaataaataaaagaataaaaattaaaactctatataataaacacttgatttcttagtcctgatttctcttttattatgaagaccagaagcagaatgt

SEQ ID NO: 427897 - DNA, 555 bp, Homo sapiens
tatctttaggaggatgaatgggaagtcacagatctagaacaataatcaacttgaactcatgctgctagcccaggtatggatttttaatataatctcaggcagggaagtgcttgcaggcatgttttctcagtcaacagttgagagcatatgcacgatggcggacacaaggtaactagcctttggctggttgaaagatgwagtcattataaagctggattttaaaccaaatgtagtgctggctgctgtctggacttacctaaaacatacactatattttaaaaagaaggctgagagtcacagaagtaaaacaaataaattccaaagttggtgttttacattatcatttatctgcaataagtgataattgatattccaaaaatatactttgctttgaattcaaattgtttattttgaacaattagtgagttcatctctgcacatgcctaaagaagataaatcaataaataaaagaataaaaattaaaactctatataataaacacttgatttcttagtcctgatttctcttttattatgaagaccagaagcagaatgt

SEQ ID NO: 427898 - DNA, 555 bp, Homo sapiens
tatctttaggaggatgaatgggaagtcacagatctagaacaataatcaacttgaactcatgctgctagcccaggtatggatttttaatataatctcaggcagggaagtgcttgcaggcatgttttctcagtcaacagttgagagcatatgcacgatggcggacacaaggtaactagcctttggctggttgaaagatgtagtcattataaagctggattttaaaccaaatgtagtgctggctgctgtctgracttacctaaaacatacactatattttaaaaagaaggctgagagtcacagaagtaaaacaaataaattccaaagttggtgttttacattatcatttatctgcaataagtgataattgatattccaaaaatatactttgctttgaattcaaattgtttattttgaacaattagtgagttcatctctgcacatgcctaaagaagataaatcaataaataaaagaataaaaattaaaactctatataataaacacttgatttcttagtcctgatttctcttttattatgaagaccagaagcagaatgt

SEQ ID NO: 427899 - DNA, 508 bp, Homo sapiens
gtgctggctgctgtctggacttacctaaaacatacactatattttaaaaagwaggctgagagtcacagaagtaaaacaaataaattccaaagttggtgttttacattatcatttatctgcaataagtgataattgatattccaaaaatatactttgctttgaattcaaattgtttattttgaacaattagtgagttcatctctgcacatgcctaaagaagataaatcaataaataaaagaataaaaattaaaactctatataataaacacttgatttcttagtcctgatttctcttttattatgaagaccagaagcagaatgttattctattttacctaaaaatatatatattatctttagaaactccttgtcagcaatcatctacatgtatgtgtgcgtgtgtgtgtgtatatatatatatatctcatacaaacaatatgtatcacatttttatgttaacaagcacaatcatataataaacccacaaatgtccaactccaaaactag

SEQ ID NO: 427900 - DNA, 555 bp, Homo sapiens
tatctttaggaggatgaatgggaagtcacagatctagaacaataatcaacttgaactcatgctgctagcccaggtatggatttttaatataatctcaggcagggaagtgcttgcaggcatgttttctcagtcaacagttgagagcatatgcacgatggcggacacaaggtaactagcctttggctggttgaaagatgtagtcattataaagctggattttaaaccaaatgtagtgctggctgctgtctggacttacctaaaacatacactatattttaaaaagaaggctgagagtcacagaagtaaaacaaataaattccaaagttggtgttttayattatcatttatctgcaataagtgataattgatattccaaaaatatactttgctttgaattcaaattgtttattttgaacaattagtgagttcatctctgcacatgcctaaagaagataaatcaataaataaaagaataaaaattaaaactctatataataaacacttgatttcttagtcctgatttctcttttattatgaagaccagaagcagaatgt

SEQ ID NO: 427901 - DNA, 508 bp, Homo sapiens
gtgctggctgctgtctggacttacctaaaacatacactatattttaaaaagaaggctgagagtcacagaagtaaaacaaataaattccaaagttggtgttttacattatcatttatctgcaataagtgataattgatattccaaaaatatactttgctttgaattcaaattgtttattttgaacaattagtgagttcatctctgcacatgcctaaagaagataaatcaataaataaaagaataaaaattaaaactctatataataaacacttgatttcttagtcctgatttctcttttattatgaagaccagaagcagaatgttattctattttacctaaaaatatatatatkatctttagaaactccttgtcagcaatcatctacatgtatgtgtgcgtgtgtgtgtgtatatatatatatatctcatacaaacaatatgtatcacatttttatgttaacaagcacaatcatataataaacccacaaatgtccaactccaaaactag

SEQ ID NO: 427902 - DNA, 508 bp, Homo sapiens
gtgctggctgctgtctggacttacctaaaacatacactatattttaaaaagaaggctgagagtcacagaagtaaaacaaataaattccaaagttggtgttttacattatcatttatctgcaataagtgataattgatattccaaaaatatactttgctttgaattcaaattgtttattttgaacaattagtgagttcatctctgcacatgcctaaagaagataaatcaataaataaaagaataaaaattaaaactctatataataaacacttgatttcttagtcctgatttctcttttattatgaagaccagaagcagaatgttattctattttacctaaaaatatatatattatctttagaaactccttgtcagcaatcatctacatgtatgtgtgcgtgtgtgkgtgtatatatatatatatctcatacaaacaatatgtatcacatttttatgttaacaagcacaatcatataataaacccacaaatgtccaactccaaaactag

SEQ ID NO: 427903 - DNA, 209 bp, Homo sapiens
aaatatatatattatctttagaaactccttgtcagcaatcatctacatgtatgtgtgcgtgtgtgtgtgtatatatatatatatctcatacaaacaatatgtatcacatttwtatgttaacaagcacaatcatataataaacccacaaatgtccaactccaaaactaggaaattattaatagcttgtactactcctgtgttcttcccat

SEQ ID NO: 427904 - DNA, 209 bp, Homo sapiens
aaatatatatattatctttagaaactccttgtcagcaatcatctacatgtatgtgtgcgtgtgtgtgtgtatatatatatatatctcatacaaacaatatgtatcacatttttatgttawcaagcacaatcatataataaacccacaaatgtccaactccaaaactaggaaattattaatagcttgtactactcctgtgttcttcccat

SEQ ID NO: 427905 - DNA, 209 bp, Homo sapiens
aaatatatatattatctttagaaactccttgtcagcaatcatctacatgtatgtgtgcgtgtgtgtgtgtatatatatatatatctcatacaaacaatatgtatcacatttttatgttaacaagcacaatcatataataaacccacaaatgtccaactccaaaactagraaattattaatagcttgtactactcctgtgttcttcccat

SEQ ID NO: 427906 - DNA, 529 bp, Homo sapiens
cagaacattttaagagcctgctggctaaagagcttcatgattggtagtgttgaccttatctttaaaaacaatctccaactccttactcttttttgtaaacccatttgaaattttgttaaatgctaccattgccagccagggtatttgttctcctaggtttggtaaaataggaactcagaaagttctaaattcttagaattttccctgatgttcttggcttaccctttacaaaaaggattcccaagcactgctctgtgcctaggcattgtggtgaagttttcattcatgtgcaatgaaccaagtaaaataaggtcattctcatgagrttgctttgtttgtttttcccctgagtttttaataatgatatttaagactatcatttattgtaatattaagtcttttctcctttcagtgttaaaatgttatttcttttatgaagtaatctggtgacagtatatagcatactggttggtttctgtttctttttaatatgcctactgacaaaatttttacattagcaaacctatag

SEQ ID NO: 427907 - DNA, 560 bp, Homo sapiens
tgttcttggcttaccctttacaaaaaggattcccaagcactgctctgtgcctaggcattgtggtgaagttttcattcatgtgcaatgaaccaagtaaaataaggtcattctcatgagattgctttgtttktttttcccctgagtttttaataatgatatttaagactatcatttattgtaatattaagtcttttctcctttcagtgttaaaatgttatttcttttatgaagtaatctggtgacagtatatagcatactggttggtttctgtttctttttaatatgcctactgacaaaatttttacattagcaaacctatagaaattactttaatatttaaccatgtctgaaattcaaaattctggcatcattctgaaaggcagttgtgattctcactcagcaaaattcttatcagtatagaagagtggagatttcaaaaagaaaatggccccaagcccaagtcctccctaagttaagactctaagatcttccaaatagttttaggctaagtcttatgaaaatttgactaaagatttcattccctttatctctatcaagga

SEQ ID NO: 427908 - DNA, 529 bp, Homo sapiens
cagaacattttaagagcctgctggctaaagagcttcatgattggtagtgttgaccttatctttaaaaacaatctccaactccttactcttttttgtaaacccatttgaaattttgttaaatgctaccattgccagccagggtatttgttctcctaggtttggtaaaataggaactcagaaagttctaaattcttagaattttccctgatgttcttggcttaccctttacaaaaaggattcccaagcactgctctgtgcctaggcattgtggtgaagttttcattcatgtgcaatgaaccaagtaaaataaggtcattctcatgagattgctttgtttgtttttccccygagtttttaataatgatatttaagactatcatttattgtaatattaagtcttttctcctttcagtgttaaaatgttatttcttttatgaagtaatctggtgacagtatatagcatactggttggtttctgtttctttttaatatgcctactgacaaaatttttacattagcaaacctatag

SEQ ID NO: 427909 - DNA, 560 bp, Homo sapiens
tgttcttggcttaccctttacaaaaaggattcccaagcactgctctgtgcctaggcattgtggtgaagttttcattcatgtgcaatgaaccaagtaaaataaggtcattctcatgagattgctttgtttgtttttcccctgagtttttaataatgatatttaagactatcatttattgtaatattaagtcttttctcctttcagtgttaaaatgttatttcttttatgaagtaatstggtgacagtatatagcatactggttggtttctgtttctttttaatatgcctactgacaaaatttttacattagcaaacctatagaaattactttaatatttaaccatgtctgaaattcaaaattctggcatcattctgaaaggcagttgtgattctcactcagcaaaattcttatcagtatagaagagtggagatttcaaaaagaaaatggccccaagcccaagtcctccctaagttaagactctaagatcttccaaatagttttaggctaagtcttatgaaaatttgactaaagatttcattccctttatctctatcaagga

SEQ ID NO: 427910 - DNA, 560 bp, Homo sapiens
tgttcttggcttaccctttacaaaaaggattcccaagcactgctctgtgcctaggcattgtggtgaagttttcattcatgtgcaatgaaccaagtaaaataaggtcattctcatgagattgctttgtttgtttttcccctgagtttttaataatgatatttaagactatcatttattgtaatattaagtcttttctcctttcagtgttaaaatgttatttcttttatgaagtaatctggtgacagtatatagcatactggttggtttctgtttctttttaatatgcctactgacaaaatttttacattagcaaacctatagaaattactttaatatttaaccatgtctgaaattcaaaattctggcaycattctgaaaggcagttgtgattctcactcagcaaaattcttatcagtatagaagagtggagatttcaaaaagaaaatggccccaagcccaagtcctccctaagttaagactctaagatcttccaaatagttttaggctaagtcttatgaaaatttgactaaagatttcattccctttatctctatcaagga

SEQ ID NO: 427911 - DNA, 342 bp, Homo sapiens
tttctaatggtccccatatatgatcattgcctgcctgactatataagactcctgttgggagcttgagaayagattgctgagcttagccctttggagactctggtatgctgtgtctgggatggagtctgcaaaaaaaaaaaaatttaaagaagagacttaaaaattatacaaaactagaatagtgctttggtactatcagattacttggtgggctattcccacttcgattcttcatatagaggatgtgaacagagaaacatgcagataaatcagtcaatgccaactgctgggggaaacgtccatagtctgcaggttcccacagaaaggatagcacttccatcc

SEQ ID NO: 427912 - DNA, 475 bp, Homo sapiens
aaggaagaatatcatagaaggaatgaatgaaactaaaataaaatgttttattttcttattcttaattgacctaaaagataatattttgtttaaaaggaataactgtaacaatgtattgaatgaatatagtatataaatgaatacawtaaatggcagtagtgtcataaataatggtaggaattgggattacttgtatcttagtttgctcaggcttttataacaggataccatacactaggtggcttataatcaacaaaaatgcagttttcagttctgagactgggaagtccaaggtcaagccatgtgcatattaagtgtctggcaagggcttgttcacagaggacggtccagtcactgggatttcacacggcagaagagcaaattagctctctagggtttcttttgtaaaggcactaattctatccataacagtttgccctcatgacctaatcacttcccacagacccatctccaa

SEQ ID NO: 427913 - DNA, 475 bp, Homo sapiens
aaggaagaatatcatagaaggaatgaatgaaactaaaataaaatgttttattttcttattcttaattgacctaaaagataatattttgtttaaaaggaataactgtaacaatgtattgaatgaatatagtatataaatgaatacaataaatggcagtagtgtcataaataatggtaggaattgggattacttgtatcttagtttgctcaggcttttataacaggataccatacactaggtggcttataatcaacaaaaatgcagttttcagttctgagactgggaagtccmaggtcaagccatgtgcatattaagtgtctggcaagggcttgttcacagaggacggtccagtcactgggatttcacacggcagaagagcaaattagctctctagggtttcttttgtaaaggcactaattctatccataacagtttgccctcatgacctaatcacttcccacagacccatctccaa

SEQ ID NO: 427914 - DNA, 615 bp, Homo sapiens
tcttagtttgctcaggcttttataacaggataccatacactaggtggcttataatcaacaaaaatgcagttttcagttctgagactgggaagtccaaggtcaagccatgtgcatattaagtgtctggcaagggcttgttcacagaggacggtccagtcactgggwtttcacacggcagaagagcaaattagctctctagggtttcttttgtaaaggcactaattctatccataacagtttgccctcatgacctaatcacttcccacagacccatctccaaatactcttaccatagggattaggtttcaacatacacattttgggggaataggggaatacaaatattgagtctgtaacactcttgtaaagtgatatttgtgttgagttattcaaagtcttatttaaaggtagattgagattagttaaaaatgtgtattgcaaactcacataaatcactaaaactgttctaaagtataactgacatgctaggagaggaaatgtaatgggattattttaagtgtcaattaaaacaatagaaataagaaaaagagtgattgttgggaggcaaagaataaatgatatgaatagaaaatagttataaacataataaatacc

SEQ ID NO: 427915 - DNA, 615 bp, Homo sapiens
tcttagtttgctcaggcttttataacaggataccatacactaggtggcttataatcaacaaaaatgcagttttcagttctgagactgggaagtccaaggtcaagccatgtgcatattaagtgtctggcaagggcttgttcacagaggacggtccagtcactgggatttcacrcggcagaagagcaaattagctctctagggtttcttttgtaaaggcactaattctatccataacagtttgccctcatgacctaatcacttcccacagacccatctccaaatactcttaccatagggattaggtttcaacatacacattttgggggaataggggaatacaaatattgagtctgtaacactcttgtaaagtgatatttgtgttgagttattcaaagtcttatttaaaggtagattgagattagttaaaaatgtgtattgcaaactcacataaatcactaaaactgttctaaagtataactgacatgctaggagaggaaatgtaatgggattattttaagtgtcaattaaaacaatagaaataagaaaaagagtgattgttgggaggcaaagaataaatgatatgaatagaaaatagttataaacataataaatacc

SEQ ID NO: 427916 - DNA, 615 bp, Homo sapiens
tcttagtttgctcaggcttttataacaggataccatacactaggtggcttataatcaacaaaaatgcagttttcagttctgagactgggaagtccaaggtcaagccatgtgcatattaagtgtctggcaagggcttgttcacagaggacggtccagtcactgggatttcacayggcagaagagcaaattagctctctagggtttcttttgtaaaggcactaattctatccataacagtttgccctcatgacctaatcacttcccacagacccatctccaaatactcttaccatagggattaggtttcaacatacacattttgggggaataggggaatacaaatattgagtctgtaacactcttgtaaagtgatatttgtgttgagttattcaaagtcttatttaaaggtagattgagattagttaaaaatgtgtattgcaaactcacataaatcactaaaactgttctaaagtataactgacatgctaggagaggaaatgtaatgggattattttaagtgtcaattaaaacaatagaaataagaaaaagagtgattgttgggaggcaaagaataaatgatatgaatagaaaatagttataaacataataaatacc

SEQ ID NO: 427917 - DNA, 615 bp, Homo sapiens
tcttagtttgctcaggcttttataacaggataccatacactaggtggcttataatcaacaaaaatgcagttttcagttctgagactgggaagtccaaggtcaagccatgtgcatattaagtgtctggcaagggcttgttcacagaggacggtccagtcactgggatttcacacggcagaagagcaaattagctctctagggtttcttttgtaaaggcactaattctatccataacagtttgccctcatgacctaatcacttcccacagacccatctccaaatactcttaccatagggattaggtttcaacatacacattttgggggaataggggaatacaaatattgagtctgtaacactcttgtaaagtgatatttgtgttgagttattcaaagtcttatttaaaggtagattgagattagttaaaaatgtgtattgcaaactcacataaatcactaaaactgttctaaagtataactgacatgctaggagaggaaatgtaatgggattattttaagtgtcaattaaaacaatagaaataagaaaaagagtgattgttgggaggcaaagaataamtgatatgaatagaaaatagttataaacataataaatacc

SEQ ID NO: 427918 - DNA, 402 bp, Homo sapiens
gccatgggcaaccatcagttatttacttcatttcctttcaatagttcttgctctcagcaagtcgggatctctcagagagaaagattcatagaggcctgagaaaaacagaagaatctagggacaaatgtaaaaccatcttcmtaatcacaatccatttgttagatacaccatcctaaattttgtcctaaagaataagcagggctcatattctatttcttatattttttgagggacgatttcagtgtaagcaacaaagcagtggaaataatttcaaatgctagaatagttttttgagtaaaatctggtcctactaatgatttaagagctggaacacaacttcttgcaggtctagagctggatcctagtccaagtgttcctggaagggatggggtaggggtgaat

SEQ ID NO: 427919 - DNA, 402 bp, Homo sapiens
gccatgggcaaccatcagttatttacttcatttcctttcaatagttcttgctctcagcaagtcgggatctctcagagagaaagattcatagaggcctgagaaaaacagaagaatctagggacaaatgtaaaaccatcttcataatyacaatccatttgttagatacaccatcctaaattttgtcctaaagaataagcagggctcatattctatttcttatattttttgagggacgatttcagtgtaagcaacaaagcagtggaaataatttcaaatgctagaatagttttttgagtaaaatctggtcctactaatgatttaagagctggaacacaacttcttgcaggtctagagctggatcctagtccaagtgttcctggaagggatggggtaggggtgaat

SEQ ID NO: 427920 - DNA, 402 bp, Homo sapiens
gccatgggcaaccatcagttatttacttcatttcctttcaatagttcttgctctcagcaagtcgggatctctcagagagaaagattcatagaggcctgagaaaaacagaagaatctagggacaaatgtaaaaccatcttcataatcacaatccatttrttagatacaccatcctaaattttgtcctaaagaataagcagggctcatattctatttcttatattttttgagggacgatttcagtgtaagcaacaaagcagtggaaataatttcaaatgctagaatagttttttgagtaaaatctggtcctactaatgatttaagagctggaacacaacttcttgcaggtctagagctggatcctagtccaagtgttcctggaagggatggggtaggggtgaat

SEQ ID NO: 427921 - DNA, 429 bp, Homo sapiens
aaatcctacaagccagaagagattgggggtctatattcaacattattaaagaaaaaaatcttcatccaagaatttcagatggagccaaactaagcgtcataagtgaaggagaaataagatccttttcaaacaaacacattcagagggaattcattaccaccagactgccttacaagagttcctgaaaggagtagtaaatatggaaaggaaagactgttatcagccactacaaaaacacctttaagtacacagaccagtgacactataaagcaaccacacaaaccagtctgcataataatcagctaagaacaggatsagaggatcaaatccacatatatcaataataatcttgaatgtaaatggcctaaatgcctcaatgaaaaggcagagtggcaagctggataaagaaaaagacccaatggtctactg

SEQ ID NO: 427922 - DNA, 429 bp, Homo sapiens
aaatcctacaagccagaagagattgggggtctatattcaacattattaaagaaaaaaatcttcatccaagaatttcagatggagccaaactaagcgtcataagtgaaggagaaataagatccttttcaaacaaacacattcagagggaattcattaccaccagactgccttacaagagttcctgaaaggagtagtaaatatggaaaggaaagactgttatcagccactacaaaaacacctttaagtacacagaccagtgacactataaagcaaccacacaaaccagtctgcataataatcagctaagaacaggatcagaggatcaaatccacatatatcaataataaycttgaatgtaaatggcctaaatgcctcaatgaaaaggcagagtggcaagctggataaagaaaaagacccaatggtctactg

SEQ ID NO: 427923 - DNA, 429 bp, Homo sapiens
aaatcctacaagccagaagagattgggggtctatattcaacattattaaagaaaaaaatcttcatccaagaatttcagatggagccaaactaagcgtcataagtgaaggagaaataagatccttttcaaacaaacacattcagagggaattcattaccaccagactgccttacaagagttcctgaaaggagtagtaaatatggaaaggaaagactgttatcagccactacaaaaacacctttaagtacacagaccagtgacactataaagcaaccacacaaaccagtctgcataataatcagctaagaacaggatcagaggatcaaatccacatatatcaataataatyttgaatgtaaatggcctaaatgcctcaatgaaaaggcagagtggcaagctggataaagaaaaagacccaatggtctactg

SEQ ID NO: 427924 - DNA, 429 bp, Homo sapiens
aaatcctacaagccagaagagattgggggtctatattcaacattattaaagaaaaaaatcttcatccaagaatttcagatggagccaaactaagcgtcataagtgaaggagaaataagatccttttcaaacaaacacattcagagggaattcattaccaccagactgccttacaagagttcctgaaaggagtagtaaatatggaaaggaaagactgttatcagccactacaaaaacacctttaagtacacagaccagtgacactataaagcaaccacacaaaccagtctgcataataatcagctaagaacaggatcagaggatcaaatccacatatatcaataataatcttgaatgtaaatggcctaaatscctcaatgaaaaggcagagtggcaagctggataaagaaaaagacccaatggtctactg

SEQ ID NO: 427925 - DNA, 580 bp, Homo sapiens
tgacaaatttgggccacattcaaagctgttctgacctgcattcagcccacaggctgcaggttggacaagcttggtttagcacaatccacttgagtgagttcttctcagtgagttcatagagatctgattgttagaaacagcctgggactgcccccttctctctcttactccctctctgacaatgtgacacactggctccccttcaccttctgccatgattgtaagcttcttgaggcctcactcagagcagatgccattgcttcctgtgcagtctgcagaacactgaaccaagataaacctcttttattaaaaaataaataaataaattacccagcattgggtatgtcttcttagcgatacaaagagactaacacagcccctgacaaactgtgacacatgaccaaacagtgttttcataaggataccataaggaagtgaatatttcagtagcaggatatcagtgtgaattctactgcaagactggatagggaaaatgtggttgattcattttattgaaaactatgcagcagctacaggrgaataaacaaccaaaaataacctacagcaatgtgggaatgta

SEQ ID NO: 427926 - DNA, 583 bp, Homo sapiens
aaaactgatgaaagaaaaaagctagttatttgaaaacatcaataatattgataaacttctatcaagattaactaaaacaaatagagatgayataaattattaataccagaaatgaaagagaggacatcattagtgatcccatgtacattaaaggatagtaaaggaatattatgaacaactttatgcacaaaaatttaatgacgagggtgaaatgtaccaattccttgaaggacacaatcaaccaaaactcacatgaggagaaatagataatctgaacaggcctttatctattaaagaaactgaattaataattaataccctgctaaacagaaagcaccagggctagataagttcactgctaaatcttaccaaacatttaatcaggaaattatatcgattctgcacaatcaatcacttccaataataaaagtaaaaaacaagttattctggaaagagggaccatggcacaagaaatgtttggcacagcacaaccagtccccagagaccaaagctgggccatgtcttcaaagcccagagtgtgcatagcttgagtcaagctgaaggaaggaataaaaaaaaatgg

SEQ ID NO: 427927 - DNA, 583 bp, Homo sapiens
aaaactgatgaaagaaaaaagctagttatttgaaaacatcaataatattgataaacttctatcaagattaactaaaacaaatagagatgatataaattattaataccagaaatgaaagagaggacatcattagtgatcccatgtacattaaaggatagtaaaggaatattatgaacaactttatgcacaaaaatttaatgacgagggtgaaatgtaccaattccttgaaggacacaatcaaccaaaactcacatgaggagaaatagataatctgaacaggmctttatctattaaagaaactgaattaataattaataccctgctaaacagaaagcaccagggctagataagttcactgctaaatcttaccaaacatttaatcaggaaattatatcgattctgcacaatcaatcacttccaataataaaagtaaaaaacaagttattctggaaagagggaccatggcacaagaaatgtttggcacagcacaaccagtccccagagaccaaagctgggccatgtcttcaaagcccagagtgtgcatagcttgagtcaagctgaaggaaggaataaaaaaaaatgg

SEQ ID NO: 427928 - DNA, 424 bp, Homo sapiens
tgaattaataattaataccctgctaaacagaaagcaccagggctagataagttcactgctaaatcttaccaaacatttaatcaggaaattatatcgattctgcacaatcaatcacttccaataataaaagtaaaaaacaagttattctggaaagagggaccatggcacaagaaatgtttggcacagcacaaccagtccccagagaccaaagctrggccatgtcttcaaagcccagagtgtgcatagcttgagtcaagctgaaggaaggaataaaaaaaaatggggagaaagtcaggggatatatgatgaagcaaaatcttttatgtctgatgttctcagaatgaataaaattataaaatgcaaagtgcatatatcacagtttcagaagcaatattggtcccactgctgattttctaaaatggag

SEQ ID NO: 427929 - DNA, 424 bp, Homo sapiens
tgaattaataattaataccctgctaaacagaaagcaccagggctagataagttcactgctaaatcttaccaaacatttaatcaggaaattatatcgattctgcacaatcaatcacttccaataataaaagtaaaaaacaagttattctggaaagagggaccatggcacaagaaatgtttggcacagcacaaccagtccccagagaccaaagctgggccatgtcttcaaagcccagagtgtgcatagcytgagtcaagctgaaggaaggaataaaaaaaaatggggagaaagtcaggggatatatgatgaagcaaaatcttttatgtctgatgttctcagaatgaataaaattataaaatgcaaagtgcatatatcacagtttcagaagcaatattggtcccactgctgattttctaaaatggag

SEQ ID NO: 427930 - DNA, 424 bp, Homo sapiens
tgaattaataattaataccctgctaaacagaaagcaccagggctagataagttcactgctaaatcttaccaaacatttaatcaggaaattatatcgattctgcacaatcaatcacttccaataataaaagtaaaaaacaagttattctggaaagagggaccatggcacaagaaatgtttggcacagcacaaccagtccccagagaccaaagctgggccatgtcttcaaagcccagagtgtgcatagcttgagtcaagctgaaggaaggaataaaaaaaaatggggagaaagtcaggggatatatgatgaagcaaaatcttttatgtctgatgttctcagaatgaataaaattataaaatgcaaagtgcatatatcacwgtttcagaagcaatattggtcccactgctgattttctaaaatggag

SEQ ID NO: 427931 - DNA, 489 bp, Homo sapiens
aaggtgttctagaatagccacattggatgggaggrtagcaatgtttctctcaggtgaggagagagtatttataaagctcgatgaatatctccaaaatttaggagtggcacaggagtctgatgtttaattaattattttccagaattgtaagagtaaaagacaaaggctgataagctgttttgctggtaaattaaagaacagcggctaatacatttagattgtcaatttcatgggtttgtgaccactgtagttgtataagaacccacattcagtggatccttcaaaactttactgttactgtcttgaaatccttaataattttatctttgaatttgtgttttgtaagtgaactctgatgggacaatggagcatgagccaggagcatggggcctcagctcacatgtgatctcaccttttgccatcttgctcccccactgatacctagagaccactacaccacctcttacccagcaggggtctgagtccaaa

SEQ ID NO: 427932 - DNA, 489 bp, Homo sapiens
aaggtgttctagaatagccacattggatgggaggatagcaatgtttctctcaggtgaggrgagagtatttataaagctcgatgaatatctccaaaatttaggagtggcacaggagtctgatgtttaattaattattttccagaattgtaagagtaaaagacaaaggctgataagctgttttgctggtaaattaaagaacagcggctaatacatttagattgtcaatttcatgggtttgtgaccactgtagttgtataagaacccacattcagtggatccttcaaaactttactgttactgtcttgaaatccttaataattttatctttgaatttgtgttttgtaagtgaactctgatgggacaatggagcatgagccaggagcatggggcctcagctcacatgtgatctcaccttttgccatcttgctcccccactgatacctagagaccactacaccacctcttacccagcaggggtctgagtccaaa

SEQ ID NO: 427933 - DNA, 489 bp, Homo sapiens
aaggtgttctagaatagccacattggatgggaggatagcaatgtttctctcaggtgaggagagagtatttataaagctcgatgaatatctccaaaatttaggagtggcacaggagtctgatgtttaattaattattttccagaattgtaagagtaaaagacaaaggctgataagctgttttgctggtaaattaaagaacagckgctaatacatttagattgtcaatttcatgggtttgtgaccactgtagttgtataagaacccacattcagtggatccttcaaaactttactgttactgtcttgaaatccttaataattttatctttgaatttgtgttttgtaagtgaactctgatgggacaatggagcatgagccaggagcatggggcctcagctcacatgtgatctcaccttttgccatcttgctcccccactgatacctagagaccactacaccacctcttacccagcaggggtctgagtccaaa

SEQ ID NO: 427934 - DNA, 488 bp, Homo sapiens
ttgtcaatttcatgggtttgtgaccactgtagttgtataagaacccacattcagtggatccttcaaaactttactgttactgtcttgaaatccttaataattttatctttgaatttgtgttttgtaagtgaactctgatgggacaatggagcatgagccaggagcatggggcctcagctcacatgtgatctcaccttttgccatcttgctcccccactgatacctagagaccactacaccacctcttacccagcaggggtctgagkccaaatacaaggagactcagggtcatatcctgagtaattttgagcgctctgtgagcatccctgtttccaaggcagagtgaaattaagagcaaagaaaaaacatcatgacaggtcaagaaagaaaccataggaagaaaaattctattatattttcttttgtttgtaaaagggatcctgcaaattaagtagctgacccggggtttcactttctggatttcaggg

SEQ ID NO: 427935 - DNA, 488 bp, Homo sapiens
ttgtcaatttcatgggtttgtgaccactgtagttgtataagaacccacattcagtggatccttcaaaactttactgttactgtcttgaaatccttaataattttatctttgaatttgtgttttgtaagtgaactctgatgggacaatggagcatgagccaggagcatggggcctcagctcacatgtgatctcaccttttgccatcttgctcccccactgatacctagagaccactacaccacctcttacccagcaggggtctgagtccaaatacaaggagactcagggtcatatcctgagtaattttgagcgctctgtgagcatycctgtttccaaggcagagtgaaattaagagcaaagaaaaaacatcatgacaggtcaagaaagaaaccataggaagaaaaattctattatattttcttttgtttgtaaaagggatcctgcaaattaagtagctgacccggggtttcactttctggatttcaggg

SEQ ID NO: 427936 - DNA, 488 bp, Homo sapiens
ttgtcaatttcatgggtttgtgaccactgtagttgtataagaacccacattcagtggatccttcaaaactttactgttactgtcttgaaatccttaataattttatctttgaatttgtgttttgtaagtgaactctgatgggacaatggagcatgagccaggagcatggggcctcagctcacatgtgatctcaccttttgccatcttgctcccccactgatacctagagaccactacaccacctcttacccagcaggggtctgagtccaaatacaaggagactcagggtcatatcctgagtaattttgagcgctctgtgagcatccctgtttccaaggcwgagtgaaattaagagcaaagaaaaaacatcatgacaggtcaagaaagaaaccataggaagaaaaattctattatattttcttttgtttgtaaaagggatcctgcaaattaagtagctgacccggggtttcactttctggatttcaggg

SEQ ID NO: 427937 - DNA, 488 bp, Homo sapiens
ttgtcaatttcatgggtttgtgaccactgtagttgtataagaacccacattcagtggatccttcaaaactttactgttactgtcttgaaatccttaataattttatctttgaatttgtgttttgtaagtgaactctgatgggacaatggagcatgagccaggagcatggggcctcagctcacatgtgatctcaccttttgccatcttgctcccccactgatacctagagaccactacaccacctcttacccagcaggggtctgagtccaaatacaaggagactcagggtcatatcctgagtaattttgagcgctctgtgagcatccctgtttccaaggcagagtgaaattaagagcaaagaaaaaacatcatgacaggtcaagaaagaaaccataggaaraaaaattctattatattttcttttgtttgtaaaagggatcctgcaaattaagtagctgacccggggtttcactttctggatttcaggg

SEQ ID NO: 427938 - DNA, 349 bp, Homo sapiens
agggggaaatgcaactaataaaatgtaggaaaaaaaacgtgaacagaaaatataataaacctamatggtggtgcttacatagataaaactgaaagaggattgtaaatagaactgtaagaatggatttgtctaccatttattatattttgttaaaaataaagaaattcaatttacaatattgaattttactagactttctggtttgaaaagctagagtttctttttcctttcagaaggcttgtattcaggtaatactgatgaagagaatcctcaagacctttacactctgggtcagttccaagatggctaagaagctgtttaaaacaaccaaaaaacaacttgataggat

SEQ ID NO: 427939 - DNA, 640 bp, Homo sapiens
gtcagcactaaaataaaaatgtagggggaaatgcaactaataaaatgtaggaaaaaaaacgtgaacagaaaatataataaacctacatggtggtgcttacrtagataaaactgaaagaggattgtaaatagaactgtaagaatggatttgtctaccatttattatattttgttaaaaataaagaaattcaatttacaatattgaattttactagactttctggtttgaaaagctagagtttctttttcctttcagaaggcttgtattcaggtaatactgatgaagagaatcctcaagacctttacactctgggtcagttccaagatggctaagaagctgtttaaaacaaccaaaaaacaacttgataggattgacaatttcatgttttttaataagtgttgaatgagactgctaactacaatcagcagatatacatatgtggtgtcatagatgttaggttttcaaaaataaagaatgtgttagaaaaatgcctgcaaatcatttgaatgttacaacctttttaaaaaaatctggctgttgagtgcagactgtgctgtttcaccttttattacaaagactcagtgaatgaaacatatttgatagcttggcaatagaagaaaaatttgtatttaaatgagaa

SEQ ID NO: 427940 - DNA, 349 bp, Homo sapiens
agggggaaatgcaactaataaaatgtaggaaaaaaaacgtgaacagaaaatataataaacctacatggtggtgcttacatagataaaactgaaagaggattgtaaatagaactgtaagratggatttgtctaccatttattatattttgttaaaaataaagaaattcaatttacaatattgaattttactagactttctggtttgaaaagctagagtttctttttcctttcagaaggcttgtattcaggtaatactgatgaagagaatcctcaagacctttacactctgggtcagttccaagatggctaagaagctgtttaaaacaaccaaaaaacaacttgataggat

SEQ ID NO: 427941 - DNA, 349 bp, Homo sapiens
agggggaaatgcaactaataaaatgtaggaaaaaaaacgtgaacagaaaatataataaacctacatggtggtgcttacatagataaaactgaaagaggattgtaaatagaactgtaagaatggatttgtctaccatttattatattttgwtaaaaataaagaaattcaatttacaatattgaattttactagactttctggtttgaaaagctagagtttctttttcctttcagaaggcttgtattcaggtaatactgatgaagagaatcctcaagacctttacactctgggtcagttccaagatggctaagaagctgtttaaaacaaccaaaaaacaacttgataggat

SEQ ID NO: 427942 - DNA, 349 bp, Homo sapiens
agggggaaatgcaactaataaaatgtaggaaaaaaaacgtgaacagaaaatataataaacctacatggtggtgcttacatagataaaactgaaagaggattgtaaatagaactgtaagaatggatttgtctaccatttattatattttgttaaaaataaagaaattcaatttacaatattgaattttactagactttctggtttgaaaagctagagtttctttttcctttcagaaggcttgtattcaggtaatactgatgaagagaatcctcaagacctttacactctgggtcagttccaagatggctaagaagctgtttaaaayaaccaaaaaacaacttgataggat

SEQ ID NO: 427943 - DNA, 640 bp, Homo sapiens
gtcagcactaaaataaaaatgtagggggaaatgcaactaataaaatgtaggaaaaaaaacgtgaacagaaaatataataaacctacatggtggtgcttacatagataaaactgaaagaggattgtaaatagaactgtaagaatggatttgtctaccatttattatattttgttaaaaataaagaaattcaatttacaatattgaattttactagactttctggtttgaaaagctagagtttctttttcctttcagaaggcttgtattcaggtaatactgatgaagagaatcctcaagacctttacactctgggtcagttccaagatggctaagaagctgtttaaaacaaccaaaaaacaacttgataggattgacaatttcatgttttttaataagtgttgaatgagactgctaactacaatcagcagatatacatatgtggtgtcatagatgttaggttttcaaaaataaagaatgtgttagaaaaatgcctgcaaatcattygaatgttacaacctttttaaaaaaatctggctgttgagtgcagactgtgctgtttcaccttttattacaaagactcagtgaatgaaacatatttgatagcttggcaatagaagaaaaatttgtatttaaatgagaa

SEQ ID NO: 427944 - DNA, 640 bp, Homo sapiens
gtcagcactaaaataaaaatgtagggggaaatgcaactaataaaatgtaggaaaaaaaacgtgaacagaaaatataataaacctacatggtggtgcttacatagataaaactgaaagaggattgtaaatagaactgtaagaatggatttgtctaccatttattatattttgttaaaaataaagaaattcaatttacaatattgaattttactagactttctggtttgaaaagctagagtttctttttcctttcagaaggcttgtattcaggtaatactgatgaagagaatcctcaagacctttacactctgggtcagttccaagatggctaagaagctgtttaaaacaaccaaaaaacaacttgataggattgacaatttcatgttttttaataagtgttgaatgagactgctaactacaatcagcagatatacatatgtggtgtcatagatgttaggttttcaaaaataaagaatgtgttagaaaaatgcctgcaaatcatttgaatgttacaaccttttwaaaaaaatctggctgttgagtgcagactgtgctgtttcaccttttattacaaagactcagtgaatgaaacatatttgatagcttggcaatagaagaaaaatttgtatttaaatgagaa

SEQ ID NO: 427945 - DNA, 288 bp, Homo sapiens
gagaaacacccaaaggtgtggaggggcaggtcaccccttcatgtgggatgtacaaaacaattctccacaaatttaaatttatgcctatgatcatgtgtaatgaaattagycctcaagagccaagttgagaccatgttcagaatgaaagcttcagaaacccatggcaaacacatgaatataagaccattttagacacagtccccagattacctctgaattcagtgggggaaaagtgacaaggagcaatatttagggcatctaggatagtgctaccttctcatccctaac

SEQ ID NO: 427946 - DNA, 288 bp, Homo sapiens
gagaaacacccaaaggtgtggaggggcaggtcaccccttcatgtgggatgtacaaaacaattctccacaaatttaaatttatgcctatgatcatgtgtaatgaaattagtcctcaagagccaagttgagaccatgttcagaatgaaagcttcagaaacccatggcaaacacatgaatataagaccattttagacacagtccccagattacctctgaattcagtggggraaaagtgacaaggagcaatatttagggcatctaggatagtgctaccttctcatccctaac

SEQ ID NO: 427947 - DNA, 622 bp, Homo sapiens
aagaagacgacctttaatggaatatttgatggacgctgaagtgagtctattaacaaaaacaaacaaaaagaatcagggactacatttgccattaattctaaaattgttgccatttagggcctcactgaaatatagggccaaatagctgttgctctwccagtagcagttctcatattaaatgatgaatttgcaaggcatgccccctaggatttcatctgttctccttgagaaaatgtcaataacttctataaagaaagagtggccctagttagagttttttagttctaagtctatgtttaacccattaagaaataattcatacttagtgtatatttttaaaaaacactaaaatatagtctaaattttcctgattttttaaactatgtaggaattatataataaaatgtgattacctaagagaatgttctggtttttaggacatatacaatgaagtacttaggattaaaataataagatggctccaatttgcaaatagtatagaaagaagagagagagagagcacactaccaatatattcaaatgtaatttagaaaaaaaatctggataaaagggtatataggactttcttctactattcttgcaacttctttctaagtttaaa

SEQ ID NO: 427948 - DNA, 622 bp, Homo sapiens
aagaagacgacctttaatggaatatttgatggacgctgaagtgagtctattaacaaaaacaaacaaaaagaatcagggactacatttgccattaattctaaaattgttgccatttagggcctcactgaaatatagggccaaatagctgttgctcttccagtagcagttctcatattaaatgatgaatttgcaaggcatgccccctaggatttcatctgttctccttgagaaaatgtcaataacttctataaagaaagagtggccctagttagagttttttagttcyaagtctatgtttaacccattaagaaataattcatacttagtgtatatttttaaaaaacactaaaatatagtctaaattttcctgattttttaaactatgtaggaattatataataaaatgtgattacctaagagaatgttctggtttttaggacatatacaatgaagtacttaggattaaaataataagatggctccaatttgcaaatagtatagaaagaagagagagagagagcacactaccaatatattcaaatgtaatttagaaaaaaaatctggataaaagggtatataggactttcttctactattcttgcaacttctttctaagtttaaa

SEQ ID NO: 427949 - DNA, 622 bp, Homo sapiens
aagaagacgacctttaatggaatatttgatggacgctgaagtgagtctattaacaaaaacaaacaaaaagaatcagggactacatttgccattaattctaaaattgttgccatttagggcctcactgaaatatagggccaaatagctgttgctcttccagtagcagttctcatattaaatgatgaatttgcaaggcatgccccctaggatttcatctgttctccttgagaaaatgtcaataacttctataaagaaagagtggccctagttagagttttttagttctaagtctatgtttaacccattaagaaataattcatacttagtrtatatttttaaaaaacactaaaatatagtctaaattttcctgattttttaaactatgtaggaattatataataaaatgtgattacctaagagaatgttctggtttttaggacatatacaatgaagtacttaggattaaaataataagatggctccaatttgcaaatagtatagaaagaagagagagagagagcacactaccaatatattcaaatgtaatttagaaaaaaaatctggataaaagggtatataggactttcttctactattcttgcaacttctttctaagtttaaa

SEQ ID NO: 427950 - DNA, 622 bp, Homo sapiens
aagaagacgacctttaatggaatatttgatggacgctgaagtgagtctattaacaaaaacaaacaaaaagaatcagggactacatttgccattaattctaaaattgttgccatttagggcctcactgaaatatagggccaaatagctgttgctcttccagtagcagttctcatattaaatgatgaatttgcaaggcatgccccctaggatttcatctgttctccttgagaaaatgtcaataacttctataaagaaagagtggccctagttagagttttttagttctaagtctatgtttaacccattaagaaataattcatacttagtgtatatttttaaaaaacactaaaatatagtctaaattttcctgattttttaaactatgtaggaattatataataaaatgtgattacctaagagaatgttctggtttttaggacatatacaatraagtacttaggattaaaataataagatggctccaatttgcaaatagtatagaaagaagagagagagagagcacactaccaatatattcaaatgtaatttagaaaaaaaatctggataaaagggtatataggactttcttctactattcttgcaacttctttctaagtttaaa

SEQ ID NO: 427951 - DNA, 564 bp, Homo sapiens
ttgcagtgagctgagatcacgccactgtgctctagccttggcaacagatcgagactctgtctcaaaaaacaaacaaamaaacaaaaaaacaaacaaacaaagtaaattcactgatgccaaaaccaaagaggaaacacagtgtgagtgacctggcaggagctgaagctaagtgacctggaaggagtggagccagaggtgcatgcatgcagacgaaagccacaatggggcctggccatccagggggagcacagagtacctggccacattccagctgagagtggaaaggagtgacctgcatcaagtcagatccacaaagagctgctccatccatcaactagcaccagaaaaactccacccccgggcccagggaaaagaagaggaatctagtcattcatccagggtcacaggtgaaaagaaaatcaccagcaaaacaaataaaacaacagttttgcattaagcagggttggagtccaaattcacggaaactcaaaactgaaaaataatatgaaaatgagtctggagctactgaaactcttagcatctcctgaagatgctcatgtcaca

SEQ ID NO: 427952 - DNA, 575 bp, Homo sapiens
gcatgcatgcagacgaaagccacaatggggcctggccatccagggggagcacagagtacctggccacattccagctgagagtggaaaggagtgacctgcatcaagtcagatccacaaagagctgctccatccatcaactagcaccagaaaaamtccacccccgggcccagggaaaagaagaggaatctagtcattcatccagggtcacaggtgaaaagaaaatcaccagcaaaacaaataaaacaacagttttgcattaagcagggttggagtccaaattcacggaaactcaaaactgaaaaataatatgaaaatgagtctggagctactgaaactcttagcatctcctgaagatgctcatgtcacagtgctctgaaggggcacactcacaatccacagtgtattggacatctatggtaaatagctactggagacaagatgataatacacgtgacaaaccacacaagaaaatgaaccaccatgcctcacctccagattggggatatattagaattgtatgtacaatataactcaagctacattaaaagcatatgcatatacaggaaaaaaatctc

SEQ ID NO: 427953 - DNA, 567 bp, Homo sapiens
aagaaaactataaatatctgtaggccaataaattagaaaacttagataaactgaacacttccctaaaaagacacaaactaccaaaactgacttaaaagcagacaatatgattagacctataacaattaaagagaatgaattaaaaataaaaaaactatccacaaagaaaagcccactcagatggcttcactagtgaattctgtcaaatatttaaagaataattaataccaatccatctcaacttcttccaaaaaatagaagaggctggaacaccaactcattctatgaggccagtgttacaccccgatcccaaaaacaaagacatcacaagaaaacgaaactacacactatcttaagaatatggatatgagaatcctcaataaaataatcaaaaactgaatccagcaacatataasaaggacaagacgccatgaccaagtgggatttagcccagaaatacaaagttggttttaacaccagaaaataaatttatgtaatacaccacattaacagaataaaggacaaaaaccacatgataatctcaaatgatatagaaaaggcatctaa

SEQ ID NO: 427954 - DNA, 556 bp, Homo sapiens
aaaggatctgaatagacatttctctgaaaaagatatataagtgggcaacaagcacatgaaaagatgctcttagtcttcagggaaatacaaatcaaaactacaagataccactgcacactctcgacgacggctaaaatcaaaaggacaagtaataacaagtgttgctgaagatgggaaaaaaataaagacaacttcatacactgctggtgggaagatsgaaccgtacagcaattttggaaaagtctgcccaggtcctcaaaaatttaaacataaaagtgccactggacctagcaattccactcctaggcatattaccccagaaaagtgaaaacgcacatccatgcaaaaaaaccctgtacccaaatattgataacagcattgagcataatagccaaaaagaggaaacaacccaaatgtccatcaatggatgaatggatatgtccaccccatggactattactgagccatgtaaaggaatgaagtactgatgcatgctacaacatggatgaaccttgaagacatcaggctaagtgaaagaagccagccacaaacgacc

SEQ ID NO: 427955 - DNA, 553 bp, Homo sapiens
agggtacagggtttttactgaagtgatgaaaatctaaaatcaactgtgctgatgattgcacgtatctttcaatacagtcaaaaccgctgcactgaacactttcagtgggtaaactgtatggtatataaattacacctcaataaagttgttacagaaaagaaggaaaatggagaaatagctaagctacaagaatgttaggcagtgatatggaaaaacacatggataaatctaaacatctgtgtaaaataatactctaaattatgactaaaaaaaaaaataccaagacaaacagaacaatactgcacataagtttggagagacaactggaattaagtgtcccaagtccttatattgtgtgtrgactgggagtatgaaataactgattagactttaaatatgcaggatcaaattggacaagacaccacaaaagggagagaaacaggagtaacttccaaacacatagagcaaaaaatgacataaaaaaaactaataagtaaaagtacacagaggtcaaaaaactatgggctgggggccaaatgcagcccaccacctc

SEQ ID NO: 427956 - DNA, 642 bp, Homo sapiens
gtgcagaatggaggcaacaaagtctacagagaatactggggaaaacagagcgctggacttcagtcctctctgtatatagggaatggtctctagatgctcatggtttcaacgaattttagtataccacagtactcatttctactctctagctccctgacttccagagagagctacatgcttgatttctaataatgctttcagtataagagagaagaaaataatgcagggttaattgctgaggtattctgggatcacctttcagtcatatatctggcatttgccctagaaccttaaatccttgtggagagagagtttttggakaaactgtactagcacaatgtctatagaaacatttgttctcttcttgcatcttcctaaactctaagggttattcctaagagtggaatatagctacattttctccctcatattttaatgaaaatatattaatgattaacctgctatactttgctattttattcactttttatgtacagtagattcaggttttcctaaggggttggaagcactctgcttggtaagaaaatatactttatatttagctgtttgcatattaatgctgctgtaccagctcttgtagggctaatgcattggtgacaccaaatattaaattgcttgttc

SEQ ID NO: 427957 - DNA, 572 bp, Homo sapiens
cttaattgactcacagttcagcatggttgaggagacctcaggaaacttacaatcatggcrgaaggggaagcaaacacattcttcttcacatggcggcagcaaggagaagtgctgagaaaaagggggaaaagccccttataaaaccatcagatctcataagaattcactcactatcacgagaacagcatggaggtaactgcccccatgattcaattacctcccaccaggtccctctcatgacatgtggagattacaggaaatacaattcaagatgagatttgggtgggtatatgtatatagatataccatatcaggtatagtgtgtgatgcggaggtttgaggtatggttaatcctgtcactcagacaagtgagacagaacccagtggttagtttttcaaaccttattccccatttcctcctctctctagtactctccagtgtctattgtggccatctttatgtccaatgtttagctcccacatataagtgagaacatgtagtatttggttttctgttcctgagttaatttgcttaagataatggcttccagccacatccaagttgctgcaaa

SEQ ID NO: 427958 - DNA, 572 bp, Homo sapiens
cttaattgactcacagttcagcatggttgaggagacctcaggaaacttacaatcatggcggaaggggaagcaaacacattcttcttcacatggcggcagcaaggagaagtgctgagaaaaagggggaaaagccccttataaaaccatcagatctcataagaattcactcactatcacgagaacagcatggaggtaactgcccccatgattcaattacctcccaccaggtccctctcatgacatgtggagattayaggaaatacaattcaagatgagatttgggtgggtatatgtatatagatataccatatcaggtatagtgtgtgatgcggaggtttgaggtatggttaatcctgtcactcagacaagtgagacagaacccagtggttagtttttcaaaccttattccccatttcctcctctctctagtactctccagtgtctattgtggccatctttatgtccaatgtttagctcccacatataagtgagaacatgtagtatttggttttctgttcctgagttaatttgcttaagataatggcttccagccacatccaagttgctgcaaa

SEQ ID NO: 427959 - DNA, 610 bp, Homo sapiens
ggagcacccaaactcataaaataactacttctagacctatgaaaggacttagacagctacacaataatagtrggggacttcaacaccccactgatagtgttagaaagatcactgagcagaaaactaacaaagaaattctggacttaaacttgacacttgaccaattggacctaatagacacctatagaatacttcatccagcacccacagaatacgcattcttctcatctgcacacagacacagaacatactccaagatcaaccacatgcttggccataaaacacgcctcaataaattaaaaaaaaatcaaagttatactgaccataatctcagaccacagtggaataaaaacaaaaatcaataccaaaaagatctcttgaacaacacaattcatgaaaattaaataccttgctcctaaatgacttttgggtaaacaacaaaattaatgcagaaataaaaaaaattctttgcaataaatgaaaacagagacacatcataccaaaatctctgggatgcagcaaaagcagtgttaagaagaaagtttatagtgctaaatgcgtacttcaaaaagttagaaagatctcaaattaaacatctaacatcacaccg

SEQ ID NO: 427960 - DNA, 610 bp, Homo sapiens
ggagcacccaaactcataaaataactacttctagacctatgaaaggacttagacagctacacaataatagtaggggacttcaacaccccactgatagtgttagaaagatcactgagcagaaaactaacaaagaaattctggacttaaacttgacacttgaccaattggacctaatagacacctatagaatacttcatccagcacccacagaatacgcattcttctcatctgcacacagacacagaacatactccaagatcaaccacatgcttggccataaaacacgcctcaataaattaaaaaaaaatcaaagttatactgaccataatctcagaccacagtggaataaaaacaaaaatcaataccaaaaagatctcttgaacaacacaattcatgaaaattaaataccttgctcctaaatgacttttgggtaaacaacaaaattaatgcagaaataaaaaaaattctttgcaataartgaaaacagagacacatcataccaaaatctctgggatgcagcaaaagcagtgttaagaagaaagtttatagtgctaaatgcgtacttcaaaaagttagaaagatctcaaattaaacatctaacatcacaccg

SEQ ID NO: 427961 - DNA, 630 bp, Homo sapiens
tggtcctttaataaaatctcacacacctaatcccatcttggcactggcttgttagagggcccagactaacagctgagcacaggaagtgccctggacagcaccaggtcaccaggatcccgccattgaagtacctggcacctcagcctcacattgcatggcctgggtcrggaggtgccttcacggcttcctcacctacccatcagggaattccttcagtctgctttgcaatgctcccagcaacctgacagtgggatttcctaccaacaagacccaatgattggccccagtatgtgacagataagaaagtgcaaaacatggagtctacagttcctggcattaaggagtctaagaatgaaactcaacaccactctggctaagagcttaaaaaagaaaaatacaatagggccctagaaagctggggtaaaagccagccagagagaagcagcagctaaagccatactgtatgggctaacaagtcaacagcagcagtgcagaggaaacccatccacttgatttccgaggggtctggaatttctggggaaagcagcaaagcacaactctgaagacaagaaagtgcccatccacccaagcctcctgttttgggactccatcactttccaaaataattct

SEQ ID NO: 427962 - DNA, 610 bp, Homo sapiens
ttccaatatctattatcacttatgtacctaaactgtctttttttctgttggttcttattcatcatgtcttatttcctcatgtgctgcattatctttgatggtgtactccatattttatttgaaacaaaagtatttgctgaaataatttgagacctaacacattattattttcttagggcatttttgttggcttctaccaagcactagagacattagcagtagaagaccactttaatctaagttgaaggcctttggatttgtggaacatcatatgacacaaagaaactggacttttgtgcaaggaaataaatttctgttttatctacactcctaaagtacagccccttggggccacagcataaagcagaggtgattcaccagggtccaccaattactgctttttctctcttcttcaggagccaccagaaagtacgaatcagtctctctggtctcctttgaactgaaaagtacccccaggacaaaagyggcctggtgctactcatttctctgggtcatagcctggtatgtctcactatcttgctagctctttgatgattttaaggagaggttttcttcccagctttttgttgcctttggcagcggtggctgg

SEQ ID NO: 427963 - DNA, 527 bp, Homo sapiens
ctggagatgacacaacaaaatactatcatctaccctatttgtcccagttcacctgtctcccattacctcacagcaacacctttaccacatccttaaatccccaaccaaaactccatccttaaaagccaatccactttctaggrgatcttgtatcctacatgacaacaaaaacggagatcatcagatggtaatgccttcacgtcctggtctccccactacaaatctatcttctctaggtgaacccttgctccctcctttatgtcatagaggaagtttctttttccctatctgagaaaggagatagggaagctgtgctctaaatccatctactctctcctcttcactttgtcactatctcaggattgtgtatttaaaagtgctcaaggctttcccctctttaacaagaaaagcctctcttactataaattctttgtatacttttaatataagtcacctctatctaccaccagacctctgtgctttctttcatcatccaacacccacttctcttctccttccatgctccc

SEQ ID NO: 427964 - DNA, 642 bp, Homo sapiens
tttctcattttacagatgttacctttttgacataaccaagtaaaccaacaggcttgaagacacaccgatcataaaaatgaatctaagaacccaggtgtaatcttctgatttctaggtcccagcgcttctcatttttaagcagagtttcatagaaatactctattcaaacaaacaaacaaaaaaaacagaaaagccacagacctctgtaacatttaagcagaggtgtcctcttagtaaaatgtaaaatacatgtgtgaaatctgtttccaacaagctcttatgttatttttagtggcccttctcatcacctgtggtgttttgttttgccctccctcaacccatttctattgcccccatccatactttagccaacaccattctctgatatgctgggttgcctgagtgcctcaccatgtctacctagcccatgtgtctctctgtccccatccacaggggtaacaccatcttgcagagagcaaacactctaagaaggcctgatggactcatctgcctgaaagtggtcataatgactggcaccataacccattctgagtgtccatggagtaatatagagatgatagtagtttgcctcatggaatcttaagaaataacattgwtatcatgattcttgcagcattatga

SEQ ID NO: 427965 - DNA, 558 bp, Homo sapiens
atacttctatgtttggtttctgagaagaaggggcaaaagaacaaattgatatcmcatatttattttgaggagacatttctagggcaagttctttaactgtggaagactaattcttcttattattagtcctcctcaatagtcttcaaaagtcctcttgtaattctgtaggatgaagctatttggcatgatagtcctgaaccactacgaagtcacagaatcaagaagattagggcttcaaggaaccttagagactactagacaaaccactctccttcacagaagaggaaaccagggcccacaggaggccctcattgaaatgtatttgataggctgggtgcagtggctcacacctgtaatccaaggactttggaggctgaggcaggaggatcacttgaggccaagagttcgagactagcctgggcaacataatgagaccttatatctacaaaaaattatcaaattggctgggtgtggtagcacacacctgtagtactagctacttgggaggctgaggtgggaagatcattcgagcccaggagtttgaggctgcagtgggct

SEQ ID NO: 427966 - DNA, 563 bp, Homo sapiens
ggcagggggatgatgtgtaagccctagtctaagtccaaaagcccaagaactaggtgtgccaatgtccaagggcagatgaaaatggatatcacagctcaagcaggagagaaaatttactcttccttcacctttttgttctattcaggtactcaaaaaagaggataatgttcacccatattgrtgaaggcaatcttcttcacttagtctactgattcaaatactaatctcttctgcaacatcttgtacagtcctctatatgacaacataaagatactggctcacaaaattgatttatttgactgtgaaatctaatagaaaaaaatacttaatattgaatcatgaataaagtgcacactttatggtttagtatataaaagtatgtagcaaaccccttttaatgaggaagctaattcaagccaactaagcttacaaaactcaatttataaaaccaggatattgatgtgttaatttaaaatagaactatactaagtgaactagatgctggcatcctcatgaccattcctctctttttttctagaaaagcctcaaggaaaccaaatttt

SEQ ID NO: 427967 - DNA, 603 bp, Homo sapiens
atgcagtatttgtctttttgcacctggcttatttcacttaacattatgttctccaggctaatccatattgctgcaaattataggatttcattytttttttatggctaaatatcattcaactgtgtaaatacaccacattttctttttccatttatacaatgatgaacacttagctcagtttcctgtcttgggctattgcaaataatgctgcaattaacatgggagtgcagatatctctttgacatacaggcataccacagagatagtgtgaattcagttcccaactgctacaataaagcaaatgtcacaatgaagtgagtcacatggattttttaattccgagtgcatataaaagttatgtttatactataatgtagtctaactgtgcaattaaattatgtcttttaaaaatgtatatacctaattgaaaaatactttattactaaaaaatgcaaacagtcatcttagccttcagcaagttgtcatctttttcctggtgaagcatcttgccttaatgctgatggctgctgactgatcagggtggtgattgctgaaggttgaaatggctgtggtaatttcttaaaataagatgcaattaactat

SEQ ID NO: 427968 - DNA, 558 bp, Homo sapiens
atacttctatgtttggtttctgagaagaaggggcaaaagaacaaattgatatcccatatttattttgaggagacatttctagggcaagttctttaactgtggaagactaattcttcttattattagtcctcctcaatagtcttcaaaagtcctcttgtaattctgtaggatgaagctatttggcatgatagtcctgaaccactaygaagtcacagaatcaagaagattagggcttcaaggaaccttagagactactagacaaaccactctccttcacagaagaggaaaccagggcccacaggaggccctcattgaaatgtatttgataggctgggtgcagtggctcacacctgtaatccaaggactttggaggctgaggcaggaggatcacttgaggccaagagttcgagactagcctgggcaacataatgagaccttatatctacaaaaaattatcaaattggctgggtgtggtagcacacacctgtagtactagctacttgggaggctgaggtgggaagatcattcgagcccaggagtttgaggctgcagtgggct

SEQ ID NO: 427969 - DNA, 558 bp, Homo sapiens
atacttctatgtttggtttctgagaagaaggggcaaaagaacaaattgatatcccatatttattttgaggagacatttctagggcaagttctttaactgtggaagactaattcttcttattattagtcctcctcaatagtcttcaaaagtcctcttgtaattctgtaggatgaagctatttggcatgatagtcctgaaccactacgargtcacagaatcaagaagattagggcttcaaggaaccttagagactactagacaaaccactctccttcacagaagaggaaaccagggcccacaggaggccctcattgaaatgtatttgataggctgggtgcagtggctcacacctgtaatccaaggactttggaggctgaggcaggaggatcacttgaggccaagagttcgagactagcctgggcaacataatgagaccttatatctacaaaaaattatcaaattggctgggtgtggtagcacacacctgtagtactagctacttgggaggctgaggtgggaagatcattcgagcccaggagtttgaggctgcagtgggct

SEQ ID NO: 427970 - DNA, 558 bp, Homo sapiens
atacttctatgtttggtttctgagaagaaggggcaaaagaacaaattgatatcccatatttattttgaggagacatttctagggcaagttctttaactgtggaagactaattcttcttattattagtcctcctcaatagtcttcaaaagtcctcttgtaattctgtaggatgaagctatttggcatgatagtcctgaaccactacgaagtcacagaatcaagaagattagggcttcaaggaaccttagagactactagacaaaccactctccttcacagaagaggaaaccagggcccacaggaggccctcattgaaatgtatttgataggctgggtgcagtrgctcacacctgtaatccaaggactttggaggctgaggcaggaggatcacttgaggccaagagttcgagactagcctgggcaacataatgagaccttatatctacaaaaaattatcaaattggctgggtgtggtagcacacacctgtagtactagctacttgggaggctgaggtgggaagatcattcgagcccaggagtttgaggctgcagtgggct

SEQ ID NO: 427971 - DNA, 525 bp, Homo sapiens
cttcaggtttatttttctcatcagctcattgtctcaatacatgtaatatctcagctgatctgtgaaatgaattcaaaactttcagactgaaagtgtagatgcaggaatacactttaaaggtgcaacttcctgtggctgctcatttttattctctgcttcttggacaaaataggtttggtgattacacaccaggccttggggctgggagacatgaatatccttggaaagggtacaggatgagccgagcctttagagacagaaataaacctcacctgtgtgagaccctgcaggtgccccctgccctcctgcacctaccctctcgtgcagttcctccccttcacatgcctcacaagcttgcctgggagcagggggcccaggtcacagctcctcctactcttttctcactgccgagatccatcctttagtaggcaggggggagtgacagttaaagactctgtggctttctctgcagtcagttgtgggtgtgaccaagygaacgggtacttatatatgttagtatatgtc

SEQ ID NO: 427972 - DNA, 403 bp, Homo sapiens
ccacagaaaaccttgtaagtatgtgtgtagcagtgaatctatacacaagccaaggtcttgtctcttgaaaccagaaccagtggccttcatcaaatcaaggtactctctacttatgagagaagtctatgtgcaaatttaattttgaatattatataaattgaatcacattttatatgtgccataagctaactctaaccttgagaaaaygtttggaattaacaaatactctgaatctggatctttaaattcttagattctgaagagatttcataagaaacaaagtatgaaaaaaataaaactcatctattaataacttgaaacagcaggtgactctaatctggtaatcagagagaggacccacatcataagcaatattcacatagttattttgtagacatggact

SEQ ID NO: 427973 - DNA, 581 bp, Homo sapiens
aacttcatgggtatatatatatatatgtcaaaatctatcaaattgtacactttatgtgcaagttattgtatgttacatctcaataaagtaattttaaaaacaaaaatattcatgttaaaacgtaagaatgaccactaaaagactagaaatagaatgtataacctttaaattagtagagggaaactaagacagtaaatatgacttgattcacccaatgaatatgggacaagggggaaaaaatagaagaaatcatgtctaaaagaaaaagtaagatggtgtaaatctggggtcagcaagcttttttgtaaaagkccaaataataaattattttggctttgtaggtaatatccttattgcaacgattcagctttactggttgaaggataaaagcaaccatcctagatggctgagagtggctatgtttcactaaaatattatatacaacagcacacgctgggctacatttttcccatgggccataatttgtcagctcttgatataaaaaatgtttgtcaataatcacaatataaatagagtaaccctatctattaaaagagtagattaaaaattcagctatttgc

SEQ ID NO: 427974 - DNA, 545 bp, Homo sapiens
tatttcttctgtaggttaatcagattaatgttttaatcatggactattggagattgcattctgatttttctttttgccagagtgatgattgatggtgctctgttcatcctttagggcatcaataataaaatcagcattgcaaccattcagtcctcagcacagtctatgcccagctcagagaacatagaatgctgccagctataacttttcatcattttcctcagaaagtttgagtatggcttgaaacagaagtcttcagtattttatactctattagggctgctgtgtttagttgagmagtttgtacattgtataagggtatccagctgaggaggcaggaggaagctgaaattcagcctaagctctgctcttttagccctctatgtgactccttctgcacagaaagacacacttttccaagttgtctggccagaggggatgcctttttataatttgcatgaagatggcatatgaactagtgggtggccctactgaccacaacaatttcctaattcagtacaatccgcagagcatatgtttactgc

SEQ ID NO: 427975 - DNA, 247 bp, Homo sapiens
gtctacagtggtaaacacaataggcaaagtacctgccctcctgaagcatacctttaaatgagcacaagaccccaaatcaaatgagtaaactagtcagtatcgtaaagcgataaacactatgaagaaaatgaataaggcaatgagatagacagcaactctgtgtttatctgtaattttgaaataggmaaatatatcagattatttttctttgtgagttattctttgggaatatagttatggaatcttt

SEQ ID NO: 427976 - DNA, 541 bp, Homo sapiens
gcatgtgctcaattaataactgttgaatgaaggaaggaaagactgctaaatttttacattttaattgatgctttctgcagcacagcaccactgggatttgcaaaacaggagttcagggcagtccatgtaatgttttttcagacttgaagattatgctgtgtttataattttaacaatttttaagatagtcttttagtttttccttttctttttggtttgaagggtcattgtattgtcatgctttcctctgattccagctctacactttatttasagttcagctttctggacctctcttgtttttcacaagagtgaaagtttctggtgtggctgcctggtcatttttataaagcctatgattactctgatgtgtatattaatctctccagcaatgcccagcagtttggtggaactttgtcctcagttgcttgaacttaaaaaatgtctagaatctgtttgcctaagctgtagaggccttttttggattggacctattaatctgtcaatacagtttgatttatgttcctattgcctgtttttc

SEQ ID NO: 427977 - DNA, 553 bp, Homo sapiens
tacgtgttaaggagagaaatagrgtagggtgagggggtaaggattaggaagaggatgagacgtgggcaagggaggctagtttagacagtggaccagagaatgtcccggagtgagtaggagaaaaagtagatgtgaatctatgtatcttgactttaatggattgttttcatttaagagtttgataaagctgccctcacattttctccagcttgccagatgtggaaggaagacacactggcctcaagtttccaggttcttgtttggagttcttaggtgcagaagatacctcagttgtcagttctgagtcacagtggccatttgcaagggcagcagttcttgatttttactacccaaataatcctatagtttttgcctccaaaatctcattagagatgagaacctgtgtcttatttatatctctatcaccaacactaagatgccatcatctgtcctatggaccactgcaaaagcctccaacctggtctgtgtgtatcaattatcacccccttcaatgtatcttgaagtttgtctgcagcatcattctggtgctcaa

SEQ ID NO: 427978 - DNA, 554 bp, Homo sapiens
actcattggggaaaagacagtctcctgaataaatggttctgggmaaactggatgtctatagaagaatgaaactaggcccaaacctctcactctacaaaatttaactcaaaatggatcaaagacttaaatataagacccaaaatgataaaaactactagaaggaaacatgggacacacatttcagaacactggtctgggaaatgattttgtgaataaaacctcaaaagcacaggcaacaaaagcaaaaataaacaaatgggattatcaaactagaaagtttctgcacagcaaaggaagcaatcaacagagtgaaaagataacctacagaatttgagaaaatatttgcaagctactaatctgacaggtgactaatattcagaatatacaaggtactcaaacatctcaacagcaaaatattcaattttaaaatgggtaaatgatttaaacagacatttcacaaagaagacattcaaatggtcaacaggtatatgaaaaaatgttcaacatcactaatcatcagtgatgattttgcaactcaaaaccacgatgaggta

SEQ ID NO: 427979 - DNA, 554 bp, Homo sapiens
actcattggggaaaagacagtctcctgaataaatggttctgggcaaactggatgtctatagaagaatgaaactaggcccaaacctctcactctacaaaatttaactcaaaatggatcaaagacttaaatataagacccaaaatgataaaaactactagaaggaaacatgggacacacatttcagaacactggtctgggaaatgattttgtgaataaaacctcaaaagcacaggcaacaaaagcaaaaataaacaaatgggattatcaaactagaaagtttctgcacagcaaaggaagcaatcaacagagtgaaaagataacctacagaatttgagaaaatatttgcaagctactaatctgacaggtgactaatattcagaatatacaaggtactcaaacatctcaacagcaaaatattcaattttaaaatgggyaaatgatttaaacagacatttcacaaagaagacattcaaatggtcaacaggtatatgaaaaaatgttcaacatcactaatcatcagtgatgattttgcaactcaaaaccacgatgaggta

SEQ ID NO: 427980 - DNA, 606 bp, Homo sapiens
ccccttcctaccctgttccccttcaaggccacgttgcctgccattccccattgtgttcccagcctttaagaagtgagctggccatgagccactctgtttttcctcatctatactctccatgctattacatgaggaagccacatctctttagagaagmtgacctctctggcattgctcatatacccacacagcctcgcccctcactatctgctgaacgcagagaactggcaagggtgtgcaaacagcagggtggtggcacctcggggctctgcctgagataccagggcccagtgaggccaagagcaggccaggggcccctgagggatggacctgagcaagggagagccaagttatagaagaggaaactgaggccaagtgccccattaattcatagtcattccttcagttcattcaaaatatttattgagtgctttctttgcttcagggactatttgcatgggatgcagcaataaatgaaactaataaacctgccctaatgaagcctgcaatatattgggaaagacaaactataaacaaataaatatataaatggtccccaagttaagatagctcggcttacgactttttcactttacaatggtgtga

SEQ ID NO: 427981 - DNA, 606 bp, Homo sapiens
ccccttcctaccctgttccccttcaaggccacgttgcctgccattccccattgtgttcccagcctttaagaagtgagctggccatgagccactctgtttttcctcatctatactctccatgctattacatgaggaagccacatctctttagagaagctgacctctctggcattgctcayatacccacacagcctcgcccctcactatctgctgaacgcagagaactggcaagggtgtgcaaacagcagggtggtggcacctcggggctctgcctgagataccagggcccagtgaggccaagagcaggccaggggcccctgagggatggacctgagcaagggagagccaagttatagaagaggaaactgaggccaagtgccccattaattcatagtcattccttcagttcattcaaaatatttattgagtgctttctttgcttcagggactatttgcatgggatgcagcaataaatgaaactaataaacctgccctaatgaagcctgcaatatattgggaaagacaaactataaacaaataaatatataaatggtccccaagttaagatagctcggcttacgactttttcactttacaatggtgtga

SEQ ID NO: 427982 - DNA, 606 bp, Homo sapiens
ccccttcctaccctgttccccttcaaggccacgttgcctgccattccccattgtgttcccagcctttaagaagtgagctggccatgagccactctgtttttcctcatctatactctccatgctattacatgaggaagccacatctctttagagaagctgacctctctggcattgctcatatacccacacagcctcgcccctcactatctgctgaacgcagagaactggcaagggtgtgcaaacagcagggtggtggcacctcggggctctgcctgagataccagggcccagtgaggccaagagcaggccaggggcccctgagggatggacctgagcaagggagagccaagttatagaagrggaaactgaggccaagtgccccattaattcatagtcattccttcagttcattcaaaatatttattgagtgctttctttgcttcagggactatttgcatgggatgcagcaataaatgaaactaataaacctgccctaatgaagcctgcaatatattgggaaagacaaactataaacaaataaatatataaatggtccccaagttaagatagctcggcttacgactttttcactttacaatggtgtga

SEQ ID NO: 427983 - DNA, 547 bp, Homo sapiens
gtagtcagataaagagagaaggaattctcccttcctctgtcttttggttctgttcaggctgccaacagattggatgaaggccaattactttgaagtggaccatgggttttactcagtccactgatacaaatgttagtctcttccagaaacaacctcacagatacactcagaaataatatttaaccagatatctgggcatcctgtggcccagggcccagtcaagttgacacacacaaaatcaaccataacacgtaagaaaaacaaaacaaaacaaaaaaccccaaaacagatggccaagccagactacaaatatattcaataagaatttccaggtgtagcttttgttgtttgctttaaaaaaatttkttttaattttttatttttccatagggtattggggtacaggtggtatttagttacatgagtgagttctttagtggtgatttgtgagattttggtgcacccatcacccgggcagtagacattgcaccctatttgtagccttttatcccttgctccccacccttaccctcaagtcctcaaagtt

SEQ ID NO: 427984 - DNA, 547 bp, Homo sapiens
gtagtcagataaagagagaaggaattctcccttcctctgtcttttggttctgttcaggctgccaacagattggatgaaggccaattactttgaagtggaccatgggttttactcagtccactgatacaaatgttagtctcttccagaaacaacctcacagatacactcagaaataatatttaaccagatatctgggcatcctgtggcccagggcccagtcaagttgacacacacaaaatcaaccataacacgtaagaaaaacaaaacaaaacaaaaaaccccaaaacagatggccaagccagactacaaatatattcaataagaatttccaggtgtagcttttgttgtttgctttaaaaaaatttgttttaattttttatttttccataggktattggggtacaggtggtatttagttacatgagtgagttctttagtggtgatttgtgagattttggtgcacccatcacccgggcagtagacattgcaccctatttgtagccttttatcccttgctccccacccttaccctcaagtcctcaaagtt

SEQ ID NO: 427985 - DNA, 237 bp, Homo sapiens
ttgtgttgtttgcttttttcagaactagcaagttgacagcccaaactaaaaagcatgaacccaaatgtggccagactaaggcatgttgagagagtcatagattttcaaagtgaatgtcttctgygctcaaagatgttccatttccttgcaggcaaaccttataaaattaatgtgtgcttatctcctctaacagagaagaaagaatgaattatatgcaattgaagataatcaagaata

SEQ ID NO: 427986 - DNA, 581 bp, Homo sapiens
agaaagaggcagcaggggagacacaatctttgtcgtaactacagatcagttgatacctaggtattcaagtttgcagagaggacaaaccagtggtggtgaaattctaagaaaatatgttcctatcactaggatccttggttaacttgatgagtgaaattaggcagaattgagctgccaaaatgggagttagcaaaaagtaagcaaggtatgggatctcaaagaatagactccaaaccagcctatggtcctcactgataaatgggstgaacacacacacacacacacacacacacacacacacacacacacacacagagagagatgtatatgtcagagtctgtttgaaggagtagatgaggatataggagaaaaaccaagagattgtgtcacaaagcccaagaaaagaaagtgttataagaataattagtggtcaactgtgtctaatgcaatacagattgtgtaaattgagactagggaaaaaaaccattagatttgacaacatggtgatcattgatgactttagcaaggccagtttgagcacagtgttagaaacaaaaatctggattagaggggattgaaga

SEQ ID NO: 427987 - DNA, 619 bp, Homo sapiens
actcaaaaccttacttccttttctacaaagagctaaaaagctttaatttatgatcatatggaggacaatattctctaaaattctgaccttataaaagctatgtaatcttaatttttaagtgcactacagagtacaaaataaaggaaaaaatatagagaggtrgaaaaacaaagtaaaagtttgaaccctgagaaatagtggagggccaacaaatgctttcactatgaaattactttctaaaccctagtgaatttatgtgttgttatttttgatgacctcataggatgagggaaactggagataaagtttagatcccacccaaaaaggaaagtctaacagaaaagctcttgttgtgtaacaaaccaccccaatacttagtaacctaaatcaacaatgcattattacattctattggttcactaggctcagctggtaagttctcacttggggagtatcatggggttacaaccagtggaggctgaggcaagagtcatctgaagacttgactgtctacccaggagggctcatttacagttgagcggttgatggtggctgttgtctgggagctcagcaggggctgccaacctaatcatcttcacattagttatccagatagctt

SEQ ID NO: 427988 - DNA, 619 bp, Homo sapiens
actcaaaaccttacttccttttctacaaagagctaaaaagctttaatttatgatcatatggaggacaatattctctaaaattctgaccttataaaagctatgtaatcttaatttttaagtgcactacagagtacaaaataaaggaaaaaatatagagaggtggaaaaacaaagtaaaagtttgaaccctgagaaatagtggagggccaacaaatgctttcactatgaaattactttctaaaccctagtgaatttatgtgttgttatttttgatgacctcataggatgagggaaactggagataaagtttagatcccacccmaaaaggaaagtctaacagaaaagctcttgttgtgtaacaaaccaccccaatacttagtaacctaaatcaacaatgcattattacattctattggttcactaggctcagctggtaagttctcacttggggagtatcatggggttacaaccagtggaggctgaggcaagagtcatctgaagacttgactgtctacccaggagggctcatttacagttgagcggttgatggtggctgttgtctgggagctcagcaggggctgccaacctaatcatcttcacattagttatccagatagctt

SEQ ID NO: 427989 - DNA, 619 bp, Homo sapiens
actcaaaaccttacttccttttctacaaagagctaaaaagctttaatttatgatcatatggaggacaatattctctaaaattctgaccttataaaagctatgtaatcttaatttttaagtgcactacagagtacaaaataaaggaaaaaatatagagaggtggaaaaacaaagtaaaagtttgaaccctgagaaatagtggagggccaacaaatgctttcactatgaaattactttctaaaccctagtgaatttatgtgttgttatttttgatgacctcataggatgagggaaactggagataaagtttagatcccacccaaaawggaaagtctaacagaaaagctcttgttgtgtaacaaaccaccccaatacttagtaacctaaatcaacaatgcattattacattctattggttcactaggctcagctggtaagttctcacttggggagtatcatggggttacaaccagtggaggctgaggcaagagtcatctgaagacttgactgtctacccaggagggctcatttacagttgagcggttgatggtggctgttgtctgggagctcagcaggggctgccaacctaatcatcttcacattagttatccagatagctt

SEQ ID NO: 427990 - DNA, 619 bp, Homo sapiens
actcaaaaccttacttccttttctacaaagagctaaaaagctttaatttatgatcatatggaggacaatattctctaaaattctgaccttataaaagctatgtaatcttaatttttaagtgcactacagagtacaaaataaaggaaaaaatatagagaggtggaaaaacaaagtaaaagtttgaaccctgagaaatagtggagggccaacaaatgctttcactatgaaattactttctaaaccctagtgaatttatgtgttgttatttttgatgacctcataggatgagggaaactggagataaagtttagatcccacccaaaaaggaaagtctaacagaaaagctcttgttgtgtaacaaaccaccccaatacttagtaacctaaatcaacaatgyattattacattctattggttcactaggctcagctggtaagttctcacttggggagtatcatggggttacaaccagtggaggctgaggcaagagtcatctgaagacttgactgtctacccaggagggctcatttacagttgagcggttgatggtggctgttgtctgggagctcagcaggggctgccaacctaatcatcttcacattagttatccagatagctt

SEQ ID NO: 427991 - DNA, 559 bp, Homo sapiens
ttagtataagggcatatgagaaacaaacctattatacagaagaaagcaacaatgcaccttgcctgtctggaccccttcattaggtaaggggagaaaaatatctaycttgaaaattttgaatcacaatttgattattggagaagttatggtcagaatttacaaggcctatgtgatattaaaaaatcaagcagtgaatttaatttaatgtagccccaggattttaatgtatcccaaaacttggcagaaataaatgcaaaacatctctggaggaaagtcaagataagccttaaaaattccactgatagagttccaaagaacagggattcattgtttaaaatggcaaaatataccaagtcagcatgggcgacagacagcaaaaatgatatacagcagatcagatagacaaagactttaagatgaaattattagacatgatcataaagtaagcatatttcaataaatgaagatgaggcatgaaaagattaacaagtacaagaaatgatgaattacaactatgccattaggaaaaaaatttatttctagaaatgaaaagtaaaat

SEQ ID NO: 427992 - DNA, 559 bp, Homo sapiens
ttagtataagggcatatgagaaacaaacctattatacagaagaaagcaacaatgcaccttgcctgtctggaccccttcattaggtaaggggagaaaaatatctatcttgaaaattttgaatcacaatttgattattggagaagttatggtcagaatttacaaggcctatgtgatattaaaaaatcaagyagtgaatttaatttaatgtagccccaggattttaatgtatcccaaaacttggcagaaataaatgcaaaacatctctggaggaaagtcaagataagccttaaaaattccactgatagagttccaaagaacagggattcattgtttaaaatggcaaaatataccaagtcagcatgggcgacagacagcaaaaatgatatacagcagatcagatagacaaagactttaagatgaaattattagacatgatcataaagtaagcatatttcaataaatgaagatgaggcatgaaaagattaacaagtacaagaaatgatgaattacaactatgccattaggaaaaaaatttatttctagaaatgaaaagtaaaat

SEQ ID NO: 427993 - DNA, 559 bp, Homo sapiens
ttagtataagggcatatgagaaacaaacctattatacagaagaaagcaacaatgcaccttgcctgtctggaccccttcattaggtaaggggagaaaaatatctatcttgaaaattttgaatcacaatttgattattggagaagttatggtcagaatttacaaggcctatgtgatattaaaaaatcaagcrgtgaatttaatttaatgtagccccaggattttaatgtatcccaaaacttggcagaaataaatgcaaaacatctctggaggaaagtcaagataagccttaaaaattccactgatagagttccaaagaacagggattcattgtttaaaatggcaaaatataccaagtcagcatgggcgacagacagcaaaaatgatatacagcagatcagatagacaaagactttaagatgaaattattagacatgatcataaagtaagcatatttcaataaatgaagatgaggcatgaaaagattaacaagtacaagaaatgatgaattacaactatgccattaggaaaaaaatttatttctagaaatgaaaagtaaaat

SEQ ID NO: 427994 - DNA, 559 bp, Homo sapiens
ttagtataagggcatatgagaaacaaacctattatacagaagaaagcaacaatgcaccttgcctgtctggaccccttcattaggtaaggggagaaaaatatctatcttgaaaattttgaatcacaatttgattattggagaagttatggtcagaatttacaaggcctatgtgatattaaaaaatcaagcagtgaatttaatttaatgtagccccaggattttaatgtatcccaaaacttggcagaaataaatgcaaaacatctctggaggaaagtcaagataagccttaaaaattccactgatagagttccaaagaacagggattcattgtttaaaatggcaaaatataccaagtcagcatgggcgacagacagcaaaaatgatatacagcagatcagatagacaaasactttaagatgaaattattagacatgatcataaagtaagcatatttcaataaatgaagatgaggcatgaaaagattaacaagtacaagaaatgatgaattacaactatgccattaggaaaaaaatttatttctagaaatgaaaagtaaaat

SEQ ID NO: 427995 - DNA, 402 bp, Homo sapiens
gaaaagtaaaattattgaaatttaaaatgcaaaacatgggtttaacattggattagacacagctaartgtaactcaggttaatggaaaagaaatctatacctccgcacgtcacagaaatcttttagagcacaaaagacaaagagaaaatcttaagaccaatcagaacaagaagcatctcatctatgaggcagtgtcgcactaaagtttagtgtagtagataggaggataagggagtttagtgttaggtgtggttggtgagaatgtgagctctggaactgtactgactgggtttccatactggttcaattatttacaagtacatcttgacaagttgcttcacctctatatgactcagtttcctcatatgcaaaatatgattaattatattttcaatttctctt

SEQ ID NO: 427996 - DNA, 556 bp, Homo sapiens
actctgtcagaacctttctgaaagacttcttccaggctgtaattctcaggctatagttctcagcaagatttctgaatgaaacaaactttaattccttaaaagcttgatttttttaaagtcaactatcatggcaaccatgaagggactcagaaagtagattttccmgggtccattgaaaggacctggcacctcagtaccggcatgaaccctctgagcccctccaggtcctccatgtttgcaaacaactgagtgagcctcttctgagtctcagaacctcgatttgatggtggttctaagttttattcagcaagttgcttttaccccttgaggaaggggcaaattcttccttgagactttttatttctcaagaaggggaattcttccagttaaaaaatactaggaagaattggatatgtgtggctgtctgattggctaggttaagccagtgttttccctttcaatttgattctataaacaaggctcagcagggaagaaactactaaaaatcttgaaggtttgacctgagttaactccaaagacaaggaacacttgcttc

SEQ ID NO: 427997 - DNA, 526 bp, Homo sapiens
tactaaatctccatagtccatatataaactgtgagctgaaacactgtgctggagcagtcagacagaatctctctgaaaaacttctccagggtcataggcccagaataaatagaaacttctcacccagatggctccaaggcatcatacttaatattaagaacattagtttacattaatttatatcaaactttaagcacctgtccyattaagctaatgggaaattaagtcttcgttgttacaatgtctctccaatttgagagtaacatggtggtttgttttcccctaacttgaaggttatgcaaagatcctgaagccctacatgagccagctcattagggagactcctctgatagtcaaccactgttccactgacctaagtgtcaggttatccctgctgtcaccccacactcgggatgtaggggtcttcagggattggggatggaggttcttgggtttagaatttagcctcctcagcacatcatgcagctaccccttctgaggcttttcaaactccccagataaatta

SEQ ID NO: 427998 - DNA, 533 bp, Homo sapiens
tggtgcctttcatgttacggcctttccctcaaatgtattgtgttcattgactactkttcataattaagaatgaggctctgacaggttgaccaaatgctgtgagtggaagggatttgttgcattgtgggcttcatcgtcaggtgagtaatagggcagacacgcagcttttgtgttgaaggatcctcaactatttgtatctgtcagcctttttttcagattatgcagtttccccataggaggatcctccagggtcctgtcttgacagggtttgagtctgtctgtcatcattctggtagctaaataaggaaagggtactgggatttttgtttagtatgatgactgacttagtccctccctactttcagaatgccatatcacctccaccctttactgtactatgagtcaacaactctgaagagaaacttttggttttcttgtgagagtgaggagggggaggaaattggtaggaaaggacagcttttattcagactttcaaccaatcttcctggaagtttacaagggtagtggtgggg

SEQ ID NO: 427999 - DNA, 585 bp, Homo sapiens
atgagaacacacggacacagggaggggaacatcacacatcagggcctattggccagtgggtggctagaggacggatagccttaggagaaatacctaatgtagatgacaggttgatgggtgcagcaaaccaccatggcctttgcatacctatgtaacaaacctgcacatgtagcccataacttaaaagtataattaaaaaaaaagaagaagaggtatcttgacactacaagaacccctataaaaaagacgaaatctcagatacttgggaagctgaggcaggaggattgcttgaacccaggaagttgaggctactgttagccatgattgcaccattgcactccagaaaaatacrtctgctgaggtcctcacaagcctatcagcaaactctgatccttgaggagtgagaacaaagattgggcctatcctgggtaagaacagttacttcagagacactccagcctgcttagcaggacttgtttgacttcactgaagggattttcccacctctagtgacacacccccacaaccacgaccaaataaagaaaaaggcaaattcctgttgtaattaacaatttttaaattgcc

SEQ ID NO: 428000 - DNA, 566 bp, Homo sapiens
ttgggactcattctcagagctggtgtggagtcaatccaacccaaaccacatgcctaggatttaagatactattaagaaacaaagtgataagtatgctagagacacaaccaacatgagagaaccactgcagctatcatcaaataatgaaaatgagaaaccaatactagaagtaatattaacagagactgtccatcatgcaccttgtgctatgcatgaattatcttacatgtttgcagcagctataagtgatactgggattatcccattttacagatcaggaaacagaggcacaagatgttaaatagtttaccaaagacacacagctagcaagtgggatacctgggatttaatttaaacaatttttttgtactcctaagactatactgacrtgtgtgtgtgtctgatggaaggggcagcagtgtctggggagaaggagtgaggaaagtagaaacatggttcatggaaatagtggatagttgagtgtgattagaacaaagaggatgctgagaaaccaagctcaaggctggagaggtgagctgtggtgggggaaggggggcaagaaagac

SEQ ID NO: 428001 - DNA, 592 bp, Homo sapiens
cctgctcagcagcctgttctactgttctcttctcaaacttccttttcagtcactctgtagacttcaattctcatgtctttgaaacctccactcatctgacttctgtagccctgaggcctcatggttttccatttcctgactgctcacccttctgacccccagtcacttcacctttaccctattgtggacacccactggagccccatctttgtcctcggctcacctctgcctatatttcctcaaaggctttacccaccatggaaactttgcactgtttctttgcctctgcctcccagatatgccttttgacagcccatattttcgtcttatagtttgcaaagaattttcttttcagatatctcatttgytccactagctatccttgagacaggctaaattggcattgttatctctattttacaaataaagaaacaaatctgggactaggagagctcaaatggcttttcctaaattctaacctgagctatagttccaacatttttagttgcctacaggatagtcttatttggagattctgcctctacctcaaactctgtctgaatttatccatctcctcaaactgatctcactc

SEQ ID NO: 428002 - DNA, 606 bp, Homo sapiens
tgcagttgagtcttggccctgagaaacatccccataggtcatgcccagcaaaccagtcttaggctagctttgcaattgtgcacccatataacagtcctgaaaaacagccctgtggggcacccctggaaggcatgtccccaggcaagccaagcagacrttctgagccagagaaacagcctaatgggttgccccagcagatgttccctcaggccatccaagcagctatgtacctgcatcctgagactgagaaatatccctgcaagccactcctggcaggcatgccctccaccccccaggctgactgagcaaccgcattgacatactcccagccagggtaacagccccatggccttaaccctagcaaacttaacccatagttcgttgacccatcatgtgtacacacattccctttacctgagaaacagcccaggaagcccacatctggctatcactacaaattcttacagcctaggccactgagagacttgcaaatgccactaatgtggattacagccaaagaaaccacatgaagactacactaaaatgtctacgtagaaccaaggtctgctcacctcactgaactgatactccaggacacatttatat

SEQ ID NO: 428003 - DNA, 540 bp, Homo sapiens
ttgaatctggcaagagaaatgacacacctgtaggtgaaatacagttgaaatagcagcctagagaaacagtaagacaacagctcctctactccacagaccctaatcccattcacacaagaaaaggccaattagcctagacttccaccctggccgggctacaatgtgatgcctcaccccagcaccctagccatggtaaagtcagagaaggccaagtaggaaacttgaacttccaccccactgggtggtaattagacaccttaaccacctctaccctaactgaggtggtctgacccagcagaaagycagagcttttaccaacaatttgcagtaaagaggccaagactgatgtaacagaacctgaggagcagtaaaggaaagaatgaagtaaagtaagcaaaagcctaaggggcccatggaataagatcaaatagaccaacatgaactttctgagagtttcagaagaagagaaaggggcaaaagattatctgaaaaattaatggctaaaaacttgccatatttgataacagacacaaatctaca

SEQ ID NO: 428004 - DNA, 571 bp, Homo sapiens
atcatatgatctcataaattctgtttgtcattggacaatatatctcaagattttgtcattcaaatcagacctcagttcaaacactgattcttagttctaatcatatgatatcatagatcctgtttctcattggacaatatatctcaagattctgtcattggaatcagacctcagttcaaacactgattcttacctgaaaacttgagaaaaattgcttaatttctctaagctacagtttacttctcactaacatggggatcctatctgttccacaagattgttttaagaattataatagataatatttataaacggtccagcatagcactttaaatatagttaatggtcaatatagcttagctttcataaaaayaatttagaaattacttaataaatagtacccattcttattataattatgatcatccatccatccatccattcattcattttgctctcaaatatctatttagtatttatctcactcaagaaattttgctaaacctttggtaggtatacattagtaaacaacacacatgtgaacttcttatttttaatacatcactggaat

SEQ ID NO: 428005 - DNA, 571 bp, Homo sapiens
atcatatgatctcataaattctgtttgtcattggacaatatatctcaagattttgtcattcaaatcagacctcagttcaaacactgattcttagttctaatcatatgatatcatagatcctgtttctcattggacaatatatctcaagattctgtcattggaatcagacctcagttcaaacactgattcttacctgaaaacttgagaaaaattgcttaatttctctaagctacagtttacttctcactaacatggggatcctatctgttccacaagattgttttaagaattataatagataatatttataaacggtccagcatagcactttaaatatagttaatggtcaatatagcttagctttcataaaaataatttagaaattacttaataaatagtacccattcttattataattatgakcatccatccatccatccattcattcattttgctctcaaatatctatttagtatttatctcactcaagaaattttgctaaacctttggtaggtatacattagtaaacaacacacatgtgaacttcttatttttaatacatcactggaat

SEQ ID NO: 428006 - DNA, 571 bp, Homo sapiens
atcatatgatctcataaattctgtttgtcattggacaatatatctcaagattttgtcattcaaatcagacctcagttcaaacactgattcttagttctaatcatatgatatcatagatcctgtttctcattggacaatatatctcaagattctgtcattggaatcagacctcagttcaaacactgattcttacctgaaaacttgagaaaaattgcttaatttctctaagctacagtttacttctcactaacatggggatcctatctgttccacaagattgttttaagaattataatagataatatttataaacggtccagcatagcactttaaatatagttaatggtcaatatagcttagctttcataaaaataatttagaaattacttaataaatagtacccattcttattataattatgatcatccatccatccatccattcattcattttgctctcaaatatmtatttagtatttatctcactcaagaaattttgctaaacctttggtaggtatacattagtaaacaacacacatgtgaacttcttatttttaatacatcactggaat

SEQ ID NO: 428007 - DNA, 571 bp, Homo sapiens
atcatatgatctcataaattctgtttgtcattggacaatatatctcaagattttgtcattcaaatcagacctcagttcaaacactgattcttagttctaatcatatgatatcatagatcctgtttctcattggacaatatatctcaagattctgtcattggaatcagacctcagttcaaacactgattcttacctgaaaacttgagaaaaattgcttaatttctctaagctacagtttacttctcactaacatggggatcctatctgttccacaagattgttttaagaattataatagataatatttataaacggtccagcatagcactttaaatatagttaatggtcaatatagcttagctttcataaaaataatttagaaattacttaataaatagtacccattcttattataattatgatcatccatccatccatccattcattcattttgctctcaaatatctatttagtatttatctcactcaagaaattttgctaaaccyttggtaggtatacattagtaaacaacacacatgtgaacttcttatttttaatacatcactggaat

SEQ ID NO: 428008 - DNA, 556 bp, Homo sapiens
gattcttaacctctggttaagctgaaatatctaacatataaaaaatatttttattttaataaacttgaataaactgcctctgggtttgatttcagcagttttttaatatacttatactacataaacaacatttaaatttctaacttctctatcatgaccaaaaggttgtatcatatatcctaaagttgcattcttgatttcctaaagtaaatattttatatgtatgtatatatgctcactagaggcagaaaatacagaccttttagaaaagggaacaatttgcttttgaaatgctggatcaatcgaaagctctggcgttaatttccacagtgactgctggtactcatgttgcctgaattttaaaatgttggtttcattaggagtaaaaatcatttagtcttctcctgcactctaaacattttatacaaaataaagtcatccaatttccaaactcctgccarcacaacaagcattaaagtctgggatacatatgtatgtggtgatgtatacattggccaaaaaaagtttttggatattcctaaacaagaaactttaa

SEQ ID NO: 428009 - DNA, 564 bp, Homo sapiens
tacaggtaaataaatgaaattaatccttttctcctttcgtcccctctgaaagtatacactgctttcggggaaatactattatatattcttagatttatatcttaaatgatattttttttaaaaaaattacagcttctaaacrgtttttgttcttcctcccaacctactccctagcaatacgatttgctaaaaataattttcatttaaaattgcagatgacacgatagttagatgtctattctttttaaaatttgtgttacagcactgtttagcttctcctcactctcaactatgccttttctcaattagcatgaaatttcaaaaagacaataaaactaaaagcaatacatttataaaaacaacatacaagggtacttcgacccagagaatctacggaatttaagttgctgttaagctatctccaaaatcaactattcattatcagtgctttggattcaaaactacgtaaagactgatgtacagggttttcaagttatcacctaaatcattacataccataatgtaagttttcaggtcctttctgagttgtcatgttgggctcat

SEQ ID NO: 428010 - DNA, 564 bp, Homo sapiens
tacaggtaaataaatgaaattaatccttttctcctttcgtcccctctgaaagtatacactgctttcggggaaatactattatatattcttagatttatatcttaaatgatattttttttaaaaaaattacagcttctaaacggtttttgttcttcctcccaacctactccctagcaatacgatttgctaaaaataattttcatttaaaattgcagatgacacgatagttagatgtctattctttttaaaatttgtgttayagcactgtttagcttctcctcactctcaactatgccttttctcaattagcatgaaatttcaaaaagacaataaaactaaaagcaatacatttataaaaacaacatacaagggtacttcgacccagagaatctacggaatttaagttgctgttaagctatctccaaaatcaactattcattatcagtgctttggattcaaaactacgtaaagactgatgtacagggttttcaagttatcacctaaatcattacataccataatgtaagttttcaggtcctttctgagttgtcatgttgggctcat

SEQ ID NO: 428011 - DNA, 564 bp, Homo sapiens
tacaggtaaataaatgaaattaatccttttctcctttcgtcccctctgaaagtatacactgctttcggggaaatactattatatattcttagatttatatcttaaatgatattttttttaaaaaaattacagcttctaaacggtttttgttcttcctcccaacctactccctagcaatacgatttgctaaaaataattttcatttaaaattgcagatgacacgatagttagatgtctattctttttaaaatttgtgttacagcactgtttagcttctcctcactctcaactatgccttttctcaattagcatgaaatttcaaaaagacaataaaactaaaagcaatacatttataaaaacaacatacaagggtacttygacccagagaatctacggaatttaagttgctgttaagctatctccaaaatcaactattcattatcagtgctttggattcaaaactacgtaaagactgatgtacagggttttcaagttatcacctaaatcattacataccataatgtaagttttcaggtcctttctgagttgtcatgttgggctcat

SEQ ID NO: 428012 - DNA, 288 bp, Homo sapiens
tgctgctgaacctgagactgagttgtttcccttgaatggaacatgattagtaataatttgtttctcctgggcccaaacccacaatagccagagctacttttcaaatattaacccaagcaggtatgaacaagttaaaacttccagggaggcagcttttctctcattattgagcaggctacagactaagtctaaaccatttaytttacagttagcaaagacatgtgaagaccagaataaggaaggtgagggagtctgggaatcaactcaagtagtaaggcaatcattagt

SEQ ID NO: 428013 - DNA, 487 bp, Homo sapiens
gtctttttctggaaagataaagaagcagctgtaaagataaagaggtgacctgtttggaggtagggcagatagcagcaacaggtgaacagggtaagaggaaagcttttcatgaactatcttttaatagagtttgattggaattctatctttagaattagaggatgaggatgacgttaaggcgccatgtttgcgctctccatctgtgctcactsactcttgcctgagtttcgtgcagcttggggtcatgcggagaagggtgaatccccgcaccatttggatttaggttctgagctaagcctctgctccagcctggccctcccagagctagggtgattgtcctgggccaataattctcaatctggccgtatgctagaatctcctagcgagctttaaaagatcctaatgcccaggctgcaccccagaccagcgacatcaagatctctggaaggggaggagcacctaggcatcagtgcattatcaaaggtcc

SEQ ID NO: 428014 - DNA, 601 bp, Homo sapiens
ttgggaacattcgctatcccccttctaggtatttaaactgtatattattgttaactatagtcatcctgtgtccggaatttattccttctggtgsgttcttggtctccctgactttaagaatgaagccgcagaccttcgcagtgagtgttacagctcttaaaggtggtgtgtccggcgtttgttccttcagatgttcagatgtgtccggagtttcttccttctggtgggttcgtggtcttgctgactttaggagtgaagctggagaccttcgcagtgagtgttacagatcctaaaggtggtgcatccagagttgtttgttcctcctggtgggtttgtggtctcgctgacttcaggaatgaagccgcagacccttgtggtgagtgttacagctcataaagatagtgcggacccaaagagtgagcagcagcaatatttattgtgaagagcaaaagaacaaagcttctacaacatggtaattgccgctgctggctcaggtggccagcttttattcccttatttgggcccgcccacgtccggctgtttggtccatttcacagagggctgattggtatattttacagagtgctgattggtgcattta

SEQ ID NO: 428015 - DNA, 597 bp, Homo sapiens
aaccttgtaaactgaattcaaaagataccctttagtttacatggttttcamtttctgtaaaattcatatggttactagttattttttcctttatcaacttaacgtaaactaccaaaacattaaaattctgcctatgtgcttgtgttggaattttttttttttgagacagcgtcttctctgtcacccagtctggggtgctggggtgcaatctcagttaactgcaacctccccctcccaggttcaatccattctcttgcctcagcctcccaagttgctgggactgcaggcacgcaccaccatgcccagctaatttttgtatttttagtagagacggggtttcaccatgttggccaggctggtctcaaattcctgacctcaagtgatctgtccgcctcagcctcccaaagtgctaggattacagttatgagccaccacaccaagctggattttttttttaaaattctggttaaattttaaccttttctagaaaaaatgttataaacaaatatgttgatattttatgcttcatgttaaaagtattaacaattgaaacttccattaaggaatctttttttcacaggttttgttgacttgtaa

SEQ ID NO: 428016 - DNA, 597 bp, Homo sapiens
aaccttgtaaactgaattcaaaagataccctttagtttacatggttttcactttctgtaaaattcatatggttactagttattttttcctttatcaacttaacgtaaactaccaaaacattaaaattctgcctatgtgcttgtgttggaattttttttttttgagacagygtcttctctgtcacccagtctggggtgctggggtgcaatctcagttaactgcaacctccccctcccaggttcaatccattctcttgcctcagcctcccaagttgctgggactgcaggcacgcaccaccatgcccagctaatttttgtatttttagtagagacggggtttcaccatgttggccaggctggtctcaaattcctgacctcaagtgatctgtccgcctcagcctcccaaagtgctaggattacagttatgagccaccacaccaagctggattttttttttaaaattctggttaaattttaaccttttctagaaaaaatgttataaacaaatatgttgatattttatgcttcatgttaaaagtattaacaattgaaacttccattaaggaatctttttttcacaggttttgttgacttgtaa

SEQ ID NO: 428017 - DNA, 597 bp, Homo sapiens
aaccttgtaaactgaattcaaaagataccctttagtttacatggttttcactttctgtaaaattcatatggttactagttattttttcctttatcaacttaacgtaaactaccaaaacattaaaattctgcctatgtgcttgtgttggaattttttttttttgagacagcgtcttctctgtcacccagtctggggtgctggggtgcaatctcagttaactgcaacctccccctcccaggttcaatccattctcttgcctcagcctcccaagttgctgggactgcaggcacgcaccaccatgcccagctaatttttgtatttttagtagagacggggtttcaccatgttggmcaggctggtctcaaattcctgacctcaagtgatctgtccgcctcagcctcccaaagtgctaggattacagttatgagccaccacaccaagctggattttttttttaaaattctggttaaattttaaccttttctagaaaaaatgttataaacaaatatgttgatattttatgcttcatgttaaaagtattaacaattgaaacttccattaaggaatctttttttcacaggttttgttgacttgtaa

SEQ ID NO: 428018 - DNA, 572 bp, Homo sapiens
tgggtcatagccatggtggttgctcttgaactgcccaactccaggggtagccttttgacagtccctcttccagccctcgcctagattttgtaaacatcacattccttataaacatcaaatccctttctgctggaagtacctacaatgaaactgtcactcatgmagcattagaactgggtgggatgaaatggaagagaaacttaatttttactcaatacctttaaaaatgattttttattgtgataaaataacaaaattggtacatttatgtaccaatgttacataaaataacaaaattggtacatgtattcaatagtatacatgacagtaaaaaagaatgaattactactacatgcaacaacatggatgggtttcacaaacataatgtgtagtgaaagcaggaaatccagaggcaaagtatccatatggcacgactccatttatataaagacaaaacaggcaaactggatggggatttgcaccaatctgaccaactgtgggacatgacaagattgtgcttttcaataaaatgcaaagtttgtgcacttatataaaatggaggatgggattct

SEQ ID NO: 428019 - DNA, 572 bp, Homo sapiens
tgggtcatagccatggtggttgctcttgaactgcccaactccaggggtagccttttgacagtccctcttccagccctcgcctagattttgtaaacatcacattccttataaacatcaaatccctttctgctggaagtacctacaatgaaactgtcactcatgcagcattagaactgggtgggatgaaatggaagagaaacttaatttttactcaatacctttaaaaatgattttttattgtgataaaataacaaaattggtacatttatgtaccaatgttacataaaataacaaaattggtacatgtattcaatagtatacatgacagtaaaaaagaatgaattactactacatgcaacaacatggatgggtttcacaaacataatgtgtagtgaaagcaggaaatccagaggcaaagtatccatatggcacgactccatttatataaagacaaaacaggcaaactrgatggggatttgcaccaatctgaccaactgtgggacatgacaagattgtgcttttcaataaaatgcaaagtttgtgcacttatataaaatggaggatgggattct

SEQ ID NO: 428020 - DNA, 569 bp, Homo sapiens
gtctccctgtgttgcccaggctgtagtacagtggcacgatctcggctcactgcaacctcygcctcccagattcaagcaattctcaagcctcagcctccagagtagctgggattaaaggtgcacgccaccacacccggttgatttttgtattttttggtagagacagggtttcaccatgttgccatgttggccaggctggtcttgaacgcctgacctcaagtgatccgcccaccttggcctcccaaagtgctgggataacaggcctgatccaacgtgctgggccacattttatgtatcctttagaggaagaaactgatctattaattgaaagtaacaggaaagtgcctggtttgcatcctggctatgtattaatatatgccttatgaacaaaaaaaaattcaaatatgaatatttgctaaattctttcccaaagcaccaaatgtcttaaaggaccccctactgactagcctattctcattttcatttgaactgggtaaatgagcttgtttatagaaataggtagtaatgaaaatttgaattctattaaaactgttaaaaaataaaaatgt

SEQ ID NO: 428021 - DNA, 569 bp, Homo sapiens
gtctccctgtgttgcccaggctgtagtacagtggcacgatctcggctcactgcaacctctgcctcccagattcaagcaattctcaagcctcagcctccagagtagctgggattaaaggtgcacgccaccacacccggttgatttttgtattttttggtagagacagggtttcaccatgttgccatgttggccaggctggtcttgaacgcctgacctcaagtgatccgcccaccttggcctcccaaagtgctgggataacaggcctgatccaacgtgctgggccacattttatgtatcctttagaggaagaamctgatctattaattgaaagtaacaggaaagtgcctggtttgcatcctggctatgtattaatatatgccttatgaacaaaaaaaaattcaaatatgaatatttgctaaattctttcccaaagcaccaaatgtcttaaaggaccccctactgactagcctattctcattttcatttgaactgggtaaatgagcttgtttatagaaataggtagtaatgaaaatttgaattctattaaaactgttaaaaaataaaaatgt

SEQ ID NO: 428022 - DNA, 661 bp, Homo sapiens
gaacagcatgggaaagacctgcccccataattcaattacctctcactgggtcccgcccacaacacatgggaattcaagatgagatttgggtcaggtgcagccaaacgatatcagtccttgaggattctagattctagagagtctaagaacgctcaattagagcctggtctccagattactacagaggaatatttgtcaaggtaggcaggcaggacatacttagctctttgtttacttggttctaagccttaaggattcagccctatggaatgggggtccatctgtgctctgcacccccaaacatcaagggctgacctggctcaaaggcatggatgagtgcctgagctagggtctgtccccagctcttgctcttgtggcctccttctttctgctcctctgcctcgtttcttttcttgtttttgttttttgattttttgagatggagttttgctcttgtagtccaggctggagtgcagtggcatgatcytggctcactgcaacctccacctcctgggttcgagtgattctcgtgcctcagcctcccgagtagctgagactataggcacttaccaccacgcccagctaattttttctatttttactagagacagggttttatcatgttggccaggctggtctcaaactcctgacagcaggtgat

SEQ ID NO: 428023 - DNA, 568 bp, Homo sapiens
agctcccctccaagttcactgccataggattccaggtttcaagaattgtagtgtgttcccttcaaagagtgtgtatagtgaatgggtcactgctcagggttccagctacacaggagtgggttgtggggccaaggaatggagaggaacagtgtccaaaagtcaggatggtgtcttgtgttatctgcccagagtccgcagagacctttaatgactcaagaatacaaacaaaccaaaacacttaaatgaatcttctatgtaggatttgtttcttgactaaagattggtccctcatcaacttctattatttaacaatgggctttgattatgtgatttagaatatgaccaactttaaaaaatattgttcyatgtaatacaaaataagtcagtttatgctttatgttaatatatgtcaatatataattttaaaaggaaagtattaactatggtgtttcagtgtcatttttggaaaaaatgagtttttcaaaaaacttcaaatgctactttgcatctaagcatgtgtttgtgtgttataaaaggtaggctagcataactaggttgtgtgttgtgt

SEQ ID NO: 428024 - DNA, 588 bp, Homo sapiens
agttcttttgccttgttctctgcctgatgtgtatgcagaggcagccctcaatatgcagtggttgaataaatgaatgaagaaaccactatcaatttctgccttgttaattctgttttccactgtccccagaggatgccttaattctgccatcattttcgtttccttatccaaaatcctttctgaccattgctccttttcatctaagccttttgtcttttcatctgctcttgttttcttatgattttttcccccatttctcacattatcttacttagtgataacatttctgttagtacaaattataagtacagttttcagagctattttcttctaggataccggctctacatttgtataagcccttgggtatttgttacttcacctaggaacaagggaagagtccagcccttcaacaaattttttaattcatactttatgctccaggcactgcttttggcaccaygggtagaacagtgaagaaatacagtcttggctctgattggtcttatttttctggttgagggaggtgataaaacaatacatgaaaaaataacatgcaggtggcgatgagagcaacaaagaacaaat

SEQ ID NO: 428025 - DNA, 634 bp, Homo sapiens
tatttttaaatgggcaacaagctattgttaactatactcaccctgttgtgtatttctatctaactgtattttgtacccattaaccatccccattttatcttccccacagcccttcccagcctctggtaaccattattctcctctctatctccatgagttcaattgttttaatttttagctcccaaatatgagtgaggatatgcaaaatttgtctttctctgcctggcttatttcacttaacatattgtcatctagttccatccaaaytgttgcaaatgacaatatttcattctcttgtatgggtgaaaaatattccactgtgtatatgtgccacgttttctttatccagtcatccattaataaacactaggctgattccccgtcttggctattgcgaatagtgctgcagtaagcatgggagtgcacatctctcttcgatacactgatttcctttcttttgggtatatacccagcagtgagattgctggatcatatggtagttctgtttttagttttttgagtaacctgcataccgttctccatagtggctatgctaatttacattccctccaacagcatacgagggtcctaggggattctattttagataggaatttgcttgggaaattgagta

SEQ ID NO: 428026 - DNA, 634 bp, Homo sapiens
tatttttaaatgggcaacaagctattgttaactatactcaccctgttgtgtatttctatctaactgtattttgtacccattaaccatccccattttatcttccccacagcccttcccagcctctggtaaccattattctcctctctatctccatgagttcaattgttttaatttttagctcccaaatatgagtgaggatatgcaaaatttgtctttctctgcctggcttatttcacttaacatattgtcatctagttccatccaaactgttgcaaatgacaatatttcattctcttgtatgggtgaaaaatattccactgtgtatatgtgccacgttttctttatccagtcatccattaataaacactaggctgattccccgtcttggctattgcgaatagtgctgcagtaagcatgggagtgcacatctctcttcgatacactgatttcctttcttttgggtatatacccagcagtgagattgctggatcatatggtagttctgtttttagttttttgagtaacctgcataccgttctccatagtggctatgctaatttacattccctccaacagcrtacgagggtcctaggggattctattttagataggaatttgcttgggaaattgagta

SEQ ID NO: 428027 - DNA, 640 bp, Homo sapiens
gggcctttgagtactctcaactctagcccttcttgttgtttaggttcaattacatgcattgcatgccacaagaatgtctagcattttttgagtgtttactgtgtggaagacactgtatggaacatgttacctttaatccccaggaaaactgtgcaaggcgggcattatccacgttttacccagaaggatcctgaagctcacagaggttatgtagcctgcctaaggttacccagctagcaactggcaaagctaggaggtaatgcagatctgattgcttctaagccagactctgcttttattttttgctgattcccatagttcccctctctcacagcccactggatgtgtgcatatggtccactccatcactacagtcatgaaggataatgccatgraaacattttgctctgtgtttgagtgattctgatttcatgaaatgatagaaattataactatgttaaatattgtcagaacattatttctggaatagtatttgattaacttgtactgtctccattcatcccacagagctctggggcccacattccacactcctttgttcttccaggaggctgttctccaccagtacctctcctattttctctctctgcagcttacagctaccaatgaccgtaggaat

SEQ ID NO: 428028 - DNA, 461 bp, Homo sapiens
agactatcaaacatataagatgcaagcttaaatgcctaggggtccaggcagagagtgtcaatgtgtggagctgccgctatatgacaatagggagtggtggggactgtgcccgactgggacattcattaacctcttaagttcaaattcatatttaaaaacactgctctgctggtcaaggaaaaacatacatgggggctacattaactctgttggactctttttgggtgcacatactcttgttygagtgtctagcagctatgtaaagttgacttaattgacacaattttgcaaataaggtagaggctctacaaggtcaaggtcttggccaaggtgacttagttaagtaggagggcaaagataagaagttgaaattctatggacccaagcctggatattttttttaaaaaactagcagaggcaggaagaagccagaaatggtaactaattattttgcatttact

SEQ ID NO: 428029 - DNA, 569 bp, Homo sapiens
aactactgtaacacatgtgatttaaaaaaatgagtaaaaactgctcaagggtttggttccttagtgggaattagtgacttaaactgggggtaaataaatatggattggagggcaaatctaagaatagatttgtaaaaccagagaaaatgactgaggtgagtctcaatcaatttagaggtttattttgccaaggttgaggatgtgccgaagaaaaagagacatgagccacagcaggatctgtggcccacaagtttttctaaagaggatttggagggcttcaacatttaaagaaaaaaaacagacaggagggaaaaggggaaagaaaaaagagggtgggtgatgtggttaggcttcgtgttcccacccaaatctcatcttgaatygtaatccccaggtgttgagggagtgacctggtgggagatgattggattatgggggcaatttctcctatgctgttctcatgatagtgagtgaattctcatgagatctgatggttttataaatggtagtttttcttgagcttgcacatggtctctttctctcacctgctgccatgtaagagctgcttg

SEQ ID NO: 428030 - DNA, 598 bp, Homo sapiens
tgggagggaaatgagtcaaagataactcaaaagttttaagacttgacaatttgggaaaatgaatggtagtgccattgscagtgatggcaagtattttgggagtgggataattttcaatgaaaatatgatgaattttgttttgaatggattgagtttgcagtgattttgaagcattcagaaatgcccagtgggctgttgataaggtattttctcatcagtctaactttcctttttaattcaagtacagtaagaattaggcctctagttattgaagtcttttttgtttttgtcaaaaattaagtaaaactatctaggcatttaatatgtatcttatgaaggtggagatatttaatatctccaccattttgctgttatctcttgttttatttcccttcccaccacaacaattaaggagtctacactttgctcacactgctaatgtatttataaagcatggcccagctgctcctgcatgcccttgctagctgcaatttattttctgccttggcctttctgacttggcctctgtatgtgtcaaattgtcttatacaggtccttgatcttttgccctagtaacattttgcatatgattacattt

SEQ ID NO: 428031 - DNA, 598 bp, Homo sapiens
tgggagggaaatgagtcaaagataactcaaaagttttaagacttgacaatttgggaaaatgaatggtagtgccattggcagtgatggcaagtattttgggagtgggataattttcaatgaaaatatgatgaattttgttttgaatggattgagtttgcagtgattttgaagcattcagaaatgcccagtgggctgttgataaggtattttctcatcagtctaactttcctttttaattcaagtacagtaagaattaggcctctagttattgaagtcttttttgtttttgtcaaaaattaagtaaaactatctaggcatttaatatgtatcttatgaaggtggagatatttaatatctccaccattttgctgttatctcttgttttatttcccttcccaccacaacaattaaggagtctacactttgctcacamtgctaatgtatttataaagcatggcccagctgctcctgcatgcccttgctagctgcaatttattttctgccttggcctttctgacttggcctctgtatgtgtcaaattgtcttatacaggtccttgatcttttgccctagtaacattttgcatatgattacattt

SEQ ID NO: 428032 - DNA, 580 bp, Homo sapiens
ggggtctcttcttaaaatattcacacctagggtacatttcctcaacctccatgacaagtaaggacagatgatacagctagcaatgcactgcgtatatgaccagcacagaggagaaaaaatgttgagcatcaaggcctgtgtaattgattccaataagttaaaaaaaaatcatggttcagattgaaatatttattgataacagattagaagctgaatatgaaaaccattccaaatatactcctaaaattcaacattttcaagttatatagacttggaaatagattgggcttcttcacgcctcgggtttaataagattagaaaaacatgcagtgattgtgcacgttgaaagagaagggataataatacttatcatgtggtttaaaatcctcatttcatggaagagagctctgaggcctagagaaatgatgactgtccatggtcaatgtggtctaataggaaaaacctaggttttatagacacaagagtctargtttgatttttttgatttgccatttgacattgagctagtttcttaattttctttagacttggttccctgatttgcaaaattgagatgtta

SEQ ID NO: 428033 - DNA, 629 bp, Homo sapiens
tttcaacttgtaacacaaggatggactgaggttaagctttggaagagctcaatccacaacagaaaccaatgaacagagtggggtgttgggcacaggcacatgtgtgctctctacatgcacataaaagagccaggtaaactataccagaggggaaagagagattaagggtggtctcaaggaaagggagaggtcagatctaaacactgaggagaagtaggaatgagagcaagagcctttgaagctctttcctactgaccttttatactgctctcctgactttaagtaactgtacacctcttgcctgggcatctaaattttgccttccaagatgttgccatcatyatttcttttaaagcatgtttgctcttagctagttcaggaattcctagcttagctagctcatggaattgtaatttctaaactattcccagtgccataattaaggaaccagtccgtcctttgactcatttccacttgcttcttgaataaatctttctgcatggatatcccctaggcacttcaattgccaaaggacagattaaaataatatctagaagggattttgtaaactgtaactcactaaatgcatggttattgttgatgtgaccaaactcaatcttgtccccaaa

SEQ ID NO: 428034 - DNA, 644 bp, Homo sapiens
aatttgtatgcaatcacaaaagatcctgagtagccaaagcaatcttgaccaaaaagaacaaagcaggagactttgttcatacaactggattttaaaatatattacaaaggtacagtaatcaaaatgcatggtactggcataaaaacagactgatcaaccaatggaataggacagaaagcccagaaataaacccacacatctatgrtcaattggtttttgacaaagttgtcaagaacacacgaggggaatgaacagtttctttaataaatggttctgggaaaactggatatccaaatgcagaagaaagaaaatggactcttatctcacccattatagaagaatatactaaaaataggttaaagactaaaaagtaagacctgaacctataaaactactcataggaaacatagaggaaaagctccatgacattggtatatgcagtgatttcttggatataaatctcaaagcccaggccatgaaagcaaaaataggcaaatgggattgcatcaaactaaaaaacaactgcacagcaaaagaaacaagtaatagggaggagacagctcacagattgagagaaaatatttgcaaatcatacatcggataagggactaatgtccaaaacgtacaaggaactcaaagtattc

SEQ ID NO: 428035 - DNA, 501 bp, Homo sapiens
gtgttttgtgacaacatgaatgaatctacaggacattgtgttaaatgaaataagccaggtatagagagttaaataccatacaatctcaattacatgtggaatctgaaaaagttggattcatagaagtagagtggaatggtggctgtcaaagtctgaagatgggggagaatgaaggggggagacattggtcaataggtacaacatttcagttagacaggatgaataagttctggtctatttcacaccatgacgactgtagttaaaaataatgcattgtatatttcaaaatagctaaaaagattttaaatgtcaccacaaagaaatgattaaaatttgagataaatatggtaattagctcaatttgatcattctacaatgtatacatgtatcaaaacattatatcccataaatatataygattattatttgttaatcaaaaataaattaaaaatattcatcttttgctgaggacccactgctccagggactgggttaggcagt

SEQ ID NO: 428036 - DNA, 598 bp, Homo sapiens
ctgttaggttggtgcaaaagcaatcgtggtttttaccattaaaagtaaagcaaaaaccacaatcacttaatacatgagtagcaaactgtggcatattagaaattttacttcatytctctggatctgttttccgatctgtaatataagagtgatggtatattctttgcatggttgttgagaggttagattaagggagcatttctgtatagtgcatttaatgaaaagtctgacccataaaattgatcatgtattggtggctattagcattaactgaaagattgttgaggtcaaattcctcttttactggtgaggaaactgatgcacatgaaagttacataacttttctgagatcttccaggtagtatttccactaaacaggtgtttccaaaatgtcaggtattgagtatgatcttgcatttttttctgtatttatataataccctggtattatttacttaagattgttctttatatttaattgctttttcatttaaatcaatttgtttagaaactatatattgttttaaatataaatttaatatcatgtattataaacaaagggtaattataaaattatgtaacaaaaacaatgttgtta

SEQ ID NO: 428037 - DNA, 598 bp, Homo sapiens
ctgttaggttggtgcaaaagcaatcgtggtttttaccattaaaagtaaagcaaaaaccacaatcacttaatacatgagtagcaaactgtggcatattagaaattttacttcatctctctggatctgttttccgatctgtaatataagagtgatggtatattctttgcatggttgttgagaggttagattaagggagcatttctgtatagtgcatttaatgaaaagtctgacccataaaattgatcatgtattggtggctattagcattaactgaaagattgttgaggtcaaattcctcttttactggtgaggaaactgatgcacatgaaagttacataacttttctgagatcttccaggtagtmtttccactaaacaggtgtttccaaaatgtcaggtattgagtatgatcttgcatttttttctgtatttatataataccctggtattatttacttaagattgttctttatatttaattgctttttcatttaaatcaatttgtttagaaactatatattgttttaaatataaatttaatatcatgtattataaacaaagggtaattataaaattatgtaacaaaaacaatgttgtta

SEQ ID NO: 428038 - DNA, 501 bp, Homo sapiens
ttatttacttaagattgttctttatatttaattgctttttcmtttaaatcaatttgtttagaaactatatattgttttaaatataaatttaatatcatgtattataaacaaagggtaattataaaattatgtaacaaaaacaatgttgttatattttagctagatactaaaatagttagaagcaatttatataccaaagagataatagcttgggagaggagaagttttaagagaccatagcacttcatgacatcaaggaattggtacactggtagtaagaaataggaaagcagttagatgttaagttatggtaagggactggccatttgcacttttggatatcagaaatggattggaatgggtgataatgtataaagattggtcatgggggtgagtgctgaaccagaagtaagatgccattttatttcagaaagatgtgaaaccatcacatactactcatcagatttcctaaaagaatttggcttgttacccaaaatgata

SEQ ID NO: 428039 - DNA, 587 bp, Homo sapiens
taattctacagaatcttttggccaaacccataagtgaamtgtgggtgacttaattgtcttttattacaacttcatgtgaaatcagtgttcatttcctattaatactggcaacagattcaacagcttaatcacatacaagattatttctatatattcttacaaaaaaatttgtcataaattgcttctgccaaaacacatgaccaaattttcaagtttcatgaaaccatacagacataaatccatgcaagacgaaagcacatagaagaaacgactaccacatacaaagcgtcttaaaaataaacagacaaactgacaggtgttaaacgccaaacaaagagcaagccagaaattaacagtctcagacttcaaaagatattgcacatttctctttaacccagtccttacaaaaaagaaagcattcatgttataggcagttatttttcaatgacagcatgttgagcaataatgcttttccaggtaagtatgccaagcttgacaacgtacattatgttcagagaaatatcacccagcataaatatgaaacaagttctagattaaaagcctacacttaatccaatttaaatttc

SEQ ID NO: 428040 - DNA, 587 bp, Homo sapiens
taattctacagaatcttttggccaaacccataagtgaactgtgggtgacttaattgtcttttattacaacttcatgtgaaatcagtgttcatttcctattaatactggcaacagattcaacagcttaatcacatacaagattatttctatatattcttacaaaaaaatttgtcataaattgcttctgccaaaacacatgaccaaattttcaagtttcatgaaaccatacagacataaatccatgcaagacgaaagcacatagaagaaacgactaccacatacaaagcgtcttaaaaataaacagacaaactgacaggtgttaaacgccaaacaaagagcaagccagaaattaacagtctcagacttcaaaagataytgcacatttctctttaacccagtccttacaaaaaagaaagcattcatgttataggcagttatttttcaatgacagcatgttgagcaataatgcttttccaggtaagtatgccaagcttgacaacgtacattatgttcagagaaatatcacccagcataaatatgaaacaagttctagattaaaagcctacacttaatccaatttaaatttc

SEQ ID NO: 428041 - DNA, 565 bp, Homo sapiens
aactccaaaagcttaagaaactttgccaaggttacaaaactattaaggtttgatgtgattcataggctttcccaagaccctgttttattaatagtatgagggtaatcacaaatattttctaccttactatatttttaaaataaattacttctttcttaatcccaaaaagttatcttcatcatatcctgaactataactcatttttttctcaaagtawtgattcaaaccctgttgccaataatttctttcctaaatctgtcacccaaagacaatggtagaagttccccactgccattttttctgacaaaatttagatattttccactatcctgtatatacaacacactacagaatttcacaaatgaaatattgccaaagcactttttaaaagacttataagtaaatgaaataccatcaattctcatactgagagatcaacagtattcatttcctgtattttaccactgctgggtccttataagtaagatttctgtaaaacaaatatctatcaactgaaaataaacaagattacaaagcaagcatgtacaagattaaatagaaaaat

SEQ ID NO: 428042 - DNA, 560 bp, Homo sapiens
gaaatttagaatctctaaactatctttcgattagtcagaaatgcaggcagatttatccctcccacgtacatttaattaccatggagtttagaaaagcttattcaacagaactagaagcaggttcaaaacagtgttcatttaaaaacatatattgttagactttggaagactaagtctacctggatttggggctgttctgtgtactgctggaagacaatgtgtactatcaaagatacttacatagctggttatttttcttcagaaaaaataattggtcatccaattttaaaaataactattaaaggttttacacagggatattaaccacataagttaaatctttgaactggtagaaacagatttttccattttcattatttctatagatagaatamggtgtttattttctcccttgcaaaaatgttaattaggtttaagaggcaggatgacaaagagatagttattataaaattaaataattttcctgtcacctttatctagtaacatgattattgattgcctggaagcaaattagatttataggaaatataaataaatat

SEQ ID NO: 428043 - DNA, 582 bp, Homo sapiens
caaaggaaatgaaatcagcatgctgaagagatagcaacattctcatgttcactgtagcactgttcacagtagcaaagatatggaatcaatctaagtgttcatcaatggatgaatggataaagaaaatgtggggtgtgtgtgtgtgtgtgtgtatrtatatatatatatatatatatatatatgcagaatggaatactattcagctgtaaaaaagaaggaaattctgtcatttgcagcaacatggatgagccttgaggatgtcatatcaaagtgaaacaagccaggcacagaaagagaaataccgcatgatctcgcgcatatgtgaaatctaaaaagttgtcctcatagaagtagagaatagaatggtggttaccagaggatggggaaggtaagaggaaggagagatataaagctatatagttaaatagagggaataggttctggtggtctattgcatagtaggatgactagagttaacaatatattgtatatttcaaaatagctaggaagagaggtttctggatcttctcattacaaggaaattataaatcgttaagatgatggatatgctaatattcctga

SEQ ID NO: 428044 - DNA, 636 bp, Homo sapiens
tgtcagtttttagatcccaatcttcaatacatcttaagggacattttgctgtatagaactaagcaggcatgatcaatgagcctgtgtgtgtagctctattttcagcctcagttaaggtggcacatttaaggtcagccctgtttaatactagatgactaagtgacacctgtcttaaatggtcaatgtattatagacagaggttgatttgcagacctgaccataaaaatcatccggtcctaaagcaggggaggcaataggtcagagatgcccctggtttaacaacagtggacacaacaggcattccttccgtgacttcttagccagaactctcaaaataaggcagttctgctgtccatcttctctttgaagatttttccctaatccctctccatctattcctgacctcaactctgctcaacatggaaaatgaattctctatgatgacacttatcacagcaaattttccataaacttttactgagcacttactgtagccagacattgtgctaggtaaggcctagggtggyaataaataaataaataaataaataaataaataaaaagagagcccagtacttgaggagctcccagtcaggcagaggaggcccaattcaacgggaaaacagaggtatgagc

SEQ ID NO: 428045 - DNA, 591 bp, Homo sapiens
tctcctggcatttgagaaacaaaatatatgggagtcttcatgtgtcctcggtcagattctgacttagttcctccacatgggttcacaaagttaagtcttgggtgggctcttattgaaaagcaacattgtatatatctgtggctccaattatctaaaactcatgttagtacaggaaccaggacttgaaaggaactagaaaaaatgaaagcaggtgatctcttaggatgatggaattcttgaagttttggacagagtcttagcttcttaattttgggttgttaaaatgtaaaacataatgcatctatattcatatatccttacaggatctttttttctttaacatgatgactagatgattgaatttctaacaactgttgcacttcattctagtagcaatcattcacattcatactagatattgaggcctagaaagaaaaccataaacgtataagaactggctctcaaaattaccctgtccaaacccataatttacagtggaaaaaaaaaacttaacagaggtagtaaaccragttacagttgggcctagagcccaggtccttctcaccaataggctcactaggaaatattatt

SEQ ID NO: 428046 - DNA, 494 bp, Homo sapiens
cctgggcaaaggatgggaggtaggggagggggacgaacgggtggcttttcttcttgcggtgagcggctaggaccgccccggagcagggcggcgggaggggtggacgagggaggaaggcggagtagagggcggggaaagaagggcgggagcctgcctggaccctggaagtgaggagtgaggggagcgcggaagagaggcggggccggggggcgtggaagtttcaaacaattgaaccgcggggtccgggagctcgggcgaaagcaagggaccctcgctctcgccttcccactagaggggcacgactcggttgccgtagccgtgagagtctgcgcggggactggctgggaagaaggaaagggttttgcaaaagactacaataataatctgcggcaacakcgcggcatagacgcgtgggagagccagtgcagctccccgccccactgcgggaggaagaaaaacaaataatagaaatgctgaaaagcagcttccaccaa

SEQ ID NO: 428047 - DNA, 591 bp, Homo sapiens
aacatgcacatggaagaattcagataaaacggtactgggctgggcacggtggctcacacctgtaatcccagcactttgggaggctgaggcgggtggatcacttgagatcaggtgttcaagaccagcctgatcaatatggtgaaaccccttctctactaaaaatacaaaaattagctgcacgtggtggcatgcgcctgtagtagcagstactccggaggctgagacaggataattacttgaacctgggaggcggaggttgcagtgagctgagatcagccactgagctccagctactcgggaggctgagacaggataattacttgaacctgggaggcggaggttgcagtgagctgagatcggccactgcgctccagcctgggtgacagagcgagactccgtcaaaaaaaaaacaaaaaacaaacaaacaaaaaacaccaaacaaaaaggtactgaaagactacagtgaaaagttcttctccaccactctgctcccatagtcccattctctttatgactgtatgtcatcttccaaatagattatttgcatattcaagcatgagtgcatattccctttttgttccttacaagtgg

SEQ ID NO: 428048 - DNA, 591 bp, Homo sapiens
aacatgcacatggaagaattcagataaaacggtactgggctgggcacggtggctcacacctgtaatcccagcactttgggaggctgaggcgggtggatcacttgagatcaggtgttcaagaccagcctgatcaatatggtgaaaccccttctctactaaaaatacaaaaattagctgcacgtggtggcatgcgcctgtagtagcagctactcsggaggctgagacaggataattacttgaacctgggaggcggaggttgcagtgagctgagatcagccactgagctccagctactcgggaggctgagacaggataattacttgaacctgggaggcggaggttgcagtgagctgagatcggccactgcgctccagcctgggtgacagagcgagactccgtcaaaaaaaaaacaaaaaacaaacaaacaaaaaacaccaaacaaaaaggtactgaaagactacagtgaaaagttcttctccaccactctgctcccatagtcccattctctttatgactgtatgtcatcttccaaatagattatttgcatattcaagcatgagtgcatattccctttttgttccttacaagtgg

SEQ ID NO: 428049 - DNA, 441 bp, Homo sapiens
tccattaatctgccattgctttctggcctgtttctctattgggccggctagagaccacactgcagcttgatgacagcactgtgaatgtctccagcaggcagatggtggaatatgtttcaaaaacttctccatgattcaccaccattacttaaagttatatgtggtggtgtagaggackgggaaggaggttgggggacccaaagcaggggaagcgcaggaactggctgtatggggtcatcgccacattgccaattttagacactgacaggaacaagcagcagaggcactaagtgtctcagggtctcagtcatgagccctttcacaaccatcgtcaaacagtgcctgacacagagcaggcagtccatttcaagtttgtttagtgaaacccatttcatagaatcattcaatttccagatgggtagggaacttaatgaatcattt

SEQ ID NO: 428050 - DNA, 504 bp, Homo sapiens
aggcattaaatcaggcactgtgacaaatgctgaggacacctaaagaaatcacgtgtacttttctaaaggagtgtgactaaataagtactrcagcatgataaatgtctggtaagtgattatttggcctctggactgtacttctctaatgatgaggatctaatccttctctaaacagctcattccatttttggagagtttagatagaaagctctcactgcagaaatttcactcccctttggttctacctgttgctcataggcctagccttggggctatatagtgtaaatcttccttttcacttgacagcccttcaaatatttgaagacgactgtcattatcagccaccccctcttcagcttctctgtctctgcctctgtctgcctggactaccccacagctggacctactgatctaccccaaggactctatcccacctcaggaagcactcaagcagcctgcctcaggttccttcatactaaattccaactgctggggctttgcact

SEQ ID NO: 428051 - DNA, 635 bp, Homo sapiens
ctaacacaatcatttagattgaaaggtggaagcgaaagaagataaaagattgagaagcaagaggcagagggacagaggggaacaaaacacaaataggcaaactgcaaagcaaatggaaaatgcattatttctaaaagggaaataccaaaagcactggcaggagcaataatggaaacaagagtgaccagatagatgggaaaattatgataggacctaacctaatattcacatgataaaagggtttctcaggctamaaatgcacacatatgcctatgtatgcagtcactgatttttttcctagttttatttgcttctttctttctcccaatttcctgggaaacaagaaagtttgtgttaactcctgactcaaaccaaaccggactacagtatggtcaagaattagaaacacagacaacactgaagggctgctctcgggataataattgcttgttacgcatttcttccctgcctaatgctaataataaattgacattgattgaaaacatcttggaaacctaattaactttttcttacttaaactgtttactttttgcttttaatttgtcttgagtaaattcccggttggtctcaatatttcattcttgtttagtgacacaagctttgtctgatcatct

SEQ ID NO: 428052 - DNA, 635 bp, Homo sapiens
ctaacacaatcatttagattgaaaggtggaagcgaaagaagataaaagattgagaagcaagaggcagagggacagaggggaacaaaacacaaataggcaaactgcaaagcaaatggaaaatgcattatttctaaaagggaaataccaaaagcactggcaggagcaataatggaaacaagagtgaccagatagatgggaaaattatgataggacctaacctaatattcacatgataaaagggtttctcaggctaaaaatgcacacatatgcctatgtatgcagtcactgatttttttcctagttttatttgcttctttctttctcccaatttcctgggaaacaagaaagtttgtgttaactcctgactcaaaccaaaccggastacagtatggtcaagaattagaaacacagacaacactgaagggctgctctcgggataataattgcttgttacgcatttcttccctgcctaatgctaataataaattgacattgattgaaaacatcttggaaacctaattaactttttcttacttaaactgtttactttttgcttttaatttgtcttgagtaaattcccggttggtctcaatatttcattcttgtttagtgacacaagctttgtctgatcatct

SEQ ID NO: 428053 - DNA, 628 bp, Homo sapiens
attacctttacaagaaaactataggaggtccttttttccttcctgaatgtgttttctaataatgaaaatatttttctagcttaatataaatactttccttgtcaatggccatatattccccatattttcaaggtaaactagttgcaagtgactttgtaatgccagaakttagagctatggagaactgagaagattgacccatatttcagaaaataatcatctcaatgaaagtcttttcatatttaaaaccatttaaagattactcaacacggtcaactgtactaatgttcacaatcaaggagaaaaactctctgactgtaaaacagacagatcatattctcattttctgtattaccagaaatacacaaatttacatcaatccttcacttatgtccatctgtgtgactcatattagatcaaatcaaaagtgagacttctctcttaaactcactttgatcctaaatactgttcttttggaatccggtttcaaacaaaaacaggaatgtgaatgtcacagaatgaaagataataaaattaaatgagtaccttttagacacagaagacatcaaaatgtacatttctgtgtatttgtatttaaaatgtacttcaattcctacatattattgat

SEQ ID NO: 428054 - DNA, 361 bp, Homo sapiens
caggcatgagccaccatgcctggtcgccattactttcaatggtaaaacagcggttgcttttgtaccaacttatacataagttgcatgatttctcacagacttaatcctttgacaataacagctgggtcatactaaagacagtccttttttttttttttttttttttaattgtcaggaggcacttttgtatcaaagtgccttcttcaaagcttaattcactttcctaaaacatgatgaccagggtttcaraacaaaactttctgggatattcactttcctggtgcttcttaatatgacagagacttaaacatattctagcacacacaatcgtagtttttaaatgtttatcttggttgtgagg

SEQ ID NO: 428055 - DNA, 590 bp, Homo sapiens
ttcttgattctttataatatacccacttaatatttaaatataaagtacattcactgaactttttttttttaaatggtgaatttgcccgggcgtgatggctcacacctgtaatcccagcactttgggagaccaaggcaggtggatagcctgagcccagtagttcgagaccaacctgtgcaacatggcgaaacctcatctctacaaaaaatgaaaagttagccagtggggtggtgtgtgtttgtaatctcagttacttgggaggctgagatgggaggatcatctgagcctgtggaggcagaggctgccgtgaaccctgatggtgccactgcacttcagcctgggtgaaagagagagaccctgtctccaaaaaaaaaaaaaaaaaaaaaaaaaaaaggtaaattttatatgtgaactatattgcaataataaaatgatgaagaaaaacatataaaatatatcacacaagtttatttctccctaaaactgccttatttcttcccataagtaaaattcctacttyatcacaatccttgtaatgtttataatttgggttctcacatagaaaaacaaacatccttaacgtttcaagt

SEQ ID NO: 428056 - DNA, 622 bp, Homo sapiens
tacttcatcatgaaggagaaccattaattagttttaactggaaattgctaacaacatttctacaaagtttataggtgtaataattcaattttccaaacataatgaagaaagtccacaaaatgttgactatgaggaccaaatcaacctctttttgcctagaataaacctgcacagactttatcaacatataatcagcagaatcaagcctggaatagatcaaaccagaaatgtgatccagtcatcctgttccaattaaagaatggaccatgtgttgaactaagcaaataagtrtagataaaataatctatgttgggatttgagtacaacttttctggctgtacttcaattgtagctaagatccaagttgaaaagttctggcaatactgcccccatacccaccatatattttaaaggaagctatcaatgacctggaccagaggcctgtgaccatcaccttgcttttttcaggcgatggtcacaggcacctccttgcacggtttctaacagaagacagaactgacctattaccaataaccacaaccctagcaaaacccaaatccaaaccccatttatatacaaaactgagaaaaggaaaagtcacagatctttggaaagtacaggg

SEQ ID NO: 428057 - DNA, 750 bp, Homo sapiens
atctaataaaaaatgtctattattttaggtcagttgtcatcactatccatttagtttatggtgagtgttcatattaatgttaccaaaatagggtgaacatcctttatgacaccttatcttacgtgtaatcatgacttgacttacatgcaatggcgaactgaaataaaatggtaattgccacaaaatggtgcttggcattctaaaaaaattaaaatttacttcaaaattcctttagaggtaatatatattcatcagaacttatcaattaattgagtaaatacaaaaacactcaaaataataatattcacaagaagtacaactgcgtttaaaatctgaatgcctggcctacatttacatagtctaatagctaactgaagttttacttgtttctatctcttttatgccaaattgtttttattctgactgagatgacataatattttaattttcccagaaaagaaaaaattaatgcagaaaaaatcaacaaaaattcagttagaagaaataagttctagcattcaatagtacagtagaaaaattatacttagcagtaattcgttgtttatttcaaaagcgctagaggaaatgaactataatgstcccaacacaaagagaaatgtttgcagtgataaatatcccagttatcctaattttattgtacattatatacagatatcgaaatatcacatatacctctcaaatatgaactatatcaatttaaaaattcaaatgttcatattgtatcatgtg

SEQ ID NO: 428058 - DNA, 696 bp, Homo sapiens
gttacttatagtcctactagagtttaaaaagatgtttcctaaagacctaccatttaaccacaaactgggaataacctaatatcaattggaaatgctgttaaacggaaacaaatgtaactgatacatttgaagcaagaggagattgaagatgaaggtatatatccaaaatggtgacagtgacagattctgattttcccattttgattaacagaatttcctataggcatcaataagctataaggtggataagatagttctgttgtaaaagtactgaggactcattatctggactctcaattctcattattcagtttacttagtttcataaaactttaagctaaatctatattctataaagtacatatgacaatattaattatmttgtcacctttctaagattaaaaaattaagtattttttgaaaacttctcagttcctggcttggtttttccttctcataataatttatttatttatttattttattttattttatttttttgagacaaggtctcattttgtcatgcaggctggtgtgcagtggtgcaatctcagctccctgcaacctcgaactcccaggttcaagtgatcttcccacctcagccttccaagtaggtgggactacagacatgtgctgccacgcctggctaatttttacattttttgtagatacggggtttcaccatgttgcccaggc

SEQ ID NO: 428059 - DNA, 562 bp, Homo sapiens
ggatgaaccccatatagcgtctaaagttttaccaagatgccgcaccattttacattgcttccctgcctgcacactgggcacttgactcctcctccccaccgcagcttttgactaaacctttctaaygctaacaacagatcttcaactcaaaggctttgcttactcagaaaaaatgacccaatagaagaaaaaatcctattgtgagtgatttaaagaacaacgggaaagtctcaagcagatacttgctaatataaaacactttgcatttatttagtctttaacttgatggtctgaaagttctaatcctttttatttgatcaactagaagtttatctcaaactaggtaactgaaaaaataagctatagcagatggattagaggtttgcattgtattctcgacaaaaactcagaattaaaatataaatatatccaatagttgtaactaatacttagataacatttactatgttttctttgtgctttgtacatactaactcatttatcttcacaaagaccctagaagtagttgccattatgattacagttatgtagatgaggaaac

SEQ ID NO: 428060 - DNA, 546 bp, Homo sapiens
ttcattcagccagcggaagatatagtaatttcatagattccatgaaaaataatccactattaattttggtgactcctgtgtctttctgatgttttctcacttktcatatgatttgtcttttatttctttcctattaattttacagaagtatcatgaaagagcattgctgactcttatcttacagatataaattccagctggctacaaaaacctgaactagcatgtccccagggaagccactgaagcaggaaaagaatgagggaggagctcaaactggaagccatgtgttgacattctgctgtcactgtggctctttggaggaaggctacagaatgatggccattgagtcaacatgacatgtgactactttaagagcattttaggaattataccattgttaaaagtcacccagtaagttcctttatctcaaatgccaaattattaatggttctggtaagttaagtaaaaagctaccctgctttttgaagacaaccactttagcaagtgttgtgaattgtggtggtttagtttttatggctatgaagg

SEQ ID NO: 428061 - DNA, 546 bp, Homo sapiens
ttcattcagccagcggaagatatagtaatttcatagattccatgaaaaataatccactattaattttggtgactcctgtgtctttctgatgttttctcacttttcatatgatttgtcttttatttctttcctattaattttacagaagtatcatgaaagagcattgctgactcttatcttacagatataaattccagctggctasaaaaacctgaactagcatgtccccagggaagccactgaagcaggaaaagaatgagggaggagctcaaactggaagccatgtgttgacattctgctgtcactgtggctctttggaggaaggctacagaatgatggccattgagtcaacatgacatgtgactactttaagagcattttaggaattataccattgttaaaagtcacccagtaagttcctttatctcaaatgccaaattattaatggttctggtaagttaagtaaaaagctaccctgctttttgaagacaaccactttagcaagtgttgtgaattgtggtggtttagtttttatggctatgaagg

SEQ ID NO: 428062 - DNA, 562 bp, Homo sapiens
ggatgaaccccatatagcgtctaaagttttaccaagatgccgcaccattttacattgcttccctgcctgcacactgggcacttgactcctcctccccaccgcagcttttgactaaacctttctaacgctaacaacagatcttcaactcaaaggctttgcttactcagaaaaaatgacccaatagaagaaaaaatcctattgtgagtgatttaaagaacaacgggaaagtctcaagcagatacttgctaatataaaacactttgcatttatttagtctktaacttgatggtctgaaagttctaatcctttttatttgatcaactagaagtttatctcaaactaggtaactgaaaaaataagctatagcagatggattagaggtttgcattgtattctcgacaaaaactcagaattaaaatataaatatatccaatagttgtaactaatacttagataacatttactatgttttctttgtgctttgtacatactaactcatttatcttcacaaagaccctagaagtagttgccattatgattacagttatgtagatgaggaaac

SEQ ID NO: 428063 - DNA, 414 bp, Homo sapiens
tggtggcgtgccccagtagtcccagctacttgggaagctgaggtagggggatcacctgatcccgggaggttgaggctgcagtgagccgtcattgtgctactgcactccagcctggacaatcgagtgagactctgtctcaaaaaacccatcaatcaaacaaacaaccaaaaacaaaaagaagttgcctataggctgaagtagttagtatccacctatttcaaaaagcgctgacccaaygaaatttactacagtaacttaattcatatcaagttgccttaataaagtactgagtaggtgactcaacaagatgcatccagagggctacgacctatcctggaagatgacacaagtttgttcaatcatcatgtacacgttcccggtgcatgatgaaataattttttttaaagtctaacc

SEQ ID NO: 428064 - DNA, 483 bp, Homo sapiens
cttttggctgaaaaaacaaaaacaaactattttgcacgtgtttttctgctggacaaatggatactagagatgtccacacaaagaagacaccctcatagaggtttaaagattcttatcattgaacatgaggcttgctgaccaacataaagtgattttagtgtaaataatgcagcaatagttctcaaactttagtatgcatcagcatcacctgggaaggcttgttaaaatacagcctggtgggccaatgcctagactttctgatttagtaggtctgaggyggggtccaagggtgtgtatttccgtcaagttccctggtggtgctgacgctatggctgctggtccagaggccactcaatggaaaccactggaatatggcattgggagaaaggtaggtgatcttcaagatgttttttgtagtttaattttaatcgggaatttatatatatgttacatgtgtatatttatacataagtgtatatgaat

SEQ ID NO: 428065 - DNA, 631 bp, Homo sapiens
tgggctaatccagaaaaacattttattaccagccattracagaacatgtattttcctagtctgtggtgctgtctgtgaacacaactagttcatgcttatagatcctttcacctgtgataatatgttgattgtgtaaataaccatattatttctgcagagtataaccttttcctgaaaacaattaatctaaaaatcttcactttgaggcaaattgcaaagttttcagtgagttcccagttgcaaaataaaggtactaagtttttcttaatgccaatgaaatatatacccaagtggctggaatatctggccctgtgagataattcaatccatctcttttcaaaaataaaaaaatccacatttaaatggtacaaacacacacatacaaagtaaatgatgaaaatgatatcaaacacattggttaattcttcttattcttaattttatagtgatttacgtagtgtgccaggttaaaaagaattctatataaatgtttccaatttgctcactttttaaaatcagtgactttatcagggaatcagttgtagaaaaatctatgcctcaggatggaaaaccatctagtgaattatcagttctatgtattaaaaggctgttttgagtattcatatgcaca

SEQ ID NO: 428066 - DNA, 564 bp, Homo sapiens
aatccatctcttttcaaaaataaaaaaatccacatttaaatggtacaaacacacacatacaaagtaaatgatgaaaatgatatcaaacacattggttaattcttcttattcttaattttatagtgatttacgtagtgtgccaggttaaaaagaattctatataaatgtttccaatttgctcactttttaaaatcagtgactttatcagggaatcagttgtagaaaaatctatgcctcaggatggaaaaccatctagtgaattatcagttctatgtattaaaaggctgttttgagtattcatatgcacaaattcatagttccagataaaggtcagcctcaccatacacctrggtacatatgtggtacaaatatctaagtttgaaagctttcacaactggtaaatttaaattataggccgaggattttattgcaactcttgccagccaaaataaagttgatattgagtgatggagtcaacatgtagaaggaattgagtttgtttaatactgtttgacttgtatacatttaattattcaatatttttgtgtgccaggcactctacta

SEQ ID NO: 428067 - DNA, 564 bp, Homo sapiens
aatccatctcttttcaaaaataaaaaaatccacatttaaatggtacaaacacacacatacaaagtaaatgatgaaaatgatatcaaacacattggttaattcttcttattcttaattttatagtgatttacgtagtgtgccaggttaaaaagaattctatataaatgtttccaatttgctcactttttaaaatcagtgactttatcagggaatcagttgtagaaaaatctatgcctcaggatggaaaaccatctagtgaattatcagttctatgtattaaaaggctgttttgagtattcatatgcacaaattcatagttccagataaaggtcagcctcaccatacacctgggtacatatgtggtacaaatatctaagtttgaaagctttcacaactggtaaatttaaattataggccgaggattttaytgcaactcttgccagccaaaataaagttgatattgagtgatggagtcaacatgtagaaggaattgagtttgtttaatactgtttgacttgtatacatttaattattcaatatttttgtgtgccaggcactctacta

SEQ ID NO: 428068 - DNA, 608 bp, Homo sapiens
tcgttttgtcacttgttaattatctagtcctattcaraaagtgaatttcatgagtgtagattcttgttctgttttgttgattgcttcatccccagtgctggtaacagtgcctgacacacagaaggtgctcaaaaaaaaaaaaaaaaaaaatacttattgaatgactgattgaatagtttggacaaattatgcacttggactatttttttccctgatctatttttttttttttacccctgaactaaaaacacaaaagttgaccatagtccatttatttcctctgattttactataataaaagcctgctagaagctacctataccatttaaaaagttagtattactgttcaaggcacatacatgcacagacatgattacctgccccagtggtggacaccagtttgggcttgctgcgagcaccatctcctttggttgtgtaggctgtgacggtgagggagtaggaagtttcaggctggagcccagaaatgatcatgtcctgaaatgacaaaatagaatgtcactgattcaaaacatgctactaatgctctgggggaaaaacaaggccgtctgccttcattctgcaaatgctcgcacatcccttgcagccat

SEQ ID NO: 428069 - DNA, 539 bp, Homo sapiens
agggtacataccaactcaatataaatattggattggctataatcagtcctagtgaataattttaaattccagcctttggctctgttttcctctgtccatgtctgaggttctcatttctgacttttttgcactggaatatttcttgcttggagagcactttcttatccttttcttttttttttgcttctaaattctaccttcctttcaacaaggttcagcttaaatcccactctcccaattcattactgcctggagctttctcttacatgcttccatgtgtgccactatcatgtgttacagactggagcatccatttggcaactagctacgtttagccttgtagcatttcttcttgtaaagttgtttgaattcattaycataacttatcttttcatttgacaattctttatttccccaactctatagtaagtttctcaatggaaatactgtctggtatatatctgtgtagtctagaaaatggctagcccagtgcatgtaaaatgtatgtaaaatacatttttttttttttgtaattttaa

SEQ ID NO: 428070 - DNA, 612 bp, Homo sapiens
aaatagaactgtacatatacagtcagttgatttttaacaaacatgacaaggtaattctctgaggaaataactatcttatcagcaaatagtgctagaacaacaggatatgtatatgaaaaaaactaatctcacactatgcacaaaattaacacktaaaagctaaaaccataaacaggcaatgacttttcttataaaaacaaaaaataccaactattaagagatgttaaataaaatttatgggaggctattgttatggaatgagcgcctgcactgggccccaacagatcagaccaaaccacaatgaaatcacttctgctaggtgccacgtaatcatgccaaactttaaaagaggcctgttttcaaaaacaacagcctgtccaggcacagtggctcacacctctaaacctgacattttggaaggccgagcccagaggattgcttgagcccaggagttgaaggttgcagtgcactatcatcacaccactgcactccagcctggacaatagggtgagaccccaactgaaaaaaaaacaaaacagaagatttaccataatcaatcaaaaggggcccaatgaacctgagctggcatgataaggaagccccctcagctgt

SEQ ID NO: 428071 - DNA, 530 bp, Homo sapiens
ctgttaagtggaaaaaaacttttatgatatagtattactgtataaattcatctcttaacagaaaaatatattatatatgcagatttcaacttttttttggagacagagtctcactctgtcgcccaagctagagtacagtggtgtgatctcggctccctgcaacctctgtctcctaggttcaagcaattcycctacctcagcttctcccaagtacctgggattataagcacccaccaccatgcccagctaatttttgtatttttagtagagatggcgtttcaccatatttgtcaggctggtctcctgacctcaggtgatccacctgcctcggcctcccaaagtgctgggattacaggcatgagccactgcacccaaccaatttaaacatcttaaaagaaacacatcaaaatgtaactagaggttgtttctacataatgggaccatggggatttctatttcttctttggcatatttgcattttctacttttttctataatgaacatctattgttaaaacaggtaagatactg

SEQ ID NO: 428072 - DNA, 514 bp, Homo sapiens
ttttatatgcttagaagagcacataaatgcaagtagagcctgtgggaatttaggcgaagtcaagagctttttctcctaacatagatctttyccggtagtatgtgagtatgcttgattgttttcttctttctcctgtatatttggaaaaatgattgacttgcaaatgttgtgcaggaaatggagaccagcagggtacaaggctgttgacagaggccattcagttgatctccttgcctcactttgcccttccacattttttttcttttattgttttcttttagagacacagagtctcgctctgtcacccaggctggagtgcaagtggtgggagtgcaatcacagcccaccgcagccgtgaactcctggctcaaagtgttcctcccacctcagtctcccgagtaactgggactacaggcacatgccaccatacttggctaatttattttttatttttgtagatacgggggtccttctaggttgcccaggcctctatgttgctggtcttgaactcctg

SEQ ID NO: 428073 - DNA, 475 bp, Homo sapiens
acatcatgcagagaaatacagcctccccgtcaatcatcgtgggttgtaatactatcccagtcaacttgtttgttaagaaactagctcatgtgggttgacctagagcacttatattgctggttttttaatgagctcagtataaatgagaaatctgagtgggctgggggtgggaccccctgtgcttgatgagccaaagcagggytaaaagactgtagatcacttgttgcttagcaaccactgccaggagacttggttttcataacccaagccttgttaatttcccagggattaggatttgggcagtgaggtttagtaatgaagtttagaaaggagtgcaaactgggtgtttttttggctcagtttgtctcctaatgcacagatctctcccacccccagcaaacaaacaaacaaagaaacaaatctccatcagggagcagttctggcaactctggacagtttgaggcccagagaagct

SEQ ID NO: 428074 - DNA, 475 bp, Homo sapiens
acatcatgcagagaaatacagcctccccgtcaatcatcgtgggttgtaatactatcccagtcaacttgtttgttaagaaactagctcatgtgggttgacctagagcacttatattgctggttttttaatgagctcagtataaatgagaaatctgagtgggctgggggtgggaccccctgtgcttgatgagccaaagcagggctaaaagactgtagatcacttgttgcttagcaaccactgccaggagacttggttttcataacccaagccttgttaatttcccagggattaggatttgggcagtgaggtttagtaatgargtttagaaaggagtgcaaactgggtgtttttttggctcagtttgtctcctaatgcacagatctctcccacccccagcaaacaaacaaacaaagaaacaaatctccatcagggagcagttctggcaactctggacagtttgaggcccagagaagct

SEQ ID NO: 428075 - DNA, 599 bp, Homo sapiens
actgtttacaatatgtcttggatctctttccagatcagtatgcctaaatgtctcctattctttttgatggctgggtttcatttcatgggatggatatactatacctattaaagtggtccatagacatttggccactacaaactgttgtgaacatcattgtatgtatatttctgtgcacaggtacatttatagaagacagattatgattagtagaattcctgggccaaaagtggttgcatttttataaatccagccaaattgtcctcctcacttaagattgttccagtgtaaactccagtaaacatataaaaatatttttttccaatgctctttgctggctcaggacattacgtgatggctaaaaatgagaatctaatttttaagtttatattgcctagtttacaaatttatccacatgtatatctgtcatctatatatttttttctsatttgcctatttacatctttgcctgtttcctgttgagttttctttttcttacagaattttattaaattgatgaatgataaaagagttaaccttttgccagttacgtagatagtgacatcttcttcctgtctgttgcctgtaactctgcctac

SEQ ID NO: 428076 - DNA, 582 bp, Homo sapiens
tctgggaaatttctgtaacagtgaacttaaatttaaacagtttgtttttattcctccagccattttactgtttgccattgtttctggtataaaggagaaatgtggaggagtcagctttcctgcattataatgtttatttgtgtatgggagggraaagtgaaatttttataagccaaggcactttatatataagataaaatgggaagattgtcaaacttatcaataccctactaataagattccaagcgttgactataacaacttctgttactcttttagcgatgataggaccttggctgcactggcttagcctttctaactttgatcaaaactactttgatcttttgtcctttagatggagtgtgcccatcagtatcaaatcctttagaagtttacctcattcccacaccacctgaaaatataacatttgaagacccgtcattagatgtgatccttcttttaagagttttacatgctatcagtcgatactggtatacttgtatgatgtgagtaatgttgcctatttatgaagttttcatggtctgtgattgataaatttcctattgcactagaaatggaaac

SEQ ID NO: 428077 - DNA, 470 bp, Homo sapiens
gcccatttcctggagtagtgctcttgttcattagtctctgtggcatctgggttcaccttctgagagattttttttattttctgtgatttttctttgccatatctgaagagactgtcaaagaaattgccctccccaggagcagaacaactttctcaacctttcctgcctcacactggggccaaaggatcattttaagtttcaaaaagtcagmctttttcagtgcaggtggttcttcagtagtacaattttctaaaaaatttattctatttgatacagcatcatatgccaaataaccacaccacagtgtgtctaagacattactcattcctgttgccttaattaatgaaacttaatattaacttgagccaataccatctctggactgatttctgtattaattagaatgggctagcatatgcaacagtaacaaacagccccacatgtctcagcggcttaaaataacagttttt

SEQ ID NO: 428078 - DNA, 470 bp, Homo sapiens
gcccatttcctggagtagtgctcttgttcattagtctctgtggcatctgggttcaccttctgagagattttttttattttctgtgatttttctttgccatatctgaagagactgtcaaagaaattgccctccccaggagcagaacaactttctcaacctttcctgcctcacactggggccaaaggatcattttaagtttcaaaaagtcagcctttttcagtgcaggtggttcttcagtagtacaattttctaaaaaatttattctatttgakacagcatcatatgccaaataaccacaccacagtgtgtctaagacattactcattcctgttgccttaattaatgaaacttaatattaacttgagccaataccatctctggactgatttctgtattaattagaatgggctagcatatgcaacagtaacaaacagccccacatgtctcagcggcttaaaataacagttttt

SEQ ID NO: 428079 - DNA, 498 bp, Homo sapiens
gctgcaccctcaatgggtttgtgtcacagcagaggagcctctcagggaacctgaatctttttttttttttttttttttgagatggggttttgctctttctcccaggctggaatgcagtggtgcaatctgggctcactgcaacctctgccttccggttttgagtgatttgcctgccaaggcctcccgagtagcyggggttataggtgcctgccaccacacctggctaatttttgtatttttagtagacacagggtttcaccatgttggccaggctggtctcgaactcctgaccttgtgatccgtccgcctcggcttcccaaagtgctgggattacaggcatgagccatcacgcctggccaaacctgaatcttttataacagactgcaagcaaactttcttgccctttcctcggaagatagacattctctttgcctcacactgaacagtaagcaaacctgccttcttctctggggggagacactatatcttacaaagctg

SEQ ID NO: 428080 - DNA, 592 bp, Homo sapiens
atatttaagcagggcgggggatactgagacagacagacagacagacatgccatacttacctacagttttggctttgtgtgtcctctctctgggtgaaataattagtttattttctgaagatcacctttgccagatatttcatgtgaaacttatgatgacctcttctaggacttcttttatgcaagattatctcctgttctccttcccaccttgaactgttaggacrgtttagtaattaagctcctatccttcagagcagggaagaaaaagtccataattggaaaatggagagaagttggaaaatggagagaagttggaaaatggggagaagttgtaaacctgaggttacatcatcttccaccccatcccccacccccattattggaaactggatgtgtattggcttctcctagctttgcaagtgtgtctaaagtaaaagatggtagaggatacaactgatctactctgcaatactctggccatagttattaaatgctggccattgatacaaaagatagaactttgaagacagaacagaatttggtgacatccctggagtcagcatttggtattaattccaatagtgtttcat

SEQ ID NO: 428081 - DNA, 410 bp, Homo sapiens
tctctcccactcttggcaccctgcccagcctccatatgcacaagcacagcctaacctgctgaagggtgacagaccatgtggaaccagcccaggagtccaccaggggtgaccttagaccagccagtccccagctgaccaaagatgcatgagtgagtccaggtgagaccagaagcccagcccaaattgctgagccatataattgtgagctaaagaaattattgtgcttttacttgctccaytatggggttgtttgttctacaacaaacctgaacggtacaccctgctagggaggcttggtgacatcacagggtttttgtttgtttgtttttatttttatttttttgagacagggtttcactctgtcactaaggttggagtgcagtggtgattatagctcactgcagacttga

SEQ ID NO: 428082 - DNA, 608 bp, Homo sapiens
cagttaggaaagaataactggcagcctaaaggtgcctctgtagctgagtatactsccaggaagtctaggcagagaaccaacattaaactctgctcctctcggggcctggtgagagctatggaatgacccagagaatccagaaattccttcttctttataccaggggctgagtttgagatgttacggctcccagaggtgccttaactgatggaagcctgtgactcgtctgggggaaggccatcatcacccatttgcccatagatacccttccaatcccagtggaaccaaaaggaaacttacaggtgggtcacatggctctcaatctttatgactgtgatcaaaagagacctgcaagtaaagaggctgcatctccaagcttcaacagagagctgttagttttacccagtttgtttattcatggctcacaagagtagcaactgctgtgccttctactacttatctactagtagtaaatagttggatcccaagaggatcccaagccctctaaaaaagaagctcacaacctggcttacctgttgaggcagtaataattaaaaacaaatatatatatatacatatatttaggcaaagaaaaaaaaatgcatgta

SEQ ID NO: 428083 - DNA, 608 bp, Homo sapiens
cagttaggaaagaataactggcagcctaaaggtgcctctgtagctgagtatactcccaggaagtctaggcagagaaccaacattaaactctgctcctctcggggcctggtgagagctatggaatgacccagagaatccagaaattccttcttctttataccaggggctgagtttgagatgttacggctcccagaggtgccttaactgatggaagcctgtgactcgtctgggggaaggccatcatcacccatttgcccatagatacycttccaatcccagtggaaccaaaaggaaacttacaggtgggtcacatggctctcaatctttatgactgtgatcaaaagagacctgcaagtaaagaggctgcatctccaagcttcaacagagagctgttagttttacccagtttgtttattcatggctcacaagagtagcaactgctgtgccttctactacttatctactagtagtaaatagttggatcccaagaggatcccaagccctctaaaaaagaagctcacaacctggcttacctgttgaggcagtaataattaaaaacaaatatatatatatacatatatttaggcaaagaaaaaaaaatgcatgta

SEQ ID NO: 428084 - DNA, 586 bp, Homo sapiens
gcctctctcaggctgggattattaccctttcctcagattgctattagattagctagtctratgtccctgattccaaaatacaagtggtaattaatctcatacccatttatttgaaaacctacagcaaaagcagaggttaaagccttacgcatttcatgaaagactaatattgaattagaattacattatttactacaacactctggtgtgagcagcaaaatttccatgtggggctacagttcttttttctcagatttctcaagttcagataacacaatctattttatctcagtgtctctcaccaactctttccccattgagagtatattaaacagacttctcatccagggaaggaaaaggttcaaggactgaacaccttgagtgggaggaaataacaattgaaccaattagcccttttataacctccctctagtttgaagacaggttttgttctgacttctttatactgagaaattttttatacatggtaatcattattctataattacattaaatgccagcttctgtgatctctcttgaaccccataaagctgtaaagcaatccacctaggccatgatgaacttt

SEQ ID NO: 428085 - DNA, 586 bp, Homo sapiens
gcctctctcaggctgggattattaccctttcctcagattgctattagattagctagtctaatgtccctgattccaaaatacaagtggtaattaatctcatacccatttatttgaaaacctacagcaaaagcagaggttaaagccttacgcatttcatgaaagactaatattgaattagaattacattatttactacaacactctggtgtgagcagcaaaatttccatgtggggctacagttcttttttctcagatttctcaagttcagataacacaatctattttatctcagtgtctctcaccaactctttccccattgagagtatattaaacagacttctcatccagggaaggaaaaggtkcaaggactgaacaccttgagtgggaggaaataacaattgaaccaattagcccttttataacctccctctagtttgaagacaggttttgttctgacttctttatactgagaaattttttatacatggtaatcattattctataattacattaaatgccagcttctgtgatctctcttgaaccccataaagctgtaaagcaatccacctaggccatgatgaacttt

SEQ ID NO: 428086 - DNA, 571 bp, Homo sapiens
ttggagcttcacagctagcctccctgggagataaggtaggtattgccaactccctacaggggagctgagctgttcagggactgcacaaggccacatttccaggaaataatagagctggaagttcagcccatgtcttctcatttcaaatcttacatccttatcagaaattgtcattgaaaatgattaaattgtgaataaatatttgtgactgttagcattctctagccttggtttttatgataagttccagggatcaatacttgctagctataggctcaccacagaaaacagtgcagttgttttacccctaaaatgcagtaaagcatgcacacaaaaaatggaataattcttaatggagaagatattccaccccactagggatagataacccattcattgccacagaaatgcagtttgttccaaatttagttagtaaattcaaataatttctttcaactgctaaggaaaactcaactaagcaagaccataaagccatgttttttgcctgagaagaaaagagccygattaaaagaaaacgaaaatataaaggggaacacaaaatgtgaactta

SEQ ID NO: 428087 - DNA, 509 bp, Homo sapiens
ggctctggtgcttcacagcctctgcacactgtcttcatgttttgtctctccaagcctgagtcactctgcaccctgctgacttcataggtgtttcattcaaactcccctgaaaagaccctgtccaagcctgctagctcttatgcatatggcaagttgttgtgcaaagctgttgtgccaggcacccggagggtccccctcagccagctcacagatggtagagacctagccctggtctagtctgctgaggcaaaaggagcaaggacatagaataaaacatggtgacccatattaaaggagacactcagaagagaggctagggtgggtacattacttggacatctcagaagagactggtgagatctacaggtaagaatgtcctctcraatattcttctatcccaaattgtattacttcaagattttgatgaagatagagatgaggccaaggcaatcttatgtgataattctgaatgtgatttttcacctaaatatgaactaacccctaaaaga

SEQ ID NO: 428088 - DNA, 594 bp, Homo sapiens
aacgtcatgtccaaagcatcaattcccttatttaaaaatggagaaaattcttcattcctgatgacaacatttaaattaaattatttcatcaaaatcaggtgatttctcaaagcactcagagcacaatatctgactttgcaaaaggaaatcacctcactatatatttgtaggctcttgggtcaatayaatgaaaagtaattgtattgaataccagaattctaaaataattgtttaaaaatagaaatacgacttatatccccccaaatttattaccatttccctcaggaatttagaatccatttatatttttcaagtcttaataaccaaaaataattttttaaagatcactagaagatactgggaagatgaaagttagataaaatactgcttatatcatgagtttataaaaagatgttcgatactattcagcacttctgcactgccaggctggtagacaatgctacttggaaatcagacctatagttatcaattgcaacgggttaaatggtggctcctccaaaagatatgcacattatctaaaacttcaagcttgtaaatggtaccttatttggaaacagtggtctttgcagacat

SEQ ID NO: 428089 - DNA, 594 bp, Homo sapiens
aacgtcatgtccaaagcatcaattcccttatttaaaaatggagaaaattcttcattcctgatgacaacatttaaattaaattatttcatcaaaatcaggtgatttctcaaagcactcagagcacaatatctgactttgcaaaaggaaatcacctcactatatatttgtaggctcttgggtcaatataatgaaaagtaattgtattgaataccagaattctaaaataattgtttaaaaatagaaatacgacttatatccccccaaatttattaccatttccctcaggaatttagaatccatttatatttttcaagtcttaataaccaaaaataattttttaaagatcactagaagatactgggaagatgaaagttagataaaatactgcttatatcatgagtttataaaaagatgttcgatactattcagcacttctgcactgccaggctggtagacaatgctacttggaaatcagacctatagttatcaattgcaaygggttaaatggtggctcctccaaaagatatgcacattatctaaaacttcaagcttgtaaatggtaccttatttggaaacagtggtctttgcagacat

SEQ ID NO: 428090 - DNA, 504 bp, Homo sapiens
tacgatcaatttatggacttcaaattccaatctgtgatgtattaggtcaaatatttttttwaaatatctttactaattttttgtctgcttaattcctggtttatatccaagcattgtgtgtcttatttaggtgtttgtctggtgatgggctacatatgggtttttgaaattacaagcagataatctctgttgtgtaactggtgaggttagtatgcttctgattgtttgaccaatttctaccgttttatcctgtgctatgtgctctgaattgtctgtgctcctccactttctttactttttcttcctttgttccctctttggattgattagggttttgttacgcttctttacactggtcacaagttacgcaatataggtctattttcttaatggaataattttaaattttaatgtgtatattttactttttaagagtttcaagttaagcaatttgtctaccctcttctaggacaatacatggaattgggacactttaaatcaaat

SEQ ID NO: 428091 - DNA, 475 bp, Homo sapiens
tctaccacacacctcaatgctatgtaattatgtgactatggaacccttctcatgtttgttaatctctcaatacctcaactttctcctctgtaaaatagggagaataataagccctaccctagaaatttgtcttgagaattacaggagacaatagatgtaaagtattcagtatagtacctggcccaaccaaarcattatatgtgtaatctcctcttctttctcccctttttgccctcttctttctcctccttcttcttccaaagtgtatagtatgtaatctgtcaagaatttattttacttatttaattattattttattatttatttattaaaatctttattttggcataaactaaaatgaaaacattatctacataaaacttgaccctttaaccatatcacattctatgatctaagtctccggttttccccaaacagcagtaactatactacaaaatttataattataactact

SEQ ID NO: 428092 - DNA, 605 bp, Homo sapiens
cagctcttgcccctaaatttttgccaaattttccaaatagaaatttatttttttagggttaaggcatatgactaatgaagtcactccataaatgcaaaaggccattatgttttagcaaacttaagtcacctgggatacyatctctaagactctgatcctgattcactgggtctagaatgggacacaggaatggaatttgcattttcattaagtatcctcagtgagttgggtatgtggattgtattctaataaatactgctctaaatatatagattatgtaataatcctaggtattaattattaaatatttgagacttatttcatatcatttttccccaacagcatactggaaaattggaataaaaaacaactaagattcaggagagggtcatggaggaaagaaaatgagcaccatggaacagttgcctgagaagacaggctcaggttagtgtctctgcagggagcactaattgggtaggcagaaatcagaataggtgtgttaggggcatgtggtaggcaacagggtcaggactagggtaaggtgaatgaggtatctgatgggattcactctcagggctgtgctagaaaaagtgttaccttcaatt

SEQ ID NO: 428093 - DNA, 584 bp, Homo sapiens
gctttcagtcctacggtgcgactcaaaaaattaccataaatcttagttttgtccctgtgaagccatctattcattccctgggggatctctcttcttgccatgtcttcctttcgttttctggaaatccttcccagacaaacccctctctagtctgttacattggagccttgcctctcagtgtttgtacctgtggggtcatgtccsctggaatctggattggccaaccagtttaagccccagaagtgttactgtgccagttctgtccctaaatcttaaaaaggcctgtcagcttctgcttttgtgcatctgggaaccctaaaccattatgtaaaaagtctggctgtcctgttggaaagacacgtggagaggccccataatgagggggaggccctgagatcccagatatgcaagcatccctcctaacccagtggctaaatgtagccacaccaatggcctctgacaagagcagcagggctgctacccaggtgaacccagtccagctacagaatcctgaacaacaacaacaacaacaacaaacagttattgtgtcttaagccacaaagtttgcaatagtttgatatgta

SEQ ID NO: 428094 - DNA, 584 bp, Homo sapiens
gctttcagtcctacggtgcgactcaaaaaattaccataaatcttagttttgtccctgtgaagccatctattcattccctgggggatctctcttcttgccatgtcttcctttcgttttctggaaatccttcccagacaaacccctctctagtctgttacattggagccttgcctctcagtgtttgtacctgtggggtcatgtccgctggaatctggattggccaaccagtttaagccccagaagtgttactgtgccagttctgtccctaaatcttaaaaaggcctgtcagcttctgcttttgtgcatctgggaaccctaaaccattatgtaaaaagtytggctgtcctgttggaaagacacgtggagaggccccataatgagggggaggccctgagatcccagatatgcaagcatccctcctaacccagtggctaaatgtagccacaccaatggcctctgacaagagcagcagggctgctacccaggtgaacccagtccagctacagaatcctgaacaacaacaacaacaacaacaaacagttattgtgtcttaagccacaaagtttgcaatagtttgatatgta

SEQ ID NO: 428095 - DNA, 638 bp, Homo sapiens
aatatagaaatgggttagaggagtaaaacaagaagggttaggttatccaaggactggcaattgcactaaactgtgattgcacatagagctggaggacaatagggaaaatgattttacccacagcccatggacactgtgccatagaggctgcttcctttggagaactgctgcctgagcagcgcctcaggaacctgtgctcaccaggcacccttgcttctatgttcttgcccaaactgctaatcttgctgttgctgtcaccactgttgctgtccatgtggctgctgctgctggcactgccacaggtgcaagcagaaagtatttttaaaaaatggcttcttccctccagccttcattcatgtcctgccctccattggatgccagctagcaagggattttgggaaatgtattttgcagtcttcctactactctgataaacagaagggtatagaagaatcaacatgaggccgacagatggtggacactctctaacacaaacacaaatctaagaggtacctttgggacctatgaagtcaggcaggaggmtgaaggacttagacatacagtcaatgtttacctaacatcactgaaagttgtcaatttataagaaaagaggaaataagataaaactagctatgtag

SEQ ID NO: 428096 - DNA, 548 bp, Homo sapiens
gcgtatggcatatgcttcattatactggttagtgatgtctgttacaaacaaggttcccaaatgccatgccagcttgcatagttctgagaaagaggtccaaatatattccattgcatttcccaattaaaattgttcattttggagtgaagttgtaagaatgattgtccaggcagcccactcttttatttatagtcctttcaaattaaatctgaaggcatttcactgatgatttgattctgattttttttttatgtttctcacattcaataaatgtcaaattgctggacarccccgactctatcttacttaactttaattctccagattctagcatatgcctggcacatagtaggtgcttaattcattttttgtcaattaaagggagtatgggtgatacttttacaattgaattatgaccatcctgaggggacttttcccatatgatccactgctttatagtctgccatataaccaatcagaccccaaaccttcaacaaaaagcagaactatagacaaagccacccatcggggcatgagtggtgttggga

SEQ ID NO: 428097 - DNA, 646 bp, Homo sapiens
atgaattaatgaatataaaattattattaattgtttttcctggctcccttttcattggacaacaattatacattgctgtattttgataagcattttatgtttaacactttgtgaaccaggctttaagaggaacagaggcatgaaattattacacagaagaataattctttgaatgtattaacatttggaaaatacatgataatcttttaatctccctagtttatagcagttttccacaactgccttaaaacttctctagaattctgcccccacttccatgttccatacrtcttttttctagaaacagttgctatatgcaattaaatggtttagaagttcaatttcccaatgttaattatactagttcctcacatgattattacatgttcaatttcttcagaaaagtttcttaaaaataaaatctatagcttgagcagttaaaaataaattagtgctgcagagaatataatagattgtgatcactataattgacaaaattgatgttagtgaattatatttacaaacacttcacataaagattctatgtaactgatagttcattttatttttataagccttttgtaaacatactgctatgtaatatgagtatatataacatactaaagaacatatctttttagtccat

SEQ ID NO: 428098 - DNA, 638 bp, Homo sapiens
tgtctaaaccagttcatgtggctctgtattgctatggctatagaacaatcagtatttttctaagagtgtgaacatgtttgtttttattctcggtaatattttattgaaattacattgaaaatagaaataagtgatctaaaatgtaataaatgaaaatatttctatttaccaaaagcaatgatcaggagaatattcttgtttaaatttttctgcatagtaattttcaataaaaaactatagactaagttttgtttaattgaatatatttcataaataaaaaactttgttctcataactaattatacaacctggagattatatttttatatagmattctgtacattatgccctaaaattggaatgttttgctcaaaatgagttactatatttctgattgctatgtgtcactttttgaaagtaataggaatagaagcaatcaattgacaaagtattgcattctttgactggatttgatcatttgtatcaaccgtagaatgttgcactagaaagaaaccatatatttggcccatagtttctccaactgactgtacattagattaatcaaggagctttttaaaaataccaatgcccaataatcacctctaagattcatgatttaactggggctggtcccgatc

SEQ ID NO: 428099 - DNA, 578 bp, Homo sapiens
actgtgaacaaaaaccaaatgctaggtttggaatgtgggacaacaaattctttgatggattttgctcctcatgtagactttgaggatgataattttaaaaaataaaccattattttggagtaattttaaatgtacagaaaaattccaaagatgacacagaragtccctgtacaccttcacccagattcccttaaggttaatatgtaattataacagagctgtcaaacctacagaattaatatttgtaccatactatgaactaaactacagattcatgtctcactggtttttacattggtgacttttttctgcttcagaatccaatccaggatatcatatctacatatccatcatgtctctttggtctcctagggtctgtgatagtctggaagtctttgtttttcatgggatagtgatagattttacaacaaaaaatgtatcttcattgacaataagttgtaagactaattttttgttatttagaaccataggaatagagttggagagacaacactttggcaaccaacaaaacagcccatagtgccttttaaaatgctactgggccccctatccagata

SEQ ID NO: 428100 - DNA, 519 bp, Homo sapiens
acagttttgtttcttaattaagcaatgactctacaaatacaaacccaaacattgtattgaatcttatagaattccaaatggatttacacttgagaaaatgttccctacagtgtaaattcaccttgaaaatttacctaaaaccctcatacactgcgtgtgagaatataaaatgatatggctgctttgaaaacagtctagcagttcctcaaatggttaaacatagaattactctacaatccagcaatttcactcctggtatacacctaagagaaataaaaacacattttcacacaaaaactcatatatgaatgttcatagcaacattaatcaaaatagtgaattaaaacccaatagtgaaacaatccaaatgtcatcaggtgatgaatagataaacaaaattgtctggccaccttataattatatgatttgaaaagtatkacagttcttaaaatctgtgaaatggccctatgaaattaatttcactcatagtcacaaaccatttagtttagggaaagactc

SEQ ID NO: 428101 - DNA, 545 bp, Homo sapiens
tgtgtcatgaagtactgtgttttcacaaggattatctcattcagatctcacaaaagtcctgcagaacagcatctggagctcagacaggcaaagtaaattttccaaggccaattaattaatttttggaagagtcaagatttgagatgatgccatctgcccacctgaaatcaattcttagatgtttacccagagaccttatttaggctttggggatcacagaaacaagggaaatcaacacaaaatttgaataaataattcattatgtgggggaagaaatggagtaatttgattcttatatcttgggctgcattaatgatttgacaccctttcatgagatacaagatcctctggtatgttatttatatattaggtataacattgatagttctkttttttttcttttgtcatgagttaggaaacgtctttgttaatagggtaggagcactgtttagaagtcaaaacaatgagacccagttttttccttacttctgtgaccaagttagtcaaccattctaaactttattttgcttattagtctgtttcca

SEQ ID NO: 428102 - DNA, 545 bp, Homo sapiens
tgtgtcatgaagtactgtgttttcacaaggattatctcattcagatctcacaaaagtcctgcagaacagcatctggagctcagacaggcaaagtaaattttccaaggccaattaattaatttttggaagagtcaagatttgagatgatgccatctgcccacctgaaatcaattcttagatgtttacccagagaccttatttaggctttggggatcacagaaacaagggaaatcaacacaaaatttgaataaataattcattatgtgggggaagaaatggagtaatttgattcttatatcttgggctgcattaatgatttgacaccctttcatgagatacaagatcctctggtatgttatttatatattaggtataacattgatagttctgttttttttcttttgtcatgagttaggaaacgtctttgttaatagggtaggagcactgttyagaagtcaaaacaatgagacccagttttttccttacttctgtgaccaagttagtcaaccattctaaactttattttgcttattagtctgtttcca

SEQ ID NO: 428103 - DNA, 575 bp, Homo sapiens
ttctcaccatacagttcatttaaattgtttttatagagtatcaaacacatttacaaaattaagagtcttcatataaaaaatttactatggtattccttttacgccaggaactaaatcttaggcattaggcgttagttcaaaaggaatatctgtctttctgaaaggaatagagaatacagtgaaagaagtggtataattcctcaacttattaacatagcaaaatgggcccaactctttagagttttacatatttttataattcttttcagtgagggagtcttaaagatttagtattaaagaaattaacaggtccacagagcagttaggcaattkgggtattttaaaaataagatgcgaccaagaatttcagtggctcccattcactatagtttattgagattatgtcatgagcaaaagatagtcattggctcaagcaaggagaccagtcataagaaatctgattcttttcatcttgtttcactcataggggctcagaatgtcacagctggaaggctagactttctctaagtggactatcataaggcattgatgagtttgagatttatccttaatat

SEQ ID NO: 428104 - DNA, 378 bp, Homo sapiens
tcaccctgttgttgtgctatcaaatactgggtcttattcttttttttttttttttttactattttttttatacccattacccattcccatccccctcttccccacttacccttcccaggctttggttgccatccttctactctctatctctacaagttcaattgttttgatttttagatcccacaaagaagtgagaagatgygatgtttgtctttctgtgtctggcttctttcgcttaacgtaatgatctccagttccatccatgttgttgcaaatgacagcatctcattttttaatggctgagtattatataagtactacattttctttatccattcaagggtttatcctacctcttcggtgcttctttcagtgata

SEQ ID NO: 428105 - DNA, 607 bp, Homo sapiens
tatgttaccttggaaaagctgctgtatctccttaaacctctgttttctcatctttatttttttaaattaattattattattattattgagatagagtctcactctgtcacccaggctggagtgcagtagcgttatctttgctcactgcaacctccgcctcccggattcaagcgattctcctgcctcagcctcccaagtagctgggattataggcatgtgccaccacgcccagctgatttttatatttttagtagagatggggtttcaccatgttggctaggctggtctgaaactcctgacttcgtgatccgcctgcctcagcttcccaaagtgctgcgattatagccatgagccaccgtgcccagccagctttctcatctttaaaatgggaaaaatagtagtagttatygcctagggttattttgaggaaaataaaaaacagtttatttaaacagtatacagcttgatacactgtatgcccttaataaatgctgcttaaagaataatactaatgtaactacaactgaattgctgtctttaaaagggggcagatggggaatcacagatcaaataaaaaatatagtgggttccttcatagtggaaccca

SEQ ID NO: 428106 - DNA, 553 bp, Homo sapiens
gtgaaggtattgctgagcttctcctttgtatcattactttttgaaaaaaacgttgaagcgaattagcaatttgtggtaacactgtttaagttcatggcaagtttctggtmttcaacaaaatatccccctagatttagtatccattgatgattcttgctttatccagtctttaccatgatgttgcaaaatggtgattttccagcttcagcatcacctccgcatttaccagccagcactcagcattctacattaagcaagagaccttccttttcctcacctatttatttattaattattggtatcactagttcgtattttttcaatggtttataatgcattacttaatattttggtgttcaaattgtccctgacctggtcattaggggtttcttcaagttgattccttggctttgttgcaagccccacactttttttaaagcatttccgcacttttagacatagtatgttccagactcatcttgcatcatctggctctagaatctatctcactgtgggtaattagtgaataccacattgtatctttgaattccca

SEQ ID NO: 428107 - DNA, 642 bp, Homo sapiens
cttgtctaactcatttttctgtccccagcaccaggctcagtgccaggcagactgtaagcattccatgcgtaattattgattgaataaatgaattcactgatggcctgattctaccgattgcttatgatacaacactggaatcacaaaactccctgtgcctcattttctccatctgtaaaacaaatatgttggaagagatgaactcttgggttcttaggggcactttatgtcatgcatttgttatgacagatcctgtgactatgtcactgtcattgaaaagtgaatctcagtcatgaaacagtcacttacaggttctcagagtcattgatgtgctttctctatttcccatttttcttttaggtccttactggaaggcagcatgtccaatgttaccttgagaaaaatgtctcccacaggaaatggtaatgtacatgatgtttctctcactcagaaaactttaaaattttggaaaaacaactcacagatctcaattctttaatacagatattgaatgcttagaaacaacagtctaatttaattagcattgcaaagttaggcttaagaaaaagtatacttgycgcagcttttagtcatgtaattggaattcaatttttttaaaattaataaaaatatctttttaaa

SEQ ID NO: 428108 - DNA, 559 bp, Homo sapiens
aacacaggggttagtaaagaaaggcaagtcctgttagcaggagctgaacttctgtaatacagaccactccaaaatgtaagacatgaaataattttaggaggaagatgatcaaatatatctggtatgtgtgcatttgcattttaataatgatgcacttgttttaatgaatatgagaaaagtactgagtttacgtttgaaaagttccctttaaaatatacttatgtgtgtaaaatgtgaggtgtgcaaaagaracataaataaatgtgtatgtagcatccagagacagtgggttataactaatttggaaaacctaggttaggaggccctctagtgctccattgtgaaagtataacttctccttcggcttttctgatcatgctgctaattacattgtttggtatttcaagtctccaagacagatttttattaaaacaacctattttatatcacaagttgacagaaatttaatttccaggataaatacaaaattaatctcccacagcaataagaaatcaacatacatattggaatggtggtttagagttctctccattaccat

SEQ ID NO: 428109 - DNA, 559 bp, Homo sapiens
aacacaggggttagtaaagaaaggcaagtcctgttagcaggagctgaacttctgtaatacagaccactccaaaatgtaagacatgaaataattttaggaggaagatgatcaaatatatctggtatgtgtgcatttgcattttaataatgatgcacttgttttaatgaatatgagaaaagtactgagtttacgtttgaaaagttccctttaaaatatacttatgtgtgtaaaatgtgaggtgtgcaaaagagacataaataaatgtgtatgtagcatccagagacagtgggttataactaatttggaaaacctaggttaggaggccctctagtgctccattgtgaaagtataacttctccttcggcttttctgatcatgytgctaattacattgtttggtatttcaagtctccaagacagatttttattaaaacaacctattttatatcacaagttgacagaaatttaatttccaggataaatacaaaattaatctcccacagcaataagaaatcaacatacatattggaatggtggtttagagttctctccattaccat

SEQ ID NO: 428110 - DNA, 605 bp, Homo sapiens
agcacagtaggaacaagaaatagaaatacttcctctaacaatgcagcaaaatcttctgggagagagaaccatacaagaccagcctattaaataacaataattatattaataccacccattactgagtaccttctacacactgcagtgtgtaaaatgcatctatatattatcttattcattcccataaccccatgaattagatgatataacttccattttccagataacaaaactgggactcagagaaattaaataatttccctcagttcacgtggctgagacaaacatttctgaatagaactacytggctcttagccaggtttttccgctatgccatgcaccttttcaacccaaaaggtagtggtgtgttctgagcaaaggcattcaggagaaaacaaacctgtcaggaggcagagtttccaacagcacactgtctttgaaactattaaaagaatagtcttaagtgctgctgggtgaaacaattaaaaggatagtcttaagtactgctgggtgaaacttgtcacacctgaacacagagatagcaatcctcattgctgggtcatctctcagtggcaggataatatacttgaaaggatgatcagttg

SEQ ID NO: 428111 - DNA, 567 bp, Homo sapiens
acttattatttgctctatggttggagaacagacaattcataaagaaacaatatcagacttttcaaactgcttcttgaaaattgcttttcaaaaagagatgtttcatttaaccagtgaaattagatgctgtggggtattgttatggaagccaagtaaatttacacaataaaataaatcttaaaaggacaattccacaggtaaaatggaggttgtcaagtactcagcattagtctctgaggcgccatcctctgaaagctgaaacaagrcaaagcatcttgagagttctgaagtgtgaagattgagacctactcaagcttctaactttctggactgtgtgaacaggtgaggagaggatgcagggacttgtgtggaatgttcaagaaactcagcagtaaagaactttatcaggcaaagaaaggcctgatggaaaagcatctccaagacatgaagaagcttgacaggaagttcacctggagagaaagtgagtcctcacgtagactctccctcactcctccatgaggtgagaaagtccagcaagggttacgccaaatcaggagtgagtgctga

SEQ ID NO: 428112 - DNA, 538 bp, Homo sapiens
catgcatgtttagaatgtttagtaaccagccaggtgcagtggctcatgcctagaattgaagcactttgggaggccgaggcgggtggatcacctgaggtcaggagttcaaggccagcctggccaacatggtgaaatcccatctcaactaaaaatacaaaaaaattagctgggcatggtcgtgggtgcctgtaatcccagctacttcaggaggctatggcaggaaaatggcttgaacccgggaggtggaggttgcagtgagccaagatcacgccattgcactccagcctgggcagcaagagaacagctctgtctcaaaaaaaaaaaaataaaaataaaaataaataaaagaatgtttagtaaccacggttctcaggaaccaaaagccaacatctcccccaacmccagttattgtaataaccagactcaaaccttctttcccttgtccagcagtgtaggtctgcatctgcccagtctacagtaacttcacttagagctgacagtgcccaaatgggcagaaagatggagctgggtgtagccc

SEQ ID NO: 428113 - DNA, 586 bp, Homo sapiens
ctaaggatggtgaaatgagaggatgaagactcaaaactcttgactacatcattaatcagctaaacccatgtgggcaaccacctatatccggacatgtttgttaaaagaaaacccttttattctctatgagtcatttttccctgttacttaataatagcaaacatttattaagttcttattatgtgtcaagcactgttccaagaactttatacctttatagttattgatccatttacttgtttatttttgaaacagagtcttgctctgtggcccaagctggagtgcagtggcaggatcttggctcaccgcaacctccacctccaaggtttaagtgattctcctgcctcagcctccctggtagctgggattacaggtgcctgccaccacagtaagctaatttttgtatttttagtagagacaggggtttgccatgttggccagactgatctcaaacttttgacctraagtgtgtgctccaaccacatcagcctcccaaagtgctgggattacaggcatgagccaccactcctggcctcttgatccatttcctcttaaacataactctatgagataagcactattcatt

SEQ ID NO: 428114 - DNA, 586 bp, Homo sapiens
ctaaggatggtgaaatgagaggatgaagactcaaaactcttgactacatcattaatcagctaaacccatgtgggcaaccacctatatccggacatgtttgttaaaagaaaacccttttattctctatgagtcatttttccctgttacttaataatagcaaacatttattaagttcttattatgtgtcaagcactgttccaagaactttatacctttatagttattgatccatttacttgtttatttttgaaacagagtcttgctctgtggcccaagctggagtgcagtggcaggatcttggctcaccgcaacctccacctccaaggtttaagtgattctcctgcctcagcctccctggtagctgggattacaggtgcctgccaccacagtaagctaatttttgtatttttagtagagacaggggtttgccatgttggccagactgatctcaaacttttgacctgaagtgtgtgctccaaccacatcagcctcccaaagtgctgggattayaggcatgagccaccactcctggcctcttgatccatttcctcttaaacataactctatgagataagcactattcatt

SEQ ID NO: 428115 - DNA, 613 bp, Homo sapiens
acgttgtactactgtctgtttttatgtctatacctccacagaagagaaagctccttgaaagtagaaccgatgtcttttcatctttgtagccccaatgcctaatgcggtatcttgcacagagaaaacccttaatgaatgtttgttgactgaatgcatgaacacatgcagcgatacagccattgccattggtctttaagagaaaggaccatggcactttgggaagccraggagggtgaattacctgacatcaggagttcgagaccagcctgaccagtatggtgaaaccccatctctactaaaaatacaaaaattagcctggtgtggtggcatgcacctgtagttccagctactcaggaggctgagacaggagaatcacttgaacccggaagcagaggttgcagtgagctgagatagtgccaccgcactccagcctaggcgacagagcaagactccgtcaaaaaaaaaaaaaaagaaaaaggaaaaaaagaaaaaggaccatgaattaagttatggcagcagtactacatattcaaaaaactaagtaaagaaaataaagacagattttttttaattactgcaatcagattcattggtcatgagaacctgacctata

SEQ ID NO: 428116 - DNA, 613 bp, Homo sapiens
acgttgtactactgtctgtttttatgtctatacctccacagaagagaaagctccttgaaagtagaaccgatgtcttttcatctttgtagccccaatgcctaatgcggtatcttgcacagagaaaacccttaatgaatgtttgttgactgaatgcatgaacacatgcagcgatacagccattgccattggtctttaagagaaaggaccatggcactttgggaagccgaggagggtgaattacctgacatcaggagttcgagaccagcctgaccagtatggtgaaaccccatctctactaaaaatacaaaaattagcctggtgtggtggcatgcacctgtagttccagctactcaggaggctgagacaggagaatcacttgaacccggaagcagaggttgcagtgagctgagatagtgccaccgcactccagcctaggygacagagcaagactccgtcaaaaaaaaaaaaaaagaaaaaggaaaaaaagaaaaaggaccatgaattaagttatggcagcagtactacatattcaaaaaactaagtaaagaaaataaagacagattttttttaattactgcaatcagattcattggtcatgagaacctgacctata

SEQ ID NO: 428117 - DNA, 570 bp, Homo sapiens
tgaaaggccttcctgatattgaaaaataaactgccatcattcagatataaatgaatcaaaggcatgttcttttccagtggctaatagtgtccattttttcagccgtctgcctcaccatcaccgtctgcaggtgaattggccagtgtttccgtgcagaatgttaaaacggcatctacatttctcactgctcctttgatgttatctccttcaactgcacaatgaaaacgcacagctactgaaatgccagagggaacacactctgattataaatgtgctggggtaaacaatgagagaaaacccacatccccatcatcgcgacgggctcctcacttagccaaatacaaccccacagttttctcccaccyctcttgggacgatgaacacacagtattgtgaccccagctaatttgtgttaaccatacagtctatgaccttgtaatagaatgggacaattcaatccattatcttaaccaacatttattgagcatgtactgtgtgcttagacctgtgtgaccaactaatcctggtttacctgggacgttcccattttagtgctgaaaactcgtcacc

SEQ ID NO: 428118 - DNA, 468 bp, Homo sapiens
gaccatcacctctcagctctggtgtcagcaaaagatgggctgcacctgctattgtttattccaataggctgtaataattaggtagagctcacggagcctggctcatataattgcctgtcagtaatagtcaatccaatggcatattttagaagttacatcaggaaaacagtctcaggatcaaacaggaatttatttgcatatgagatataktaaaaggcaggacagaagttatgctttatggcaaaagaaagagatatgagtccacggcttttaaaattttctatgaggccattttttagagcagtaaatacttaaagcttcatggaaaagaatttacaatgcactctgtgtgttttattattcattatttagtgagcattgtgaagtcgattttgttcaagatatggatgaagacatggagcttattcatgggacctctgatttaaaatgagtaaaccaattcataca

SEQ ID NO: 428119 - DNA, 554 bp, Homo sapiens
aatggggtacaatatacatttctgaccaaccatgttctttagggtcttggcttatcaactaaccatcttcacataaagtctcagcaattgcatgccccatagagggaagattaaaakagacaaacaattagtaagacaggaaactaaaagctgtccatggaagggaacaagaacagtaataaatgggtactccaaaagtcaagagttacacacaaatatcaaacctgtaatcacccaatgagttcttcctgcctgctctacagacagaatcaattcatttagagcatggcattgcaatagagaaagagtttaattgatgtaaggtcagccatgtggaagaactggagttatcactcaaatcagtctccacgaaggctcaggagttagggttttacacctgagaagaaccttctcatgacttttggtgcttcatgaagaagacaggagaccccaaaatgtggtcagaggcacctttttggtcttccttaaggagtgtcatagttgctaagagtcccctctagatctcttcgtgtggtatcaaaggtggcaaaaaa

SEQ ID NO: 428120 - DNA, 570 bp, Homo sapiens
tgctctaacacttttttcccctgtagaagccaacatggaatacaacatgaaaactgtctaaatgggaaccttctaatatagctcattgtatgccatgcatttccactccatttccactatgttggaactgacttctgctttcctacttagccattaggcgacttagttgcctctaggcaagtaacttctctgaaatgtttcattttycatgaagtttaaaaaaaaaaaggtgaaggactttagagagctttgaaccgaataaggtctatcagacatcttgaaaagctttttctccagacgacgcagaaacaggcacacggggttctgctttccccacctcccacccccaagcccaggtcccattcttctcactttcaatcctcatttgggctcctaaaggaatagcaaagagagttattttatcaataccagcgctcctctgtccccaaatccagctagggaaggtttcggaggcctcagctacttgagagagggtagagacgatccttcctcgcctatctacccagccacccaccccttcccagatgtagcgtccgggccccagaccaa

SEQ ID NO: 428121 - DNA, 570 bp, Homo sapiens
tgctctaacacttttttcccctgtagaagccaacatggaatacaacatgaaaactgtctaaatgggaaccttctaatatagctcattgtatgccatgcatttccactccatttccactatgttggaactgacttctgctttcctacttagccattaggcgacttagttgcctctaggcaagtaacttctctgaaatgtttcatttttcatgaagtttaaaaaaaaaaaggtgraggactttagagagctttgaaccgaataaggtctatcagacatcttgaaaagctttttctccagacgacgcagaaacaggcacacggggttctgctttccccacctcccacccccaagcccaggtcccattcttctcactttcaatcctcatttgggctcctaaaggaatagcaaagagagttattttatcaataccagcgctcctctgtccccaaatccagctagggaaggtttcggaggcctcagctacttgagagagggtagagacgatccttcctcgcctatctacccagccacccaccccttcccagatgtagcgtccgggccccagaccaa

SEQ ID NO: 428122 - DNA, 284 bp, Homo sapiens
aaatggaagaaaaatttagaaacattagtttggagacttatagccaggaaagaattcaggattcrggatttcctgcaaggaaaataataaaatccccaaaacaatggacagggttaggaatttataacaggtacatgaaagttttcttctgaaacatagtttttctctctttagttccctacttctaacaaagataaatcatagaaagaccaatctatttgtaaaattatgttttagtcttatacctggcctgattatttgcataaagtaagtaagaatagtga

SEQ ID NO: 428123 - DNA, 569 bp, Homo sapiens
agttggatgagggaccaagggcagggccatggtgaggaagcgaaaccaagaaggactgagtctgatgagggcaccattctttgatatccctaatttatcccaaacctctgttgtgggggtggctgctgggagaggagacaaagccagcagaacagtgggagtagtaggtgggagagaatcagagagaagttggataacagcagttgttcagtggaatttcacagtgcctttcaagaatgaaattcaatttatatttagaatttgacttgaatccagaagaaacagacaagctggctaatatcaagacactgtatgaaataatttgtgtcggttattgaaaggatttgtaatcaagtgtgaaagggatgtctggtcatgatcattcattcacatatttttggggcattgtgtcccacgaggtgtatagagatgaattaggtcctctctgtctccaagtagcttattgaaaaataattttgcataatggctaagaatgatatgttggactcaaattcttgggtccaaagtctggctctgttacttgyggtgtgaccttgagcaagttattg

SEQ ID NO: 428124 - DNA, 589 bp, Homo sapiens
atcaagacactgtatgaaataatttgtgtcggttattgaaaggatttgtaatcaagtgtgaaagggatgtctggtcatgatcattcattcacatatttttggggcattgtgtcccacgaggtgtatagagatgaattaggtcctctctgtctccaagtagcttattgaaaaataattttgcataatggctaagaatgatatgttggactcaaattcttgggtccaaagtctggctctgttacttgcggygtgaccttgagcaagttattgaatctctttgtgcttcagttccctcattgtcagcgtggggacagtagtgcctgtttcataggactgaataagataacagatgtaaagtgcttagggaagtgtctggcataaacaggactcaatgaatgtcagtttttaaaaaacattcagcccttctgccatgtggggacacaacaggaagacagccatctatgagccaggaagtgggccctcatagacactgaatctgttggtgctttgatcttggacttcctggcctgtggaactgtgagaagtaaatttctgtagttcataagccaaaaaattctttttcattgat

SEQ ID NO: 428125 - DNA, 514 bp, Homo sapiens
aagtgtaatcccccatgttggaggtagggcatggtgggaggtgattggatcatgggggtggatttctcatgaatggtttggcaccatccccttggtgctgttctcatgacagtgagtgagttcttgtgagatctggttgtttaaaagtgtgtggcatctcccctcacccccttgctcctcctctggccatgtgacgtagctgcccctcctttgccttccaccgtgaytgtaagtttcctgaggccttcctagaagcccagcagatgccagcaccatgcttcctgtacagcctgcagaactgtgagccaattaagcctcttttctttacaaattacccagtgtcaggtatttctttatagcaatcctaatatagtgttcaattctagtacacatacaaagagttgcaaacccatagcccattaagaacatatgtattaactagattgcacatttggggacagctcatttcatcttgagcctcacagtatccagtcacgatgttatcttctaaagt

SEQ ID NO: 428126 - DNA, 507 bp, Homo sapiens
gagcatccaaacatttgaaatgacaaacaacagtgcagggcctaaccttgtgcctgtgtattttggtattgctgaagctgtaatttcagggtagatacctagaagagtgatcgtaggttagaaaggtaagtgcatatgcagttgtgttaggtattgccaaatttccctttaaaaggattgtgccaatttgtattctcacaagagatgctagtacaagtgttgagactgatgtgtggctagatggctggagagctggctgacatctcaccccgcagcatcaatgttagaaccggtgcttacgcggcttgcagttactagagagagccactagatggcagatacagcccatcacagacaacagtgagcacacctttttccagattttgcttcaggggcctttgataacaattgtgtaagttgaagtaatrgaatgtttctaaatgactaatagcacaacaactagctgttttgtaggttgttttttgtttttttgagacagtctcgctc

SEQ ID NO: 428127 - DNA, 578 bp, Homo sapiens
agaagcccagaaagcagctgtcctcagctcactcctctcaccgcagatcacccattcaccaggtacttactgatggctaccatgggccagatgtgatcccaggatttgatcgtgagaggagcttgtgtcagagtgtgtgaaccagagcaactccatcttaaacaggagctgggtaaaatgaggctgaaacctactgggctgcattcccagatggtgaaggcattctaagtcacaggatgagataggaggtcagcacaaaatacaggtcataaagaccttgctgataaaacaggttgcagtaaaggagccagccaaaacccaccaaaaccaaaatagcaaaaagagtgacctctggtcatcctcactgctacactcccaccagcaccatgacagtttacaaatgccatggcaacgtcaggaagttaccctatagggtctaaaagggggaggcatgaataatccaccccttgtttagcatatcatcaagaaataaccatgaaaatgcacaaccagcagccctcgggsctgctctgtctatggagtagccattctttattcctttactttcctaataaatt

SEQ ID NO: 428128 - DNA, 493 bp, Homo sapiens
tgatggcattccttggcttgtggtccaatctctgcccccatattcacaccatatgaatagtgctttctccaatgtgtgtctatgtctctggctcttctttttattatgtggacacttgtcattagatttagggcccaccttggtaatccaggatgatcccttcatctcaagatccttaactaattataactgcaaagacctcatttccaaataaggtcacatcaacaggttcagatattaggatgyggacatatctttctgggggctaccacccaacccactataagaacgaaggtttagaatatttgaggctaggtgcggtggctcatgcctataatcccagcacattgggaggtgggaggatcacttcagacgaggagtttgagatcagcctgggcaacatagcaagaccccttctctactaatttaaaagaaaaaaaaagggggatacttgaaatacatgataaaacatgagaggggcattgtttcctca

SEQ ID NO: 428129 - DNA, 554 bp, Homo sapiens
ttctcaccatcttcaacagtaacatcttggccgaaataataacttgtaatgcatccaaatacaaaaaagtatcaaaacscaaagacgaaataaaggttattacacctgtcaatcatgttcaccaggaaatattttaagaatttcttacttttgtaatgccaacagtgcattatttgacaatcgaattgattgaatctttcttagatctttttctctctcattctctctctctaacttttgaggaattagaatggaaaaaaatgaggatcttaacattccaactgctttgaaattttatcactgaagtctttcattaatattctccttacaaacatattagacacaatagtctttttttttgaaggttttgagctcaaggaaatttcatggaaaataaaaaaaaacatgaaaccttatcacttcagtataatctcataacagtttagaaaaagaatcacattgggtctgattttccatttcaagtgatctgtatggaagggctgaatgaacatgggttggtgaagtgaggtggtaatttcaccccgaaggcaatg

SEQ ID NO: 428130 - DNA, 554 bp, Homo sapiens
ttctcaccatcttcaacagtaacatcttggccgaaataataacttgtaatgcatccaaatacaaaaaagtatcaaaacccaaagacgaaataaaggttattacacctgtcaatcatgttcaccaggaaatattttaagaatttcttacttttgtaatgccaacagtgcattatttgacaatcgaattgattgaatctttcttagatctttttctctctcattctctctctctaacttttgaggaattagaatggaaaaaaatgaggatcttaacattccaactgctttgaaattttatcactgaagtctttcrttaatattctccttacaaacatattagacacaatagtctttttttttgaaggttttgagctcaaggaaatttcatggaaaataaaaaaaaacatgaaaccttatcacttcagtataatctcataacagtttagaaaaagaatcacattgggtctgattttccatttcaagtgatctgtatggaagggctgaatgaacatgggttggtgaagtgaggtggtaatttcaccccgaaggcaatg

SEQ ID NO: 428131 - DNA, 543 bp, Homo sapiens
gtatagttaagaaatacagactttaagagtgatatcagcagggttgtggacaagtaagggagccttactccctcatggaaccaccaagtaaagagcaacawatggaccaacatagctttatgagaatgctagaaaccagttaaaaatctgcaggaagtcagcaaatgcctaatctagtaaaagctacattcaacctggtagagaattccatggcattgttgctcatcttggctctatctactgttgggtgcagagcagagtagttgggagaaagttacccaattcctggttcgtccctcagaatggaagaaaaatagtggaacttgtttacaacgttctgatgtttctggaagcagctcaagggactgggttcagtttcatttaacttggagtgttgatgagaataatggcatagtttgtatatcagtttagggactgctgaaagcagtagtgagagctgcaggggaactgggtaccctgggcaagagaatacaaacagaggaatataataggacataaggccctgagaagaagcaaatgtga

SEQ ID NO: 428132 - DNA, 557 bp, Homo sapiens
tcacctggaggatcttgttaaaacacagattacaagatcccattctcagagcctctgattctgtagtctggagtgggcctgggaatttccgtttttaaaaagttctgaggtgctgctgctgctcctcaaaccccactttcagaaacgctgacctacatgataaggtgatttctttccttttccatttgccaaataagtcataattgctttttattacatagtttctactttggggagagagacgtgtgatattttaactcaaaagaattctctgaagatttawatttctgacctagtgaagcctccaacacaacagacataacaaccatttcagatggttgagatttgaatatgattggaattaataataaatctttatggattaggaatggggcaattttatttgaatacagtgacatttatcctgagaaggtacttcacaagacttacaagaaatacagagattttgggaagattaaaactctatttttaactccatccttttagggcataaagcaaataattgagttacttacatgcattagctataataaagt

SEQ ID NO: 428133 - DNA, 613 bp, Homo sapiens
cacggctttctggttcaatttttacatcagttagcactcctgtagcaacttcaggatttggtaacttgggaaatagttaaattgctatctgtagccacacagtcttcaaaattaaactggtttgagacatcaatgacagcagcagttgagtgctagattggttcaaataccacatttagttgcagtcttcttacaggaggacctcaggggattccacaggaatcatgcctgtgttttgctaacatttcatgattacagataactttatagatcaccaagtctctgcaatcatgtcaatggcttactcatgttgcttttctccatttttctcttcatgctctacatttagaaagagttgttccaactgctttcagaagtgagctgtcactgtgccaactgtaccctgatccaatggctgcagaatggctgtgtagttcaatgggaaaaactcaacccctacatgatccaagtgtrggagtatgttgtgggcagaccaattgtctactggcaagagcatactgtgtattgctccttgcattcccttgtcaatctttatcagccattcagtaacacatctctcattattcaggcatgtgtattggcttggtaatca

SEQ ID NO: 428134 - DNA, 421 bp, Homo sapiens
tctctcttaaaattgctgtttccaaatgtcaactgaatttctagaattcatttaatgtcyctttgtctaggttatgggagcatttccaaggtgattctcaatgtacacttttagcctcacatgaatagaaaaaaatcttattatggtgttttagaacaccagccccttaattctcccctacactcagagctacaggatataataacccaaccccacagatacagaggggcctgcctggctttaaccccagaagacatcacgtcaggttcggcagagagcaatacagaagcacttctataaaggctcttttgcagctttcatggccagtcaagagatgataaaacagaatggggaggaagtggcacccaacagggtgcagctccttcatctgcatagaataagcagagcctatttctcattc

SEQ ID NO: 428135 - DNA, 612 bp, Homo sapiens
tagaacactgatttagatttttacattacccatccctcttgtttcttctgagcagcagtcagagatcactggttggtttgcaggaataagcacggttagcctaaattgcaaaaacaaacttaaaaacaactgatgagactagaatctaataagaagtgtaccatagttcttacaacataacttttttgtttgcagtttcccatttttactaaagacaaatcagcaagacaaatttgctttattatacttggcctgattatttgtataaagtacaacaaggaaaattattttttacataagctctttttaaattggctttgatggaactctattccatagaagaaatcttagataagacttttttaaagctgagcccagccatgggtttctaccctcaaatacctctgagttgggtaarttcctttttctgagatcccaagataacttggggctcctggacctgttagaaagtgacattctttacttaccacaggtcagaaaccttatacagggactgtataataggcaaggtatgaggccagttttccaaacagcttttattggctctacaagtcaagtttgactccttaaacgaatgcaaactattccagt

SEQ ID NO: 428136 - DNA, 558 bp, Homo sapiens
tcctcagcatcgtcccttccatgttcaccagaaagatgtcaccagacaccaccacttacctagttagcctttgggtccctttatggtagccagaaaaatgttacagggaaggggtcctaatccagaccccaagagagggttcttggacctcrcgcaagaaagaattcagagtgagtccacagtgcaaagcaaaagcaagtttattaagaaagtaaaggaataaagaatcgctactccattgacagagcagccgtgagggctgttggttgcccatttttgtggttatttcttgatgatatgctaacaaggcgtggattattcatgcctccccctttcaaaccatatagggtaacttcctgatgttgccatggtacttgtaaactgtcatggtgctggtgggagtgtagcagtgagtatgaccagaggtcactctcatcgccatcttggttttggtgggttttagccggcttctttactgcagtctgttttatcagcaaggtgtttatgacctgtatcttgtgttgaccttctatctcatcccatgacttagaatgcctt

SEQ ID NO: 428137 - DNA, 561 bp, Homo sapiens
taatataaaagatctcttgaaataggccaatgcctcagtagagaaaaaatggcaaaagataagaaaatacaattctcagaaaaggatatacaaatgaccttcaaaaatagctttaaaaggtaattattctcatagtaagagaaataaaacaaccctgaaataccatttttaactataatattgttaaaaatcaaactctgatagcattctctttggacagacattagaaaaacaggtagtcatttattttttatagaaatgtaatttggtaccatctctgtgaagcacgacttggcaatatgtatcaaaatgaccaatatgtatacccattgataaaacagttcctcttccaggaatttatcctacaagatrctttttttttaaaacttcacctttattttccacctttcattgtcattatattttgagtgttcactttataaactaattcagaactgaaggacattttcccttttatgataatctcttttaataagagaatttaattcacaaacactttttattattgcttacatatttggatccattctacgtaagttt

SEQ ID NO: 428138 - DNA, 436 bp, Homo sapiens
tttgtttggggtggggggtatttagcagtttctttttggcttcctgacttattatttttttgacttattcagtaaaaataaattttccctttgctaccatttcagactttctttatcctgcttatagatcaacaggtaatatactggctaagagcatagcctggaatcagactcaccaattgaccaacaaggcagtacctctatgactctgcaagaatctcagcattactgggcttgcagtgctcccagtgcagatacagcttagacaacaatacccaagtcctttygaatatctgaaaagccttccaaaacaggatagctataaataagcccagactgtgaagaccgcaatacctaacttttcaatgcccagacgtcaagcatcaagaccatccaggaaaacatgaactcaccaaaaaaaaaaaaaaaaaagtaa

SEQ ID NO: 428139 - DNA, 533 bp, Homo sapiens
gaaataaccaatatcagaaataaaaaaggaagtgtcacacaaatcctacagacattgaaaatatcatgatagggtattaagaacaacttatccctaaaactttgaattgttcatgaaatgatcaaggtggaaaatataacttaccaaaactgacacctgaaaaatagaaaataagttaaaatacaaacactaatacaacaaatgaagaaattaagtcagtarttaaaatcccccacacaacaatagctcaaggctcacatagcttcactggttagttgtaccaaacagctgaagaaaaaaataattgtcattttgtacaaatttttccagacaataaaactggagaatacacacttcaactcatttcataaagctagcataaccttgataccaatattcatggatattataagaaaggaaacttccaggacaatctcactcataaacatcaaggaaaatttattaaacaatataactaacaaatagaatccatcaatatataaaaaatgataatacctcatgacaaagttggt

SEQ ID NO: 428140 - DNA, 571 bp, Homo sapiens
acatgtttttagaattctattatcaaagctatgggttaatatccaacattgtgacgtgatcctgtgactttagtcaaatcagtcatggaaagttagaaatctcctcccttaaacattgatgcattcttagaattgcttcttgcctaaactatgtttttcaaaaatgtaaatctcagagagttgttcttccagtcacattgctggagtagagatttataatttttaaaatttttaaygagattattgacttgttaatttgtagattattgacttattaatttgtttcaagttcttttgtgttaactgtcttaaaaatggctaacagttatttagtgctttttataggctagattctggattaagctgttttcatgaatcatctcatttaatcctcacaaacccaggaggaagaaagtatccttcctctaatttaacagatgagaaaatgaatgcagagagataaagtaattttcaaactgtcaatcagttagtaaaagggaacttataggattattcaaatggaaagagagataaaaagtgataacttgtacagttttctccatccataaat

SEQ ID NO: 428141 - DNA, 580 bp, Homo sapiens
atcactatcacacgttgtctatgatagcaaattcttctttgttctycatgcagcaaaaattacatctgttgtctcatctcgatttgaaaaacctctcagcaattctaggaacaggtagccaccagtccaaaagaatgctggacaaaattgtagtagtagtttgtggttttcctttcttccttttgaaatatttctatctttataatctcttaacattatctgaggcctatctaaggcattttagtaagtagagcattttagtaggaaagagaaaaattcaacttcctaagcacctcctcccctcaatgctttgaagtctcagcacatatgctcatgggacaaatgacacttttgtaaaagaagaaacagaaaacctgccaattgactgaatattgggaataaacaagcagggatttccactttttaaagaattcttcactttgttaagaatttacatgatgactctttctgtggtactatagagcctcctccacagtgaaattgagaaggagattgggacttgatatgcaaactcaagtatataactggttcattagagagaaatgaatgataaatatca

SEQ ID NO: 428142 - DNA, 580 bp, Homo sapiens
atcactatcacacgttgtctatgatagcaaattcttctttgttctccatgcagcaaaaattacatctgttgtctcatctcgatttgaaaaacctctcagcaattctaggaacaggtagccaccagtcyaaaagaatgctggacaaaattgtagtagtagtttgtggttttcctttcttccttttgaaatatttctatctttataatctcttaacattatctgaggcctatctaaggcattttagtaagtagagcattttagtaggaaagagaaaaattcaacttcctaagcacctcctcccctcaatgctttgaagtctcagcacatatgctcatgggacaaatgacacttttgtaaaagaagaaacagaaaacctgccaattgactgaatattgggaataaacaagcagggatttccactttttaaagaattcttcactttgttaagaatttacatgatgactctttctgtggtactatagagcctcctccacagtgaaattgagaaggagattgggacttgatatgcaaactcaagtatataactggttcattagagagaaatgaatgataaatatca

SEQ ID NO: 428143 - DNA, 405 bp, Homo sapiens
taatttgattaaaatatgcagtttttggggaaacatggttttctgtcaaaaaggcaaattactatatatttaaataaagtcatttgtatttactatgacatccagcaagtcttataaaactatacaaattacagtayactgctatgctacccaatatgaaatataaaaaagatgattttgtaacaggtcatttaacttcaataggcatagatgttttattatatagttcaaagatacctaaaacagatgaggggaattttaagatgtcttagtgtttttttttccttgaaattttgcaacattaaaccatttacctacataaacaccacataaatattatttaatacaaagaagcagcatatcaaaccctatagaaatatctgagaaaatgtccatgacggaaga

SEQ ID NO: 428144 - DNA, 557 bp, Homo sapiens
aaatgcaaagtaagatggtaagtatttaacacatacaggggttgacatggaggcagaactaggagtgattagaggttcctctcatggattttacatgaatcaagacagctccaccttgataactgaaacaattcaggtgcctcgcacattttctgtcatccactagaaatggggttatgaatttaagtctttggaggctatggacccaattaataatgactaatttgccaaatttgctggaaccctcagaaataaattttggttttctgagcctgacttgtgtttcttacgtaagaagggaatgtattcactgttattgtgtttttttgttttttgttttgttttgttttggtttctttttgagacgaactcttgctctgttgcccaggctggagtgcagtggcgctatctcagctcactgcaacctacgcctcccaggtggaagcaattctcccacctcagccycccaagtagctgggattacaggctacgccaccatgcccggctaattttttgtatttttagtagagactgggtctcaccatgttggccaggct

SEQ ID NO: 428145 - DNA, 594 bp, Homo sapiens
tgtggctttgtggtatagtcttaagtcagatagtacagtacaatacgtcaagctttgttctttttgctcaacattactttgattattaggagtcttttctggtttcatataaattttaggatttatttctatttctgtgaaaaatgttattggaattgtgatagaaattgcattgactctgtaggtcactttggatagtatgaatgttttaacaatattcttcaattccatgaatgtgggatatcttttcatttatttatgtattcatcaatttatttcaccagtattttagagttttcagtatacatgtctgtcacctccttgggtaaatttatttctatgtattttattcttggtagctaccacaaataggatttttttctttttccttttttttggattgatcattcctaatgtatagaaatgctactgattctttgtatgttgatttttctattctgcaactttactgaatttattctaaytaattagtttttaagggaattcttagggttctctatatataagatcatctcactggcaaacagatccaatttaccttctttttttccaatttgaatgcttttatttctt

SEQ ID NO: 428146 - DNA, 594 bp, Homo sapiens
tgtggctttgtggtatagtcttaagtcagatagtacagtacaatacgtcaagctttgttctttttgctcaacattactttgattattaggagtcttttctggtttcatataaattttaggatttatttctatttctgtgaaaaatgttattggaattgtgatagaaattgcattgactctgtaggtcactttggatagtatgaatgttttaacaatattcttcaattccatgaatgtgggatatcttttcatttatttatgtattcatcaatttatttcaccagtattttagagttttcagtatacatgtctgtcacctccttgggtaaatttatttctatgtattttattcttggtagctaccacaaataggatttttttctttttccttttttttggattgatcattcctaatgtatagaaatgctactgattctttgtatgttgatttttctattctgcaactttactgaatttattctaattaattagtttttaagggaattcttagggttctctatatataagatcatctcactggcaaacrgatccaatttaccttctttttttccaatttgaatgcttttatttctt

SEQ ID NO: 428147 - DNA, 490 bp, Homo sapiens
atcagttgaataaagtccaccagtaagaatattacagtttttaaaaataggctgggtgtggtggctcacacctgtaatcccagcactttgggaggccagggcaggtggattgcttaarttcaggagttaaagaccagcctaggcaacacggagaaaccctgtctctaataaaaatacaaaaaattagccaggcatggtggcacatgcctgtagtcccagctacttgggggactgaggtgggaggttctcttgagtcggggaggtcaaggctgcagtgagtcctgaccatgccactgcactccagtctgggtgacagaatgagaccctgtcttaaaaaaaaaaaaaaaatgcagttttcatcttcacaaaaagttcatatttgtatttgctaagtttgctagaagcattaattatacttcatctactatttcatcctcaagatgaattactgatattttttctgtaagacaattctagtaaagcacctcac

SEQ ID NO: 428148 - DNA, 490 bp, Homo sapiens
atcagttgaataaagtccaccagtaagaatattacagtttttaaaaataggctgggtgtggtggctcacacctgtaatcccagcactttgggaggccagggcaggtggattgcttaagttcaggagttaaagaccagcctaggcaacacggagaaaccctgtctctaataaaaatacaaaaaattagccaggcatggtggcacatgcctgtagtcccagctacttgggggactgaggtgggaggttctcttgagtcggggaggtcaaggctgcagtgagtcctgaccatgccactgcactccagtytgggtgacagaatgagaccctgtcttaaaaaaaaaaaaaaaatgcagttttcatcttcacaaaaagttcatatttgtatttgctaagtttgctagaagcattaattatacttcatctactatttcatcctcaagatgaattactgatattttttctgtaagacaattctagtaaagcacctcac

SEQ ID NO: 428149 - DNA, 633 bp, Homo sapiens
attcccaagattatatgtcctttgtcttctgctacctgagtgggtagggaaggactgtcaggtgggggcggggctaggcgtgtctgagctcagactctccttgggtgggtcttgctgcggctgctgtsggggatggggtgagagtcccaggtcactggagctgtgcacctaggaggattatggctgcctctgctgagtcatgcaggttgtcaaggaagtgggggaaagccagcagtcacaggcctcacccacctcccatgcaaactgaagggctggtctcactcctaccatgccccccacaacagccccagatctgtttccaggtggaaggcgggcttgaaaacttgccagaggctttcacctcccagagtatttggggtgtctcccgggtcctgcagaagcagtccgcttccttcagagagtctgagggtcctctcaggattgctggtttgttcttgcagtcgatctggagctaaaattcacaatttaagcctccacatgctcctctgtcaggagctgcaatctagtcctgcctcccatctgccatgatccctctttatacacaatctacagattcaatgcaatctgtattaaagttctaatggctgtttttgcagaaataaaaaagttgat

SEQ ID NO: 428150 - DNA, 633 bp, Homo sapiens
attcccaagattatatgtcctttgtcttctgctacctgagtgggtagggaaggactgtcaggtgggggcggggctaggcgtgtctgagctcagactctccttgggtgggtcttgctgcggctgctgtgggggatggggtgagagtcccaggtcactggagctgtgcacctaggaggattatggctgcctctgctgagtcatgcaggttgtcaaggaagtgggggaaagccagcagtcacaggcctcacccacctcccaygcaaactgaagggctggtctcactcctaccatgccccccacaacagccccagatctgtttccaggtggaaggcgggcttgaaaacttgccagaggctttcacctcccagagtatttggggtgtctcccgggtcctgcagaagcagtccgcttccttcagagagtctgagggtcctctcaggattgctggtttgttcttgcagtcgatctggagctaaaattcacaatttaagcctccacatgctcctctgtcaggagctgcaatctagtcctgcctcccatctgccatgatccctctttatacacaatctacagattcaatgcaatctgtattaaagttctaatggctgtttttgcagaaataaaaaagttgat

SEQ ID NO: 428151 - DNA, 633 bp, Homo sapiens
attcccaagattatatgtcctttgtcttctgctacctgagtgggtagggaaggactgtcaggtgggggcggggctaggcgtgtctgagctcagactctccttgggtgggtcttgctgcggctgctgtgggggatggggtgagagtcccaggtcactggagctgtgcacctaggaggattatggctgcctctgctgagtcatgcaggttgtcaaggaagtgggggaaagccagcagtcacaggcctcacccacctcccatgcaaactgaagggctggtctcactcctaccatgccccccacaacagccccagatctgtttccaggtggaaggcgggcttgaaaacttgccmgaggctttcacctcccagagtatttggggtgtctcccgggtcctgcagaagcagtccgcttccttcagagagtctgagggtcctctcaggattgctggtttgttcttgcagtcgatctggagctaaaattcacaatttaagcctccacatgctcctctgtcaggagctgcaatctagtcctgcctcccatctgccatgatccctctttatacacaatctacagattcaatgcaatctgtattaaagttctaatggctgtttttgcagaaataaaaaagttgat

SEQ ID NO: 428152 - DNA, 585 bp, Homo sapiens
taggctctgtgagggtggtacccaccaagccaggcaccagagggaatctcctggtctgctagttgcgaagaccatgggaaaagcacagtatctgggccagattgtaccattcctcctgatacagtctctcacaagttcccttgactagggaagggaaatcccccaacaccttgagcttcccgggtgaggccacagcccaccctgcttcagcttgccctccrtgggctgcacccactgtcccaccagtcccagtgagatgaactgggtacctcagttggaaatgcagaaatcactcaccttctgcatcaatctcgctgggagctgcagaccagaactgttcctatttggccatcttgccagctctcctgatgtaccatatttattatttgcatgtgttgaaccatccttatattcctagtttaaatctcacttgctcaaggtgaatgaaccttttaatgtgctgttgaatatgatttgctagtattttgttaagaatgttcacattcatgttcatcggagatattgacctgtaattttattgtttgtagtatccttgtccagccttagtatcagggtgatgctagc

SEQ ID NO: 428153 - DNA, 585 bp, Homo sapiens
taggctctgtgagggtggtacccaccaagccaggcaccagagggaatctcctggtctgctagttgcgaagaccatgggaaaagcacagtatctgggccagattgtaccattcctcctgatacagtctctcacaagttcccttgactagggaagggaaatcccccaacaccttgagcttcccgggtgaggccacagcccaccctgcttcagcttgccctccatgggctgcacccactgtcccaccagtcccagtgagatgaactgggtacctcagttggaaatgcagaaatcactcaccttctgcatcaatctcgctgggagctgcagaccagaactgttcctatttggccatcttgccagctctcctgatgtaccatatttatyatttgcatgtgttgaaccatccttatattcctagtttaaatctcacttgctcaaggtgaatgaaccttttaatgtgctgttgaatatgatttgctagtattttgttaagaatgttcacattcatgttcatcggagatattgacctgtaattttattgtttgtagtatccttgtccagccttagtatcagggtgatgctagc

SEQ ID NO: 428154 - DNA, 517 bp, Homo sapiens
ttgctaccagcactcatttaattttacataagtaccctctttgaggctgaagtaaatctgactaattttcaatgtgaaaatgaaatacaaaaacttttcttggagttatttctaaacagaactaacatcagaatcttctgaatcatcagaatcatctattttagaaaaatctgattcatcaaataaaaactgaaaatgacactaacatcatgtgtagtaatgctatgttttctaggattagacattttcagcaattgagcattaccatattttgtaaatggaaaatcactgctaaaataggatgatgtcttttgtttccaaagttgatatactacagtaatgcaaaaataacaaagcaagatatgtcatggcagttatttctggataaactctgcagctgcaagcaccgctggcaaattttcttgaggcagatggggaaaggattaagaaattagcttttatsttcattgatcttttctattgtttttctagtctctattttatttatttctgctct

SEQ ID NO: 428155 - DNA, 414 bp, Homo sapiens
tttaaccctctgttttatctgatatgtgtataactactgctctcttttggtttctatttgcatagaatatctttttctatccctttgcttcagtctatgtgtgcatttaaggttgaactgattctcttgtaagtagcatatagttgggtcctttttttaatctactaagtcaccctgtgtcttttgatttgatatgccaggtaattactggcaggtaaggacttactwttctcgtgttctttaaactggaagaaaagaatgctaattagtcactttaacatttcttaagactggtctggggtgatgaactccctcagcttttgtctgtctgagaaaggcttttatccttcatttctgaaggacagctttgctgggtgcagtattcttggttgacaggttttttttttctttttt

SEQ ID NO: 428156 - DNA, 560 bp, Homo sapiens
ctctggaaatgtgttcaattgcctttaatgctggaccctgatgaggaccaaggaagacaatcaaggatctcagtgtgtattaagtgtaccctctgtgtggaggagtgctgtgatgatctctctatgtcagagaccaaagggcaagctttcactggaggtcctttatgttatgctaataaatgagtgtagggagtgtttataagagaggagagggaacttgtcactgccatgaataaaactgataaacaccccaagctcatgtaccaccccactcccacaaaaacagtgtttggcctagtttttatttccattttaaccaaaagaaaaaccatcaaacatctctagtgaaaacttttaggctttttcctactggattccatcacttaaaagaatcacaaaattttttmcttaaaacattgttaggtatcttctagttcaacatctccctccactcccaatcttatttcatacctcatttacccatttgttggcataaatacccctattcaaaatttctatacatatacaaatgcatacatgaatatccaatgtgaaagtta

SEQ ID NO: 428157 - DNA, 541 bp, Homo sapiens
cagtctgtttttgtttttatgtggaacaactaagctaattaatcttagagaatcacatatgtatacaaaaagctcaggtctggggcagcaataaaaacttaagatttccagtttcttctgactagattccagttcttattcataacaataacaataattcaatagcccactggtgagagactgctatgaccctgagagaatagctttgaaataccaagaataatggcatttagatttctatagcatccaggccctcccagcaccccttgyggcaggatcttgcaatgttctacagaagtacaatgcattaaggctctcctcataaagtaggcagcattattattctcattcctcatgctgccaaaacaaagtggagagatgtgcttctgttgcctgcccaaggttaattccagtggcgaaactacaaattcaactcagttatttgccttcaactatgatcaagcagctttgtattttcaagaaaagctgatgtaacttacccaaaaccagagtaaattacatttcagaaggagaatgagca

SEQ ID NO: 428158 - DNA, 541 bp, Homo sapiens
cagtctgtttttgtttttatgtggaacaactaagctaattaatcttagagaatcacatatgtatacaaaaagctcaggtctggggcagcaataaaaacttaagatttccagtttcttctgactagattccagttcttattcataacaataacaataattcaatagcccactggtgagagactgctatgaccctgagagaatagctttgaaataccaagaataatggcatttagatttctatagcatccaggccctcccagcaccccttgcggcaggatcttgcaatgttctacagaagtacaatgcattaaggctctcctcataaagtaggcagcattattattctcattcctcatgctgccaaaacaaagtggagagatgtgcttctgttgcctgcccaaggttaattccagtggcgaaactacaaattcaactcagttatttgccytcaactatgatcaagcagctttgtattttcaagaaaagctgatgtaacttacccaaaaccagagtaaattacatttcagaaggagaatgagca

SEQ ID NO: 428159 - DNA, 479 bp, Homo sapiens
tcctgtttgctgcctcttgtcactcccttctctgctcattcatttctattgtgtgtttattagatttaggttgacttaatagaaatatgttattgattttattatacatagttaaaaattgtcaattcacttcttgtaagttctacatttactggtggcccaatacctctttttttttttttttttttttgkctttcatttgtttcttgctataaatttccacaaagcagttaaaatgtacctttaaagcaaaacatttccttgtgtatggaaataggataaaatgtttccagagcaatctaggatataatgtcttgaagtttagaaaactcactctattagtgttttttctccctctccaaagcagatatgctgttcaattctttcaaatgtgtgagcagttgtcttaaactataaaatgaaactaccaatctatctatgtataaaaatactcaagaatgtgactctttctaacctca

SEQ ID NO: 428160 - DNA, 209 bp, Homo sapiens
agttattctaagggccaggttaaagaatscttttaagtcagcacttttctgtttttttgtcttcaacaaaattaaagggaggtataacagtggtcaatagctagatttttaaatataatttttgataacatatcactatgaatttgaaagtatgacttggaagaatttctaagaattgagtgatgttataaaaaattatattctttatt

SEQ ID NO: 428161 - DNA, 209 bp, Homo sapiens
agttattctaagggccaggttaaagaatgcttttaagtcagcacttttctgtttttttgtcttcaacaaaattaaagggaggtataacagtggtcaatagctagatttttaaatataatttttgataacatatcactatgaatttgaragtatgacttggaagaatttctaagaattgagtgatgttataaaaaattatattctttatt

SEQ ID NO: 428162 - DNA, 209 bp, Homo sapiens
agttattctaagggccaggttaaagaatgcttttaagtcagcacttttctgtttttttgtcttcaacaaaattaaagggaggtataacagtggtcaatagctagatttttaaatataatttttgataacatatcactatgaatttgaawgtatgacttggaagaatttctaagaattgagtgatgttataaaaaattatattctttatt

SEQ ID NO: 428163 - DNA, 209 bp, Homo sapiens
agttattctaagggccaggttaaagaatgcttttaagtcagcacttttctgtttttttgtcttcaacaaaattaaagggaggtataacagtggtcaatagctagatttttaaatataatttttgataacatatcactatgaatttgaaagtatgacttggawgaatttctaagaattgagtgatgttataaaaaattatattctttatt

SEQ ID NO: 428164 - DNA, 572 bp, Homo sapiens
gccatctagtgttagctccataaacaagtttcctctaaatgaaagcatagttggtataaggggactttcatctcaggagagaggattgcttaaacctgggaggtcaagtttgccgtgagccatgatcccaccactgcattccagcctgagcaaccctatctcaaaaaaaaaaaaaaaaaaaggcattgataagtcttgataaagccttcttgatgtatttcccagtaagtgagaaagttattctaagggccaggttaaagaatgcttttaagtcagcacttttctgtttttttgtcttcaacaaaattaaagggaggtataacagtggtcaatagctagatttttaaatataatttttgataacatatcactatgaatttgaaagtatgacttggaagaatttctaagaattgagtgatgttataaaaaattatattctttatttactatgtaaataaatatttctyatttactatataaaaaagaatatagttaatgctgaatcctgtctcattctatcagtaagtcctatttatccatggatacattatttaagtagacaaaaagaaaac

SEQ ID NO: 428165 - DNA, 589 bp, Homo sapiens
tgtgctttttgctaaaactttgtttggtgggttcccctagctcccacagtctaccacattatagtggatataagaggattactccaggtaagggatattcagaatgaatgcccctgaaatagggagaatccatgtagtagtataacatttgttggaagggttgattatcaaacaacacaagtgtttccatgtgatagacagaattctgacagttgtagatgtaatagcagctaatagaatcatcttgaagtagatgtaatcattatcccctcatcatatgaagcaaatgaagcattgaaaattaaagagcttgcccaagttttgattrtaagtgatgcctccaatctggggcccagaatccattccacctcttgtttgtaggtcttaaaaacaatgaatttgagattcctaataagcaagtaaccattcatgcactctacccatgtttactgaatgcccaagaatgtcatgcacgatgctaagaactagagacaatgctaattattagggattcaaatatgaaagtgatatagtttctgtcctcaaggactttatagtgtaatgaagggaaacataagtaaatgggtac

SEQ ID NO: 428166 - DNA, 496 bp, Homo sapiens
tagcattgtggggaatggaagggcattccaggcagagagggtaatatgaggaaagagggagcgtgtagttgaatgtgcagggaaagtttgtgcagaatggctaaatcactggattggattatagagtagggagctgaatggcaatagatggaactggagaggtagacagaaccaggtcatggagggcctcatgcacaaaataataggtggttggacttcctcatataggtaatggagagccatgttcaagacacacacccaagggaaaagtatttggattagattttgaagaaggatatgggatggggttcagggtgggcaaatggagactaggctagttagttgagaccacttygcttagaatgatgagagggcaatctaatgtagtacaaggaaggaagggaggagaggaaactgtttagaacagggtttctgcacatttcgggccacatatttcttagtggtgaagggctgtcctgtgcactgtaggggcact

SEQ ID NO: 428167 - DNA, 624 bp, Homo sapiens
gaatatctgccagtattctctgcaatacaggacccatacttacccgatttctacagggagctctggactgccttcctgattccagcctctgtcaaccttttctctccctccctttgccaacattaaaaaagaagttaacaaatggatctaattaccacagtggtttgaggcttctcaacgtttttttttttttcccttccagctgtaaagatgtcctcagactgagcttcacattcagaactgctgtcaaactctcactttaatgggcacttaaatttaatgtcaagctgatgcctatggaagaccttgattaaatttgcaaagagtagactctaactgaaacagaactttagagttgtctcatttcgcctttcaagcttaaatcccaraagttttcttctcttctttgtaaagaattacagaagtttgcttgcaaagaccctgagtatcaataagacagcaaagtgtaacaagcaaaacacccggcatgtttttagagagagaagaaatcccttagcttattaaaattctatgtgaattaaagatctttcccattgctttattccattcccagctcatttgaaatctatagctattcacttttatgactctataatattataa

SEQ ID NO: 428168 - DNA, 592 bp, Homo sapiens
actattcattgctgaagttaattaatttaccaaatctatttggtaattcacagcaactacagaagtaataaggtatggaagttagagggtaaaataaacactttattttatatgtacaatcttcttgcttggtaattgtctattcttcatgaacctgtccccagagtaatggcagcagataagacgtgccattattttacataataaaatatccctattattccttaataaatataaytggctatactttattttaattcccaagtcacagttcactcaggagagtctggtgcctgatgtagaataaccacaaataggtcaactcttaaaaaaagttaaagaaaagtttaaaatcttcattagtgatcagcagtgtgttggatactccaaattaccactttaaaactgaagtaatatccaatctgttacgacataagactctcccaattatacgcagacactgtcatgtacactttgatatttattaacaaaaatggtccagaaaaggattgagtcaaaattacaaaatgattaagagttaaaacaaaagttgttctttattgtagtttctgggggactttaaccagtcccc

SEQ ID NO: 428169 - DNA, 263 bp, Homo sapiens
ccccttcccacatgtgctccatcccagggagatggggattttatctrtaagcccctgactggggctgctgcctttttttcagagataattaatctttttttattaaccactaaaacagtgccaagggccttgaagtgaggatttgtgccatggctctgtgatgctgtttctcctttttcttgatctgcaattgtccttaactcattttgtgaagctctttgtgatctactaagttgcttgatagcaaaatgaaatgatgaagt

SEQ ID NO: 428170 - DNA, 477 bp, Homo sapiens
gtgctgctgcaaatggtatcaattaactggtttattttcaaaacttccatttaagtaagtttgatcacagaggcctcgggaaaataaacataggattttatttgggggaggggtaggatggcagaaacctgacaataaaaatagattctatttttaaattaaattagaaaaaatataaatgaaggaggatattcacatctaaaagtccacagtgagagatctagtgamtacaaacagcctttttattttgttgatttaagtgtggtttaagttgactatttttatatgtgaggggatttagatatatgtctttccaaaatcttcattaatctaaaacaagttttaaaaattggcaatagtggcaatacttgagggaataatcaataggagagatattacaaaagcagatttgagaaataaaaaccactccttactttttggtgattatgccacaaactcaatgtttaaatctaattt

SEQ ID NO: 428171 - DNA, 500 bp, Homo sapiens
gaaagcaatattgttttacctatgggatatttgggttttaatcaagaggttttgcaatgacagcttataatgaggcagctggtattaccaaaaaagccatatggaactatcatagtgctgctgcaaatggtatcaattaactggtttattttcaaaacttccatttaagtaagtttgatcacagaggcctcgggaaaataaacataggattttatttgggggaggggtaggatggcagaaacctgacaataaaaatagattctatttttaaattaaattagaaaaaatataaatgaaggaggatattcacatctaaaagtccacagtgagagatctagtgaatacaaacagcctttttattttgttgatttaagtgtggtttaagttgactatttttatatrtgaggggatttagatatatgtctttccaaaatcttcattaatctaaaacaagttttaaaaattggcaatagtggcaatacttgagggaataatcaata

SEQ ID NO: 428172 - DNA, 504 bp, Homo sapiens
ttggggaccgctgcattaagggttccatagatattggctggtattactattattattttaattattattggtaatattataaaatatctttttcctatgagatattttatcaagttagaaattctgcaattatataaccataatagaaaaactactttgtaacaaccaaataaaaaacataaaaataattgtaaaactttagcatggtagctgatgatgatttcaacaaacgcaacttcctttttgggagggtcatggatctttaataaataacatggactatggaaaaatacacatrtgtacttagagacaaaatgtttcaagaagtacaaggatctccaaagtccgttcttggatgtctttcccaggttagaaatccaggctcaggatcagtggatgcaaactagggccagaggactgaattggacttggagatgtgttttgttggcctgcagagggcctcacaatttgtcaatgtgaatgcctctaatagggcaaacatgt

SEQ ID NO: 428173 - DNA, 460 bp, Homo sapiens
taggttttgccatgcagataagtatgagacttgggaagtggattacagtwacatcaggtggcagccacaagtacaaggatcagattttctgcatggaagatggcaaaagccttggttcttctaggcagctgtggcaaagattccagatctagtctagaggttggcaaatcaaggcctgtgggtcaaactgggtctactacctaattttatcaatagagttctattggatcaacagtcatacctgttcatttgcatattttctacagctgcttttgcactacaacagtagagttgagtagctgtgacgcagaccatatggaccatgaagcctacaatttttacactctggctctttacagaaaaactttattgacccttgggctcatccctagatatggagtggtgggtgacagctgtagtaaagattttctcatgaggtagcttctcctagttacaaaat

SEQ ID NO: 428174 - DNA, 460 bp, Homo sapiens
taggttttgccatgcagataagtatgagacttgggaagtggattacagtaasatcaggtggcagccacaagtacaaggatcagattttctgcatggaagatggcaaaagccttggttcttctaggcagctgtggcaaagattccagatctagtctagaggttggcaaatcaaggcctgtgggtcaaactgggtctactacctaattttatcaatagagttctattggatcaacagtcatacctgttcatttgcatattttctacagctgcttttgcactacaacagtagagttgagtagctgtgacgcagaccatatggaccatgaagcctacaatttttacactctggctctttacagaaaaactttattgacccttgggctcatccctagatatggagtggtgggtgacagctgtagtaaagattttctcatgaggtagcttctcctagttacaaaat

SEQ ID NO: 428175 - DNA, 405 bp, Homo sapiens
tccacatgcaatctaggttttgccatgcagataagtatgagacttgggaagtggattacagtaacatcaggtggcagccacaagtacaaggatcagattttctgcatggaagatggcaaragccttggttcttctaggcagctgtggcaaagattccagatctagtctagaggttggcaaatcaaggcctgtgggtcaaactgggtctactacctaattttatcaatagagttctattggatcaacagtcatacctgttcatttgcatattttctacagctgcttttgcactacaacagtagagttgagtagctgtgacgcagaccatatggaccatgaagcctacaatttttacactctggctctttacagaaaaactttattgacccttgggctcatccctag

SEQ ID NO: 428176 - DNA, 405 bp, Homo sapiens
tccacatgcaatctaggttttgccatgcagataagtatgagacttgggaagtggattacagtaacatcaggtggcagccacaagtacaaggatcagattttctgcatggaagatggcaaaagccttggttcttctaggcagctgtggcaaagattccagatctagtctagaggttggcaaatcaaggccygtgggtcaaactgggtctactacctaattttatcaatagagttctattggatcaacagtcatacctgttcatttgcatattttctacagctgcttttgcactacaacagtagagttgagtagctgtgacgcagaccatatggaccatgaagcctacaatttttacactctggctctttacagaaaaactttattgacccttgggctcatccctag

SEQ ID NO: 428177 - DNA, 460 bp, Homo sapiens
taggttttgccatgcagataagtatgagacttgggaagtggattacagtaacatcaggtggcagccacaagtacaaggatcagattttctgcatggaagatggcaaaagccttggttcttctaggcagctgtggcaaagattccagatctagtctagaggttggcaaatcaaggcctgtgggtcaaactgggtctactacctaattttatcaatagagttctattggatcaacagtcatacctgttcatttgcatattttctacagctgcttttgcactacaacagtagagttgagtagctgtgacgcagaccatatggaccatgaagcctacaatttttacactctggctctttacagaaaaactttattgacccttggkctcatccctagatatggagtggtgggtgacagctgtagtaaagattttctcatgaggtagcttctcctagttacaaaat

SEQ ID NO: 428178 - DNA, 551 bp, Homo sapiens
atctcaaagtatttttgacaggctacctggtaatgtgtcccctttactaaatccaaaatctaaaatgaatgaggaaaaagacaaataaaaattagaaattaagttttcttctaaaccactgtagctcacagctgttggccttttcataatcttcattccagacaggaaatgcaataaatcatgtagcatgttgtacttctgcagcctggacactgtgataattctgacattatacagtagtggtttaggtcagcattaaaccacagatgacaagagatagtgatctttctgacctaccaactgtacatttttgtaactttacctcaacagcaagatgaaaatggatcctggtatgatgactttgacagttattgtcagaacatcatattgcaacatctctccraaaactgtagatagaaatctagtaatctaatggttggtgcatgaagcaatcaagtatactgtttagatatttattttccacgttaatggtttatacagatacagcataaaatactgctgtgtgcccatcaggaaaatttaatgtaaac

SEQ ID NO: 428179 - DNA, 589 bp, Homo sapiens
ctcctcctctttctacagataggctcaggtcttaaacccagaaatgaacaatcctatgatgcttaagctaataccactctagcatcccctttactggcactttttttttttttttttcttgagacagggtctcaatccattgccaatgctggagtgcagtggcatgatcacggctccctggaggctcaacttcttgggctcaggtgattcttccacctctgcctcctgagtagctaaggctacagttgaatgycaccacacctgctaattttttgtagagacaggtttttgccatgttgctcaggctggtcttgaatgcctgggctcagcagtctgcctgcctcagcctccctactaagtgctagcattacaggtacaagccactgcacctggcctgacacattttttgaaaaggttatttactgtctttcattaattttttaagcaagtataatcttgcttttggtttccaccattttactgacacctcaccaaagtcaaagtcaaataatcctctcagcatatccaaccaccttttcttagttcctccatgaaaagaaatctctgctacaagggactctgtggaact

SEQ ID NO: 428180 - DNA, 602 bp, Homo sapiens
gttctaccactgacttcctacctatgcaccatggcatgtcacatcctaggactccaaaaaagagaatggctttctacctatgctacaattctaactgaaaagaccatcagatttctagtcttaaattatctaatgccctaaatccacattaataccatttaaatgcagacataatatgttaacatagatacgttaagaacttgtattgttttcaaaaaggggatcctttatgactgcttaaaaaaaaagccagtaattctttatttctagattccttatcaaatatgttagcagcagtttataaccactaaaattaagtcactcaaacygaaaccaactatacttcctttaagttacctattagtatttatgtattggtgccaccattatcctaagcttgaaatcttaacactcctatagtctttcatttgtgcattctctctccctaattcccaaccttcatgcaaggcctaattcaaagggcatctcttccataaagggttccttgacctcttcagctggttatagtctttccctcatcagaagacccaagacagtctatgtgtacctctcatgacacttggtttatgtttttattttca

SEQ ID NO: 428181 - DNA, 590 bp, Homo sapiens
catcactctacctaactccaaactatactataaggctattgtaaccaaaacagtatggtactggtacaaaaaccgacacatagactaatgaaacagaatagagaatcagaaataagmcagcatacctacaactatctgaccttcaacaaagtcaataaaaataggcaatggagaaaggactccctattcaataaatgtgttggaataaccagctagcagagacatgaaaattctaagaacaaaaaagaaatgctagcgatcaaaaacactgtaacagaaatgaagaatgtcttcaatgggttcatcaatagactggacatgactggggaaaatccttggatcttgtggatataacaaatagaaacttctgaaactaaaaagcaaagagaaaaaagacaaaaacaaaacaaaacaaaacacaatacctaagaactatgggacaactataaaaggtataacgtgtaaatgaaatcccaaaaggtgaaaaaagagagaaaagaacagaagcacagatggggagaaaacatttgcaaaagacaaatctgataaagtactgttatgcgaaatacacaatgaactcttgtaaacta

SEQ ID NO: 428182 - DNA, 336 bp, Homo sapiens
ggggagaaaacatttgcaaaagacaaatctgataaagtactgttatgcgaaatacacaatgaactcttgtaaactatgggctttggatgataagaatttgtcaatgtagkttcatcaattgtaacacatgtaccagtgtggtgtggaatactgacagcaatggaggttgtgcatgtgttggggcgtggaggtacatgggaactctgaacttcccacacgattttgctgtgaacctaaaacagctctaaaaaattaagtttattactttttaaaaatggaataagtaaatgtttccaacaaataatgagttcattgagtgctaagtataatatttct

SEQ ID NO: 428183 - DNA, 562 bp, Homo sapiens
ctatccaccttcccctaattctccctgaattcccatatctacccattctacttcctaaatgcctattaaaatagttaatcctaggccaggtgcagtggctcatgcctgtaatcccagcacttcaggaggcttagacaagaggatcgcttgagcccaggagttcaagaccagcctgggcaacacagtgagacccatctctacaaaaaaattaaatattagctgggtgtggtggcatgcacctgtcgtctcagctactcaggagcctgaggcagaattatcacttgggctggggggttgaggctgcmgtgagccatgattgtgccactgtacttcagcctgggcaacatagtgagacccagtctcaaaatataataataataataataataataataataataataataatcccttcctctagatttccactatacaaagtagtcagcaaatgcttaatgaatgaagtactacaactgcctcctacccagaatccttgcctccatgttcataaaacaagctaatgggacagaagggactttgaattgggtcagacaggagaaca

SEQ ID NO: 428184 - DNA, 562 bp, Homo sapiens
ctatccaccttcccctaattctccctgaattcccatatctacccattctacttcctaaatgcctattaaaatagttaatcctaggccaggtgcagtggctcatgcctgtaatcccagcacttcaggaggcttagacaagaggatcgcttgagcccaggagttcaagaccagcctgggcaacacagtgagacccatctctacaaaaaaattaaatattagctgggtgtggtggcatgcacctgtcgtctcagctactcaggagcctgaggcagaattatcacttgggctggggggttgaggctgccgtgagccatgattgtgccactgtacttcagcctgggcaacatagtgagacccagtctcaaaatataataataataataataataataataataataataataatcccttcctctagatttccactatacaaagtagtcagcaaatgcttaatgaatgaagtactacaactgcctcctacccagaatccttgcctccatgttcataaaacaagctaatgrgacagaagggactttgaattgggtcagacaggagaaca

SEQ ID NO: 428185 - DNA, 633 bp, Homo sapiens
tgaattgggtcagacaggagaacaaaaggaaccagcatataatgaaaagtgaccaagtgccaggcattttgtagcagcttttaaaagtgtaatcccatttaatcatttagataatcacaactcctctatgatgctacacttgagaaaactgaagttcaaagaatgaagcaatgtgatgtacgacagttattaaatggtagacatgtacagacaagtctgattccaaaacccatctctacaaaaaaattaaatattagctgtgtgtggtggcatgcacctgtcgtctcagctactcaggagcctgaggcagtgagctatgatcgtggcattgcagtcagggcaacagagcaatattctgactctaaaaaaaattaaaaaytaaatttaaaaagtcactaaccatcaggcattggaaaacatttaatggagcagaataatgggttgatagccttcctaatgctatagtagaccaaggagtacttcacatttttttcttcatgcatgctggtactgaggtgggtgcaaagatccaatagacagatcttacctcaaggagtttatggtcctggaggaactaatcacctatgtgaatgcgtgattaatagaaaatagcatgataatgtgtcataaaag

SEQ ID NO: 428186 - DNA, 573 bp, Homo sapiens
ttcttattactaaggaagtgtggtattatggaaagaatgtgggctatattcaattcacttctgacactaactagagctcgtgcagatctctcatggattaagagctcagtcacacmagactgtgccctacttcatataccaattgcaagcagtaggttcccaggtcaccacaacttctgaccagtttggccacaagtgggaggttaccacaacccccttctcaggttcagtaatgtgctagagcagctcatagaactcctgggctcaagtgatcttcccacctcagcctcctgggtgactaggactacaggtgtgtgtcaccagacaaggtcttgcaatgttgcccaggctggtatcaaactcctgggctcaagcaatcctcccaccttggcttcctaaagccctgggattgcagatgtgagccactatgccgggcccttggttgatgattttctaattccactactaggtgacactcatctggcataacaacccataccccgttggtcaaccaaaagcagacaatgtacctttgacaagatatctggcaagagcaaatattcaatactggtg

SEQ ID NO: 428187 - DNA, 571 bp, Homo sapiens
aattttagagtatggcaaatgactgatttagtcaaaaatttatcttctactctgaaaaaaatacatgtttgtttaaaagacaaaccttgccacttttatattggagcacaatcttaaactaccaccgggtgatctctcaaggctgtcacaaayagaattatcagaagctgtgagtggctgtggagcacatcaaatgttcctacatgatactttaagcaacacttgttaaatagtgagaagccagattgcccaaataacaagtcattttcaaagggcaaaatcttcgaggttctcactctaataattagagtgaaatggctataaagtttttactgctatgattctttaacttataaaatggatactgtagaaagcttagagaatgattacttggcagtttttcatacatgaaattaaagtatcatgtagatagaaataaaaataaaacagattattttgagtttataaataattatacatattggcaatgaactgaaacttaaatacaaaaggtgggcaggtcatattttggaaaacaggtaaatcccccctcttttaagtgaccacaaga

SEQ ID NO: 428188 - DNA, 571 bp, Homo sapiens
aattttagagtatggcaaatgactgatttagtcaaaaatttatcttctactctgaaaaaaatacatgtttgtttaaaagacaaaccttgccacttttatattggagcacaatcttaaactaccaccgggtgatctctcaaggctgtcacaaatagaattatcagaagctgtgagtggctgtggagcacatcaaatgttcctacatgatactttaagcaacacttgttaaatagtgagaagccagattgcccaaataacaagtcattttcaaagggcaaaatcttcgaggttctcactctaataattagagtgaaatggctataaagtttttactgctatgattctttaacttataaaatggatactgtagaaagcttagagaatgattacttggcagtttttcatacatgaaattaaagtatcatgtagatagaaataaaaataaaacagattattttgagtttataaataattatacatattggcaatgaactgaaacttaaatacaaaaggtgggcaggycatattttggaaaacaggtaaatcccccctcttttaagtgaccacaaga

SEQ ID NO: 428189 - DNA, 473 bp, Homo sapiens
aaatatgcttcaagggattttaacttatcaggattaaataacttcaaaaacttgccaaatcattgcaagtttacacggctgtgctattttgttcttctggatagcttttcttcttcactgyaacaacaacaacaaagactgaaaaagagtttaaatgatgccctatatagagtatagtggatacattaaaagataataaaagtaataaattttattttctttcaaaagttgcctcagtatagtgggactgggctgtccaatactttaagagaataagaaagagagtcagaataagagataggaaaataccttgctattttttgtgtgagattttttaatttgaggttataatttaaatatagtgaaatgcagatatcttaagtctatagtttgatcagtttgggtaagtgactatacctatataacccacacccctaccagaagatagaacatttctatcaacctgtagaatt

SEQ ID NO: 428190 - DNA, 513 bp, Homo sapiens
gagcaaataagcggtagctgtttggaaagatgaatgtataaatatgcttcaagggattttaacttatcaggattaaataacttcaaaaacttgccaaatcattgcaagtttacacggctgtgctattttgttcttctggatagcttttcttcttcactgcaacaacaacaacaaagactgaaaaagagtttaaatgatgccctatatagagtatagtggatacattaaaagataataaaagtaataaattttattttctttcaaaarttgcctcagtatagtgggactgggctgtccaatactttaagagaataagaaagagagtcagaataagagataggaaaataccttgctattttttgtgtgagattttttaatttgaggttataatttaaatatagtgaaatgcagatatcttaagtctatagtttgatcagtttgggtaagtgactatacctatataacccacacccctaccagaagatagaacatttctatcaacctgtagaattc

SEQ ID NO: 428191 - DNA, 559 bp, Homo sapiens
agtgtaaaagttgaggcttgggagcctctgcctagatttcagaagatgtatggaaaagcctggaacaccaagcagaagcctccacacagagtccccaatgggacactgcctactggacctgtgagaagagggctagacacactgacagcttgtaccctgcacctggaaaagacacaggyactaaatgccacccctgaaagcagcctcagggactgtaccctgtagagcctcgggtggagctgcccaaggccttgggagcctacccttcgcaccagtgtgccctgagtgtgagacatagagtcaaaagagattattttggagctttaagatttaataactgccctgctgggtttcagatttgcatagggcctgtagccctttctactccccagtttctcctgtctggaaagggagtatttacccaatgcctgtacccccattgtatccatgaagtaactaatttgtttttgattttacaggctcataggtggaagggactagccttgtgttagatgaggctttggactttggacttttgagttaatgctggaatgagtta

SEQ ID NO: 428192 - DNA, 534 bp, Homo sapiens
cacactatgccagcctccaggaaaaggagggggctgaaaaatgagttaataaatgctcagcctatatgatgaagcctccataaaaatccctaaactacagagtttagaaagcatctgggatgctgaagacatggagatgacaggagggtggaacacccagagagggcatggaaggtccatgcygcttcctacatatcttacccagagtacttctttggctattcacctgtatcccttaaaacatcctttataataaactgataaatataagtgtttccctgagttctatgagcgctccagcacattactgaacctgagaagggggttgtggtaacctcccacttgtggccaaaccggtcagaagttgtggtgacctgggaacctactgcttgcaattggtatatgaagtagggcacagtcttgtgagactgagctcttaatccatgagagatctgcacgagctctagttagtgtcagaagtgaattgaatataggctatccggctagcatcagagaattggtcagtgtgagaaa

SEQ ID NO: 428193 - DNA, 476 bp, Homo sapiens
atcttcttgacctaaatgaggcaaaagagccatgtatatgtgcacagaaatcagcataaggatatggcatttaaaaatttttaatttttaaatttattacacatgtaggtttgttatacygttatattgtgtgaagctgttagggcttttaatgatcccgtcacccaagtagtgaacaaagtacccaataggtagtttttcaacccttcttcttttccctctctcctggctctaggtcctcagtgtctattattcccatatttatgtccatgcgtacccaatgtttagctcccacttataagtgagaacatgcagtatttgattttctgttcctgtgttaattcacttaggttaatgacctccagctgcatccatgctgctgcaaaggacatgattttgttctttttatggctgtgtagtattccttgttgtatatgtgccatattttctttatctaattcacctttgatgggtac

SEQ ID NO: 428194 - DNA, 476 bp, Homo sapiens
atcttcttgacctaaatgaggcaaaagagccatgtatatgtgcacagaaatcagcataaggatatggcatttaaaaatttttaatttttaaatttattacacatgtaggtttgttatactgttatattgtgtgaagctgttagggcttttaatgatcccgtcacccaagtagtgaacaaartacccaataggtagtttttcaacccttcttcttttccctctctcctggctctaggtcctcagtgtctattattcccatatttatgtccatgcgtacccaatgtttagctcccacttataagtgagaacatgcagtatttgattttctgttcctgtgttaattcacttaggttaatgacctccagctgcatccatgctgctgcaaaggacatgattttgttctttttatggctgtgtagtattccttgttgtatatgtgccatattttctttatctaattcacctttgatgggtac

SEQ ID NO: 428195 - DNA, 160 bp, Homo sapiens
accttcaagaacttggaactctaatttmcatattaaaagaaacaaagtgagagtctgctaaactacaaagtgacctcattattactcaccactgcccagaatttaggataccaaaatcattagaagtaggtcctatgaagattagttatcataagtacta

SEQ ID NO: 428196 - DNA, 160 bp, Homo sapiens
accttcaagaacttggaactctaatttacatattaaaagaaacaaagtgagagtctgctaaactacaaagtgacctcattattactcaccastgcccagaatttaggataccaaaatcattagaagtaggtcctatgaagattagttatcataagtacta

SEQ ID NO: 428197 - DNA, 160 bp, Homo sapiens
accttcaagaacttggaactctaatttacatattaaaagaaacaaagtgagagtctgctaaactacaaagtgacctcattattactcaccactgcccagaatttaggataccaaaatcattagaagyaggtcctatgaagattagttatcataagtacta

SEQ ID NO: 428198 - DNA, 635 bp, Homo sapiens
tggctctttgtttccagtggggatccactccccaatgcctgggctggaattttttccctgctctttatgaggcctctctcttctatctgtttaatcctgcttctcccatgggaacttctcaattgaaacctcaccttagcaaactcctgctttgccactatagttctaatactgtctgcttgctttctcactggcaaagcyttaccaaaaactctcttcagctatggtgggggctcctggtatatccctaaattagtccatctaaaaacagccctagggcaaaaagcaacaaagcttttggatgcacagcggtctgcttatttcacttggtattaagaagccaaaaaacagctaaataattcaaatctcaaactactgaggctctttcacactgtctgtagaaaaatttttctgactcagtaaagttcctagagctctcaacagcacctccatattcccctcccagctttcctttatagcctcctctcccaaactctcttccaccatctgccccctcctccagtccctcacctccctgtaaccaaaaggttcactggcctccatctccttcagatgaagcccaggatcagccagtacctgttcccaagtgaggctaatagaagagagaacattta

SEQ ID NO: 428199 - DNA, 579 bp, Homo sapiens
gtactacagccaatccaaccaggcaaatggtggccagttacttactttataaagttggactgtctcataactatattggtgatattactaacactgtttcattttattattttatttttaaaatgattttattttatttcattattattttattttattttattttattttattttattttattttgagacagggtctagctctgtcacccaggctagagcacaatggcatgattatgccccgctgcagcctcaaactcctggcctyaagcaatcctcctgcctcagcctcccgagtagctgggactagaggcacatgccaccatacctggctaattttttttttcctagagatggggtctcaccatgttgcccagcctggtctcaaactcctgaactcaagccgtcctccagagataatacatttaattgaagcaataacttcatttccacatgccttaatcacatctttagatacttgaattatactttctatatattctctcataacattgttccctagttattcaatgtaaacaagtctcaccttgtttacaatattataagctccttgcagatg

SEQ ID NO: 428200 - DNA, 569 bp, Homo sapiens
tttaacatactagtaagcctatccccacatcttcattacatttttgtgatttaaaacaaatttcattatattacakttatatagaacacacagtgatattatatttttaaagagaaagtttattattgtaagaaacttaaagttataatgtaatagaaagaacattcataaagttataatgcatacaagattattctaagaattacattattaaaaacatattcatattgggcatttcttcatttaacctggtgagtctgattttaaagggaaattctggctagtcatattatctacctggtctaattgataaatttttatggtttatgtctttgaggcaatggctggttgtattactggtttctgaccttcaatttccagagcagatctctgtggcttttgaaaaacactatgttattaactggatatatttactcaaccatctgtactctctaacttagtaacactgatacataaagtcctcctgactttttcatcatttctgtagagaatttcttatctccagattttctgaagcagacaaaaacatacttatgagctacataatt

SEQ ID NO: 428201 - DNA, 569 bp, Homo sapiens
tttaacatactagtaagcctatccccacatcttcattacatttttgtgatttaaaacaaatttcattatattacagttatatagaacacacagtgatattatatttttaaagagaaagtttattattgtaagaaacttaaagttataatgtaatagaaagaacattcataaagttataatgcatacaagattattctaagaattacattattaaaaacatattcatattgggcatttcttcatttaacctggtgagtctgattttaaagggaaattctggctagtcatattatctacctggtctaattgataaatttttatggtttakgtctttgaggcaatggctggttgtattactggtttctgaccttcaatttccagagcagatctctgtggcttttgaaaaacactatgttattaactggatatatttactcaaccatctgtactctctaacttagtaacactgatacataaagtcctcctgactttttcatcatttctgtagagaatttcttatctccagattttctgaagcagacaaaaacatacttatgagctacataatt

SEQ ID NO: 428202 - DNA, 569 bp, Homo sapiens
tttaacatactagtaagcctatccccacatcttcattacatttttgtgatttaaaacaaatttcattatattacagttatatagaacacacagtgatattatatttttaaagagaaagtttattattgtaagaaacttaaagttataatgtaatagaaagaacattcataaagttataatgcatacaagattattctaagaattacattattaaaaacatattcatattgggcatttcttcatttaacctggtgagtctgattttaaagggaaattctggctagtcatattatctacctggtctaattgataaatttttatggtttatgtctttgaggcaatggctggttgtattactggtttctgaccttcaatttccagagcagatctctgtggcttttgaaaaacactatsttattaactggatatatttactcaaccatctgtactctctaacttagtaacactgatacataaagtcctcctgactttttcatcatttctgtagagaatttcttatctccagattttctgaagcagacaaaaacatacttatgagctacataatt

SEQ ID NO: 428203 - DNA, 335 bp, Homo sapiens
tgcaagctgaaaggtcagttctggaagggtggcctttccattgattaaaggtcttgttacacgctttcctcaggggcagagttgcttcactgctgcacatttgcataacgaaggggccagtactcataatggggataagaagctgtgttttatggtaacgaggaatatccatcccgatagagaagagattgggacccaggattaaataaatgtaaattccaccttcccagatacactgctaaataaggggaaaaartaaattttgagttcaaagacatttctttccactattcaccaaccattgtaatctagagacttgtgttctagaaggggag

SEQ ID NO: 428204 - DNA, 576 bp, Homo sapiens
tgggtagagagggagagctagatttatcctgagtcttgtgaattatctgttgtgtgactgagttttgtgggaattaagccaaatcaaaataaataatgcatgtaatgtgtttagcacactccccagtgtgtggtgggcatccagtaagcattggctattattaagagctatggagtctgggccacatgctacaagacattcagcagtgaaactgttttgggttgctgtagagagtaggratgtatgttgcatgggaacagtcagggagggaggtccattttcagcatcaccccagggtcagatgtcatgacacagacagagggaccgagagagagagagcgagcatgagcccctcctgttattgtcctaaaccctcattcactgagggcagcctctactccattaccgcagtaaaggttctgctgtgaagccagatatgcagcagccctccctccagcaccttgctttcacaggatctgtttcttgccatgcatgccatagattcacagagcattttataaattgaaaaaggctattcaatggcaaggtattactattaccgtgtatccaactggt

SEQ ID NO: 428205 - DNA, 576 bp, Homo sapiens
tgggtagagagggagagctagatttatcctgagtcttgtgaattatctgttgtgtgactgagttttgtgggaattaagccaaatcaaaataaataatgcatgtaatgtgtttagcacactccccagtgtgtggtgggcatccagtaagcattggctattattaagagctatggagtctgggccacatgctacaagacattcagcagtgaaactgttttgggttgctgtagagagtaggaatgtatgttgcatgggaacagtcagggagggaggtccattttcagcatcaccccagggtcagatgtcatgacacagacasagggaccgagagagagagagcgagcatgagcccctcctgttattgtcctaaaccctcattcactgagggcagcctctactccattaccgcagtaaaggttctgctgtgaagccagatatgcagcagccctccctccagcaccttgctttcacaggatctgtttcttgccatgcatgccatagattcacagagcattttataaattgaaaaaggctattcaatggcaaggtattactattaccgtgtatccaactggt

SEQ ID NO: 428206 - DNA, 396 bp, Homo sapiens
atcactgcctaagcaagcaattattttgtttttgcttctgcagttagacaaggaagaatgttttgcattctatcagctgggcttttattgtttttcatgttaggacaaatgttctttgagaggtggggtcttgtttgaggaaatgtcaagctgtccagtttagatttattggtgattgcggcaggtgccaaatgtttcaagaagttggcgtatgcactttttttttctcccctggcagactttcctggaatcaggatatgttctctgcaggaagaaagcaaatgtgctatacttaaaattcagtgtatgacagaaaaacytaaagaagacttatagtagatgaatttacattatctgaaaggtattttatgcaccaagttccaaagttagagaagg

SEQ ID NO: 428207 - DNA, 585 bp, Homo sapiens
gaaaggacacgtacctacagcggaacgatgatgaataacaactgacttctcaacagaaacaatrgaagcagaaaataatggcacaacatattcaaagttttaaaagaaaaaaacccgtcaaccttgaaatctacctagagacaatatcctctaaaaatgagggtgaatttagtatattttcagataaaagaaagcttagagaatttattatggcacatctgcattacactaaagaaaaattttcaagcaaaagagaaattacactagctagaaacataaatcgacatgaagtaataaagaacacgtaaatatttagataagtgaaaaggccactttttgtttttaacatctttgaaagacaactgtttaaaacaaaaataataatatggtatggtgggttctgttgaacatgtaaatgtaaaatatacagcagtcctagtataaaagttagggagaatggaattgtactgttttaggtttttatatcatatagaaaatggtacaatattaagtaagtagatagtgataagttaaggattcatgctgaatagcctagagaaaccaccaaataataccacaaagagt

SEQ ID NO: 428208 - DNA, 518 bp, Homo sapiens
actttatccatcatcccctgccattgtggctgctttcacagccctttgaaaggataaacttgtgacccttgttgtgaagttaggactgactcatgctgagcagttgagcagtataaagtttatttagtactttaatttattcctttagaggggctactgcccctaccagaagcttattgccaccgtcctccaaggggggtgaactcaaaccgtttatgcacctcactagagatacagaactataaaagttctaaaccgttactttagattcttttcaggctccttcagaagatccgctctaaagacastggcatgcggcagcaaattacctcaaaggaaacatgccataaaatacttactggaaaaatgacctcgggtagaagatgcataacaaagattattattatgcattttaagagcctgcctctaattatctgaaatgcattttacctcttttagcctatgaacgtcatgaacagaatcagggtaattgctctcctcacctccatactagatgg

SEQ ID NO: 428209 - DNA, 534 bp, Homo sapiens
cctgaaattaaatatttagaccacttttaagtgcagagaagtgaagaatagggcctgaacgagttgagggaatcgtgtccctacccttgcctcaaacttaaacaagaactcaggaaatttttagggttatttggatactgctgcttatggattaactcacatgcactaaacagtaaaattctatatccaaaacttgccccggggaagactgaccatttcctgtggacttctgaggaagtccatcaggttgaagagctgaaaaaaggcttataacagcccctgtcttagccttaccttccctagaaaagccattccacctttttgtcaacgtggataatggggtagctttaggagtgctcacttaagaacacggaggccatyggcagtccatggtggccttcctgtcaaaagtcttagatccagttactttgtgagtggcctcaatacatccaatccattgtggctacagcactaatggtcaaagaaagcaggaagttaacctttggaggaaaattgacagtaataacgccccat

SEQ ID NO: 428210 - DNA, 536 bp, Homo sapiens
cttttaggattggagaacggttcacatgcatgtgtgtggggcagttggtcagagctgtccattatgaaaggtgcttctagaatacttggggaatgtgggagctagaaaacaggttgttattaaaggaattgaaatactcccacttgaaatgttcccattttctctgtaaaggaatttcttgagcaaaggaaaactctacatcctctgtctacctgaagttcaaaattagtggtgtttggttttaataattttagtagttgatgacaaaacaacgctctctgctgtcctctctgtcacatctaacatgatgtgaatgaggcagtccctgatgtgagatgtgctgggttttgcaggggtaatgaacatcgatctgtgtgttccatcgactccttctttaaacttgtatctcagcacttagcctgtgtcataattgtctgtgcagaggtcamggatgggctcttattcatctctgtgtctcaaaccctgtgcctgacacatagcagttcctcaatgaacatttgctgaatgaatgaatg

SEQ ID NO: 428211 - DNA, 522 bp, Homo sapiens
agagccgcccagcagctgtcctctgcagggactccttaagagggaggagtcatgactgacccccagctttccaacacaggttgggtgagctgtgatgccaccaaccaaggcaggaatgcaggcctgtatgtcagtgggttgtggggaaggctgggttttgaataaactgaatgtgagatggcctcagaacatccatgcagaaacgtaagcaggcagtggaaagtaagggctagagagagatctgagtgttactgacattagggtgtagctgaaacccgaggcatggacgacaacgcttcaggagaaaatccagaatgacggagatgctggagacagaagctggtacgcatgagcacggagggccagcctgacagaggagtgcagaggcagagaaggaaaaggcagaaagaaaaacccaggagtgcattattgcatgtggcaasagtccagaaggggtagtgatcagtaagtgaactgaaagggtcagtaatctaagggctaaaagtacatcacttgaaatgg

SEQ ID NO: 428212 - DNA, 571 bp, Homo sapiens
ttaccatcagatattcaacaatattattgtaagtaggttgggaactgaactgcttgggaacaggcagaggtcatgcctcatttatttctatatttcttgtactcagtagagaacgaagtttgcagatcattttcaataactattcattgaaggcaaaaatgaacatttgctctacaagaaatatagatgcatctgtacacaacttctttaagcaattttgcactatgttgctacctaaaatttaaccaaaatcaaaaatcttttatgtacactcagggtctttgtttaggtggcttttctcagttccctcaactcttctgcagggtatagaggatggctttgcacatgcaaatgatctcasccttcctctccatcacttcttttcgttaattctaagataattacactcttgagaaaacttgcccagatctctagatgaggacaagtttttctgttatatgtgctcatggcacttaaaagtcatatttttccatacatttgtgaaattgttttatgtatatcttcctccacctcccacccttctaaatcctacaagcctacaaatttttac

SEQ ID NO: 428213 - DNA, 570 bp, Homo sapiens
gggtcacataaacttttgtttcttttttacattatgaaattattcaaattatcccaggctccaaaaccctctctctaaaacaagcctcgaggggaattgcctaatttcaaaggtgtcaagcatccggcaggcatcaagggataaaggcctgttctccaggtgcgcaagccagaaytgagaataaatttgggtcaacatagataacatagtaggtcctgaggaattaccccatcagagaaggacagtggatgagacagcctcctgatacaagctgatgtcaggagtctctgatgtaggtagaagagtcattgaaaagattgcttgtcatcacgacgattcattaatacgtacagtaaaggacccagcacaatcagttaaagaaccaaagagaccaaatactgctaccaaataaccaaagaaacaaaagcacaatgaaatcttttaataaacagaaaaggacacaattctttctatcatgaactgttaggtacatggcctctgcccatgaaacgtgttcctcttcctggctaaccctgcttattttccaataaaagtatgaattttggacct

SEQ ID NO: 428214 - DNA, 582 bp, Homo sapiens
catcacgacgattcattaatacgtacagtaaaggacccagcacaatcagttaaagaaccaaagagaccaaatactgctaccaaataaccaaagaaacaaaagcacaatgaaatcttttaataaacagaaaaggacacaattctttctatcatgaactgttaggtacatggcctctgcccatgaaacgtgttcctcttcctggctaaccctgcttattttccaataaaagtatgaattttggaccttttctacagtgttactcagyctcacctctgttttcccacggcaccctgaccagagctttatccattcatttatgttctatttcatttgcttaacaagatcttcccaccagagagagagaagcctaatgctggagactttgtcttaaccatgttagttctctcagtgcttagcatatggctggctgactctcagcaagtgaaggaatgggtgaatacctgcatagtgaataattattcaagagcagagaaacgagaccatagctctggtattaacaagttgtatgactttcagaatcacttcaccgatccaggccttcagataaaaaagatgagtagc

SEQ ID NO: 428215 - DNA, 601 bp, Homo sapiens
ttttaacatagctctccagaaataaaaagttcttgaccactgatggagtccggatatttgtcctcatccaaatctcatgttgaaatgtaatccccaatgctggaggtggggattacacttcaacaggagatttgggaggtatttggatcacggaggcagatccctcatgaatrgcttgggccatcctcttggtgatgagtgagctcttcttctgagtgtatggcaccttacccccaactctctctcttttgttctggctctggtcacgtgacaaagactgttccttcttcacctttcaccatgattgtaagctcctgaggactccccagaagccgagcagatgccagaaccatgggtcctataaagcctgaagaatcatgagccaattaaacctctttgttttataaattatgcaatcacaggtattcctttatagcaatgcaagaatggtctaatataatcagtgacactaatcatcaatattatcttattaattttcccagtttattcaacatcaaaaccagtacattttagttaaactcacattaaatgtttgtatttttttcattttatgagttgtctgtctgtatttttttccact

SEQ ID NO: 428216 - DNA, 576 bp, Homo sapiens
tgccgtggtgcccagagatgtattttcacaagcccttcagatgactctggaaagtaygatctttttagagccacaaacatgtttacttcagaatttttgcctcatcttccaattaaaaacaattttaaaattgctaaaatatgtttatatttattttgatgcatattaacattttcctctaagaaaaactatttgtaattcagttaaaaaaagaacaaaaggagagagatggggaaaagaggagcaataaggacaaaagttaatatgaaatactaatgttattttttgttttcttccatcttttattaagttcaggtgtacatatgcagaatgtgcaggtttattacataggtaaatgtgtgacacagtggtttgctgaacagatcaacatattacttaagtattaagcctggaatgttaattttataatatacaaataagccagtatttcctacattttagctgaggaatttgttaaaacatgcagacctcaggcatctctctcagggatctgggttaagcaagtacagtgctgatgctgactgtatttcagacaaaacactaacagtgactctg

SEQ ID NO: 428217 - DNA, 527 bp, Homo sapiens
gaaggacagttggagcctgagatctgaaagacscatagggtcagagcagatatggagctgagggtcaagtgtcatttccaagcaggaaccagcatggtctgaaaaggtgaggaagcaagacgtacgacgcatcccaatgggaagaggtggctgtgaatgatgctgggagaatgtgggcagtgtggggtggaaacaggcaagataggcagtgcgagatggtatagactgaaaaagaaagccattgggtggattctatgtatgactctcttcctgaacctcctaacaccctggaattgcatgagtaaatgctaatctccctaataactaatatccctgataactagtttgcctctgtacagacttcttcctcatagcaaacatcttaaatgatgttgcatttttccaggcttgtctttgttagataaaaacaggggctttctttatactggagtgttctgggctctgggtcaagcattggagaacattttttcagctttccccagggtcctcggcagatcacctgaaac

SEQ ID NO: 428218 - DNA, 579 bp, Homo sapiens
ttctaaacccaactcaactattagctgtgtgaccattatggagtcacctgacttctcttaccatcttaggctgctcatttgcaagtggagataatacctgtatcatagttttgttatgaaaattaaataacatatttgtaaacatctttgttcaatgcctgacactttgagagtgtccaataaatgatgagcattgataatcatcacaatatataaacagaaagtacaaataacaacattcattcttcgacttcaacyacatcagaagagtgcctcatatgtataataacatgatttctaatatttctgtgacagagggtgaaaaagttgttcaggtgttttcctgaaagaaactgttctattgaaactgaaatccagaaaaattgaattttgttataaaatcccagattctttaatttgacattatttactagaataatgttaaatttcaattactttggaacttaagagtctataataaatatcatctgttggttaccaaatttttaaacaattgttgaataataacatggttaataattattgaatgtttctcattggctaaggactctgtaaagt

SEQ ID NO: 428219 - DNA, 579 bp, Homo sapiens
ttctaaacccaactcaactattagctgtgtgaccattatggagtcacctgacttctcttaccatcttaggctgctcatttgcaagtggagataatacctgtatcatagttttgttatgaaaattaaataacatatttgtaaacatctttgttcaatgcctgacactttgagagtgtccaataaatgatgagcattgataatcatcacaatatataaacagaaagtacaaataacaacattcattcttcgacttcaaccacatcagaagagtgcctcwtatgtataataacatgatttctaatatttctgtgacagagggtgaaaaagttgttcaggtgttttcctgaaagaaactgttctattgaaactgaaatccagaaaaattgaattttgttataaaatcccagattctttaatttgacattatttactagaataatgttaaatttcaattactttggaacttaagagtctataataaatatcatctgttggttaccaaatttttaaacaattgttgaataataacatggttaataattattgaatgtttctcattggctaaggactctgtaaagt

SEQ ID NO: 428220 - DNA, 600 bp, Homo sapiens
ctcatttatgtgtattaacattctcataagctgaggatccaggaacaccacttacaggcaccacggagtccccacctcagtctttctaagggtcagtcccacttcactgtttgatattcaaggcactataacacatatattcataatgattcggmctttattataaaaggaaaaagcatgaataattatattctagttttgtataaagtggtgcaagttttttattgttctttaatcttatggtacttagaatatggttgacagaattacatcacatttttaggaagtaaaagatgtgtgctttaccagtgatttactgtcgtttatataatattaaaatattgtgcacaatattaaatagagcttaaatgtataaacccattaattttctcttaaatactctgaattgttatctacgaaatcagtagttaaaatttaataactaaaatttaaaatgaaaggccttccttcagtttataagatttacaggctcagctctcataaatataaatagatgaatcttcaatatcatcaatatatagtaaatgaaaagcaacacaggcaagataaaaaaagctgaaatggtttgcagaggaaatt

SEQ ID NO: 428221 - DNA, 599 bp, Homo sapiens
ttattttgtcaaatggtttttctatgacaggcttttctctggagttgttcatttccatgtcaaagaaaaaacaatattgtgcatttctaaaataaacaaaccatttataaattattctcacccaacagaaatagttgttactttgaaaaaaaaaaaacaatgttgaatttcttttcctgctgtaataattgccagtcagccgaaatggcacgtggttgcasatatgtgattgcataatacatttaggatagcaataaagtcacaatcaaacccatgttggatggtttgcagttaagaaatactttttatacaaatagtttgattttttaattgtttgctaattatttaattatttattgtagcatcatgctgaacagtcattacactcatatcatttcttataaaaagtcactttactctccaaatcagttgagggcagactctaagatggctctcagtaagcttcacctcctggtattcatgcctaagagtagtccctttctcctgatcatgggctagcctagcaaagctgatgggatgtcctttcccttcttaggtttcaaaaggtagtgacttcagtcttgctaacagactctctc

SEQ ID NO: 428222 - DNA, 599 bp, Homo sapiens
ttattttgtcaaatggtttttctatgacaggcttttctctggagttgttcatttccatgtcaaagaaaaaacaatattgtgcatttctaaaataaacaaaccatttataaattattctcacccaacagaaatagttgttactttgaaaaaaaaaaaacaatgttgaatttcttttcctgctgtaataattgccagtcagccgaaatggcacgtggttgcacatatgtgattgcataatacatttaggatagcaataaagtcacaatcaaacccatgttggatggtttgcagttaagaaakactttttatacaaatagtttgattttttaattgtttgctaattatttaattatttattgtagcatcatgctgaacagtcattacactcatatcatttcttataaaaagtcactttactctccaaatcagttgagggcagactctaagatggctctcagtaagcttcacctcctggtattcatgcctaagagtagtccctttctcctgatcatgggctagcctagcaaagctgatgggatgtcctttcccttcttaggtttcaaaaggtagtgacttcagtcttgctaacagactctctc

SEQ ID NO: 428223 - DNA, 576 bp, Homo sapiens
gccatatacagaagaatgaaactcagacccccatcgctcaccatataaaaaatcatataaaaatggattaaagacttaaatctaagacctcaaactaagaaacttctaaaagagaacattggggaaactcttcaagacactgagcaaagatatcttgtgtcataccccgcaagcacaagtaacaaaagcaaaaatgaacaaatgagatcatatcaagtttaaaagctgcacagcaaaggaaataacacagtgaagagacaatccacagaatggaaggaaatatttgcaaactacccatctgacaggaaattaatcaccagaatatataaggagctcagacaattctatagggaaaaacatgtaataatctgattttaaaacgggcaaaagatctgaatagacattactcaaaagaagacatacaaatggcaaacaggtatatgaaaaggtgctcaacatcaatgatcatcagagaaatgccaatsaaaactactgtgagatattatcttaccccagttaaaatggtttatatccaaaagacaggcaataacagatgctggcaaggatgtggagaaa

SEQ ID NO: 428224 - DNA, 577 bp, Homo sapiens
tcagattttcaataatagtaagattggggactggagatggcacaataaattcagagtcgacaaactagcaatggaaatgcttgcaactggtcatccaatttgtttaggctgcatatttagratgtggaaataatacgtttcctttagcagcaaggtggcatctcagctttcaagaccttaggggtggtttgagctgtcttataagccaaggactgttggaaaggaatgcaaattcgaggacatgtaaggatgtttaagaaaggttgtggatttttctttgttgcagtgctcagaatacatttcttctcctgggaatgccttgttgtaatcctgcccacaggctgaaggtgaaatgtagaatcttgtttttttttttttttttaatcaagacagggtcttgcatcttgctctgttgcccaggctggagtgcaaatgggagatcatggctcactgcacccttgacctcctatgctcaagtgatactcccacctcgaccccacaaagtattgggattacaggcatgagcttcccagctgaaatgtgcagtcttaaactgacttgaaatcatgggtttatt

SEQ ID NO: 428225 - DNA, 577 bp, Homo sapiens
tcagattttcaataatagtaagattggggactggagatggcacaataaattcagagtcgacaaactagcaatggaaatgcttgcaactggtcatccaatttgtttaggctgcatatttaggatgtggaaataatacgtttcctttagcagcaaggtggcatctcagctttcaagaccttaggggtggtttgagctgtcttataagccaaggactgttggaaaggaatgcaaattcgaggacatgtaaggatgtttaagaaaggttgtggatttttctttgytgcagtgctcagaatacatttcttctcctgggaatgccttgttgtaatcctgcccacaggctgaaggtgaaatgtagaatcttgtttttttttttttttttaatcaagacagggtcttgcatcttgctctgttgcccaggctggagtgcaaatgggagatcatggctcactgcacccttgacctcctatgctcaagtgatactcccacctcgaccccacaaagtattgggattacaggcatgagcttcccagctgaaatgtgcagtcttaaactgacttgaaatcatgggtttatt

SEQ ID NO: 428226 - DNA, 577 bp, Homo sapiens
tcagattttcaataatagtaagattggggactggagatggcacaataaattcagagtcgacaaactagcaatggaaatgcttgcaactggtcatccaatttgtttaggctgcatatttaggatgtggaaataatacgtttcctttagcagcaaggtggcatctcagctttcaagaccttaggggtggtttgagctgtcttataagccaaggactgttggaaaggaatgcaaattcgaggacatgtaaggatgtttaagaaaggttgtggatttttctttgttgcagtgctcagaatacatttcttctcctgggaatgccttgttgtaatcctgcccacaggctgaaggtgaaatgtagaatcttgtttktttttttttttttaatcaagacagggtcttgcatcttgctctgttgcccaggctggagtgcaaatgggagatcatggctcactgcacccttgacctcctatgctcaagtgatactcccacctcgaccccacaaagtattgggattacaggcatgagcttcccagctgaaatgtgcagtcttaaactgacttgaaatcatgggtttatt

SEQ ID NO: 428227 - DNA, 577 bp, Homo sapiens
tcagattttcaataatagtaagattggggactggagatggcacaataaattcagagtcgacaaactagcaatggaaatgcttgcaactggtcatccaatttgtttaggctgcatatttaggatgtggaaataatacgtttcctttagcagcaaggtggcatctcagctttcaagaccttaggggtggtttgagctgtcttataagccaaggactgttggaaaggaatgcaaattcgaggacatgtaaggatgtttaagaaaggttgtggatttttctttgttgcagtgctcagaatacatttcttctcctgggaatgccttgttgtaatcctgcccacaggctgaaggtgaaatgtagaatcttgtttttttttttttttttaatcragacagggtcttgcatcttgctctgttgcccaggctggagtgcaaatgggagatcatggctcactgcacccttgacctcctatgctcaagtgatactcccacctcgaccccacaaagtattgggattacaggcatgagcttcccagctgaaatgtgcagtcttaaactgacttgaaatcatgggtttatt

SEQ ID NO: 428228 - DNA, 522 bp, Homo sapiens
gtacttcaaaaatggaactgaaaagtaacaaaaatggaagtgactctgggtttaaactccgggaagccattttgcctcttactttctatttctatcctcaatttttattaggacactatggctacagaattcaatttcagtgttccccagagagaactgaaagatgaatgctactaaagagaattccattttgaatyggtgctactttgaatttcttacatgtttttatagtcagcaatagcaataaagatattttgctaattttgaaagacaaaacaaaaagaggaaggtaatcatcaaattgttttaaagccaaactttagatggttcttctagtataaaacttctcatacattgctaacgtgatattataaatacatatttattcctttctagaggaaaataaactaataaaataataattatgttaattgtataaaggaaaaacaaatacatcatgttttagcatttttttattatgaagtcagattttctctctctctaactggcaaaaattaattc

SEQ ID NO: 428229 - DNA, 522 bp, Homo sapiens
gtacttcaaaaatggaactgaaaagtaacaaaaatggaagtgactctgggtttaaactccgggaagccattttgcctcttactttctatttctatcctcaatttttattaggacactatggctacagaattcaatttcagtgttccccagagagaactgaaagatgaatgctactaaagagaattccattttgaatcggtgctactttgaatttcttacatgtttttatagtcagcaatagcaataaagatattttgctaattttgaaagacaaaacaaaaagaggaaggtaatcatcaaattgttttaaagccaaactttagatggttcttctagtataaaacttctcatacattgctaaygtgatattataaatacatatttattcctttctagaggaaaataaactaataaaataataattatgttaattgtataaaggaaaaacaaatacatcatgttttagcatttttttattatgaagtcagattttctctctctctaactggcaaaaattaattc

SEQ ID NO: 428230 - DNA, 522 bp, Homo sapiens
gtacttcaaaaatggaactgaaaagtaacaaaaatggaagtgactctgggtttaaactccgggaagccattttgcctcttactttctatttctatcctcaatttttattaggacactatggctacagaattcaatttcagtgttccccagagagaactgaaagatgaatgctactaaagagaattccattttgaatcggtgctactttgaatttcttacatgtttttatagtcagcaatagcaataaagatattttgctaattttgaaagacaaaacaaaaagaggaaggtaatcatcaaattgttttaaagccaaactttagatggttcttctagtataaaacttctcatacattgctaacgtgatattataaatacatatttattcctttctagaggaaaataaactaataaaataataattatgytaattgtataaaggaaaaacaaatacatcatgttttagcatttttttattatgaagtcagattttctctctctctaactggcaaaaattaattc

SEQ ID NO: 428231 - DNA, 603 bp, Homo sapiens
cacagggtagctatactgttttttataatgatgcctccttaccctgacagttatcacaacataaacatagaaaaccagaaagacaaacgagagggtagttatgctctgattttataatgatgcctcyttaccctgacggctatcacaaatgcagcaaaatgaggtcaatgatgtccccttggtagacttggtgatggctgggaaactgtcagtaagtgtcacagaaagcttgccttgtcaatttttgacctttcttctttttctgcagtcattgaaaacatgttccaggatggcataaaaggtcagtatcttgctggtttttagcccaatcttcaacaaagtcctagtacaaaactttggaacaggcaaaatgacaacactggggattgaggagcagagcaacatgaattgtgttttctgaaggtgacagtgaataaggcataaaatcctcttttggcattctattccttgtgaagtagcagttctcttcatgtcaccattcaacccttacccataagatgtattccaggtactttatagatcactccttggggtggaaccactgttcccattcatcatcatgggaacaatgactcttatgaa

SEQ ID NO: 428232 - DNA, 337 bp, Homo sapiens
tacttgtttatttatttatttatttgagacagggtctgcctctgttgcccaggctgaagtgcagaggtgcgatttcagttcactgcaatctccacctcccaggcttaagcctttcttccgcctaagcctcccaagtagctgggactataggtgcacaccaccatgcctggctaatctgtctattttatctagagatggagttttgccacattgcccaggctagtcttgaactcctgagwacaagcaatccgccccactcagcctactaaagggttgagattaacaggcaggagccaccgcccctggtgtcaatattccttataatcaatgtaaacgt

SEQ ID NO: 428233 - DNA, 603 bp, Homo sapiens
tgtcgctgttagacaaaccacgtcttctctagcaaatgaaagtcgtattttgctcctaatttttctacttacaacattacgaaagaaagttgatttgaacaaagtctaagctgctattaaattttgagaaaagaatcctccctcgccaaaggtgaagtttggagctatgggttgaagcaatatgcaaaaccacaactcagttgtgggtgaaaatttagatatgttcttcctgttagtaattcatcataaactaagtgcgtttctaaagagaaaagccccatcagtgaatctagcctaaaatactataaacgtgttttcccaaatagcataaagacagcacatatttaatataagtgtatgaaagaaggaaagaaaagcccaacttagaaatgttattcagaaaatattgactcatttattattttttaaagaacatattaaatatcaatgtactatgatgttgactargtactatgatatttaacatctatgtacaaatgatgatgttgaatatttatgtactgtgatatcagatatccatgtactatgatatcagatatctctgtacaatgatgttggatatctgtatattacgatgatatt

SEQ ID NO: 428234 - DNA, 456 bp, Homo sapiens
ccttctgtatgggaaatcaggaaatgtggattcattaacatatctgtaaaaagttgttctctggatttcaattctatctataatttgagcagtgtatgtgactgtattatttgtaggttctcctccagccctaaaattctgaggacagggcctcccagaatcaggaaacagccctagagaaggtgccaagcaacagaacaataggaaatgttaggatggagagacagtggtgtattgttaaattctggattctcagatctctaagcaagtattttcaaaaacaaaacaaaaccaaaaaacacctttacctctagctcctctaacttcaytgcttttgaggaagttttgtgataaatattccattgctaattgtctatggtggcttcttggtcttttaacaaactatgtatgttatgcttcaaattaataaaatttcagctaattacaatcctccat

SEQ ID NO: 428235 - DNA, 518 bp, Homo sapiens
gtgtcattgtctcttcttggtattatgcaaatgtgaccatgtgatatgtttttgtgtaaacaaaaaagtaacaccattaaggaccagaacagggggaacagaatcaacaaaggaaagctctgtaacttagtgcactatcattccgtatctgattcatacctttgagcttcctacttarcatttgtcttaattattatatatgtcttgaaagcataatatagtgtttatctgttctgtctagaggaaagcaatcacagcatatcaaataaacttccaaaatcaatggtcttgctaatttaattaaaaactgacacataaaaccttgtgtactacaagaaaattgtgtaaagagagaaggatccaaattatgaagaaggaaacatcaatctagttctggttggaactaagttttaataaaacaaaatgagtgtatattccaatacatgtctggataatggatatatccttgcaagcaggtccttgagccctgtacagctcataagcaaatggcatctatt

SEQ ID NO: 428236 - DNA, 600 bp, Homo sapiens
aattcaactttttggttcaaaatcctaggttatataccacacacatgatcttaagtcactattatactatttcaataatatattttacagtatcattctgcaaattaaggacattgtaaagaaggcaaagatttgaagacccaagggaaaaaataatcagttacttccttacggcttgctttttttcttgttattcttaatttaacatattcctaattattctacatttcttttatgagtacgtattgtctctttttcttcagattataggtgactttgagatttgtccataccttatgcctattatctagtacaatttttatttgttattttaaaataatatgctgatagacaactctattgtttctctgagggaactcattatctttaaaactcattctaatattccatttaaaacgtcagatataaaagtagcatcaaaattatcatcccatcaaaacagatmacacacagtttataagtcaactgaatcaattattatgtataagattagaagtttacaactgggcttgtcagctttaaaagcaccctggaaggcttgacaattttacatgtattaattctaaagtgggcagggat

SEQ ID NO: 428237 - DNA, 522 bp, Homo sapiens
caaacagcacccctctcagcaaattgctcttttatagaacaaatgtttatttatcaatatttgcttcaagaccctcacctctaggagtccactaatcctaaatcacaaaatcaggaccttgggccaatcctcataaggtccctatagggaaagatttatcttaaataacttgagtccagacctcaaaaagcccacaaatatccattcctaggccctcccttctgaaaattactgaaagtcatcttcttgtgatcttccttactggaagcaataaactgagctttgcttgatcaacaggttactctyggtagttgctcaagacaaccttcatatctcctccgtgtgactaaatttcagacaagtttcttgattccaggactcttttttttaaaataatttttaagagcatttattttaggattgattagggcaggaggctttagaaaacctgtaactaattttttttcctgccgcttaaaggtgtatgtcttcttccaacctgctgccaggttttcaacccag

SEQ ID NO: 428238 - DNA, 602 bp, Homo sapiens
aaaagaatatggaggttcctaaagaaataaaactagggctaccacatgaccctgtaatccctcttctgggcatatacccaaaggagatgaaattactaccttgtaaagatacctgtattcctatgttcattgcagcattatttacaaaagccaagatatggaaacaacctaaatgtccatccgtgggcaaatgaataaagaaaatgtgtgtctggtgtgtgtgtttgtgtgtgtgtgtgtgtgtgtgtgtgtgtgtgtgtaatgaagtattattcagccttaaaaaaagaagaccctgccatttgccacaacagtartagacctagaggacattttgctaagtgaaaaaagccagacatagaaagaaaaatattgcatcttctcacttacatgtgattttttttttttttaaagagctcaaacacacagagatcaagaatcaaggaagagcacggtggctcttgcctgtaatcccagcactttgggaggctgaggcgggcggatcacttgaggccaggagtttaaaccagctggccaacatcgtgaaatcctgtctctactaaaaatacaaaaattagctgggtgtggcggcacgtgcctgt

SEQ ID NO: 428239 - DNA, 567 bp, Homo sapiens
tcttgcacacctgaattgtttgaagaagagttacacctttcacatggaagtatagaataaattaatatatgttacttttattaactgaatcctgcccttctttgctcagagatgtcaaaaaatgtgctcaagatcacacagcaagtaaatggtagagcctggtctgtatgatttaaagcctatactctcccccacttatctgctggctgtagcctgaatcattgcatagatgacaggatattatggcaaaacagcagtcaagctagtaaagtatagtttgttggtaggcagcagagaatagagcagatctgacctttgtttatttaacaagtatttatcctacaattcctatgcatagaggagacatagactgtaacctmaaagatgtccagaaagattaagctggttatgtgacctgctagctgtatggccatatgcaggttatttaagttctctgagcaacattttattcacttacaaaatacaagaaataggtgtacccctctaaatggaagctttgagggtcaaatgcagcccttttgcaaaagtgcagtgtaatcactatag

SEQ ID NO: 428240 - DNA, 499 bp, Homo sapiens
tattcttacgcatgtattctgtaacacagccatctgaactgtgaatctgaggaatttactccatgctctccttgtcagcatcttcacaaccctgtacattacgtttcccacaccctaggagctgagacagctcctctgtcagcctcatttgtggattggttggagtagaaattaccctggtgtactcactgttttagcacagatttcgggaagaaagaataatttcaggacttgcaggatggaaacgtaggtagcttcattgttttagaagaaagttgtatctcaggcattgactatgtcatgaaaggaactgaaaaaatctcacaaagaggacaatgagttgatgattctgggctaagtagaatatagaatgaaagtagcatgtgataacagagtgacccatttccaggatggactaactcagtggttctgataagaaaaggaaaatgttcaytgggggtttgaatatttagggtttcaatattaactggaaaggttg

SEQ ID NO: 428241 - DNA, 599 bp, Homo sapiens
gattaatttatgctttttatttggccccggatggatcaactaaatggaattaaaattatacaagtaaatgttatttcaaaccctccagtagcaggaaatagctttataacaaaattacataacagctggtgctgctgccagtgaccagaatggtaatgttttcttttgatttccttrtaactgcacagggctatttagctgcaatgtcttcaaagactttcagtaaagagggacagaagtaaaggacactagtgctttgtgggaatacataaatgatatttctgcaggatacgtcacaatcttttctacaaaatcagctttgcaaatatctgtcactatttgaagtgtaaataaaagaatacaattgctgtgtcagggcttctcaaataggattttgcactcaaatcacctgaaaaacacgttaaaatgcagattcccatctcaagttctcagttgggggctgagatgctgcctttctgaggagctctctaatgatgttgatgctggtgtttcttgtatcacactttcggcagtaggaatacagcagtgattgtttgtcacaacggatcaatgtgctctggcctgtttttaaggccaca

SEQ ID NO: 428242 - DNA, 599 bp, Homo sapiens
gattaatttatgctttttatttggccccggatggatcaactaaatggaattaaaattatacaagtaaatgttatttcaaaccctccagtagcaggaaatagctttataacaaaattacataacagctggtgctgctgccagtgaccagaatggtaatgttttcttttgatttccttgtaactgcacagggctatttagctgcaatgtcttcaaagactttcagtaaagagggacagaagtaaaggacactagtgctttgtgggaatacataaatgatatttctgcaggatacgtcacaatcttttctacaaaatcagctttgcaaatatctgtcactatttgaagtgtaaataaaagaatacaattgctgtgtcagggcttctcaaayaggattttgcactcaaatcacctgaaaaacacgttaaaatgcagattcccatctcaagttctcagttgggggctgagatgctgcctttctgaggagctctctaatgatgttgatgctggtgtttcttgtatcacactttcggcagtaggaatacagcagtgattgtttgtcacaacggatcaatgtgctctggcctgtttttaaggccaca

SEQ ID NO: 428243 - DNA, 551 bp, Homo sapiens
ggcaggggcgaggcaggtcatctttactcagtctacagagtaaaatgctaatctctctgggaaacgccctgaaacaccccagaaatcatgttttacccgtgatctgggcattagccagtcaaatggacacataaaatttactaccaccggatgtcttccaccacctctacctcgtcaaaccaaattccagttcaagccataccttaaaccaaaggtgagagtaaggagtgatttagttatattctgtgaaaacaagcataggcaaccacggttgctcttagtattttatttgttgtgggatcattagtattttctttcaagaaatgtggaataccatatttggggataaattttagcaaattggaatactatactatacatatagctgtcagactggcccaatttcaatgataatttttgtgctattgaaaagaacaaagaakagcttacttctaaaaaagattgataaaaatgaataaataataatgtacaattagaagtaatgaaaatatgtcaaataaaataattggtaacacaaacactaaaaaaaa

SEQ ID NO: 428244 - DNA, 532 bp, Homo sapiens
agagataatgggcccccactcaacaagagtgctaaaaatagcagtgagaacagggaccccacacaggcggaacagtgtgtgccaatgcgcagaggcaggggccgcctgacatggtaaccactgtcgccggcaatacagggatgcccagtaatggccatgagaagcaggcaggtattcctcatgtgcaggaagtgcacgcctgggcaaagccaagggcagcaggtcctcagggagtgatgggaaacgagagagaagcaggcgagcacaaggtgaggttaaacaggaagacgcacaacgtttaacaaacccctggacttcaccaccacygggaaaatcataaagaagagctgccttgatttactcactgttaatgttaaacatttctaaagagtagaccaacaacgcagaaacatgtatatggagacaatagcgagcctgggagtaatttttggcgtatgacaaaagtggtattttaatgtaaagagagacattatttaatattttttgttggctcagtcaatttattaataca

SEQ ID NO: 428245 - DNA, 562 bp, Homo sapiens
tgtataattatatatatatatatatatatgtctctttgtttacttttttgcctagcattcttttataaatcttaaagtttatacamttttttttactctttctttaccctcctaatttaagtacttgttttacctatcttagcacctgcctgggtctctgtgctctgggaaaacctctatcacacaagattctgatgagcaaagtagttcagaggagatctatcagactgctgtcttcactggtatatataatgtgctaatgcattccttatgtaatgagcttcattttcaccaaccagaacttggaatggaatcctactccacactggcaatgatgctatggctgttgatgagatggggcactggggagtgtatttgtctggtggggctgtcataaacaaatacctaacgctaggtcatttatacacaacagaaatgtcttgctcacaattctgaaatctgtgaggtcaaagattaaggtagcagattttgcatctggtgaaagcctgttcctcatagatggccccttttagctgtgtcctcaaatggtgaaatgggtgag

SEQ ID NO: 428246 - DNA, 562 bp, Homo sapiens
tgtataattatatatatatatatatatatgtctctttgtttacttttttgcctagcattcttttataaatcttaaagtttatacaattttttttactctttctttaccctcctaatttaagtacttgttttacctatcttagcacctgcctgggtctctgtgctctgggaaaacctctatcacacaagattctgatgagcaaagtagttcagaggagatctatcagactgctgtcttcactggtatatataatgtgctaatgcattccttatgtaatgagcttcattttcaccaaccagaacttggaatggaatcctactccacactggcaatgatgctatggctgttgatgagatggggcactggggagtgtatttgtctggtggggctgtcataaacaaatacctaacgctaggtcatttatacacaacagaaatgtcttgctcacaattctgaaatctgtgaggtcaaagattaaggtagcagattytgcatctggtgaaagcctgttcctcatagatggccccttttagctgtgtcctcaaatggtgaaatgggtgag

SEQ ID NO: 428247 - DNA, 593 bp, Homo sapiens
aaaataattcactgggacttagtacatgagcatagtttagtttgtgagattgactgatgaaaagtatgacctgagaaaaagagacagggcaggtagatttgtggggaaaatagacctggaagttcttttgyttcattttgctttgttttttttttgtttttttgagacagagtctggctctgtctcccaggctggagtgcagtggcgcgatctcggctcactgtaacctctgcctcctggatgcaagcgattttcctgccttagcctcctgagtagctgggattacaggcatatgctaccatgaccggttaatttttttgtatttttagtagagatgttggccaggctggtctctaactcctgacctcaagtcatctgcccaccttggcctcccaaagtgctgggattacatgcctaagccactgcatctggtcccagaccttgaagtccttgaccataggttgtatgtcatgatggcacttggacatttgatttctttagagaaaaagtccctatctcataagatacaaccaaataagttcagaagtaaagaagtagaagccactataaacaatccatagaggaaaggaaac

SEQ ID NO: 428248 - DNA, 558 bp, Homo sapiens
tggcaatgctaatcttatttgcattccaattagagtataattgacaattacactatgaggttttctttgaatattgtaagaattagaagatacaagaagtggaaaaagtagtaaaactttaagagtactagagagaaatagaatcagagtgggaggaaatttgagtctattttcccttacacagtaaaatatttccttacagatggtcatctatttgaatacatggtccaactaaaagctctttgtctaaatattgtgtggtttcaaacggcaaatatcttcattgtctattgattgatctagtaatatagtgaargacaaaataattatagccaaccaaactgcaaaaattcctttactataaagtattagctacaaggcaggcatggtggctcatgcctgtaatcctagcactttgaggggcaaaggcaagtggatcccttgagcccaggggttcaagaccagcctgggcaacatgacaaatcccatctctacaaaaagtgcaaaaattagccaggcgtggtggtgtgcacctgtagtcccagctacttaggaggc

SEQ ID NO: 428249 - DNA, 448 bp, Homo sapiens
ggtgaaaccccgtctctactaaaaatacaaaaattagctcagcatgatgacatgcacttgtagtcccaggtactcagggggttgaggcaggagaatcacttgaacmccgagtggcaggcactaggttggctataattttaaaagacagacaataaaaaatgctggcaagggtgtggggaaattagaaatgtccagtatagcaaatccacagggacagaaagtagataggtgtttgcctagggctgggagaggggtgtggctgctaagggttatggggttttatctttggaatgatgaaaatgttctgaaattagattgtggtgatggctgcaaaactctatataaatattctaaaaactattgaactgtatactttaaatggatgatctgtgtggtgtatgaattgtatctccataagctgttaatttaaaaaatgtaataaatatgc

SEQ ID NO: 428250 - DNA, 577 bp, Homo sapiens
tgtcatggtggaaaaactttttgatgtgctgctggattaggtttgccagtattttgttgagaatttttgcatcaatgttcatcaaggatattggcctgaagtttcttttttttgytgtctcccccaggttggtatcaggataatactggcctcacagaatgagtctggaaaaaatccctccttctcaattttttggactagtttaagcaggaatggcatcagctcttctttgtacatctggtaaaattcagctgtgaatctgtttggtcccgagaattttttggttggtagcttatttattactgactcaatttcagagctcattattggtgtgtttgcagattcaatttcttccttgttcagtcttggaaggatttatatgtccagaaatctatccatttctgctagattttctggtttatgtgcttagaggtgttcatagtattctctgatggttatttgtatgtctgtgggatcagtggtaatatcccccttgacatttctggttgtgtttctgtgaatcttttttcttctttcttagtttatctagtggtctatattattaattttttcaaaa

SEQ ID NO: 428251 - DNA, 537 bp, Homo sapiens
gagttttttatgaagggatgttgaatgttatcagatgctttttcagaatcaattgaaatgatcatatggtttttgttcttcattctgttgatatgatgtatcacattgatttatttgtatatattgaaccatccttgcatccctgaaataaatctcatttgktcatgataaatgatctttttagtgtattgttgaattcagtgatttttgcatcaatgtttatcatagatattggcctgtagttttctttctttgatgtgtctttgtctggttttgatatcagggtaatactggtcttgtagaatgagtttggaagtattccctcccctctattttttggagtagtttcaataggattggtattagttctttaaatgtttggtagaattcagcagtgaagacatcaggtcccaagcttttcattgctgggagatgttttattatgacgtttatctcatttgttattggtctgttcaggttttggatttcttcatggttcaatcttcatagattgtatgtgtctaggaatttatttgt

SEQ ID NO: 428252 - DNA, 540 bp, Homo sapiens
tgtggcctccgtgtattctgagccaatgaactagtcaacagccttttctccagtgctcaacgaagacacaatccggcccacgaccaggtgctaagtgctgsttggtagcacttgagggagaggatgcgcagagagagtattagcaagactaagattgtcagggcaggccgggcccagcagggccagttcaacccccttccagggcagaatctgcagggctttccggctgcccgagcaccccactgtgttgatgactgggtggcagactcacactcctggctaattccaggagagactcatttaagcatttaccatttagcctaattgtttctttaattgaaagtctgcagataagcacaggtttctttcctatgcaaaagaggcttgagctagaagaaacaagccggtggtgtaagaaaacaagtgctagttttagcctggctttggggaaggggggctttgtgcctctgggttcttgcatcataatgtatttgagttaatttgacgggtgggggttcttagttacccaaacactttaat

SEQ ID NO: 428253 - DNA, 540 bp, Homo sapiens
tgtggcctccgtgtattctgagccaatgaactagtcaacagccttttctccagtgctcaacgaagacacaatccggcccacgaccaggtgctaagtgctggttggtagcacttgagggagaggatgcgcagagagagtattagcaagactaagattgtcagggcaggccgggcccagcagggccagttcaacccccttccagggcrgaatctgcagggctttccggctgcccgagcaccccactgtgttgatgactgggtggcagactcacactcctggctaattccaggagagactcatttaagcatttaccatttagcctaattgtttctttaattgaaagtctgcagataagcacaggtttctttcctatgcaaaagaggcttgagctagaagaaacaagccggtggtgtaagaaaacaagtgctagttttagcctggctttggggaaggggggctttgtgcctctgggttcttgcatcataatgtatttgagttaatttgacgggtgggggttcttagttacccaaacactttaat

SEQ ID NO: 428254 - DNA, 540 bp, Homo sapiens
tgtggcctccgtgtattctgagccaatgaactagtcaacagccttttctccagtgctcaacgaagacacaatccggcccacgaccaggtgctaagtgctggttggtagcacttgagggagaggatgcgcagagagagtattagcaagactaagattgtcagggcaggccgggcccagcagggccagttcaacccccttccagggcagaatctgcagggctttccggctgccygagcaccccactgtgttgatgactgggtggcagactcacactcctggctaattccaggagagactcatttaagcatttaccatttagcctaattgtttctttaattgaaagtctgcagataagcacaggtttctttcctatgcaaaagaggcttgagctagaagaaacaagccggtggtgtaagaaaacaagtgctagttttagcctggctttggggaaggggggctttgtgcctctgggttcttgcatcataatgtatttgagttaatttgacgggtgggggttcttagttacccaaacactttaat

SEQ ID NO: 428255 - DNA, 540 bp, Homo sapiens
tgtggcctccgtgtattctgagccaatgaactagtcaacagccttttctccagtgctcaacgaagacacaatccggcccacgaccaggtgctaagtgctggttggtagcacttgagggagaggatgcgcagagagagtattagcaagactaagattgtcagggcaggccgggcccagcagggccagttcaacccccttccagggcagaatctgcagggctttccggctgcccgagcaccccactgtgttgatgactgggtggcagactcacactcctggctaattccaggagagactcatttaagcatttaccatttagcctaattgtttctttaattgaaagtctgcagataagcacaggtttctttcctatgcaaaagaggcttgagctagaagaaacaagccrgtggtgtaagaaaacaagtgctagttttagcctggctttggggaaggggggctttgtgcctctgggttcttgcatcataatgtatttgagttaatttgacgggtgggggttcttagttacccaaacactttaat

SEQ ID NO: 428256 - DNA, 551 bp, Homo sapiens
tgccatatttttgcatcattgctatggtattttcttcctcatcttgctcatatgtgggtaactgtctcaacattttatttgctctgatacaatgttggtgacttctttacttttgttttctaatgagctgatattaaaataacaatggaagagaatgttgaagttgtttgctctagatttagggattaaatttttaatattcctagtaccagttttctctaattactagaaaaacaccatactggccatagaaagagccccstagaggctaattggcatttatttgtttctgttggaattcagatcccctctatagacagataaaaggatagaagataaaaggagttcagattcacagtctacaaagtcataaaatttatactggcaaaatgtaagaatatacaagaaagatttcgatacatttaagaatgatagctccaacaaggaactataaggaagatattaagaatttcttggttattatacataaacagagactgacaagaaaaagaacaactgccatatgctccctcccctcataagtgcctcgt

SEQ ID NO: 428257 - DNA, 551 bp, Homo sapiens
tgccatatttttgcatcattgctatggtattttcttcctcatcttgctcatatgtgggtaactgtctcaacattttatttgctctgatacaatgttggtgacttctttacttttgttttctaatgagctgatattaaaataacaatggaagagaatgttgaagttgtttgctctagatttagggattaaatttttaatattcctagtaccagttttctctaattactagaaaaacaccatactggccatagaaagagccccctagaggctaattggcatttatttgtttctgttggaattcagatcccctctatagacagataaaaggatagaagataaraggagttcagattcacagtctacaaagtcataaaatttatactggcaaaatgtaagaatatacaagaaagatttcgatacatttaagaatgatagctccaacaaggaactataaggaagatattaagaatttcttggttattatacataaacagagactgacaagaaaaagaacaactgccatatgctccctcccctcataagtgcctcgt

SEQ ID NO: 428258 - DNA, 563 bp, Homo sapiens
aatggcaaattaaattgtgtgtcttttttgttttgtctttctacctgatgtgtattcaagygctataacacgtatttccttgacaaaaatagtgacagtgaattcacactaataaatgttcataggttaaagtctgcactgacattttctcatcaatcactggtatgtaagttatcagtgactgacagctaggtggactgcccctaggacttctgtttcaccagagcaggaatcaagtggtgaggcactgaatcgctgtacaggctgaagacctccttattagagttgaacttcaaagtaacttgttttaaaaaatatgaattactgtaaaataatctattttggattcatgtgttttccaggtggatatagtttgtaaacaatgtgaataaagtatttaacatgttcaactgtctgtgtatcattcaattcagcatggtagcctcagcaaaacactgacaacctgtaaaacctttggtgattcttccatttcctagcaggtgtggttggagatttatcttttatttttggagatgggttcttgcttgttgcccaagccgtcc

SEQ ID NO: 428259 - DNA, 563 bp, Homo sapiens
aatggcaaattaaattgtgtgtcttttttgttttgtctttctacctgatgtgtattcaagcgctataacacgtatttccttgacaaaaatagtgacagtgaattcacactaataaatgttcataggttaaagtctgcactgacattttctcatcaatcactggtatgtaagttatcagtgactgacagctaggtggactgcccctaggacttctgtttcaccagagcaggaatcaagtggtgaggcactgaatcgctgtacaggctgaagacctccttattagagttgaacttcaaagtaacttgttttaaaaaatrtgaattactgtaaaataatctattttggattcatgtgttttccaggtggatatagtttgtaaacaatgtgaataaagtatttaacatgttcaactgtctgtgtatcattcaattcagcatggtagcctcagcaaaacactgacaacctgtaaaacctttggtgattcttccatttcctagcaggtgtggttggagatttatcttttatttttggagatgggttcttgcttgttgcccaagccgtcc

SEQ ID NO: 428260 - DNA, 574 bp, Homo sapiens
tggctgctctaagtgggaaggcatttattgtatgtatgtctgtgtgtgcacacacgcatgcatgtggatggaattcaaaccccatcttaaaggagcagttactattcagctgcagccaattgttggaactggagcatgtaggcccagtatttccgggtctttcaattttttttgagggaatctcaaagtaataatcacaaaattgtggagacctagcaaaatatttttttgctgaccactagctgtgggaccacttaaactgaggttgaaggaaatcacttatttatttattaagtgatattgtttgaccttttaacaatgcgcataaaatgtgtaagaagatatttttaaaagatgaccactttattttattattttgcagctttatttatgtttcacacatagtcgagcaagaattcctgccttcaactktacaccatggctacggggctttttttttcatgtatagattatgtattatgttcatcttaacacattcctctgtcccacctttcactcaatttaaaaaaaaatgtaagattttagccaaattagtatttcccaatgagctgac

SEQ ID NO: 428261 - DNA, 343 bp, Homo sapiens
atttttaacaaagatttaccatagtgattacaggtgtgagccaccgcacctggcctgggctctgctatttaaatcctgtaggtctcagttttttcctcttaatctcccctggtagttgtrccagttaaatggatgctgatggtagagcaacaaatgctccctaatccattgcttgtgtttctccttgcacagaatgcagttttgtcacctccatgttttcgtatgaatggaatacttgttattccttgtaacctagtgaacacctcttcattcttccatacttgagctaaaatcaacctttatgtgaagccttcccaaaatcgccaaacctccagccccaccc

SEQ ID NO: 428262 - DNA, 527 bp, Homo sapiens
ttttagtctgggacatatttcaggggagtacagatcaaaactccattcctttctgcatttatgttggcatttcatatgattctaaaagtccattctagttagattctcaaattttagttaatagttcataatkttcttgtaaaacaactcggagtattcatttagaagatgtttattgaacacttcctatgttctagacgatgtaggggctagggaaatagcagcaatcaaatagagaaaagtctgtggccttgtgagacttacttgcattttagcaagagggattaaaaaagtacaccttagctgacattgtattagatctttgtttattgccccattttactctgtatttatcttactgtagcttatcctttaaaaaaatttaaaattttcacaaaattcctatccaggggtatatttatctaagtgatcatttcaaagaaccaattttggattaatttgcctttttttgatatgtttgcagggaatggcatctccattccatcatttatgcccttctctttaaa

SEQ ID NO: 428263 - DNA, 624 bp, Homo sapiens
aattattttttaccacaatcaccctgttatcctagcaaatactaggacttattccttcttttgatttttttgtaaccattaaccgtccccacttccccgtcaccactccactactcttcccagcctctggtaaccatccttctaatctctatctcaatgagttcaattgttttaatttttacctcccacaaatatttataaaaaataaatattratttataaaaataaacttttagctccatgagaacatgcagtatttgtctttctgtgcctggcttatttcacttaacataatgatctccagttccatccatgttgtttcaaatgacagtgtcttgttcttttttatggctgaatagtactccattgtaagtaccaattttttttatctgttcatctgctgatggacacttaggttgcttccaaatcttggctattgtgaatagtgctgtgctaaatatgggagtgcagatctcttttcgatatcctgatttcctttcttttgtgtatatacctaagagtgggattactggatcttaaggtagctagctctgtttttagttttttgaggaaccaccaaactgttctccatattggttgtactgatttacatttccaccaaca

SEQ ID NO: 428264 - DNA, 571 bp, Homo sapiens
accatacataagttgaggaagttatcaccttagactctcaagtctaaatcaattactcaattccatatcctagattgaagttagaaggctgtccctctactaggacaaattattttataaaactactttaaatatcaaatatgtacatattccttttaacataaaagtattagtactatggtttcaattctcttaactatttctatacttacctcaaaaccctctggagtrgaaaaatgtatatccacctgaggaagattgttactatctcacgtaactgtgcttgccaactcagtatgaaaaacaatttctgccccaattaattacaaatgttttcggcgtggacactgtttgttttcaagccccctactggattgaatgaaccctattttttaaatgctatttaatagttgctgggtcatgggctttaagatttaaaagagggttggtttggcgggtcatggatctcaaattcatggatttaagtaatagatacattaatttctccgtatgctcacagatgtctctggcacctactgaggtttatcatgtgattgcattttatatttcc

SEQ ID NO: 428265 - DNA, 571 bp, Homo sapiens
accatacataagttgaggaagttatcaccttagactctcaagtctaaatcaattactcaattccatatcctagattgaagttagaaggctgtccctctactaggacaaattattttataaaactactttaaatatcaaatatgtacatattccttttaacataaaagtattagtactatggtttcaattctcttaactatttctatacttacctcaaaaccctctggagtggaaaaatgtatatccacctgaggaagattgttactatctcacgtaactgtgcttgccaactcagtatgaaaaacaatttctgccccaattaattacaaatgttttcggygtggacactgtttgttttcaagccccctactggattgaatgaaccctattttttaaatgctatttaatagttgctgggtcatgggctttaagatttaaaagagggttggtttggcgggtcatggatctcaaattcatggatttaagtaatagatacattaatttctccgtatgctcacagatgtctctggcacctactgaggtttatcatgtgattgcattttatatttcc

SEQ ID NO: 428266 - DNA, 613 bp, Homo sapiens
aattagtaacagggcagaatctctggctgccctgaacagaccattaaagaccagaggaagtggctttaagaacaaatttgaaaggaaagtgaattttatctatttttttaatttataaaatcagagtttttgttatttgactgtcacctaaagaatgaggaagaatttgytataatttagggacaggaacgaacaggtttttaagactcgtttgtgtgtctaggtttttaagtctagtttgtatgcaaaaacctggagggaagagatggttatagacagtttgaaaactctcaggagttcattgtggccaagttagagaataaagtaccaaaaagatactctgggcagagagaaatgaagctggaaaagtaaataggtgccatagtgttcagatccttgcatgtgagttctggcaggtggcctcgaaaaagcacttaacctcccagacgtagttttcttattggctggtaaaaggatacactgggttgagtgcagtggttcacagctagtgagcactttgggaggccggggccagaggattgcttgagtgtaggatttcagaccagcttgggcaacatagtgagacgtctctactaaaaaataaaaaaattta

SEQ ID NO: 428267 - DNA, 631 bp, Homo sapiens
ttacagttattacctggaaatacaaggatattacttcaaatcagatgcttggggagtagaagaacaggaagcaagaagaggttattagcaaacatcaatatttctcatagtagagaacaaacagagaattactaagggtattatatgaaggtattagtatataaggagccattcaagcagaaatacaaactttaccaataaaagaaaagaaagagaacaaatgaaatagacaaagattatttctatcaaaatcgtatgtattaattataacattaacatatggcagaattaaggtgaagtatatagaccatggacatgattctttatattattaaggtacacttaacagtaatcaagtttgaaatgactgagatttcctaatagatgwgacttataaagatatgaacaaagtacttcactcattatattgagtagaagaggggtcccaaattcaaatgcctattggaaaaagacactgaaagaagctggctgctctaagtgggaaggcatttattgtatgtatgtctgtgtgtgcacacacgcatgcatgtggatggaattcaaaccccatcttaaaggagcagttactattcagctgcagccaattgttggaactggagcatgtaggccc

SEQ ID NO: 428268 - DNA, 608 bp, Homo sapiens
atgttaagtgatagttattagcttttgtgtgtcattttgtgtagtctacagatttagggctcgtggcacacgttctcactgataagtgagagccgaacaatgtgaacacatggacgtagggagggaacaacacacactgggccctgtcgcggggtgggaaccggggacaggagagtatcaggaaaaatagctaatgcacacagagtgtaatacctaggtaatgggttgatagatgcagcaaaccaccatgacacacatttatctatgtwataaagctgcacatcctgcatgtataccctggaacttaaaaaaaaatattgaagggtcatggttaacttgtatgtgtgccaatatgcatagtatatatacatatacaaatgcatatatgtacacatgcatatgtctaatttttcattttgtaattaatttttagaccacactaaagttgctcttagtgatgatagggcttgtttctttgtttcattgtggctacttcttagcaccttctttagaaagcagttaggagaagatcatttgaaggccaacgagtgttgtgggttattgttaagctgatttaacattatctccccccacaaccacgcttgact

SEQ ID NO: 428269 - DNA, 608 bp, Homo sapiens
atgttaagtgatagttattagcttttgtgtgtcattttgtgtagtctacagatttagggctcgtggcacacgttctcactgataagtgagagccgaacaatgtgaacacatggacgtagggagggaacaacacacactgggccctgtcgcggggtgggaaccggggacaggagagtatcaggaaaaatagctaatgcacacagagtgtaatacctaggtaatgggttgatagatgcagcaaaccaccatgacacacatttatctatgtaataaagctgcacatcctgcatgtataccctggaacttaaaaaaaaatattgaagggtcatggttaacttgtatgtgtgccaatatgcatagtatatatacatatacaaatgcatatatgtacacatgcatatgtctaatttttcattttgtaattaatttttagaccacactaaagttgctcttagtgatgataggkcttgtttctttgtttcattgtggctacttcttagcaccttctttagaaagcagttaggagaagatcatttgaaggccaacgagtgttgtgggttattgttaagctgatttaacattatctccccccacaaccacgcttgact

SEQ ID NO: 428270 - DNA, 588 bp, Homo sapiens
tgcttagtaattttgggaccctaacattttcacaggctttaaattttattattctttagttactacgtgctagcatataaataaatagtacaaaaccaagaaggcatccaccttttggttgtctcttcacgtgtaaaacaacactttgtgttaagtatcttcacacacggcggcgcaaaggtagaaaccgatactaaaaaagcgtgtagaaaatagytcccagcctgggcaacacagggagacctcatttctacaaaaataattcgccaagcatagtggtgcgcacctgcggtcccagctacttgagaggctgagatgggaaagttgcttgagctcgggcagcaggagttccaggctgcagtgagctaagaatgcgccactggactccagtatgggcgacagcgtgagaccctgtctcaaacaaaaacaaaagcccgttactccaccaagaaggcgcttttgcacattgttttaatgcttaacgccttcaggatgccagcgtgacggaagcaagtaaccaccaaggcatcaccactggcgctaaacttctcacttccggagtgctgcaagcgcagaaaatatacgtca

SEQ ID NO: 428271 - DNA, 588 bp, Homo sapiens
tgcttagtaattttgggaccctaacattttcacaggctttaaattttattattctttagttactacgtgctagcatataaataaatagtacaaaaccaagaaggcatccaccttttggttgtctcttcacgtgtaaaacaacactttgtgttaagtatcttcacacacggcggcgcaaaggtagaaaccgatactaaaaaagcgtgtagaaaatagttcccagcctgggcaacacagggagacctcatttctacaaaaataattcgccaagcatagtggtgcgcacctgcggtcccagctacttsagaggctgagatgggaaagttgcttgagctcgggcagcaggagttccaggctgcagtgagctaagaatgcgccactggactccagtatgggcgacagcgtgagaccctgtctcaaacaaaaacaaaagcccgttactccaccaagaaggcgcttttgcacattgttttaatgcttaacgccttcaggatgccagcgtgacggaagcaagtaaccaccaaggcatcaccactggcgctaaacttctcacttccggagtgctgcaagcgcagaaaatatacgtca

SEQ ID NO: 428272 - DNA, 593 bp, Homo sapiens
ttaatcactgagtagctgtcgcggtgatcagatcaactgtcgcgatattgcagtgcttctcctcaagtcactcttatttgacttaatgatggcacaayagtgcaagagtatgatgctggcaatttgaatatgccaaagagaagctgtaaagtgcctcctttaaatgaaaaggtgaaagttcttgaattaataaggaaagaaaaaaatcgtattctggctgaggttgcttagatctgcataaaaatgacttttctatctgtgatattgtgaagaagcgaaaagaaattggtgctagttttgctgccgtaccataaactgcaaaagtcatgacctcagcgtgtgataagtgctcagttaggatggaaaagccattacattttggggtggaagacatgaagagaaacatgttctgattgatgacaatcaggtttggtacttctgcagtttcaggcatcctctgggggtcttggaacataccccaaggatgagggggctgtctactatgttaatagaatcaattgtagtaaattgacatgcttttgatcccagatctaccacttattagccctgtgactctagggaggttacctaac

SEQ ID NO: 428273 - DNA, 593 bp, Homo sapiens
ttaatcactgagtagctgtcgcggtgatcagatcaactgtcgcgatattgcagtgcttctcctcaagtcactcttatttgacttaatgatggcacaacagtgcaagagtatgatgctggcaatttgaatatgccaaagagaagctgtaaagtgcctcctttaaatgaaaaggtgaaagttcttgaattaataaggaaagaaaaaaatcgtattctggctgaggttgcttagatctgcataaaaatgacttttctatctgtgatattgtgaagaagcgaaaagaaattggtgctagttttgctgccgtaccataaactgcaaaagtcatgacctcagcgtgtgataagtgctcagttaggatggaaaagccattacattttggggtggaagacatgaagagaaacatgttctgattgatgacaatcaggtttggtacttctgcagtttcaggcatcctctgggggtcttggaacataccccaaggatgagggggctgtctactatgttaatagaatcaattrtagtaaattgacatgcttttgatcccagatctaccacttattagccctgtgactctagggaggttacctaac

SEQ ID NO: 428274 - DNA, 531 bp, Homo sapiens
tgttagatacatctggaatattctgatagtcttgttcacattttggtaacttgttttatgtctttagtcatgctgttatctctgcctgatacttctattgccagacatgcttggagtctagtcccattgtttgtctttgttgattccttcaggatggactacgtcataccaggttgagtcccggttccacaatgcaacagtcatgttatcttgggtatattacttatcttgactaaatttgtttcttactctgtaaaatgaaattagagactaaagmacttgtctcagaatactgttgtaagtactaaatgagataatatgtaaaagcccttggtatagagcctgagctctcagaacataatttttcttgctagcattcagcactggattatctctagtgcccatcacaatgcctggcacttagttactgttcagtaactgtttggtaaatgaaaaaacttaactaatttatgataaattttaccattacaaattatccaaatgctagtaatctgtggatgtaccatactt

SEQ ID NO: 428275 - DNA, 488 bp, Homo sapiens
tttctaattaaaaggttgtggcgggagaagttcaggtggaaataaaaaggagagggcaaactataggataaatgagacttaagggacatggcaaccaaatacaaygtggggatcttgtttggtccctgttgcacgcacaccaactggaggaaaacactgatgagacaagcagggagactaaacactgatggagtgactgatgcaatgaaataggaaggacatgagagaagactggccatatgttgataactggtcatgtgtatatgaggatcgagtatattattccatctacttttgcatgcttgaaaatttccctagtaaaaaactgggcgtcaagttaaaattacatgcaatgtctgactttctcagtgagtgactgactggctgaagagatatctaaatatatctctatggttctctattattaaataaagaattacacaaaagaataagttgtgaaatcaagattagcccctgagtttctctta

SEQ ID NO: 428276 - DNA, 488 bp, Homo sapiens
tttctaattaaaaggttgtggcgggagaagttcaggtggaaataaaaaggagagggcaaactataggataaatgagacttaagggacatggcaaccaaatacaatgtggggatcttgyttggtccctgttgcacgcacaccaactggaggaaaacactgatgagacaagcagggagactaaacactgatggagtgactgatgcaatgaaataggaaggacatgagagaagactggccatatgttgataactggtcatgtgtatatgaggatcgagtatattattccatctacttttgcatgcttgaaaatttccctagtaaaaaactgggcgtcaagttaaaattacatgcaatgtctgactttctcagtgagtgactgactggctgaagagatatctaaatatatctctatggttctctattattaaataaagaattacacaaaagaataagttgtgaaatcaagattagcccctgagtttctctta

SEQ ID NO: 428277 - DNA, 619 bp, Homo sapiens
atgttgaacattgatagtgagaggtgaagctgsctgggcttctgggtcgtgtggggacttggagaacttttctgtccggctaaaggattgtaaacacaccaatcagcgctctgtgtctagctaaaggtttgtaaacgcaccggtcagcactctgtgtctagctaaaggtttgtaaatgcaccaatcagcactctgtaaaatagaccaatcagcaggacgtgggcggggccaaataagggaataaaagctggccacctgagccagccccagcagccgctcggctccacttccatgccatggaatctttgttttttcactctttgcaatgaatcttgctgctgctcactctttagtgagcactacctttatgagctgtaacactcaccacgaaggtctgcggcttcactcctgaagtcagcaagaccacgaacccaccaggaagaagaaacaaccctgtacgtgccatctttgagagctgtaacactcactgggaaggtctgcggcttcactcctgaagtcagcaagaccacaaacccaccagaaagaagaaactctggacacatctgaacatcaggaagaacaaactcgggacacactatctttaagaactgtaacacca

SEQ ID NO: 428278 - DNA, 619 bp, Homo sapiens
atgttgaacattgatagtgagaggtgaagctggctgggcttctgggtcgtgtggggacttggagaacttttctgtccggctaaaggattgtaaacacaccaatcagcgctctgtgtctagctaaaggtttgtaaacgcaccggtcagcactctgtgtctagctaaaggtttgtaaatgcaccaatcagcactctgtaaaatagaccaatcagcaggacrtgggcggggccaaataagggaataaaagctggccacctgagccagccccagcagccgctcggctccacttccatgccatggaatctttgttttttcactctttgcaatgaatcttgctgctgctcactctttagtgagcactacctttatgagctgtaacactcaccacgaaggtctgcggcttcactcctgaagtcagcaagaccacgaacccaccaggaagaagaaacaaccctgtacgtgccatctttgagagctgtaacactcactgggaaggtctgcggcttcactcctgaagtcagcaagaccacaaacccaccagaaagaagaaactctggacacatctgaacatcaggaagaacaaactcgggacacactatctttaagaactgtaacacca

SEQ ID NO: 428279 - DNA, 619 bp, Homo sapiens
atgttgaacattgatagtgagaggtgaagctggctgggcttctgggtcgtgtggggacttggagaacttttctgtccggctaaaggattgtaaacacaccaatcagcgctctgtgtctagctaaaggtttgtaaacgcaccggtcagcactctgtgtctagctaaaggtttgtaaatgcaccaatcagcactctgtaaaatagaccaatcagcaggacgtgggcggggccaaataagggaataaaagctggccacctgagccagccccagcagccgctmggctccacttccatgccatggaatctttgttttttcactctttgcaatgaatcttgctgctgctcactctttagtgagcactacctttatgagctgtaacactcaccacgaaggtctgcggcttcactcctgaagtcagcaagaccacgaacccaccaggaagaagaaacaaccctgtacgtgccatctttgagagctgtaacactcactgggaaggtctgcggcttcactcctgaagtcagcaagaccacaaacccaccagaaagaagaaactctggacacatctgaacatcaggaagaacaaactcgggacacactatctttaagaactgtaacacca

SEQ ID NO: 428280 - DNA, 388 bp, Homo sapiens
ttccaagtacacatcacaccaaatrtaacaccatgtacctgctatcccaattacacacatctgaaagaaggagtttcccgaggcataaatctctctatattagtagttcttcttatttcagagaataactttgagtaattactgcttacatttctccagtaaagacaatactcagtttatcggaacagcttatttctcagtcacggaaccccttcagtccatagtactctttcatttattctgccccttactgctgaagaactcacaggatgtgcagtataaataaatatcctcatgatttccagtgctaggactcagaaaaactggaagaaacaaagaaaactgctagatggctctttgtggttcttttcatgtaacagttgaaggt

SEQ ID NO: 428281 - DNA, 588 bp, Homo sapiens
tgcacaggtacaagctcaggactccactgctgaccatgtgagagtgataggaaatgctcatgtgccattgtggagagggaaaatttggatataagcctgtatacgtagcatgacttcaacccattctatctatctatctaattatctactcaccatctatccatcatccatccattatttatgcatgtatcctccatccatccatcatccatccattccatccatcatccatccattccatccatcatttattcattcatcccccatccatccatccatccatccatccacccacccatccactcatctacttacctacctacctcatagtcctcaattataaaattgtgtggaacagataataaggtactttccatttttaactttttgtgattctacatataatatttcttttcacagaatcacttgattcatggattagccgaggaagtttatttttaattttgcaaatgctttcctttatttatccttatggtactcatcacatctcaaaatsttagctatttacttcatattgtgttttccctagaaggtgagctccctgaaggcaggggctttgtttgtttt

SEQ ID NO: 428282 - DNA, 629 bp, Homo sapiens
ttggtactgacactcatggtaactgcctgcagtgtggccttttgagggtgctgatttctcagtggaacttaaactaatggatgatgtaccttctgattgtctcctggatgtgctgccattactcctttgggagtgtggacacacaaacacacacacacatatgtgccccaggtcaactgttacaaagctccatggctrttggttgagctcagtgattatgcacacaatacgcacatgtgcaggtgcgacccacagtcctaggacagggccggcttctggaagaatagtgtctgtgcctgaagagcctagcaacttaaaaggctgttgagcacttgcaatacaacacatgactatccagtctattagaaaaaaatacacatgatacctttgattaattaaatgcttgattgattaaataacttttggtttaattattcctacagggacttctaggagagaaaaagccaaccaagcaaacaaaaacacaagaattccattccttgccaaaatattggcagtcagtattttcaggcaggtgtgcactgtatgctttgcgggacaggcttcctgtgaactgatgttgggggatgctgtccccagatgtgggagattccatctctgtcaggtca

SEQ ID NO: 428283 - DNA, 629 bp, Homo sapiens
ttggtactgacactcatggtaactgcctgcagtgtggccttttgagggtgctgatttctcagtggaacttaaactaatggatgatgtaccttctgattgtctcctggatgtgctgccattactcctttgggagtgtggacacacaaacacacacacacatatgtgccccaggtcaactgttacaaagctccatggctattggttgagctcagtgattatgcacacaatacgcacatgtgcaggtgcgacccacagtcctaggacagggccggcttctggaagaatagtgtctgtgcctgaagagcctagcaacttaaaaggctgttgagcacttgcaatacaacacatractatccagtctattagaaaaaaatacacatgatacctttgattaattaaatgcttgattgattaaataacttttggtttaattattcctacagggacttctaggagagaaaaagccaaccaagcaaacaaaaacacaagaattccattccttgccaaaatattggcagtcagtattttcaggcaggtgtgcactgtatgctttgcgggacaggcttcctgtgaactgatgttgggggatgctgtccccagatgtgggagattccatctctgtcaggtca

SEQ ID NO: 428284 - DNA, 629 bp, Homo sapiens
ttggtactgacactcatggtaactgcctgcagtgtggccttttgagggtgctgatttctcagtggaacttaaactaatggatgatgtaccttctgattgtctcctggatgtgctgccattactcctttgggagtgtggacacacaaacacacacacacatatgtgccccaggtcaactgttacaaagctccatggctattggttgagctcagtgattatgcacacaatacgcacatgtgcaggtgcgacccacagtcctaggacagggccggcttctggaagaatagtgtctgtgcctgaagagcctagcaacttaaaaggctgttgagcacttgcaatacaacacatgactatccagtctattagaaaaaaatacacatgatacctttgattaattaaatgcttgattgattaaataacttttggtttaattattcctacagggacttctaggagagaaaaagccaaccaagcaaacaaaaacacaagaattccattccttgccaaaatattggcagtcagtattttcaggcaggtgtgcactgtatgctttgcgggacaggcttcctgtgaactgatrttgggggatgctgtccccagatgtgggagattccatctctgtcaggtca

SEQ ID NO: 428285 - DNA, 590 bp, Homo sapiens
atatgtttgttggctgcataaatgtcttcttttgagaagttcattatamttcgcccactttttgatggggttgacatcctttgcccactttttggtggggtttggttttttcttgtacatttgtttaagttctttgtagtctgctgttcctactaagatgcacccatgtttcttgaatacacatcagggattgctgtaagcctattatttccagagtttttaaaaagtagattctgataattttggctagtgttctcttgatgtcatgaaagagagaattttcaaaattatttttctgccatttctgtcaatatcactttataatttgatttttaaatggcctttcacagggccattacatttatcttaaatgtaatatttattagtttaacatttcaatttagatttacatttttctaacatacaccgagtatattctcttattttgaaagatatataattagtggtcttatcccttgtgatcaatataatcacacttagtaatgtaatcttgtggaattcatttatatatcaattgtggtaaaaactgtttttggagaataatataaatggagtaagtgaataattca

SEQ ID NO: 428286 - DNA, 590 bp, Homo sapiens
atatgtttgttggctgcataaatgtcttcttttgagaagttcattataattygcccactttttgatggggttgacatcctttgcccactttttggtggggtttggttttttcttgtacatttgtttaagttctttgtagtctgctgttcctactaagatgcacccatgtttcttgaatacacatcagggattgctgtaagcctattatttccagagtttttaaaaagtagattctgataattttggctagtgttctcttgatgtcatgaaagagagaattttcaaaattatttttctgccatttctgtcaatatcactttataatttgatttttaaatggcctttcacagggccattacatttatcttaaatgtaatatttattagtttaacatttcaatttagatttacatttttctaacatacaccgagtatattctcttattttgaaagatatataattagtggtcttatcccttgtgatcaatataatcacacttagtaatgtaatcttgtggaattcatttatatatcaattgtggtaaaaactgtttttggagaataatataaatggagtaagtgaataattca

SEQ ID NO: 428287 - DNA, 590 bp, Homo sapiens
atatgtttgttggctgcataaatgtcttcttttgagaagttcattataattcgcccactttttgatggggttgacatcctttgcccactttttggtggggtttggttttttcttgtacatttgtttaagttctttgtagtctgctgttcctactaagatgcacccatgtttcttgaatacacatcagggattgctgtaagcctattatttccagagtttttaaaaagtagattctgataattttggctagtgttctcttgatgtcatgaaagagagaattttcaaaattatttttctgccatttctgtcaatatcactttataatttgatttttaaatggcctttcacagggccattacatttatcttaaatgtaatatttattagtttaacatttcaatttagatttacatttttctaacatacaycgagtatattctcttattttgaaagatatataattagtggtcttatcccttgtgatcaatataatcacacttagtaatgtaatcttgtggaattcatttatatatcaattgtggtaaaaactgtttttggagaataatataaatggagtaagtgaataattca

SEQ ID NO: 428288 - DNA, 589 bp, Homo sapiens
agaaagcagcagccttctgggagctacctgcataggagggacagcccgagctgctaagccgggtctgcacaggactgagggctggctgatgacaggagggcctttcgctggggctgctgggtcttggtttctcrggctggttttcctgtcgttggaaactgcattgccctgagctctgcgtgctgaaataaatctaagggcaagtccagctgttggaggaatgtagttgtgtttggaataagtagcatcggtagcgtgccttttcctcatgtgaatcaccagggctctttcttgctcaggaagttggaggcacaaatcctgtatcccctcacccccgccccccgttttttttttttttttcattaaaaattctgttttgccaatagttttgcaccttttcaatttttgtgaatcgtctctagaggtttgcagttggctaccattctggcccttgctctgaaactccatacagctggttaccatcgagccgcatgtgcctggtacattgccagctcctctgtcagtgctgataaattcctaaagatacactagttcagctggacggagcaggtttttgttgtttttgttt

SEQ ID NO: 428289 - DNA, 562 bp, Homo sapiens
ataacatctgtcactgccatttataaaataaaatatctgagtctctcaaagacagtttaggaaattcacgatcctcctaagagaaagacgaaaacaccgtcagtagattctcagccccaggacaggccagcttaaagtgattaggcttgtggacagagattaaactgacaaaccttacacacttggccctagcctggagcaggggattgattttttctctgagaagaactttagaggccaaaggaaaagacaagttgaaaagaaattcctctctgaacagttacacagctaaggcaaagatttcagaattctgccccgagaatctttcttcccagcctagtttagtgctatgaccaaatacaaaaaaaagaaccaatttaggacyaccaccagaattatttatttatgactctcacacccctttgtggatcactgatggcaagttctaagtgactgattgattggttctcctttgtgcctcattgatcaatcagggcattcccaaagactactaattatttcagttttcaacccaagttaaacataatcaggaagttaaatc

SEQ ID NO: 428290 - DNA, 598 bp, Homo sapiens
aactttagttactaatagaagtttgataatgtgaggatgtatatttagaaaatgtatgtgacagaaagatattagaaatattcatgtgtgaatgactaataaatcacaggttaaaaagttcattcagtgtattgatatgttgttcaatgtcatcttccttgttcattgtgaaaatctttggaaataggagctcaaaaggtgtccataaattttgtacctcagctgaaaagctttctgataaagggaaaaatgagatttggcatttagaactagcttctggacactattagaaatagagcatcaaattctgttctcactaaagcttttataactgagccagacattatattgagctttatatacagttttctgaattgagttatatttaaagtgggttatattcactgacaaggcttttgaacagagccagctctctagtatctgtcattgtgcaactcctttgaagggagcggacaatttgaaagtragggaggggagtgagaagaaaaggaaggaggcaacttgagagatgtcttagtctgtttgggctgctgctatatcaagataccataaattaggtagtttataaacaatagaa

SEQ ID NO: 428291 - DNA, 553 bp, Homo sapiens
ctagtacatagaggtatctggaaggttattatgttatctgaatcttgaatagaatcagttacctgaagccagtgttaccttaggaattccatatgtgtgattgaagattgcttattatgcaaagaagttctatttgtagaagagtatttccatagatgatacttgtttttgatttgacataaggctatgcccctaatcctctaggcagacttaaatttcacagaagtttagattttataagacccattgtttttctccttagaagaactattctaaaagggtttcctttaattttatatgaaaataatttttgatgattcaaaatttaatgggtgttcagtatttgccaagactatatgtgtcttttctccgtcttgtagtccttagaattgtgactrctaacaaaataaaacagagttttcctttagtgactcaattttttagaggctactttgtgtgttattcagattattgttttttcctcagctcatttccgtgtttgcacatgtacttgaaggtttagggtggaaaaggaatgctaatccattgtgtg

SEQ ID NO: 428292 - DNA, 595 bp, Homo sapiens
aagaattaatttgcaattgttatttcttataaacttactcaattcttttctgactcctcagctagtgattaagaaaaaaatcatgtggacatgaagggagaaagctttgctttctacttggctttctgtgtacaaatcagaaattaggtatcatggaataattgttctaggaaattgcgttgagagaatggtattattaactatattaactaacttgtctaatgatctttgtgtgtagaaaccatgaaaacaggaaaacatctttgttcaccaaactagatcttcataagccactgttttataattttgaatcctgttgaacaacattctgtaggttattaaatcaagacttttgtctttttttatttccagcaaactcaagtgtgtatatataagtstttggaatgttgaaggagtgacattccacaggcttcagatttttttttttttttgctgcccattgtgctaaggagaccagtaaattaagaatgtttaatgatttctcctttatttgctttctttttggagctctgttacagcctaaaaaattagttcttgtggatgggtttttgaataggaaaattagtttcaagat

SEQ ID NO: 428293 - DNA, 636 bp, Homo sapiens
tttgggaggttgtcatgcttgaaattttatcaaatatatattttttgatccttcaagtaaaagtgaaagtgactttgggtagggtaagagcctagggtgttgtagtacattttcatgaggatttagacttttgcataatgaaatgattcaatgtataagagaaatctggagcataatgacatttatgtaaattagactctctctctatatatgcaacagcacttgttaaagaacattttattttattttattattattwtttttgacagagtctccctctgtcacccaggctggagtgcaatggcgtgatcttggctcactgcaacctctgcctcccaagttcagcaattatcctgcctcagcctcccaagtagctggaattacaggcgcccgccactatgcccagctaatttttgtatttttagtagagacggggtttcaccatgagttattcaggctggtctcgaactcctgacctcaggtgatccacccacctcagcctcccacagtgctgggattacaggcatgagccactgcacccggccaaagaacatttaaaaaaatttatattcatggggcacaagtacaattttcctaccttaatatattacactgtggtgaagtaggggccttcag

SEQ ID NO: 428294 - DNA, 561 bp, Homo sapiens
actattaataaaacagggtcttgggaaagcctatgaatcacatcaaaccttaatagttttgtaaccttggcaaagtttcttaagcttttggagttgcagtttcctaatgtcaaaatcattgcattgttgtgtggattaaaggagataatgtacaatactcaacataatgattgatakaaagtgattaataaaggcaattattacaattattatattacataattaagtataaaggaggacttaaacagatcacaactagaaaacacttcattaatactagtgtccttaagatttttaaactgttctgccaaaaaaataaatttttcaaagtttaagtaagataggtctttgttataggacttctcataatttcaatttgctagtatgtgattcaagaggacagcatagaattagtacttttaaaaatgttttgaccttcagacctattaaaatgttgccagtttctcctgtttcatggtacagtttgcaaaacacttggatgaaaacatataatcaggcagctttatttttattccaatatcatgatcctaaagactaaaa

SEQ ID NO: 428295 - DNA, 617 bp, Homo sapiens
tattttctttctaagcactacccagatttaaatacaagttgttataaaattatgaawggatgaattaaattgcttacaataggatggagacacagtaaaggcagaaatttggaaaaaagcaaggaaatccttaatctatgtattcttcccaaactatccctccccttgttttttaaaacccggcctgtattttaagatttttaaattttatacctaaaactttcctctgtctctttcccttgttttccccgccatccttttttttttaagctttacactggtgagaatttggcctacaagtctaatgcagtttatgggcaccagttgttatggtctaataatctttcccaggctctccctatttgcaagacacattctaatttggggtcatatggatcatttataaggaaatgcctttttgtaatccacttgcccctacatatatttttatttgtaatatttacacagctaatttgaccagaggagaaactgctcttggaacatgagtgatttctacacagagaacaaatttagttccaatcaagatctccatgattaggaacgggtgttgagggtaatttggaattcaaggcaactaccaatacagcacacgttta

SEQ ID NO: 428296 - DNA, 565 bp, Homo sapiens
tgtcacatgctgattgactcagaggagacaagatccaccctgggagtatggagtggggaataaattcagctcctcttttgttcattgcaatattataaagtgttataatattttctaccatttgtagaaaacattttgatgtgccataatttaaattttcttcttctattaggttgatgtaaaagtaattgctgtttcacaatgagaacacatgggcacaaggaggggaacatcacacactgcggcctgtcggggggtggggggcttaggggagggatagcattagaagaaatacctaatgtagatgatgggttgataggtgcagcaaaccaccatggcacgtgtatacctrtgtaacaaatctgcacgttctgcacatgtatcccagaacttaaagtataataataataaaaattttttagaaagtaattgtgtttcagaccatgaattttaagtcgttataattaggtttaaacaatctttactaatcaaaaccagacccattacaaccaacacagttttgccaatgagaaataagtttgtttattcctatagcataacaatc

SEQ ID NO: 428297 - DNA, 565 bp, Homo sapiens
tgtcacatgctgattgactcagaggagacaagatccaccctgggagtatggagtggggaataaattcagctcctcttttgttcattgcaatattataaagtgttataatattttctaccatttgtagaaaacattttgatgtgccataatttaaattttcttcttctattaggttgatgtaaaagtaattgctgtttcacaatgagaacacatgggcacaaggaggggaacatcacacactgcggcctgtcggggggtggggggcttaggggagggatagcattagaagaaatacctaatgtagatgatgggttgataggtgcagcaaaccaccatggcacgtgtatacctgtgtaacaaatctgcacgttctgcacatgtatcccagaacttaaagtataataataataaaaattttttagaaagtaattgtgtttcagaccatgaattttaagtcgttataattaggtttaaacaatctttaytaatcaaaaccagacccattacaaccaacacagttttgccaatgagaaataagtttgtttattcctatagcataacaatc

SEQ ID NO: 428298 - DNA, 565 bp, Homo sapiens
tgtcacatgctgattgactcagaggagacaagatccaccctgggagtatggagtggggaataaattcagctcctcttttgttcattgcaatattataaagtgttataatattttctaccatttgtagaaaacattttgatgtgccataatttaaattttcttcttctattaggttgatgtaaaagtaattgctgtttcacaatgagaacacatgggcacaaggaggggaacatcacacactgcggcctgtcggggggtggggggcttaggggagggatagcattagaagaaatacctaatgtagatgatgggttgataggtgcagcaaaccaccatggcacgtgtatacctgtgtaacaaatctgcacgttctgcacatgtatcccagaacttaaagtataataataataaaaattttttagaaagtaattgtgtttcagaccatgaattttaagtcgttataattaggtttaaacaatctttactaatcaaaaccagacccattacaaccaacayagttttgccaatgagaaataagtttgtttattcctatagcataacaatc

SEQ ID NO: 428299 - DNA, 537 bp, Homo sapiens
aattaattcccttgaagaaacaccaaagatgaagggatcaaagtggaattctgatatactttttgatcaaagaagtaggttttatgctattaagtaaacttaagcctcaactatataatagatttttcacattaaaatccaagtgtttttgcctttgatgatctctgtaatgcctatttctgccttgtgactgttaacttattagaggtaattctgctttagctaccttgggtaccatattagaagacaatgcctaatctagaagtgtctcttattcctccaaagaaaaattgttatgtatatttcatatttactgaatgttattgtagcccatcattttgaaaggggggtaatrtaaaatagtatatgaatcactgatagcttcctttaaacccagtgtttgtcatatgtactatatttgccaacaattctgggtaggtatttgcagtaatttttttaaaaaagtcattttcatgtatgtgtctagccctgaaaagacaaaagaaggaaaagtggccatactggtttaatctgagc

SEQ ID NO: 428300 - DNA, 452 bp, Homo sapiens
cttcttgcctagggagtccaataccagcttggtacagtcacagagggcatctgccttccttcccctcgtcgccttcctcccactgtgcgagcttcggaaccctaaggccggttcactgcgcattgtccccgacaagttagcagcgctccccgaggggtgtgaggcaccaggtagggtgcagggcgcgagcgcggggcggtggtgcccggcgggggyggggtgcccacggacgcagccgcctagctctgccggccgtcctgaggcagctgctggcgcccgccgggaggcgcgtggccacttgcacttcagcgcgcggttctctctccgcaggctgctttctaggatttgaaagggccatagcgacagaagtcgatctctaagaaggcataaactcggcctgagacgtgggggggagacactgcagagaagaggccaagttccagcgcagaagg

SEQ ID NO: 428301 - DNA, 452 bp, Homo sapiens
cttcttgcctagggagtccaataccagcttggtacagtcacagagggcatctgccttccttcccctcgtcgccttcctcccactgtgcgagcttcggaaccctaaggccggttcactgcgcattgtccccgacaagttagcagcgctccccgaggggtgtgaggcaccaggtagggtgcagggcgcgagcgcggggcggtggtgcccggcgggggtggggtgcccacggacgcagccgcctagctctgccggcygtcctgaggcagctgctggcgcccgccgggaggcgcgtggccacttgcacttcagcgcgcggttctctctccgcaggctgctttctaggatttgaaagggccatagcgacagaagtcgatctctaagaaggcataaactcggcctgagacgtgggggggagacactgcagagaagaggccaagttccagcgcagaagg

SEQ ID NO: 428302 - DNA, 457 bp, Homo sapiens
cacttcccttttctcaatgaaaatattttttagacagaataaaaaaccttcagaatgagatgaggaaataaccttagttttaaaaagtacatttagacctggcgcagtggctcacgcctgtaatccyagcattttgggaggccgaggcaggtggatcacttgaggtcaggagtttgagaccagcctggctaacatggcaaaaccctgtctccactaaaaatacaaaaaaaaaaaaaaaaaaaattagctgggtgtggtggcacgcatctacagtcccagctattcaggaagctgaggcaagagaactgcttgaacctacgaggcagaggttgcagtgagccgagatcgtgccactgcattccagactgggtgacagagcaagactccatctcaaaaaataaataaaataaaaataaaaaatacacttaaactttgaaaacaaaagtttgctgaaaac

SEQ ID NO: 428303 - DNA, 654 bp, Homo sapiens
ttcagttaattatcaaagattttagatacaagctaagcattttttaaaactactatattttggagtctctgttagagtagcttggcctaccttttactctcctgcctggtggctaagcaacatcgcaattttcatggttgctgacttacttctcaatgatcaaggtaatgaatctttcaattcagtactaaattccaaatcttgatttattcattccataattcacaataagggagctttcaagtttaccattaagtccaacggtcatcactactgaactaagttgcaataaattaagggcttccgggttaggaacatgtaaaaagcctctgagttccttgagcacttcatctctaccttctccctccaaacytcctcatctactctcccctacagttccaccttataaaatcactaatttaagtatccccttctctgacagcaacttcccagttcttccaacttgcctgatcagccactcatattttcctatagtgtccaggctgacaagaggctgcatctcaacaagtccttccatgacccttacagcagggcagggagaagtggaaatggcaaatggagagctgcttcctaaagcaagtcacatggcacatttaacttcaagcagacatggagaggggttgcccatgtaca

SEQ ID NO: 428304 - DNA, 654 bp, Homo sapiens
ttcagttaattatcaaagattttagatacaagctaagcattttttaaaactactatattttggagtctctgttagagtagcttggcctaccttttactctcctgcctggtggctaagcaacatcgcaattttcatggttgctgacttacttctcaatgatcaaggtaatgaatctttcaattcagtactaaattccaaatcttgatttattcattccataattcacaataagggagctttcaagtttaccattaagtccaacggtcatcactactgaactaagttgcaataaattaagggcttccgggttaggaacatgtaaaaagcctctgagttccttgagcacttcatctctaccttctccctccaaacttcctcatctactctcccctacagttccaccttataaaatcactaatttaagtatccccttctctgayagcaacttcccagttcttccaacttgcctgatcagccactcatattttcctatagtgtccaggctgacaagaggctgcatctcaacaagtccttccatgacccttacagcagggcagggagaagtggaaatggcaaatggagagctgcttcctaaagcaagtcacatggcacatttaacttcaagcagacatggagaggggttgcccatgtaca

SEQ ID NO: 428305 - DNA, 444 bp, Homo sapiens
tgtttttaaacaggctatgcaaaaagcccatatccttaagaaaaaaaaatccttttttcctactcttgggcaattatttatgggggttggaaagagaagaaaaggtcactatctccttttatataccaagctcaaaaagatgagcagcacttatggttttgctgtgtatcacgctcagttctaagcacttcacaaatattaacccacgcaaccctcacaaccaccttasgagataagttgctattattttccgcattttacacttgaaactgagaaagagaagtgaagtgacttgcagaggtcccaaagccagtaagcggtggatggagatgcggacccaagcagtccggccccggagctcctaatacacgacgcttccagaaaagtcattagacaggcttcctccggtcaccaacacacacacaccccgaggatgtgaagaga

SEQ ID NO: 428306 - DNA, 586 bp, Homo sapiens
gttgtcaaatgcttatccaaatgtgctaaggtatttcctgatttataattctatcattatacttggatcttctttataatttcctatttttttcttcttcatatgctgtgctactttaaaacayagaaaattaagtaattaataggtgatatgaaaaatactcccttctattcttctgaaaatttctgactattctatcacaattattctaagacctaaactttagaagcattatgtcgagtcctaaaaaagaatatccattcaaattttgtgattacattacatttaaagatcaatatggggagaaatgacatcttaccaagaattcaaactctattaaaatctgtatgtgccactatggacttttaaagttttcttcctacaggttctgtatatttctttatatttttccctctgtatattttctgttgctaatgtaaattatacttctctatccatttttaaaaagcttttatttttgcattttataactggtcaccttcctaaacctttattatttctaataacttctcaattaactgagttttctcattaattttatttccacgtattgataattttgtcc

SEQ ID NO: 428307 - DNA, 539 bp, Homo sapiens
ctgtgctttagacttacttgagggtgcttctaaaacaatcatccttttcagacttgacttccagaccaaatttcttctatagaataaatacacatacaaacatatttatatgcctgtgtacttatttatatctaagcaagaagaaataagtggaagaatatacatcaagacattgaaatgataatgggaacaaccacatgataatgarcaacaactatattaatcagggttctccagagaagcagaaccaataggagattatatatataattggcatacttgattatagaagccgagaaatcccacagcctgccatcttcaagctggagatccagaaaagccagtggtgtagttccagtccaagcctgagggcttgacaaccaggagcactgatgtccaagggcagaagataagatggatgtccagattccagaagagagagtgaattgacccttcctctgtctttttgttctgtttaatcatgcaacagtttggatgatgcccaccacattggtgagggctatcttctttactcagtc

SEQ ID NO: 428308 - DNA, 539 bp, Homo sapiens
ctgtgctttagacttacttgagggtgcttctaaaacaatcatccttttcagacttgacttccagaccaaatttcttctatagaataaatacacatacaaacatatttatatgcctgtgtacttatttatatctaagcaagaagaaataagtggaagaatatacatcaagacattgaaatgataatgggaacaaccacatgataatgagcaacaactatattaatcagggttctccagagaagcagaaccaataggagattatatatataattgkcatacttgattatagaagccgagaaatcccacagcctgccatcttcaagctggagatccagaaaagccagtggtgtagttccagtccaagcctgagggcttgacaaccaggagcactgatgtccaagggcagaagataagatggatgtccagattccagaagagagagtgaattgacccttcctctgtctttttgttctgtttaatcatgcaacagtttggatgatgcccaccacattggtgagggctatcttctttactcagtc

SEQ ID NO: 428309 - DNA, 497 bp, Homo sapiens
tgacatacatatgtaagtatatgattaagtaaataaataaatgggtaaaagataaatcttccttactaaagaattccaaataatacatgtagacagtttcccctccagagatggaacttaaagcttcaccccttgagtatgggctgaatttagtgtcttgcttccaaacaatagattatgtaaagggaaaaaatagtaactttacagcagagacacctggcacacactacctgaacaaagcgatcaaggttagcatcaacactgataagtcatgttggtagtatgtattcctgacatgatgtgataaggagagaactctacctttacctctgtggtcttcctcttaaaagtctgtaaccctacaactagtcatgagaaaaaaaaaaacatcatcagacaaacccaaatttagggacattatacaaaacawctgaccagcactattcaaaaatatccaggtcatcaaaaacaaataaagactgagaaactgtcacaga

SEQ ID NO: 428310 - DNA, 535 bp, Homo sapiens
cttatacatatccaaaaattaactccaaatggattaagggcttaaatgtaagaccaaaacctctaaaattcttagaagaaaacaaaggaaaacttattgacattggcattggcaatgattacttggatatgactagtgacaaaagcaaaaatacacaaatgtgattatatcaaactgtaaatcttttgcacagcaaaggaaacaatcagcaaagtgaaaaggtaaacaacagaagaagcataaatattggcaaattatatgtctgcaaaatgcataagaacccttaccactcaatagcaaagaaacaagtgatctgatttaaaaatgaayaaaagatctgaatagacatttctccaaagaagacatacaaatggttaacaggtacatgataaggtgctcaacatcactcatcatcagagaaatgcaaatcaaaaccaaaatgagacatgacctaacacttgttaggatggctatgaccaaaaagacaaagtgaacaagtgtttgccaggatgtggagagaaggggattcttgtac

SEQ ID NO: 428311 - DNA, 615 bp, Homo sapiens
tttgtaaaacattccataccatttgaaaatacattgtatacatcatgacacttcatttcctaaaactttagcagacatctcctaaagataagggcaatctcccacataattataatactattatgagtcataagaatattaacaataatttcataatatcatctaacatccaggttagatttaaatgttcgcatgtttcaaaaatattttttggtgcttttaaaacatttttgaaaataggatccagtctaggatcacttagtgccttttgttgttatttctcatagaccctttatatgtggaataatcataccccatacctcttctcccttccctccgttatcttccttttccccctgatattttccaagttcagatcagtcatcttatagaatgtcccacattctgaacttctctaattatttctactttgtgtcacttaagtcattcatctataccttttatttccggtacattggaaactataacgacttcatgacattcaggtcagacttttttggcaagaatccatyataggtgatgttatatgtttcagattaccacacaccaaggggcacaaagtatcagcttgtcctactgttactggtgctagtt

SEQ ID NO: 428312 - DNA, 557 bp, Homo sapiens
tgctaattctacagtagcagaagcaagttkccgatgtttcctggggactcacccagtgatgattctctcctgacttcccacctctatatatgaagggcatctaggtgctagttagccaacgatgacaactgtgcatcaagggacaatgagttgggagcttaggcatatggacaacttgtgtaaattttctaattctgccagttggccatgggctgtactcacagagaagacttagaagtggatacttgtctttcagatgttcactaacgctctgacagttggcaatttttaactagtcttaaaagaatgatctatgaaatttgtctggacctttttcaggtgtgaaaactaaatccagcttcctcccttttgcctatacatctttgatgtgcactgtacaattacagagatacctttgtagtaagggcagttttccctaaaggagaagcacatacatgggagacaagtgaaacagccaatgctgagtaggcaagacagttgaaattggcttcgtaaccatcctacactcccagaatcattgaagaagttagcttcta

SEQ ID NO: 428313 - DNA, 557 bp, Homo sapiens
tgctaattctacagtagcagaagcaagttgccgatgtttcctggggactcacccagtgatgattctctcctgacttcccacctctatatatgaagggcatctaggtgctagttagccaacgatgacaactgtgcatcaagggacaatgagttgggagcttaggcatatggacaacttgtgtaaattttctaattctgccagttggccatgggctgtactcacagagaagacttagaagtggatacttgtctttcagatgttcactaacgctctgacagttggcaatttttaactagtcttaaaagaatgatctatgaaatttgtctggacctttttcaggtgtgaaaactaaatccagcttcctcccttttgcctatacatctttgatgtgcactgtacaattacagagatacctttgyagtaagggcagttttccctaaaggagaagcacatacatgggagacaagtgaaacagccaatgctgagtaggcaagacagttgaaattggcttcgtaaccatcctacactcccagaatcattgaagaagttagcttcta

SEQ ID NO: 428314 - DNA, 478 bp, Homo sapiens
gcacaaagggtttgggaacacctagaggcagagaaagagggagagggaggagtgaggatgactccagtawttgaaacagaaaatgggaggaattttgtatttgctgaaattgggagaaaaaaagattgggaagaaaaagatcattttgccctgggtctccctggcctgatgctcattctcacttgggatactaccagggctgaccagctcctgccatgactctctgaacagtcatttttttttttttttcaaaatagacgatacttaccatttctttcagaataggtctattacccattccttcaatggactggtttaaatatcaatactcaaggggattttcaagatcatcaccacatttctgccgacttcctccattccaacatactagttaacccttttccttcacccctaacggaagctataagggacagcacaaaaaaaaaaaaaaaaacacacacacacacacacacacaca

SEQ ID NO: 428315 - DNA, 566 bp, Homo sapiens
ccttgaactgagtgtgctctgcaacatgtgtcgtttatctgttatgacctgtgtctatgtatgcatgtatgtgtgtgtgttttaacccgcagtggaatgcaaaacctgtttgagactagcgctggagttttctagaatttaaaaaaatctgttggatgttgtattagtttgttctcatgctgctaacaaagacatacccaagactgggtagggtaatctacaaaggaaagaggtcaaattgactcacagtttggcatggtaggggaggccccaggaaacttactatcatggtggaaggggatgcaaatacatccttcttctayagtggcatcaaggagaagtgcagagcaaaagggagaaaagctccttataaaaccataagatctcctgagaactcactcactatcacaagaacagtggcatgggggtaacccatgattcaactaccttcccaccaggcccctcccatgacatgtggggattacgggagctacaattcaagatgagatttggatggggacacagacaaatcatcagactttaaatggccattaaattgcaaatgt

SEQ ID NO: 428316 - DNA, 558 bp, Homo sapiens
taaaattgtttgtataggtcaaaagtggtgggatattggcaatttcttagagtttaacctcaaatatcacacagtatagcccaatattttacagtctgatctctggggaccccatagactagcagggtgactttgcacaaattacttacatttatacctcagtttcctcatttgtaaaaatggggaaaatattacttcattagataattgtgacgattaaacaaaataattcacatgagcaattgtgaaaatttaayctgttagaaatgtgaactgtttagaaacaacttgtttagaatgtgcctgtcacatagtaaacacttcataatgctaaccattgttattattattctagaccccagaaaactaggcccagtacatggtaggcattcaatgaatatgcaccaaatgaatggatgaatcagtgtaaagagctgtgtacagaacttggctcattttataccctgaataagtgttagctactactctaattatgctttctctttaactcttccaatagtcttttggaataactattgttgtccttgttttattagg

SEQ ID NO: 428317 - DNA, 581 bp, Homo sapiens
agtgttagctactactctaattatgctttctctttaactcttccaatagtcttttggaataactattgttgtccttgttttattaggtgagacaaacaagttataaaatggtgaaggaactttccacaggataaacagttagaaataggcagagcaagcatttgcaaccatgtttcatkaactccaacatcacaacagattcaaaagtctcttagtctgttcaggcagggataacagagtagactgggtggcttgtaaacaacaggaatttatgtctcacggttctggagcctgggaagtctaagatcagggcactggcagttctatgtctggtgagggcccacttttgggttcatagatggtgttttctcactgtggcctcacgtggtggaaggggctaatgagctcccttggacctattttataagggcactaatcctattcagaaggtattagttgcctcccaaaagtctccacctcttaataccatacccttggatgttaggatttcaacatatgaattttgtacagacacaaacattcagatcgtagcaaaatcagagcttggaaaggacaaagga

SEQ ID NO: 428318 - DNA, 580 bp, Homo sapiens
gtttattttatcctatggagaaaggaaagctattaaataactatgaatagaggaaggtttttgtttatttttttgtttgttgcctttgctcttcttggcagcaaagtgaaggatacccagaaggggttgagattacagaactgtttaggcattcatagaaagagtgttatcactatgactgggaaaaattcctttggaagcatggtataggttgagtatcctttatccaaaatgtttaggaccagaagtgtttcagatttcaaawtttttcagatatttgaatatttgcatatacataataagatatcttgagtatgagacctaaatctaaatgtaaaattcacttatgtgaatcttttatataaaccttacagacatggcctgaaggtaacttcataccatatctttaataattttgtgcatgaaaccaagttttgactgtgttttgactatagctcatcacttgaggttacatgtggaattttccatttgtgacactatatcggtgcttaaaatatttcagattgtgaagcatttcaaatttcagattttctaattagggatgctcaacatgtatttg

SEQ ID NO: 428319 - DNA, 580 bp, Homo sapiens
gtttattttatcctatggagaaaggaaagctattaaataactatgaatagaggaaggtttttgtttatttttttgtttgttgcctttgctcttcttggcagcaaagtgaaggatacccagaaggggttgagattacagaactgtttaggcattcatagaaagagtgttatcactatgactgggaaaaattcctttggaagcatggtataggttgagtatcctttatccaaaatgtttaggaccagaagtgtttcagatttcaaaatttttcagatatttgaatatttgcatatacataataagatatcttgagtatgagacctaaatctaaatgtaaaattcacttatgtgaatcttttatataaaccttacagacatggcctgaaggtaacttcataccatatctttaataattttgtgcatgaaacmaagttttgactgtgttttgactatagctcatcacttgaggttacatgtggaattttccatttgtgacactatatcggtgcttaaaatatttcagattgtgaagcatttcaaatttcagattttctaattagggatgctcaacatgtatttg

SEQ ID NO: 428320 - DNA, 605 bp, Homo sapiens
tctttgtgagacttacatgtaaaacccaaaactatagaaaccatggaagacaacctaggcaataccattctggatgtaggagcaggaaaaggtttcatgatgaaaacaccaaaagtaattacaataaaagcaaaagttgacaaatgagatctaattaaactaaagagcttcagcacagcaaaggaaactatcaasagagtgaacagacaactgacagaataagagaaaaattgtgcaaactacacatctgacaaaggtctaatatctagtaactataaggaacttataactttataattttaaaacacacttttaaattttttttcactttttattttaggttcgggggtttgtgtgcaggtttgttatataagtaaactcatgtcacaggggtacatgagtttattatttcatcactcaggtactaagcctagtacccaatagttattttttctaaggaacttaaatttacaagaaaaaaaaacaattaaaaagtgggaaaaaaatatgaacagacacttttcaaaagaagacatacatgtggccaataatcatgtgaaaaacagctcaacatcactgatcgttagagaaaggcaaagcaaaac

SEQ ID NO: 428321 - DNA, 605 bp, Homo sapiens
tctttgtgagacttacatgtaaaacccaaaactatagaaaccatggaagacaacctaggcaataccattctggatgtaggagcaggaaaaggtttcatgatgaaaacaccaaaagtaattacaataaaagcaaaagttgacaaatgagatctaattaaactaaagagcttcagcacagcaaaggaaactatcaagagagtgaacagacaactgacagaataagagaaaaattgtgcaaactacacatctgacaaaggtctaatatctagtaactataaggaacttataactttataattktaaaacacacttttaaattttttttcactttttattttaggttcgggggtttgtgtgcaggtttgttatataagtaaactcatgtcacaggggtacatgagtttattatttcatcactcaggtactaagcctagtacccaatagttattttttctaaggaacttaaatttacaagaaaaaaaaacaattaaaaagtgggaaaaaaatatgaacagacacttttcaaaagaagacatacatgtggccaataatcatgtgaaaaacagctcaacatcactgatcgttagagaaaggcaaagcaaaac

SEQ ID NO: 428322 - DNA, 605 bp, Homo sapiens
tctttgtgagacttacatgtaaaacccaaaactatagaaaccatggaagacaacctaggcaataccattctggatgtaggagcaggaaaaggtttcatgatgaaaacaccaaaagtaattacaataaaagcaaaagttgacaaatgagatctaattaaactaaagagcttcagcacagcaaaggaaactatcaagagagtgaacagacaactgacagaataagagaaaaattgtgcaaactacacatctgacaaaggtctaatatctagtaactataaggaacttataactttataattttaaaacacacttttaaattttttttcactttttattttaggttcgggggtttgtgtgcaggtttgttatataagtaaactcatgtcacaggggtacatgartttattatttcatcactcaggtactaagcctagtacccaatagttattttttctaaggaacttaaatttacaagaaaaaaaaacaattaaaaagtgggaaaaaaatatgaacagacacttttcaaaagaagacatacatgtggccaataatcatgtgaaaaacagctcaacatcactgatcgttagagaaaggcaaagcaaaac

SEQ ID NO: 428323 - DNA, 545 bp, Homo sapiens
tcagtaggatgcagtcattataatatttaaaaacaacttttaatgatgtggacagataactaactgttgggtgctcactttgttccagggatttcttgcctatatttttcaaattttctatgatgaacatttattagctttatgatcataaaagtgccataagttttatcttttcctcctctttctacaaagaaatttgttaactaaatattgagagttaacaaggtgatagtgaatgatattttaataagagattgattctgttaagaaattaagcatcctcggccatgcatggtagctcatgcctgtaatcccagcacttagggaggctaaggtgggtggatcacttgagtccaggagctcaagaccagcctggccaacatggcaaaaccctgtctctactaaaaatacaraaattagccgggtgtgtaactgtaatcccagttacttgggaggctgaggcacaagaattgcttgaacccaggaggtggaggttgtagtgagccgagattgcgacactgcactccaacctgggtgacagagca

SEQ ID NO: 428324 - DNA, 591 bp, Homo sapiens
tgccatgtggtggctggtctggctagtcaccaaagcttctctcaacccttaggtccctcgccttggttccaagagataaaggattctctcccaggttgctttgggcctcagggctattctcctgctccttccactgcaaaccaatccaagaaatcacayggtttgggatcaaagctgctgggaggcgtcctgaagcactctgtgctgacccgctgctgatcccttgagctgctggggaggtctggggagtatcttcgtggtggggctggggccatccacccacaggaggctgcctgaggggagagaaacccaagaaggcttctgtctcctctccttaaagcggagccagtcttaagagcagaaacaagctcaacttgaatcactcttttcagctctttctgagcagctgccgggactgtggcgtgaagaggaaatgggaggactcaaagcaacttccatggattttcttagaaagtgctcacccttgtttcacccagaaaatagcatcagaggacatctctaaagcttctcattaggacccttaggatcaaggcaaatgctcgtccttgaggagcatgaaaatggaaaacc

SEQ ID NO: 428325 - DNA, 541 bp, Homo sapiens
tttcctgaaccatggcttaactttgtgaatccacaactctctcttccccaggagatccaaaaagrtagggtaggatgtaaaggcttcaatctgtttaaatggatatgagagtccctggctctccttaaaataagtagcatggattttgtctctctgccttacttcctcacaaacattctgaatgagaaaagttcaaaccattatttgttcaagtacttaatctactttgggacacaagtttaataaattaaaatattcttctatctgttccctttgatcagtgaacataaagttatcctttgactcatatttaaaatgttcagtactacaacactgaacaatagtatggaggaaaaaaaatgccaatttaagtttgaacttgcttcaccattcctatcccaacccccatgattagaaaatcaaaaagaacactttgagaaataacctcagtggggtcaaaagccagagtctccaggatgtcttgttcttaagacaaatagaaggaggtacaaatataggattgcagacttgtttacttcat

SEQ ID NO: 428326 - DNA, 550 bp, Homo sapiens
agccagcgctgcccttacaatatgttgtgtgaaatagacactctcattatggtgacagtaggtcttttagattttgttcgacagttgcccaccttctcactggagtgaaatgaatgactaggcagcaccttgctgcatagcatgaagggaggagacccatagttctttaccaccctatgtcaggtggccgctgagagaagacttgaaaggagaagagaatagatgtatgtttgttgcaccagtgtgataggtgatggagggacctattagatgagacatgggcaggggcactcctttatggcctaaaatgcaagackaaattggtgatgcctttctagaaaggaagcatggagatataaaaatccatcatccctcccaattttgtactgggtgaacagtaattggaagcattctagaaggaactgtccattgtgaaatcttagttgcatactttagatgtaaaacaatgaattggggatacctctgttttagtcacagttgtgcaatgtgtcagttctatgagtgatggcaagacatcttcctcgccctg

SEQ ID NO: 428327 - DNA, 623 bp, Homo sapiens
aaaaaacttattctaaagagctaggatcatttaagaatcatttcagtaaattctttaaaccatcagtaatgaaatttgtaataggactgaaagtgtaaaaatcagcattttaaaaaaatccaagtcatatatcgtctggctagtcatgggctctgggctctgagctggggttctgatggctgctgttaatatttccagcaaggtcattaccttgtttatgtccacctagtgctcttcrcagggtgcacatctctacacgggagctgaccagcatgggcaacaaagcacctgatcccaaaatgtaacacagaatcttggcaggctccaaaagccagcacccagtaagagttagtagggcatcggggcccaacagacattgagaattttcaacaattgcgtacaaaaattatgtcctctcttctttcctttttcccctagaatattcgtgcttactcttcagcagcccaaattgcccttttgagccttcttcacgccatcacagatgtggagatgaaaggacaatctctgttctctcgccagctatttcccactttaccactccaaactgggagctgttttacttgctgttccagggtcagagttacgaaggcattgcattagaa

SEQ ID NO: 428328 - DNA, 577 bp, Homo sapiens
catactaagacattactgatttaccctattctgtctattaaagcaaggcatgatttttttaaaccttttttttcttattggaaaatgtttactttaatttgcattgtgttaaaataacttacagaaatcaatttggatattttatggtgagtattatggtgaagaacattcaatacctgaggaaactcaagtatccaacaaactcaacccttacagagacacatagagctgaaaataaatatataaataaacttaggaaaaacacaagtaaaattcaagcatgagaagttaatcattgtttgatgtactaagtcttttatgtacacataattccgataaacttgggtatctcttcctaaattcatatcaaattagaagcatcaagtgcttttagggaaggaactgttctaaacagaagaaaagaaggaagaaatgatggctaataatytggaagaaagaaaaaaagcctctttggcaccatttaatctgtgtaaaaagagccttaccaatgtagtctgatgacaccactggaaatttggtattggtcctgatgataacagtcttgaatcaccaagaa

SEQ ID NO: 428329 - DNA, 577 bp, Homo sapiens
gacattatcctgaggtcattggagagccatcgaaaggtatctgtcttggaaaaaccttgattacyctgtcatataaatactgctctggtaatgtgaaaaatgaattgaatgaaaggtggcaagataggtatggagacctatttagttatgtcgtggtaatccagataagaaatgatagtggcttgaatgaaaagtaaaggatacaactacatagaataaacgggcatttcagttgtggaaacataacttgtttggggggcgtgtgtgtgtatgtgtatgtgtgtgtagagtcaaaagtggctcttgggcctccctttgttgtttgagctagagtgacacattccaagtagagctgtgtggggaggcaattgaatatgtagttttggcaccccagctagagatctgggatggagagatacccagctaggaggcagctggttatcagtggtaatgaagtcacagaagtgtatatattctcccagggggacctgcagaatggaatcacaggaagtcctcctacagactcatcagggatattaccttggtatgagccagaggacaagctgaaaaccagagt

SEQ ID NO: 428330 - DNA, 577 bp, Homo sapiens
gacattatcctgaggtcattggagagccatcgaaaggtatctgtcttggaaaaaccttgattactctgtcatataaatactgctctggtaatgtgaaaaatgaattgaatgaaaggtggcaagataggtatggagacctatttrgttatgtcgtggtaatccagataagaaatgatagtggcttgaatgaaaagtaaaggatacaactacatagaataaacgggcatttcagttgtggaaacataacttgtttggggggcgtgtgtgtgtatgtgtatgtgtgtgtagagtcaaaagtggctcttgggcctccctttgttgtttgagctagagtgacacattccaagtagagctgtgtggggaggcaattgaatatgtagttttggcaccccagctagagatctgggatggagagatacccagctaggaggcagctggttatcagtggtaatgaagtcacagaagtgtatatattctcccagggggacctgcagaatggaatcacaggaagtcctcctacagactcatcagggatattaccttggtatgagccagaggacaagctgaaaaccagagt

SEQ ID NO: 428331 - DNA, 577 bp, Homo sapiens
gacattatcctgaggtcattggagagccatcgaaaggtatctgtcttggaaaaaccttgattactctgtcatataaatactgctctggtaatgtgaaaaatgaattgaatgaaaggtggcaagataggtatggagacctatttagttatgtcgtggtaatccagataagaaatgatagtggcttgaatgaaaagtaaaggatacaactacatagaataaacgggcatttcagttgtggaaacataacttgtttggggggcgtgtgtgtgtatgtgtatgtgtgtgtagagtcaaaagtggctcttgggyctccctttgttgtttgagctagagtgacacattccaagtagagctgtgtggggaggcaattgaatatgtagttttggcaccccagctagagatctgggatggagagatacccagctaggaggcagctggttatcagtggtaatgaagtcacagaagtgtatatattctcccagggggacctgcagaatggaatcacaggaagtcctcctacagactcatcagggatattaccttggtatgagccagaggacaagctgaaaaccagagt

SEQ ID NO: 428332 - DNA, 573 bp, Homo sapiens
agtccagagacttgggttccagttttagctctactactaacyagcaatgtaactgtgggctatcccttccccaccctaagcttcagatctctcccctgtataaagagggaatttggagtagatgatctttagtgctcttttcttcttgaccttctgttatccagctttcacccaaccacaccatcagtgctcagctatactcacctccaggaatatgccctgaactctcacaaccttcccacctctgaaggtttaacctctcttttctctttgctcagtttctccagggtctgagtggcatctagcccttgccagttcacacaaggagaattgcatgcctttgactctggagagtcattccttgtttgtttgttttctatttctaccctctccagaactgtcatcctcaggatccttccattggcttccaagccttcctgaaaagatctttcaagagggttccattcagccccccagggtctaaatctactgaagagctgatcttccacatcaatagactcctccaatgtcctggaatgtgtacctctgaattgaggccaccgcagagccagt

SEQ ID NO: 428333 - DNA, 579 bp, Homo sapiens
aatgggggagctttgtacccagaggagagaaaaagcccagaggtagagatgcttgagaaggactctccccaaatggagacccccattcagctcccccccctcactgaaagcttgctagagattgttttttttttagagaggaaggctggttgccttccaggcctcaatttgttccccaaagtagtctttcccacgggaagaactgtttcttattctatgtataaaactggatttttgaacctmtcaatcagtctcccatatgaaatgtaccctctaaactggagtcctttatgtaagggccactttgagccccagcaacactgtgggtcagatgatgaccctgtttggagtggcgtacatatttctgggtgtctgtctgtctgtgttgcccaaacgtgctcctatttaaccttgatcatcctttctggctgaaggatgccaaagtgaatatcggtcattctatctccagcagcaatcttagacagccaaggaaatgtcaaccctaggaaataaacagccctaatattagcctagatgtgtggacatgtttcctcagcagatgtgggaaaaaaaaaaacc

SEQ ID NO: 428334 - DNA, 600 bp, Homo sapiens
agagtactgaaggcagagggatgcaaaggcaaagatcctaagatggaaaccacttgggtgtgttgaaagaaaaagagagacagcagtgtggccgaagtgtggtaattaaagaggggactggagggctacgatatgagagaggtgggtgggagccagagcatgctggaaattgtgggccttggtgaagacttacagagcccagtaaaagcaggcattgatatgacttgattgatgtttttgaaaaatcactctggctgctacatggaaaatgaattgtagaggtggaggtagaggtaccagttaggaggctgctggatgaagggagtgatgacggaaatggagagaagctgtttgatttcataggtattttggaactagaacagcaggacttgcaggtggatagaatgtaaagaacgagaraaagggaggaatcactaatggcctttaggcctttggcttgagcaactatatagatgatagtgccaattactgaaaagaggaagaatgaattcaggggcatggaactaagagctcttcttgggggttttacattcagatggccattaggcattcaggtagagatgacaagtaggcagttgg

SEQ ID NO: 428335 - DNA, 565 bp, Homo sapiens
gagcccgtggattctgatcttgcagcatttctagctctggggccaccgggttcttgactccactctccggttctaacttgaatccctgccccagcctcccgctctcagcacagagcaccttctccatgtcattcccctgcttcaaagccttcctggtcagtgtcttcaattcygaacaacttttgcatacgtgtcaaaacgacccatgtgttgcacactgatcagaaaatatcagcgatggctcctatccccgcaacaggaaatgttacactgagcactacactcagatctgccaaatgtagaaacttgaatatcaaacaggcatagaagcagtcatataatctgctcctgtaacctcagtgaggtcctgttctctgtcctttgtggctccctgcaagcatcctgcatgaaagatccactctaaagcagatgctataggagttctgtcagcaagctgtctacgggggccactgagtcctctgtgaaggatggggtggggtggggcggaggaccaagcagagtcctccactgacagctgtactccaggggtgggcaactgagcatg

SEQ ID NO: 428336 - DNA, 614 bp, Homo sapiens
aaacccatacgttgcaccgcaaagttttttgcacttccttattccaggagatgagttcgcagatcctttctttggcgaaaggaaagaaaaccacaatagataaagcaactttcttagatcacacagcatattcacaatggagctgaaacaagtaaattagctggactcacatctccaaacctgaaaaaaacatagtcacctctttagacatcagatgaagtataaagaaaatagaaataaaggcaaaagtactacagctgkatttcatggggaccctgacaattctcatcagatacccgactcctgaggtgttagttctgaaaagtgggccaaacacttggcccggagttcacctttaaggttagtttagcagactctgagaagcactaattaagacgtgttaagcaaatgaaacaaagtaaaacaagacagttatacaggcaaatatgtttaggaaacctttggtaagcagaactaaatggattctttacagcaggacctctcccactctcgaatgctaacatgcactgggactctccaagaataaggtagagcaaaggatagtttctgaatttatttgaccatggaatattcttcacccatatctctggttg

SEQ ID NO: 428337 - DNA, 642 bp, Homo sapiens
tggggaggaggttaggaatgggaatgactattcatggggtggggtttctttttggggtgacgacaacaacctaaaattacactgtgctagtggttgcacaactctgtgaatacaccaacaaccactgaataatacactttaaatgggtaggttttatgatttgtgaattacatcttattaaagatgttttaaaaagcaatggaagaggttcaaactaacccaggtttttsttttaccaggtgcacacatgcattctagcttaccatgggagaagaaaacctattcttctttgtgagatactctgaaatcatactatgctttgctgccagagagctgactagagaatagcccaggagcctaccaggagaatcaacacgaaaaaaaacacacattttccgtggtgtttctcagactggctctttgcttttttctctttcagcaacctagcattctctttttatttttatctcaagcacataataactctattaattctctctaagtatttccaagtgtaagccctgctgtgctgctttaatgagtagattcatttataattagcattcatttgaaatcaatatttttcttgcatcctttaaaatctaactaaaatgaacctttcagaaaaacatctgtattaac

SEQ ID NO: 428338 - DNA, 590 bp, Homo sapiens
taactgaccgtggtggaggggacactgtgggacttcgagagtaagtcaaagtcatgtggcttccacctcgttttctggaaccttcactcttggagctccaggctgcaaggcaaaagtatgacttccatgaggccatgatccagtggggagccccagcccgtggagaaagcacaaggcaatgggctggttagcaagccaagctcagctcagccttgtgagtatcagtccaagcgccagccatatggggygtcaggggattccaactcctggccattagcgtgttctcagctgaggcccaaacacggtggatcagaaacaagccagctcagctcagccttgtccaaattcatgagccacaaaattcatgaggatcataaaaatggttattggattactaagtttgagagtgttttgctgtgccacattagataagagagggcacttggaaaaggacttctccagcccaatattacccggctgatgctgctgaccttgttaacaggccagcaactgcccttgaggaacatgaagtcccacttaaaggaattacctttgttaatagacttcaggcccattggacacagggaaag

SEQ ID NO: 428339 - DNA, 550 bp, Homo sapiens
tattacctctcgccaggattactgcaataccctcctaactggtcttcgtatttctatttttgcacttttaaaagtcattctttgcatagcagctgggctatctttttaatawgcaaatcatgccacatccttctcctgtttaaaaatccttcaatggcttcagattgtgcttaaaataaaattgaaagtccatgtcagagtccgcagggccctgtaccatctggcccctgcctactgttccgccctccaccctgaacgtcccgaactccagcggcactgccttctctaggtttctggaacttagcaagagcttgacagccccaggacatttgcactcactattcatggctggtttcatctcctggtgctggtctcagggtgtacatcagccctttgaagagagtgtccttgaccactcttcccaaagtagccctcaactgattcttaatcactttctaaaataatattgttcaatgtttacttacttgttctctgtttcccaccactaaaatgtgagttccatgagagcaggggccttgaccctcctgtc

SEQ ID NO: 428340 - DNA, 574 bp, Homo sapiens
ctcagttgaattctttcttctgaggaggcaagaatcgaggttgctgcagactgcacagatacggatttgctgcagtaacagtacctcagatctctctggctggttgggctaagaaaggacgccaggcttaccttgtacagctcactttgaagctctgctgtatttgtttgataatccgagatgtatgattacactggaaaaataaagggcttgattctttaaaaacatcagcaggctaccatgctagaataatctttaaaatcatttctagttccaaaactgtgagagtcagagaggtcagagaagtgagcctagaagataatgtctgttgacagctgccaggtgttcaaggtggagccgggaggtagcaaggtgtggaggaaggatgtgggtgatgtgtacataggaaggcatctgcaagcagctggtggtgaataaaccctatakggaggccctctaggctcatgtggaaggaaatggatcttggagttaggagacagaagttaagagccaagctgctcttccatgagtcaagtgatctccaatgaactgcttaccctctgagtcttgattt

SEQ ID NO: 428341 - DNA, 537 bp, Homo sapiens
cagtcccggctgtatctactgaaggctgttttcttttctccatatccactgtttagtaaattaccagagtagccatcaggaaatagatgatcagtgatattgccatcatcattatttcataatggccattcaatatgtttttctttatagctcttaagaaatgyacttctgtaattcagcatcctttctcaaattttaagcagcaggttttctttgacattaattcatttactctacaagtatttattgagcacttacctgtgtcaggcacatggtaagggctgagaatttagtagtaaataactactgcagccactgcccttgtggcgagtatagatgaggaaacagagtctcaaaaagagtaaagtttggccaaagtcacaacacaagtttgagctgaaattggaagtcatatatgccaacaggaccagcttcataacttgcaaagcccagtggtagatgaaaatataggcacttgtccaaaaacgactaagaatttcaagacagcaacatccaagcattaaaccaagtgcagga

SEQ ID NO: 428342 - DNA, 384 bp, Homo sapiens
cttttcaaaagaagacgtatgagtgaccaacaaacatatgaaaaaatactcaacattactagtcatcagagaaatgcaaatcaaaaccgcaatgagacaccatctcacatcagtcagaatggctattattaaaacttcaaaaaatgacagatgttggtgaagctgcagagaaaagggactgcaaatacactgttggtaggaatgcaaattagttcagccactgtaggaagcagtttggagatttcccaaataactaaaaatataactaccatttgacacagcaatcctattactgggtatatacccaaaggaaaataggtcattctaccaaaaagacmcccgcactcatacattcatcacagcactattcacaatagcaaagac

SEQ ID NO: 428343 - DNA, 523 bp, Homo sapiens
ccctgtcttcagccctggatgttttctgaagattctctggtacacttaaatgagtcatctactaagcgtctccctccactccctgcccctgacccccatccctaacttcctccaccagtttctgckaaggggagaagatgatatagagctctatctccacactgatacaagttacagcatctctatttgaggacagaaacagctacaattagtttgagctttaaatatctttctttcctattacattttattaaactacacagaaaaaaatcacataagcagctttatattcataatgggggaagaagtggttgtaaaaatatagaggaagaaatatgttgtttgattcttcctttatcttttccaaacatataggctttgggctctttttgatcataacaatatccatattttgttctgactaaacagtccaaaaagttcaaggcaagtgagtgattactatgcattagtatctttttcctctaagaattgttcactggacctggatccacctaaaaatgga

SEQ ID NO: 428344 - DNA, 604 bp, Homo sapiens
aatttatttaaagtgtttgaatgttacagtctagtgcaaatttagttctcagaatcattgatatgtaggtgtagatggtgaaatggtttggcttcatgtccccacccaaatctcattttgaattgtaatmcccatgtgtgagagagggacaagatgtgaggtgattggatcatgagggcagtttcccccatgctgttcttgtgttagtaagtgagttctcacaagatctgatggttttataaggcagttttccctgctcttgcttgctctctctctcctgctgccatgtgaaaaatatctttgctttcccttcaccttccaccatgattgtaagtttcctgtggcctccccagccatgcagaactgagccaattaaatctttttcctttataaatttcccagtctcagatatttctttagagcagtgtgaaaatggactaatacagaaggattaggcaataatttattagtgagaaaatagtcaaatatataatcctaggaatagtaacgtatggttttttgtttttgtttttgtttttttgttttttttttttatttggagaaaagggagctgttaagagataaatagaagtagcggtaagaa

SEQ ID NO: 428345 - DNA, 564 bp, Homo sapiens
ttgtgcaattatttgagttgcaagctgaactagctgatcttttcacaaactcaatttttacttgaaagaaagattgatggtcacactatggttatttagaattggtatgtgacatatattttacaaaaatgcactgagcccatcatttcaagaaaaatactaattgttataaatgataaaattagcagtttcaagtgaatgttggaaaatgtatatctactaccatgagcttgacaacttcctaatatgtaatgacttttcatatgtatggtagtaatattaatgcacatgatgattttgatgttgtataatgaaatgtatcaatgtttgggagatctatgtaactcagtaagctagtcttttccaaatgaatgcatgatataaaatcattcataagtaaaggatccattcaaaatgctagacagaccaatgaattttaatacaagagaggacaaaaagttcattgatgtgtttccagattccacaatgcaactaccttttaagaaacatttgtcaagttttggtgtaatatcaakaaagaatacctgaaaaggctattaaaat

SEQ ID NO: 428346 - DNA, 351 bp, Homo sapiens
ttttcatgctagtgcagcacctatctatcttctttctggcagggcwgtctgcttttcagtcagcatctgactaaagatcaatgagagaaagctttttgaaggtgctttcaggtcctgcggcaagggagatgatcagaaagctgccataagcttcagacccacttgacaaattaggaactattttggtgctctataaactgctgtcacatcagttacaaacactaattagagatacaatactttgatagttaaagtgtccagtgcattaaataccacttttgcttactgcaattagcttatacattgacttacacttcagactataagacagtcagattaaaatgcattgac

SEQ ID NO: 428347 - DNA, 560 bp, Homo sapiens
ctttagggagtgtagcaaaaggatttccaaccagggcagacatcaccattcccagagccagcattagagagatcacataataaaggagaaaaaggctttttaaaaagaacaacttaaaagtctccaacagcctccaagtctgttatagaaggaaagattgaaatgagcaacgaaatgcccaacataagataagagaaatacaatctacccacaatgcatgagggttttatttaagaaaaacactgatcaaaggcccatatttcctgctataaataataccccttgaagaataccattaatattcacaacagttgtgtaactacaaaagaaactgagaattgttgtttagagaaaataatartggattttggaagataaaaggaaaaggtggaaaagaaaaaaagacagaaaaaaagatatttactgtggaccaaagatcattattcagtgaaacttaagtcagggaaatcatgcctaaggggacctagaccttgtgaaagctagaaaaaagaaagtggaatccaaattatattcctcatattacccctgaaatgcatccc

SEQ ID NO: 428348 - DNA, 584 bp, Homo sapiens
acccatttggggaggtaaaatcatagactcttaggttcatttgctcttcctgaacttggagggaaaacacctgttacttttggccaattgatcccccaattcaggtctcagaactaaaccacccacatccagggtgaaaaagaggagactttctgcttctgggggaggccaaggataggctagggtgtgaggagggcagaggagaaaggacccasgcacgggtggtgagtccaggcttgagaattcatagtgtctcttttgcatgaatcttattcatagtctctctttttgcatgctccatagcaggccaccaggcggcacttgtgaaatgataaatggagctctctcatcctcatccagtttctgggtgtctcctgagtcacattcagaacagggaagtaaaaagggctgtgaaatgagccttagtgtcatgtggttctttttctctaattgggtctggcaggcccgggcacaggggcctgggaaacatatctttttggcaagggtagaggggaaatctagtgccctctattttcccattcggtatctaagctgacattccggatgaaaatctccagagggct

SEQ ID NO: 428349 - DNA, 549 bp, Homo sapiens
cctccattctctgtaactgctcacaataaggtccagactgaaaatacaatctccttttttggtttctcatccatctcaaatcacctataaatgattaaagaaagaaagagtaaacatatcaccacactctgtacctcgtccygggttttctataaatgctactcatgttccctcattttgctcaactttgagcagtgcatatgacatctactctctggctccatctataggatctcagggcctgttccttactgctgaaagtatccttatttattctgaagggtggtaaagttgcagggtggaaggtggatgcctgactgcacatatggctacccagatgaaatcaaactgagggccaaaataactcacctatgggttaatagtcattattagttcataattcatgtatgtcgtttaatgaattagagtatagagaaccctgggccccagaacaagcaacttaaagtcatagacaagtttttttcaacttgttagcatcaggcatctcatttgtaaaacaaatgggctctaaggtcctttacatttttg

SEQ ID NO: 428350 - DNA, 574 bp, Homo sapiens
ttctctctcaatcaggtaggtgaacaatgaagaatcctgctgtgtgcttttagtgtagactgatcattgtctttctcayactgtttcagtatgtctgttttttctttattttccatgtattagtgtattccagatatttgattttatcccccttgtctctgattggggcatactagtgacttgtacatcatgaattaaaaccctttaacttctcattaatattgaaacccttagggctctctttttgagccaaataaattattcacattttcaacctggatagtttacacagagcaaatttaagggtgagagaaagcaaagaggaaaattaatttgactggaaaattgaaacaaaaagaaataaaagccttcaaaatttctcttcctaagaaaagcttaaggtgtaccaagcatccatgaacaagacattggattttctcaaatctctttccttggggtgagtttataacttcactgtcatgtctttcaggaaagatacccaaataatagtatgttcaatgaggtatatgggaaaaacctgacatccagctccaaagcagaactcagtccctca

SEQ ID NO: 428351 - DNA, 484 bp, Homo sapiens
attcccaggtgcggttgctcacacctgtaatcccagcactttgggaggccaaggcaggtggatcacttgagcccaggagttcaagaccaacctgggcaaaatagtgagactccatctctacgaaaaatttaaaaattagtcagatgtggtggcacatgcctgtggtcccagctacytgggggactgaggtaggtcaatcgctcaagcccaggaggtggagactgccgtgagctgtgacggcaccactgcactccagcctgggcaacaaagtaaggcaccctgtctcaaaaaaaaaaaaaaaaaaaaaaaaaaaaaatccaatgatacaaataaagacaaagtggactataagggtgcagacactaatggattatcaccaacagaaatcttagaagaaaagaaacactaaagcattttcccaaaggagctcatcattttaaaaatggacttgacaatatgaagcgccttctttgtaactgtctct

SEQ ID NO: 428352 - DNA, 538 bp, Homo sapiens
ttagttgcataaagtgaggtacatttagactagtagggaaaagaacgcacttttttgccstcaactctaacattgagtagatagtttcattgagtacaagacaggaaaccctgaaggaggcagggaggagacctcatttattagatataaacttggcctggatctcacatgaaggatacagaaaagtcaacaggggtcctgttgttcagcaatgctattgaaagcctcagggcttgaaatcgtctttctccaggaaggcaagttagtcctgtctaatctgtcgttgggttggttttccgttgctgcatgacaaattaccacaaacttaatggcttaaaataacacacatgtactatgtcacagttttcatgggtcaggagtctgggcacggcttagttgggccctgtgctcagggtctcacaaggctgagatcgaggtgttatctaggctgctttctcatctggagacttgacggcatctgctgccaagctcccttggtttgttggtggaattcatctgtagctatagaattcatgaa

SEQ ID NO: 428353 - DNA, 538 bp, Homo sapiens
ttagttgcataaagtgaggtacatttagactagtagggaaaagaacgcacttttttgccgtcaactctaacattgagtagatagtttcattgagtacaagacaggaaaccctgaaggaggcagggaggagacctcatttattagatataaacttggcctggatctcacatgaaggatacagaaaagtcaacaggggtcctgttgttcagcaatgctattgaaagcctcagggcttgaaatcgtctttctccaggaaggcaagttagtcctgtctaatctgtcgttgggttggttttccgttgctgcatgacaaattaccacaaacttaatggcttaaaataacacacatgtactatgtcacagttttcatgggtcaggagtctgggcacggcttagttgggccctgtgctcarggtctcacaaggctgagatcgaggtgttatctaggctgctttctcatctggagacttgacggcatctgctgccaagctcccttggtttgttggtggaattcatctgtagctatagaattcatgaa

SEQ ID NO: 428354 - DNA, 538 bp, Homo sapiens
ttagttgcataaagtgaggtacatttagactagtagggaaaagaacgcacttttttgccgtcaactctaacattgagtagatagtttcattgagtacaagacaggaaaccctgaaggaggcagggaggagacctcatttattagatataaacttggcctggatctcacatgaaggatacagaaaagtcaacaggggtcctgttgttcagcaatgctattgaaagcctcagggcttgaaatcgtctttctccaggaaggcaagttagtcctgtctaatctgtcgttgggttggttttccgttgctgcatgacaaattaccacaaacttaatggcttaaaataacacacatgtactatgtcacagttttcatgggtcaggagtctgggcacggcttagttgggccctgtgctcagggtctcacaaggctgagatcgaggtgttatctargctgctttctcatctggagacttgacggcatctgctgccaagctcccttggtttgttggtggaattcatctgtagctatagaattcatgaa

SEQ ID NO: 428355 - DNA, 587 bp, Homo sapiens
tctggttaactggatttgctgggcatctgaaggctaacttgcagagtctttctatcatgccagactttaatagcaaaaagttagaaagacctaaacattcagcagtaggggacttgtataataaaccatgggttattcatataatggcacactatgatgtcattccaaatgttatagaagaaygttcaatgactggacagatggttacgatatattaagtgaaagtttcagaaaagtaatacagaataagcccatattgtaaaaaaaaaaaaaaaagatttcctttttttttttgagacggagtttcgctcttgtcacccaggctgaagtacactggcgcaatctcggctcactgcaacctctgcctcctgggttcaagcaattctcctgcctcagcctcccaagtaactgggattacaggcgcctgccaccacacccagctaatttttgtatttttagtagaggtggggtttcagtgtgttggccagactagtcttgaattcctaacttcaagtgatccacccacctcggcctcccgaagtgctgggattacagacatcatccaccagcccaacaattcactcctg

SEQ ID NO: 428356 - DNA, 587 bp, Homo sapiens
tctggttaactggatttgctgggcatctgaaggctaacttgcagagtctttctatcatgccagactttaatagcaaaaagttagaaagacctaaacattcagcagtaggggacttgtataataaaccatgggttattcatataatggcacactatgatgtcattccaaatgttatagaagaatgttcaatgactggacagatggttacgatatattaagtgaaagkttcagaaaagtaatacagaataagcccatattgtaaaaaaaaaaaaaaaagatttcctttttttttttgagacggagtttcgctcttgtcacccaggctgaagtacactggcgcaatctcggctcactgcaacctctgcctcctgggttcaagcaattctcctgcctcagcctcccaagtaactgggattacaggcgcctgccaccacacccagctaatttttgtatttttagtagaggtggggtttcagtgtgttggccagactagtcttgaattcctaacttcaagtgatccacccacctcggcctcccgaagtgctgggattacagacatcatccaccagcccaacaattcactcctg

SEQ ID NO: 428357 - DNA, 578 bp, Homo sapiens
gtgagaacccaagagactggagaccacggaccaatccctgcaaaaagcagccagggtagaaagggaagagctgagcggacttcacgatagctaatttgtgttacaaagccgatacggctgatgctcgctttttctcctatgrcatgcaggcgacatgttacttcctattcccataaaccctccactgtaggattaacacctaagacaccaaccaagacacaaaccaatacaaaaaaagatatgacccttggcgtacagtctgtttttgaaactccagaaagtcaggggaaagcgcgaacgcagtcccccactaccacaaattatgcagtcgagtttcccacatttggggaaatcgcaggggtcagcacatccggagtgcaatggataagcctcgccctgggaaaaccaccttcgtgatcatggtatctcccctgccaggtaagtatgaaacgttgtgcctctgccccgacacagcctcatacgcctcactctttacacacacggtcacttgccccgcgcactcccgagccctttccagccctgacacacagctgggattctcacttccgatcagcggt

SEQ ID NO: 428358 - DNA, 578 bp, Homo sapiens
gtgagaacccaagagactggagaccacggaccaatccctgcaaaaagcagccagggtagaaagggaagagctgagcggacttcacgatagctaatttgtgttacaaagccgatacggctgatgctcgctttttctcctatgacrtgcaggcgacatgttacttcctattcccataaaccctccactgtaggattaacacctaagacaccaaccaagacacaaaccaatacaaaaaaagatatgacccttggcgtacagtctgtttttgaaactccagaaagtcaggggaaagcgcgaacgcagtcccccactaccacaaattatgcagtcgagtttcccacatttggggaaatcgcaggggtcagcacatccggagtgcaatggataagcctcgccctgggaaaaccaccttcgtgatcatggtatctcccctgccaggtaagtatgaaacgttgtgcctctgccccgacacagcctcatacgcctcactctttacacacacggtcacttgccccgcgcactcccgagccctttccagccctgacacacagctgggattctcacttccgatcagcggt

SEQ ID NO: 428359 - DNA, 578 bp, Homo sapiens
gtgagaacccaagagactggagaccacggaccaatccctgcaaaaagcagccagggtagaaagggaagagctgagcggacttcacgatagctaatttgtgttacaaagccgatacggctgatgctcgctttttctcctatgacatgcaggcsacatgttacttcctattcccataaaccctccactgtaggattaacacctaagacaccaaccaagacacaaaccaatacaaaaaaagatatgacccttggcgtacagtctgtttttgaaactccagaaagtcaggggaaagcgcgaacgcagtcccccactaccacaaattatgcagtcgagtttcccacatttggggaaatcgcaggggtcagcacatccggagtgcaatggataagcctcgccctgggaaaaccaccttcgtgatcatggtatctcccctgccaggtaagtatgaaacgttgtgcctctgccccgacacagcctcatacgcctcactctttacacacacggtcacttgccccgcgcactcccgagccctttccagccctgacacacagctgggattctcacttccgatcagcggt

SEQ ID NO: 428360 - DNA, 578 bp, Homo sapiens
gtgagaacccaagagactggagaccacggaccaatccctgcaaaaagcagccagggtagaaagggaagagctgagcggacttcacgatagctaatttgtgttacaaagccgatacggctgatgctcgctttttctcctatgacatgcaggcgacatgttacttcctattcccataaaccctccactgtaggattaacacctaagacrccaaccaagacacaaaccaatacaaaaaaagatatgacccttggcgtacagtctgtttttgaaactccagaaagtcaggggaaagcgcgaacgcagtcccccactaccacaaattatgcagtcgagtttcccacatttggggaaatcgcaggggtcagcacatccggagtgcaatggataagcctcgccctgggaaaaccaccttcgtgatcatggtatctcccctgccaggtaagtatgaaacgttgtgcctctgccccgacacagcctcatacgcctcactctttacacacacggtcacttgccccgcgcactcccgagccctttccagccctgacacacagctgggattctcacttccgatcagcggt

SEQ ID NO: 428361 - DNA, 575 bp, Homo sapiens
aatttgtgttacaaagccgatacggctgatgctcgctttttctcctatgacatgcaggcgacatgttacttcctattcccataaaccctccactgtaggattaacacctaagacaccaaccaagacacaaaccaatacaaraaaagatatgacccttggcgtacagtctgtttttgaaactccagaaagtcaggggaaagcgcgaacgcagtcccccactaccacaaattatgcagtcgagtttcccacatttggggaaatcgcaggggtcagcacatccggagtgcaatggataagcctcgccctgggaaaaccaccttcgtgatcatggtatctcccctgccaggtaagtatgaaacgttgtgcctctgccccgacacagcctcatacgcctcactctttacacacacggtcacttgccccgcgcactcccgagccctttccagccctgacacacagctgggattctcacttccgatcagcggtcctgaacccgctcccagggcacgggaactcccttcgtggcgaagcagcaagtggcgaagcagcagcctctgcgctgcctcatctacata

SEQ ID NO: 428362 - DNA, 525 bp, Homo sapiens
tcgccctgggaaaaccaccttcgtgatcatggtatctcccctgccaggtaagtatgaaacgttgtgcctctgccccgacacagcctcatacgcctcactctttacacacacggtcacttgccccgcgcactcccgagccctttccagccctgacacacagctgggattctcacttccgatcagcggtcctgaacccgctcccagggcacgggaactcccttcgtggcgaagcagcaagtggcgaagcagcagcctctgcgctgcctcatctacatagaagtcgccctgtccgtgatgtcaccgacagtgccttgcccagtccccgtctgcctttctgccactcaaccgaccaatctgctgccagagtcgccaagaggaagtgacgtctgcctctccctttttccctcccgcccctgcgtctgttctctcccaaagaagctggtccttagcctgtgttaaggagcaayctttcggtggccagatggagccggggcatccttcttcaaataatggcttttaattcgc

SEQ ID NO: 428363 - DNA, 533 bp, Homo sapiens
gtgcaacagagcgagactctgtctcaaaaaaaaaaaaaaaaaagaaaagcaagccaggaccccatggccggygagatccaaaccagtaaaggggcagctcctcagagataggcatgtgcattagagaaaaaaagtatccttaacatgactccatatgataatcagctcattaaaactcatgcatatggactgcacatcatgcatgtacttaaaattatgggatggaggcaatgtgcaagcacacaagggccaaagtaactaagcaacccacctatcaatcaaaaggcaaacactggctaacgattaggcatccttgggaagagaagagaaagaaacacacataaaaagacccaacgtacaccaaactaatactgatctcacatcccagagatcagcccactctccccactctgagactgttactgtgcttaataaattttgctttgctttgctgctttgtgtgtgtcatgtacagttctttgtttgggacaccaagagcctggaaatgcacggcaccatctggcaagaattag

SEQ ID NO: 428364 - DNA, 605 bp, Homo sapiens
tcttggctgttgtgaatagtgctgcaataaacatgagaatgtagatatcttctgccaattgcaacaatatgaatgaacctggaggacactgtgttaagtgaaataagccaggcacaggagcacaattatcacataatctcacacgtatgtggaatctaaacaagttgattcatgtaactggagagtagatgagtgatttccaagggctgaggtggatggggggaagagagttggaaagatgttggtcaaaggatatgcaatttcagttagwtgagaggaataacttcaagagatctatcatacaacatggttatagttaataacaatatactgtattcttgaaaaatgctaagatagtggatgttaagtgttctcaccacaaaatgataactatgtgaggtaatgcatacgttaatcagctagattaggtgaatccacaatgtatgtatacatcaaaacatactgtgataaacacatgtaattttatctgtcaatttaaaacaaaacaaaacaaaattattgttctaccagtctatagttcatgttttaataaagccttctttacttttgttccatgataatcaacctatgcttgatacagggaa

SEQ ID NO: 428365 - DNA, 582 bp, Homo sapiens
ctgcatgtgctccctggcctgcggccaagtaagacatggttttgcttttccttagccttccatcatgattgtgaggcctccccagccatgtgggactgtgagtccattaaacctcttttctttataaattacccagtcttagatatgtctttattagcagcataagaacagactgaaacagtaatrtgagtatacatggtcattttttctacttcataaaatatagaaaagatatagaagcgtgttcacagaacattaacaatcttcactggagttcattcagggctaaaacacttgtctatgatagacagttctcagttatctacatcctaattgttctgtgactgtgcccattcactagttagttgcttttgttaaaagatgtaaataaaataatgatatattcattacaaagcaataaatatgcaagataatggacatgttttatccatttgtctatcaagggaactggtaaaattttactaagataggaaaaaaaatttagcatatgcattgttttatgtattaataaggcaagtgtattttgaagctacagtcaagagttttaaatgtgtcatttaa

SEQ ID NO: 428366 - DNA, 582 bp, Homo sapiens
ctgcatgtgctccctggcctgcggccaagtaagacatggttttgcttttccttagccttccatcatgattgtgaggcctccccagccatgtgggactgtgagtccattaaacctcttttctttataaattacccagtcttagatatgtctttattagcagcataagaacagactgaaacagtaatatgagtatacatggtcattttttctacttcataaaatatagaaaagatatagaagcgtgttcacagaacattaacaatcttcactggagttcattcagggctaaaacacttgtctatgatagacagttctcagttatctacatcctaattgttctgtgactgtgcccattcactagttagttgcttttgttaaaagatgtaaataaaataatgatatattcattacaaagcaataaatatgcaagataatggacatgttttatccatttgtctatcaagggaactggtaaaattttactaagatagkaaaaaaaatttagcatatgcattgttttatgtattaataaggcaagtgtattttgaagctacagtcaagagttttaaatgtgtcatttaa

SEQ ID NO: 428367 - DNA, 559 bp, Homo sapiens
tattacctgggtgacaaaataatctgttcaccaatcccccatgacacacaatgtacctgtgtaacaaccctgcacatgtaccctgacctaaataaaagttaaaarataaataaataaagctatgcagcaccaggaagaattcttcaggtgcccaggaagggagtatttaggctagccctggggcagaggggaatctgatgtctagcaagaggaaagtgggtcctgactggcttcactaccagcttcctaaagtggccttggtccccagatacatttcagctgcatccaggccatagtaactgtggtcttcatgcaagctctcgtactacactgatcttagaatctgtgtgctaggggtacaacccagcatgaaaccagctttggcagccatgggagtgcctgtgttgccagcactcccaactctgggcaatgcagcacagagagacactccttccaactggggaagaaaagggaagagtacaagaaattttgtcttgcaaccaggtaccagcccagtcacagtaaagcacagcattgggcagaatcccaaagcccctga

SEQ ID NO: 428368 - DNA, 418 bp, Homo sapiens
gcctgctcttcctgggacagcccctagagtgtattacctttagccagtgtatagtctcacccagtggaggacacaaataagatctcatgtcaaaccatcactactgtcccaacttaggaggtgggtagccgagattgataaggagttctttaatctctgggaatgaaacactttaaaaatcttatyacttttaataacgaacattcccctaactcttgttgtcagaattctgacgccactataagttctcccttacgttcttcccatccccaccacacatacacacacaaacacacatgcacgcacaaaaaaaaacaccagacacatacaaacccatgtatttaaataaataaaatacttgagcaatttcttcacagtcttgaggacagaaattgagtctcaaacataccaggagctt

SEQ ID NO: 428369 - DNA, 418 bp, Homo sapiens
gcctgctcttcctgggacagcccctagagtgtattacctttagccagtgtatagtctcacccagtggaggacacaaataagatctcatgtcaaaccatcactactgtcccaacttaggaggtgggtagccgagattgataaggagttctttaatctctgggaatgaaacactttaaaaatcttattacttttaataaygaacattcccctaactcttgttgtcagaattctgacgccactataagttctcccttacgttcttcccatccccaccacacatacacacacaaacacacatgcacgcacaaaaaaaaacaccagacacatacaaacccatgtatttaaataaataaaatacttgagcaatttcttcacagtcttgaggacagaaattgagtctcaaacataccaggagctt

SEQ ID NO: 428370 - DNA, 610 bp, Homo sapiens
ctttagggattcctaggagagatagtttgacttcttcttttcctatttggatgccttttctttctttctcttgcctgattgctctggcttgcacttccggtactgtgttcaacaggagtgggaagagtgggcatccttgtcttgttccagttctcaagggggatgcttcctaaaatgtcaatttgaaagcctgatttttgtctttgactttgaacactgaaagacaatccagagaactagcaaatttacatttaaaaacctgccttttaagtttttaaaaactatgaatttaaaattgcttcttttaaaattgggttttaaatttttgattctacaagaaaattttcattcaacaagcacttaggacctgttctgagtttcttcagagcctttcttaaaagataargcacatattgaaggtagagttattaagaatgagaaggtggagaaaaaataaaaataaataaataaacaatgcagctctcatccaaaatcctaatggcccaaaaaagctacaaaaaaagatgcctgagaggccacccctcctttcatattaaaaagctatagtgatttgtagagtcagagcttaacaaatcaccctattcttcat

SEQ ID NO: 428371 - DNA, 471 bp, Homo sapiens
tcactatcacaaaaacagcatgagggtaaccacccccatggttcaattacctctcaccaggtccctcccatgacacatggagattatgggaactactattcaaggtgagatttgggtggggacacagccaaaccatatcagaggtgaacaaaataatgccttttgtagccatttgcacacgtgtgtgtatatgaagatttcagagggtaagaaacatcacaaagaataataaaacaagctgtgaagatggaatattaggagtaagtggggaatgctaaaaataaaaatagtcatggaagccctccttaataagatgagattttcmcagagatgtagatgaagtgagagaatgaaacacctcaacatcttgaagtagagcctgttggcaaaggtcaataagtacggaagccctaaagcaggagtgtttttggccttttgagaaacagcaaggaggccataaatgatgggaag

SEQ ID NO: 428372 - DNA, 570 bp, Homo sapiens
aacaatagaataatccaagcaggagtttcacatgactagctaaaggaagatgtcaaaatagctgtatatgctaggggttaagaccctgaaaaaccatagtgttggccaagctgggtaagactgactagactcaacatagtgctagatttgatctaggttttacctaggacctcattatacactcattaacatactaaatcacacatccaccaaggccatgacacttccaggaacacccatatctggtgtaaaaatgtgtgggaccatagtgctgagaaatcttcacttttttccaggaattttcatgaatattccacccattggttaaagaaagccataggccagttgcaatggctcatgccrgtaatcccagcactttgggaggctgcagcaggcagatcacttgagatcaggagttcaagaccagcctgggtgacatggtgaaaccttgtctctaatttttttaaaaaaagaagaaaataaaggaaaaaaaaaagaaacccataaaggtggaggccccaaaccctgtcaggtgtgactctcttgaatacacatgcacccccccctttc

SEQ ID NO: 428373 - DNA, 556 bp, Homo sapiens
ttgaactcctgggctcaagcaatcctcctgcttcagcctcacaagtagctaagattacaagtgtgarccacagcaactggctcacactttcatccctctgaaaattccttgatagtaacagaaaaggaataataattttttaaaaaaaggcataaatgtgtaagaacaaacaggagagaagagaaaaaaacaggcaaaagaacaggagagaaaagacaggcaaaagacaccaaaatttgaagagatggaaaattcatcaataaatgataacaaattcagtgtacctgcaaaaactgaaacctaagtctaaagtgaaagagacaaagaagtgagttcattcacacagaggcaggagaaattgaggaacggaaggcattaagtacctttgagagtggagttgaggggcaaaactaaacaagagaaagactggttaagactaaaaaaatggttagccctccacctctcttcctcactataaagccagaaatcacaattcattttatggggctagcataactatgatactaaatttagacataaacattacgagaaaaga

SEQ ID NO: 428374 - DNA, 556 bp, Homo sapiens
ttgaactcctgggctcaagcaatcctcctgcttcagcctcacaagtagctaagattacaagtgtgaaccacagcaactggctcacactttcatccctctgaaaattccttgatagtaacagmaaaggaataataattttttaaaaaaaggcataaatgtgtaagaacaaacaggagagaagagaaaaaaacaggcaaaagaacaggagagaaaagacaggcaaaagacaccaaaatttgaagagatggaaaattcatcaataaatgataacaaattcagtgtacctgcaaaaactgaaacctaagtctaaagtgaaagagacaaagaagtgagttcattcacacagaggcaggagaaattgaggaacggaaggcattaagtacctttgagagtggagttgaggggcaaaactaaacaagagaaagactggttaagactaaaaaaatggttagccctccacctctcttcctcactataaagccagaaatcacaattcattttatggggctagcataactatgatactaaatttagacataaacattacgagaaaaga

SEQ ID NO: 428375 - DNA, 622 bp, Homo sapiens
gtaagttagttatattgcttttatttttccatatgcttagttagcagcaagtgtagtctcataatctttgagcttcccatctcctgtagattatctgtgaaccttaggtgttaactgtcgttcaaaaggaaagttctccagctgtcccctccctaatgagaatgacccttaatgtcagttagtttgtctgttggtrctgctggtactattggtggtgctgccattgccatagcttcttgctgacccacatcaccattactgatctcattggcatccatcacctgacaggcgctattggtccttgcttcaggaaagtttttctggcaccagttccacctcagccttgcaaggcaacatggtctttgaaagagggtatattagtcagggttctacagagaaacagaccaaaaaaaatgtgtgtgtgtgtgtgtgtgtgtgtgtgtgtgtatagtcatgcattgcataagagtgttttgcttaaggatggactacatttacaacggtactcccatgagattataatggagctgaaaaatgcctatcacctagtgacatagctgttgtaatgttgtagtgcagtgtattactttttctatgtttagatacacaaatacttactata

SEQ ID NO: 428376 - DNA, 592 bp, Homo sapiens
ttattctgtcatcactttcttctgggaccaatacaatgcttcactgcagtgggcactgttgttgaattccctacctgtgaaagaagtttctggagaactttgtcttgaaatgcacatacttagccaagttctttcttctgaaccatcctttttgctgcccccttctggaagccagagtcacctgcagaaaaactcctccctastagctctccaagatgtggaaaggcaaagtccaccaaactccagcaggttcacgggaggctttcatgttggacatctcttactcatcagtcaaccagtggtgtccttaactgcttgccagatacctcaagttccatggatccaaaaccaaattcattctctcaccctccaccaatttctcttccgccttgttttctccttcccttctctatctactcattctgtaatcaatacatatatatatgaagagagagagagaggaagattaattgatttttaagaattggctcccgtgagtgcagaggctatgtgagtccaatatctgatgggtaggctggcaggctagagacttagagaaggggtgcaattcaagtccaaagacaacctgctg

SEQ ID NO: 428377 - DNA, 558 bp, Homo sapiens
aatgacacaccaggagattatatcccgcacctgcttcagtgggtcccatgcccacggagccttgctcactactagtgaagcagtctgagatcgacctgcaaggcagcagcctggcaggaggaggggtatccaccattgctgaggcttgagtaggtaaacaaagcagctggggaagcttgaacggggcagagccctccgcagctctgcaagccctgctgtgtctagaccccacctctggaggcagggcatagctgaacaaaaggcagcaaaaacttctgcagacttaaacgtccccgtctgacagctctgaagagaacagtggttctctcagcactgtgtttgagctcagagaatggacagactgcctcctcagtgggtccctgacccccttgtaccctaactgggagacacttcccagcaggggccaactgacacctcatataggcgggtacccctctgggacgaagtttccagaggaaggatcaggcagcagtatttgctgttctrcaatatttgctgttctgcatcctctgctggtgatacccaggcaaacatggt

SEQ ID NO: 428378 - DNA, 612 bp, Homo sapiens
tctacctctctctttagctctaataatgtttgctttatatatctggctgctctagatatctatttggtgtatatgtatttacaattgttatatcatcttgctgcattaactcctttatcactatatgaccttgtctctttttatagtttttttcttgaaatctattttgtttgatataagtatagctccttttactctttttttgtttgtttgtttcmatttgcatggaatgtatttctacatccctttaagtctatgtgtttctctataggtgaagtgggtttcttgtaggcaacagatggttgggtcttgttttttctaattcattcagccagtatttcgttttggagagtttagtccatttacattcaatgttattattgataagtaaggacttactcctgccattttgttatctgttttctggttgttttgtggttttctcttctttccttccttcctgtcttccttacagtgaaggtgattttctccggtggtatgttttaatttttgctttttattttttgtgtagccattgtatgttttttgatttgaggttatcatgaggtttgcaaatactatcttacaacctattattttaaactgatgaca

SEQ ID NO: 428379 - DNA, 525 bp, Homo sapiens
tctatggcttctgtataagaaaaagagacattttgacaggcaacacgartatgaagcgacagcaagtacaaatccttggcaactgtcatttcattatcctgctgttgaattcacatccaaattgtgtgataacttatacctgcatgtttgtttttgagccagggtctgtcaaagtagccgcgtttcctgcttaagaatagaattattagccacatgcaaatttatgccatagaaatctaaaaatagcaaggatgttttgtgtttcataaagagggaaaataaaaactccatgtcattttatgcttatactgaaatttccagtgaaacgttcctgattaaataaaagtagaatttttagaaaatagcagataatttatattttaccttattttgaaattaattcaacattagtaaaggtgtttaataaaactaaaaataaagcaaaagtaattcggattgtcagttacattatactacatgtccattacatttaatgcagtagtggaaagctgattatatgttagg

SEQ ID NO: 428380 - DNA, 512 bp, Homo sapiens
ggtttttgcaacttccatcaacccatcctcaaaattagctctttaaatcttacacctaccatagcctctcatctctgtcccctctttttcattcccagtcctattttagttgaggcgtttattgtaacagtaacctcccacrgtgtactgaatgcagccttcatattgctaccagattaatcttccaaaaccactgtgctcctgatgtcttcagtggcttcttctcacctacagaataaagtccttctaatcaagctggtaaagacactttagtttgggcctagctaaatttaattcccactaatactccatagtattatggcctcaaacaaattctgcatttttcttctctgttcttatattcatgaaagcatctctttcctaatcctagaaaaaaactccttcatccttcaagatctatttcaagtgatacctctcctccaggaagccatcctgccaccccaacaaaaatgacttctacctcctcataatcccgatggtgatcactttac

SEQ ID NO: 428381 - DNA, 455 bp, Homo sapiens
attctattacttgcaaaaaatgatagattctttctccccttctgatacttacatctcttatttttcattcttcatagcattggccaatatctttagtatgtcttaaaaatagcagtgaaaatctgcatccttgtcttttttctaatcttatagcaaatgcatctaaagtttctctgttaagtaaaatgtttgcagtagatttttggtattgaatttttaccaggttaaagaagttcctttctactcataatttgctctgagtttttaaaaaatcatacataagtattgaagttatgaaatgcatttttctgcatcaactaarataatcaaatgaattttctcctttggtttctttttttccctccagctttattgaggaataattggcaaataaaaattgtatatatttaaggtatctaatatgatattttgttacgcatatgcattgtgaaatg

SEQ ID NO: 428382 - DNA, 593 bp, Homo sapiens
aaaaaaaaaaaaaattagccaggattggtggtgggtgcctgtaatcccagccactcgtgaggctgaggcaagacaattgcttgaacccaggaggtggaggttgcagtgagctgagattgcgccattgcactccagcctgggtgacacagcaagactctgcctcaaaaaaaaaaaaaagttgtcagcatggcttttttgaccccaaaattccatctcctatactgactgatgcctaaaattccattatgagagcttcattccagtcatttatggtaatattaatagttattaagaatggtacatattagaataatgcatagaataaactctcaagagaactttcattttaaggcaaggatttgttttcttttagaactcaagatcaccagaaaggcagctatatttgtgscattatccaccgcttatagcttgtatgaatgattttatacaagctataaaatcactaaaaatttttgtttttgttctctttgtccctctttttttttttttttctacagcaagttatttaacacttttagatttccccttcctttacattaaaataaccttggttgtacagatggggcaatcat

SEQ ID NO: 428383 - DNA, 600 bp, Homo sapiens
ttagccacggctgggatgcacagcaccaagtcctaagactatacaaagcagcaaggccctgggcccagcccaggaaaccatttttttctcctagaccttcaggcctatgatgggaggggctgatggagatctgtgacatgccctggagacattttccccattgtcttggcaattaacatttggcttcttgttacttatgcaaatttctgcagcctgcttgaattctccttagaaaatgggtttttcttttctattgcatcatcagcctgcaaattttccaaacttttatgccctgcttcccttttcaacataagttccaattccaaactgtctctctcaagttcaaagtccgtcagatctctagggcagggacaaaatgctgccagtctctttgctaaagcatagcaaaagtgacctttgctccagttctcaagwagctcctcatctccatctgagaccacttcagcctggaccttattgttcatatcactattagcttttttgtcaaagccattcaacaagtctctaggaagttccaaactttcccacattgtcctgtcttcttctgagcccttcaaactgttcaaacccctgcctgtt

SEQ ID NO: 428384 - DNA, 600 bp, Homo sapiens
ttagccacggctgggatgcacagcaccaagtcctaagactatacaaagcagcaaggccctgggcccagcccaggaaaccatttttttctcctagaccttcaggcctatgatgggaggggctgatggagatctgtgacatgccctggagacattttccccattgtcttggcaattaacatttggcttcttgttacttatgcaaatttctgcagcctgcttgaattctccttagaaaatgggtttttcttttctattgcatcatcagcctgcaaattttccaaacttttatgccctgcttcccttttcaacataagttccaattccaaactgtctctctcaagttcaaagtccgtcagatctctagggcagggacaaaatgctgccagtctctttgctaaagcatagcaaaagtgacctttgctccagttctcaagtagctcctcatctccatctgagaccacttcagcctggaccttattgttcatatcactattagctttwttgtcaaagccattcaacaagtctctaggaagttccaaactttcccacattgtcctgtcttcttctgagcccttcaaactgttcaaacccctgcctgtt

SEQ ID NO: 428385 - DNA, 547 bp, Homo sapiens
cggcaggagacgatgatataaaaatgaaataaacaagaactaaaaaaaaattgtcatgccctttattgttcactgtcaacttaagatcatttttaaacttcccgttaagaaacttgtttggaatatattgaatcactaggaagaataacatggaaaataccaacctcagatgttttcttgggttgattttaggcctcttccattaacatggagatacactaaattgctgaaattcactttaactggatgcttatttattgactagcacaactacaattttaaaaagatctgtttatattcctacaaaacattggtaatattgttttaatttgttaagtatttgttaagtttggtgtagtcacgtacagcacagtaagggaaactcagaccagaaaggcaaaagagtaagtttattactcacaaactccagagagaagagggcagcatgctttgcagggccaatgggaatgagtagggggcattcaggacgtgtactcagccarcaggtagagagtaagagtgagagggagggacctgtgggcccatg

SEQ ID NO: 428386 - DNA, 523 bp, Homo sapiens
gattttcaatttgttttgctcagatccattaaaggaattactatctatggcagctagaaccttttgaaacatgttttctaaagatgatttgaaagtcataattgctccttgatccacgggctgcagaataaatgtaatgttagcaggcatgaaaacaacattcatccccatcagaactcttaagtgactagattccttgtcaatgagcagtaatattttgaaaggaatcttttttttctgaggaggaggtcttgactatgggcttaaaatattaagtaaaccatggtataaacagatatgctgttatccaggcttcgctatttcatttatagggcatagtcaggctgtattagtcgggatgtatttagcataattcttaaggactccaggattttcagaatggtaaacgagcattgacttcaacttaaaatcacaaatgcattagcccctaacaagagartaagtctatcttttgaaacattaatgccaatcattgacttctctttagctatgaaagtcccag

SEQ ID NO: 428387 - DNA, 523 bp, Homo sapiens
gattttcaatttgttttgctcagatccattaaaggaattactatctatggcagctagaaccttttgaaacatgttttctaaagatgatttgaaagtcataattgctccttgatccacgggctgcagaataaatgtaatgttagcaggcatgaaaacaacattcatccccatcagaactcttaagtgactagattccttgtcaatgagcagtaatattttgaaaggaatcttttttttctgaggaggaggtcttgactatgggcttaaaatattaagtaaaccatggtataaacagatatgctgttatccaggcttcgctatttcatttatagggcatagtcaggctgtattagtcgggatgtatttagcataattcttaaggactccaggattttcagaatggtaaacgagcattgacttcaacttaaaatcacaaatgcattagcccctaacaagagaataagtctatcttttgaaacattaatgccratcattgacttctctttagctatgaaagtcccag

SEQ ID NO: 428388 - DNA, 515 bp, Homo sapiens
acaccccgctgagagtattagatcatccatgcagaaaactaacaaagacatttgggacccaaactcgacacttgagcaaatagacctaaccgacacctaacagaacactccacccaaaaataacagaatatatattcttcatattttcacattacatactcaaaaatcaaccacaagctcagccataaaggaattctcaacaaattaaaaaaaaatcataccaaacacacacttggaccacagcacaatgagaatgtaaatcactaccaagaagatctctcaaaaccatatgattacatgcaaattaaacagtcggcttccagatgacctttgggtaaacaatgtagttaaggcagaaatcaagaaattctttgaaaataatgaaaacaaagataaaacatwccagaatctctgggacacaggtaaagcattgttaagaggaaagtttatagcactaaaggcccacatcaaaaagttagaacgatctgaggttaacaacctaacaccgtatctag

SEQ ID NO: 428389 - DNA, 526 bp, Homo sapiens
atacacaccgtctaccgaatcgatctgcggctcacctcttttcccactatctttctcccttttctagctcacagtggtcttgggccaggcctttttacagctattacagaacccattttcacattgttcggttgagcgtttatctttttgattctgtatttactcttctgttcaaaagcccggggcaaccgaacaaaaggataatgyttcgtatcacatttaagagtagaaattacagttcaactatcagaaatgctctgggatggagctgcccccgtgggacctgggctgcactgtttccatcctcccaggaagaaccttgggaacctattcacccgctttggttttggcaaactcactagcctgaggctatgcagtgaagatgaagttagttgaaatatagttgtttacatctgttttcataaggatgattaagacaccttttctcatgggggctacagcagctaacattttttaaaaaggctttagcttctgcaaaagcattgttctaggtatacaccctgtg

SEQ ID NO: 428390 - DNA, 580 bp, Homo sapiens
tacctaatttaaggtatacaatcccatgagagcagaccctctttagaagtgtaatcagagcctcctatgtaacaatacataaatcaggtctctgccttttcttaagaaaaaatacctttttcatgctgacatttgatgactaaaacataggatcccatttttcactgattttcatgaaatatctaaactccaggaacccagtcttgatttgactgctgtctagttcttgccagaatcctagctaagtggtactggcacaagaattgacagacattgacagaactgcatacatttcacagagacataattaaatataaataaaaactgagtgggtgataaagataggcgcataatgtaatgagaaaaaaatggaggaactattcaagtrattttttttttttttgagatggagcctcgctctgttgcctaggctggagtgcaatggtgcgatctcggctcactgcaagctccgcctcctgggttcacaccattctcctgcctcagcctcccaaatagctgggactacaggcacccaccaccaagcctggatagtttttgcatttttagtagagacgtggtt

SEQ ID NO: 428391 - DNA, 580 bp, Homo sapiens
tacctaatttaaggtatacaatcccatgagagcagaccctctttagaagtgtaatcagagcctcctatgtaacaatacataaatcaggtctctgccttttcttaagaaaaaatacctttttcatgctgacatttgatgactaaaacataggatcccatttttcactgattttcatgaaatatctaaactccaggaacccagtcttgatttgactgctgtctagttcttgccagaatcctagctaagtggtactggcacaagaattgacagacattgacagaactgcatacatttcacagagacataattaaatataaataaaaactgagtgggtgataaagataggcgcataatgtaatgagaaaaaaatggaggaactattcaagtgattttttttttttttgagatggagcctcgctctgttgcctaggctggagtgcaatggtgcgatctcggctcactgcaagctccgcctcctgggttcacaccattctcctgcctcagcctcccaaatagctgggactacaggcacccaccaccaagccyggatagtttttgcatttttagtagagacgtggtt

SEQ ID NO: 428392 - DNA, 538 bp, Homo sapiens
ctatctctctccagagctcaaaatcaacccataataggtactattatacaatagtactaacttacgttcccagtgtgatatgatacgggaactgagggacatagtgctcagacttgttccttcagtgattggaccattgactttcagctagatgtacgtctcttgcccctgtcctcccctatagtgtgttcttttctaagacgtgtctctttcctccatttgaaaaaggctcattgtccagacaggtttgatcctaagctggtttctgtgtatttttatattttgtggttttgtcagaattttataagctatttcattttascaggtaatctctttagtatatcctttttgctaatggtacattttacttaactggcttgtcctttaactttctaggttctattgctttttttctatattgtcgtgtttatagaatgttttatcatttttattcaagtatttaattatcttagttaatttctcttctttaattttctgtggttttttttcttctttacgttaatatattggtagaccc

SEQ ID NO: 428393 - DNA, 202 bp, Homo sapiens
cacaacacatatttgatacaggacttgtatccaaaatatactaaaactcctaaagctcaaaaataagaaagcaaacaaaaagtyggcaaaagatctaaacagacacctcagcaaagaagttattcagatggcaaataagcatacgaaaaaatgctcatgatgtgtcattagggaactgcaaattaaaacaacaagtggtact

SEQ ID NO: 428394 - DNA, 603 bp, Homo sapiens
atatccggtcgggttattgttgtttgtttcagacagaaaattctagagtatgtctgtatgctgatgggatactgcagtaaaaagagagaaagttatgatacaagttattaataggaaaggaaaatcgatgtagtgatgtcytcagtagacaaatgaagaacagatccagggcataagaggaagtattcatttttgataagaatcagaacactttcttccttgtactgaatagaaaggcagaaactataggtagagatgcaggaagatttggaaacatggtagcagaaagatggagactttattttttattgcttctcttttttccagtgaagtatgaggtatggtcatcagttaagagttgaaatgggagaacaaagaaatgaaattgaagaaaacagagtagcgatagaaagtggtggacttaatagactgaaggcctcaattagaaaagggtgtttgaaatctaaattgcagaggttgtacaagggaactgagggcaattatataaaaattaattgtattttaactaaaaggcatttcatttttatgagggtgagacctttattttcctcaccactatatcccagactaacacacagcagt

SEQ ID NO: 428395 - DNA, 554 bp, Homo sapiens
gcagaaacgtcatagtattaggagatgtgatgacaaaggaagaggtaggagtgatgttaggaaggggacatgggccatggaatgcaagagaactccagaagctgaaaagagcaaggaaatggactatctactgaagcatttggaagggatgcagctctattgataccttgattttagacttctaacctacaaaactgtaagataaacttgtattgtctaagggactaattttgtggtaattttttactgcagcaacagaaaactaatagagttcctgaacaccatcatgaactgtagagagaaagctgtcaccctaagttgttatggcaggcctcaggaaattgctctctcaagttcagaatgatgtggcgttctgccycccactgatccccgtcacactgttttatagcacatgcatacattgcagtatgaagtccttaggggaagtaaatattttctatagcctccctcctttgaatcttgcatatacatagattgttgcgctatgcccaatagtttatggtaattgtttaagagtctatgcagctttccta

SEQ ID NO: 428396 - DNA, 554 bp, Homo sapiens
gcagaaacgtcatagtattaggagatgtgatgacaaaggaagaggtaggagtgatgttaggaaggggacatgggccatggaatgcaagagaactccagaagctgaaaagagcaaggaaatggactatctactgaagcatttggaagggatgcagctctattgataccttgattttagacttctaacctacaaaactgtaagataaacttgtattgtctaagggactaattttgtggtaattttttactgcagcaacagaaaactaatagagttcctgaacaccatcatgaactgtagagagaaagctgtcaccctaagttgttatggcaggcctcaggaaattgctctctcaagttcagaatgatgtggcgttctgcctcycactgatccccgtcacactgttttatagcacatgcatacattgcagtatgaagtccttaggggaagtaaatattttctatagcctccctcctttgaatcttgcatatacatagattgttgcgctatgcccaatagtttatggtaattgtttaagagtctatgcagctttccta

SEQ ID NO: 428397 - DNA, 560 bp, Homo sapiens
taaacaaagcaatcttgattttgtatcaccaaagcttcctgtaattcattcacttattcatcaataaacattgaaatgtccaccttgagttaggcactggaaatgccatggtaagagagattcctgacatcattgaactcagtgtctagcctaggagacagacattgaataaacaatctcaattgtcatgagttttatgtgatggggcatacagggggatttgggaatatgcaacaaggattgccacctaatctgaggtttagggaaagcttctttgaggaagtkatcttgacctgagctctaaacattaaatagaaattaactgggtgaaaatggcagcagggagggaaagattgagctagatttcaggcaaagaagttagtatgtgtaaaggccctgaagcctgaggttatgaaaaaacactactgtttgaggaattaaaataatttcagcgtggctagagcagacagagtaagaaaaaagaggcagatcagtgctatgaattgaattgtgtccctcccccccaaattaatatgttgaagctctaatccccaatgaga

SEQ ID NO: 428398 - DNA, 602 bp, Homo sapiens
cactgtcagttccataaggggcttaaagatttttgagcctaaacaaagcaatcttgattttgtatcaccaaagcttcctgtaattcattcacttattcatcaataaacattgaaatgtccaccttgagttaggcactggaaatgccatggtaagagagattcctgacatcattgaactcagtgtctagcctaggagacagacattgaataaacaatctcaattgtcatgagttttatgtgatggggcatacagggggatttgggaatatgcaacaaggattgccacctaatctgaggtttagggaaagcttctttgaggaagtgatcttgacctgagctctaaacattaaatagaaattaactgggtgaaaatggcagcagggagggaaagattgagctagatttcaggcaaagaagttagtatgtgtaaaggccctgaagcctgaggttatgaaaaaacactactgtttgaggaattaaaataatttcagcgtkgctagagcagacagagtaagaaaaaagaggcagatcagtgctatgaattgaattgtgtccctcccccccaaattaatatgttgaagctctaatccccaatgagatat

SEQ ID NO: 428399 - DNA, 512 bp, Homo sapiens
aaataaaaaaactccaaagcaaatctggataagacttaagtgataaaaggatgaaaaaaatagccttccagactgggtacaaaatattgtggtaggytacacttcggaagataaactgtgaaaagaaaatacattcttatctcaaggaatagttgaactattcaactagagaaagctaatgaagttagagctagacatgaaaaagagaatgccagaggcccctttttttttttttttttttttttttaaggaatgaacatcctttgaaacaaaaaagatgaacgttagttgaagcaagaaaatcaaggttcagtttcctggatttaaaagacatttcatcaaggacacttaactacatagtagcaaataactgacctaagatcacacagcttgtctaaggcaaaacaagctaccctccattgcagattagacgtggatctccaacctcaaaggcaaagggtaagactgaggatgggtgttcctcctcatcctgccaggaagcatcagtgtaa

SEQ ID NO: 428400 - DNA, 512 bp, Homo sapiens
aaataaaaaaactccaaagcaaatctggataagacttaagtgataaaaggatgaaaaaaatagccttccagactgggtacaaaatattgtggtaggttacacttcggaagataaactgtgaaaagaaaatacattcttatctcaaggaatagttgaactattcaactagagaaagctaatgaagttagagctagacatgamaaagagaatgccagaggcccctttttttttttttttttttttttttaaggaatgaacatcctttgaaacaaaaaagatgaacgttagttgaagcaagaaaatcaaggttcagtttcctggatttaaaagacatttcatcaaggacacttaactacatagtagcaaataactgacctaagatcacacagcttgtctaaggcaaaacaagctaccctccattgcagattagacgtggatctccaacctcaaaggcaaagggtaagactgaggatgggtgttcctcctcatcctgccaggaagcatcagtgtaa

SEQ ID NO: 428401 - DNA, 596 bp, Homo sapiens
gtttgtctattttttgctttgatccctgtgcttctgaggtctttttctaaaaattcttgcctagtcctatttcataaagtgtttcccttattttttcttctagtagtttcaggtcttacatttaagtctttagtccatttagagttgatttttgtgtatggtgagagataggggtctagtttcattcttctgcacatggctagccagttattccagcaccatttattgaagagaatgtccttacctcaatatgtgttcttggcacctttgtcaaaaatcagttggcttcacattratgaatttatttctgggttctttattaagttccattgatctgtctatatgtctgtttttatgccactgctatggtgttttggttgctatagctttgtagtatgtttttaaagtcagtgtgatgtcttcttcaactttgttctttttgctcaagattgttttagctatcagggacatttgccgttcatatgaattttaggattgctttttctatttccattaagaatttcattggtattttgatagagattgcatcctgtcatttgtgacaacatgaatgaggctggaggacattatgttaa

SEQ ID NO: 428402 - DNA, 564 bp, Homo sapiens
ctgtctttcctgaacttctccgcgtctctgttcctcccacatttcagccagatccaactctggcatctttagttcaaaattattttctcttgtcagaaatctcatagacgctaaggattgaaaagtttgccattaggtcatcaacttctccagatgacatgaacagtgtctgcaatattctccatacctatctctactggaaagtctttggtgacaggagttgactatatatacacggcagtgcttatcacaaggggacaggtttgtttatttttttcattttataaaatttgtataaatgtataggatacatacaagtataatttggttacatggatagattgtatagtggtggagtcaggggttttagagtatccattactcaaataacacatgttayactcattaagtaattaatcatccaccctcctccctcccttgcactcttgctagtctccattgtctatcattccacattctatgtccatttatacacttttgagctcccacttatgagaacatgtggcacttttctttctgtgtctgagttatttcatttaagat

SEQ ID NO: 428403 - DNA, 411 bp, Homo sapiens
aaagatgaggatctaattacattcttttgcatatggatatccasttttcccagcatcatattttaaatgccatgtattcttggcatctctgttgaaaatgacttagctgtaagtgcatgaatttatttctgagttccccattctgtttgatagttctatgtgtctgtttttatggaagtaccacactattttggttactacagctttgtagtagaatttgaagtcaggtaacgtgatgccttcagcattgttctttttgctcaggattgctttagctatttggagtcttctggttctatatggttctgtatggttttgttttttctatttctatgaaaactgtcattggtattttgatagggaatgcattgaatctgtaggttgctttgggtagtattgtcattttaataa

SEQ ID NO: 428404 - DNA, 636 bp, Homo sapiens
ggattgctgggtcaattggtagttctgttttaagtctctttagaaatccccaaactgctttctacagtggctgaactaattygcattcccaccaacagtgtataagtgttccttctatctgacgcctcaccagcatctgttgttttttgacagtttaataatagctattctgacatgtgtgagatgttatctcattgtggttttgatgtccatttctctgatgattattgatattgagcattttttcatatctttgttggaagcatgtatgtcttcatttgagaagtgtctgttcatgtcttttgcccattttgaattgtttttgtttttgcaattatataagttccttatagattcttcatattagacctttgtcagatgtgatatttgtgaatatattctcccattctgtaggttgtgtgtttactctgtcagtagtttctttcgctgtgcagaagctctttggtttaattaggtcccactggtcaaggtgtgtgtgtgtgtgtgtgtgtgtgtgtgtgtgtgtgtgtgtgtgtgtgaattgcttttgaggatttagtcctaaattattttccaaggctaatgtccagaatggtgtctcctagggttttttctgggattcttacagtttgagtt

SEQ ID NO: 428405 - DNA, 617 bp, Homo sapiens
ttgtttgcctgggaaagtatttctcattcatgtttgaaggataatttcatcagatatactattctaggctaaaagattttttccttcagcacttaaaaaatatcatgccactctctcctagtatgtagtttttccactaaaaagtttgctaccaggtttattggagctccatggtatgttatttgtttctttgctcttgctgctttttagattctttatttattcttgacctttgggaggatgattattcaatgctttgaggttgccttttttgggttaaatctgcttggtgttctatagccttcttttacttggacattgatatctttttctaggtttggaaagtttgcagttaccccttcgaataaactttctacccctatctttttctctccctcccctttaaggccagyaattcttagatttgcccttttgaggttattttctagagcctgtacatacccttcactgtttcttattcttttttcttttgtctcctctgaccgtgtgttttcaaatagcccgtcttcacgctcactagttcattcttctgcttgatcaattctgctattaagatgctccaatgcattcttcagtatgtgaattgcatttttcat

SEQ ID NO: 428406 - DNA, 596 bp, Homo sapiens
gggcccagttctgtcctaggactcacctaggtgttacagtctttgtagcctggactgccttttaaatttatgtggagccccaaagcactcgagcctgtagtggcaaggcttgtaggaactcaagttccaactgctaggatcagcgattcccctgtggctagagctggtttaaatgcaccctctgtgggcagacatcagctgagtttggttttgccttctgctataacaagggcaacattgatttcaaggcctcacaactgatggctgtccctctccccagggcacggaaatgctctctgcctcactctactgctgccaggggattggggaagggtggcatcagtgatttaagamtgattttttctgtttttttttctgttcttctcttaaagatatggaattcaaaccaggtacggtgagtgctcatctgatatttggttcttacaaaggtgctttttttgtgtgtgtagatagctattaaattgttgttcttgtggggtttgggggataatcagtggagacttctgccctgccatcttcttccgcccttcctctctattttctgtgttaatctcactatcagactatgaagcttg

SEQ ID NO: 428407 - DNA, 638 bp, Homo sapiens
tgtgaggttttgatcctagtgtgtagttgttagctgattgctttgtaatttcttttatgtggttgctttatagggtctgtgtgctatgtacttaagtgtgttttggtggtagcagatacagttctttcatttccatatttagaacttcattaaagatctcttgtaaggttgttctagtggaaataaatttccttagggtttgtttgtctagaaaagatttatttttctttctcttatgaagcctagtttggtaggatatgaaattcttggttggaatttcttgtcttttagaatgctgataataggccctcaatatatcctggctcgtaagatttctgctgtgaattcagctgttagtctgatagttctggtagatgatagaacatctgatagctgttccttctgtatgtgatctcgcctayttctctagctgtctttgagatttttttctttagaattgaccttagatagtctggtgactatatgctttggtgacatttgttttgtattgtattgcacaggtgttcactggatttcttgtatctggatgtctacttctttagtgagattagggaaattttcttgaattatttttattaaatatgttctcaaggtttctcaggaatgccaacaattca

SEQ ID NO: 428408 - DNA, 601 bp, Homo sapiens
tgtgtctgcctctggagaagggaatgcagcatctgggagaatacttggaatagaatcaaatagaatagaatggaaatatttctcacaacttcaaaacctggagcttcacttactctttcctcattcctgacagagtaggagctttataatcattgaattaaaattgaatagccaggctcaaacagaggttaggattaaatcctgacctaggaaggcgtgcatctttttaacttgtttcataactgttagtcaagctgaggagatgcttctctgaagaaaggcagactatcttaagaaacttcaggtcaaacttcttctagcacctaccatgtgcgaggttcttttccaggcttgttggaagatcacagagggacagtgagcaaacaggawatacaagggcataaaatatctgcaatctccctaagcaactaatacttttctatggtattagaaaatccatttcaccgggatgaactgcttttcttttctgaaaataccttaactttcctagtgttgctcctgtcagtactacctaaagtgtaatgtgaatcactactcattttctgtatatttgttggaactgagaaatggaagtcaattg

SEQ ID NO: 428409 - DNA, 500 bp, Homo sapiens
tatcctaaatctccttgttttataagaataacagtcactttggattggggcccaccctaatgacctaactttaccttaatcacctctttaaagataccatctccaaattcagtcatattctgagttgctgggggttaggtcttcaacatatgaatttgaggagggggccaggcatagtggctcacatctgtaatcccagcactttgggaggccaagacaggcagatctcttgagcctaggagttcaagaccaacctgggtaacatggcagaacccgtctctactaaaaatacaaaaaaraaaaaaaaaagctggttgtggagttgtacacctgtagtcacagctacttgggaggctgagatggtagaaacacctgagcccaggaggcccaggttgtggtgaggcaatatcacaccattgcactctagcctgagcagtagagtaagaccctgactttaaagaaaaaagaacttgggaaggggacacgattgagcctacaac

SEQ ID NO: 428410 - DNA, 559 bp, Homo sapiens
cagttcttaaaagcattgaagaccttaaacagtcttaaacagcaaatactgtgttttcatagaaagtagaagaatgtgtgcatttcaaaataatgttacatgtgcttttgcatgagaaaccacctatgttatttagcgaggctgaagactgcaacctagacraaatgaaagtacagtctcatctctgccttggcatcagatcaggttgctattggcaaagctaagtagaggatttttttttcattgacaccttcaagtttgaagcagaagtaaaagaaatgacctatgttatttaaataattaccaaattatttaggatgaaaaggcatgtagtcattgtgaattagaacataacaaaattgagcatgcctttgttgaattatatgtgtgcatgctcacatgtgtatatacttttaaagttcatgttccaataatgctttctttgtagagggcaagctttctcaaaaaagtttatgggaaatttccttattgacttattttaacaagtagcaggttacaatgcctttccaaggaatcattaaattaaattgtttctata

SEQ ID NO: 428411 - DNA, 561 bp, Homo sapiens
acataacaaaattgagcatgcctttgttgaattatatgtgtgcatgctcacatgtgtatatacttttaaagttcatgttccaataatgctttctttgtagagggcaagctttctcaaaaaagtttatgggaaatttccttattgacttattttaacaagtagcaggttacaatgcctttccaaggaatcattaaattaaattgtttctatataaaacattgtccctaagctcccagctacttggctgatagggaaataatttttctcttcttttmaaattagttgaatatttacttcatactgattaattgagaaacaatggaatttctcaagatagaaacactatagtttttgctatatttctgtcatgggaaaagatggagtattagtttcttaaggctgcggtaacaaggtacctaaaactgagtggcttaaaataacagaaatttattatgtcacactttcagaggctaaaactccaatattaaggtgtcagtagaattggttctttctgagggctgttagggataatctgttccacacctctttcctagtttctgg

SEQ ID NO: 428412 - DNA, 589 bp, Homo sapiens
ccccttctcaactctgttatattgaagatcaatgaacatgaactttgrgggatacattgataccatggcacctgttttgaacatagatgtttatggtgacaaaaaggagatcagataactatagcatctcctatttattaattaagactagaatataaatgatagagtagatgttagattactttatgtaggctgttttttttaaagcatactgcaataaattacccagataaaataagtcagccaaaaatctcccctcacttgaattggcctgatattatggagtgatgtactagtactggatttagagcatgccagaaaaaaaaaaattctaaggaaagtttggagatacattactatctggaattaatttagattgatacaaaattaaagagagggtactaggtagttaattaaaaaatttctcaataataattattttacttatttataaatatataatttattattttaattgtacttattttactaggtgatattgtgtaggttgaatttttaaaatagtaattttattagttttcaaaatgtaatgcataaaacatttttatttcaaatttaaatttctgtt

SEQ ID NO: 428413 - DNA, 589 bp, Homo sapiens
ccccttctcaactctgttatattgaagatcaatgaacatgaactttgagggatacattgataccatggcacctgttttgaacatagatgtttatggtgacaaaaaggagatcagataactatagcrtctcctatttattaattaagactagaatataaatgatagagtagatgttagattactttatgtaggctgttttttttaaagcatactgcaataaattacccagataaaataagtcagccaaaaatctcccctcacttgaattggcctgatattatggagtgatgtactagtactggatttagagcatgccagaaaaaaaaaaattctaaggaaagtttggagatacattactatctggaattaatttagattgatacaaaattaaagagagggtactaggtagttaattaaaaaatttctcaataataattattttacttatttataaatatataatttattattttaattgtacttattttactaggtgatattgtgtaggttgaatttttaaaatagtaattttattagttttcaaaatgtaatgcataaaacatttttatttcaaatttaaatttctgtt

SEQ ID NO: 428414 - DNA, 613 bp, Homo sapiens
aattaaataacctgctcctgaatgatcattgggtcaataatgaaatcaagatggaaatttaaaaaattctttgaactgaccaataatagtgacacaacttatcaaaatctctgggctacagcaaaaatggtgctaagagaagagtttatagcattaartgactacatcgaaaagaatgaaaaagtacaaatagactaaggtcacacctcgtgaaactggagaaacatgaacaatccaaacccaaacccagcagaaaaaaagaaataagattagagaagaactaaataaaattgaaacaaaaacccccccaaatcccaaaagataaatgaaacaaaaagctggttctttgaaaagataaataaaaatgatagaccattagtgagattaaccaagaaaagaagagtgaatatccaaataaggtcaattagaaatgaaacaggagatattacaactgatgccacagaaatgcaaaagattattcaaggctaatatgaacacctttatgcatcataaactagaaaacctagaggagatggataaatgcctggaaatatataaccctcctagatttaaccaggaaaatatagaatctcttaacagaacaataacaagc

SEQ ID NO: 428415 - DNA, 613 bp, Homo sapiens
aattaaataacctgctcctgaatgatcattgggtcaataatgaaatcaagatggaaatttaaaaaattctttgaactgaccaataatagtgacacaacttatcaaaatctctgggctacagcaaaaatggtgctaagagaagagtttatagcattaaatgactacatcgaaaagaatgaaaaagtacaaatagactaaggtcacacctcgtgaaactggagaaacatgaacaatccaaacccaaacccagcagaaaaaaagaaataagattagagaagaactaaataaaattgaaacaaamacccccccaaatcccaaaagataaatgaaacaaaaagctggttctttgaaaagataaataaaaatgatagaccattagtgagattaaccaagaaaagaagagtgaatatccaaataaggtcaattagaaatgaaacaggagatattacaactgatgccacagaaatgcaaaagattattcaaggctaatatgaacacctttatgcatcataaactagaaaacctagaggagatggataaatgcctggaaatatataaccctcctagatttaaccaggaaaatatagaatctcttaacagaacaataacaagc

SEQ ID NO: 428416 - DNA, 613 bp, Homo sapiens
aattaaataacctgctcctgaatgatcattgggtcaataatgaaatcaagatggaaatttaaaaaattctttgaactgaccaataatagtgacacaacttatcaaaatctctgggctacagcaaaaatggtgctaagagaagagtttatagcattaaatgactacatcgaaaagaatgaaaaagtacaaatagactaaggtcacacctcgtgaaactggagaaacatgaacaatccaaacccaaacccagcagaaaaaaagaaataagattagagaagaactaaataaaattgaaacaaaamcccccccaaatcccaaaagataaatgaaacaaaaagctggttctttgaaaagataaataaaaatgatagaccattagtgagattaaccaagaaaagaagagtgaatatccaaataaggtcaattagaaatgaaacaggagatattacaactgatgccacagaaatgcaaaagattattcaaggctaatatgaacacctttatgcatcataaactagaaaacctagaggagatggataaatgcctggaaatatataaccctcctagatttaaccaggaaaatatagaatctcttaacagaacaataacaagc

SEQ ID NO: 428417 - DNA, 613 bp, Homo sapiens
aattaaataacctgctcctgaatgatcattgggtcaataatgaaatcaagatggaaatttaaaaaattctttgaactgaccaataatagtgacacaacttatcaaaatctctgggctacagcaaaaatggtgctaagagaagagtttatagcattaaatgactacatcgaaaagaatgaaaaagtacaaatagactaaggtcacacctcgtgaaactggagaaacatgaacaatccaaacccaaacccagcagaaaaaaagaaataagattagagaagaactaaataaaattgaaacaaaaacccccccaaatcccaaaagataaatgaaacaaaaagctggttctttgaaaagataaataaaaatgatagaccattagtgagattaaccaagaaaagaagagtgaatatccaaataaggtcaattagaaatgaaacaggagatattacaactgatgccacagaaatgcaaaagattattcaaggctaatatsaacacctttatgcatcataaactagaaaacctagaggagatggataaatgcctggaaatatataaccctcctagatttaaccaggaaaatatagaatctcttaacagaacaataacaagc

SEQ ID NO: 428418 - DNA, 567 bp, Homo sapiens
caacagcatattaaaaaattaatccaccacgatcaagtgggtttcataccagggatgcagagatggtttaacatacataagtcaataaatgtgatataccacataaacagaattaaagacaaaaatcacatgattatctcaatagacgcatraaaagcatttgacaaaattcagcatccctttatgattaaaaccctcagcaaaataggcatagaagggacataacttaaggtaataaaggccatctatgacaaacccacagccaacactgttctgaatggagaaacgttgaaaactttccccctgagaactggaacaagacaaggattcccactttcaccacttctattcaacatagtactgggagtcctagccagagcagtcagataagagaaagaaatcaagggcattcaaattggtaaagaggaagtcaaactgctgctgtttgctgattatataatcatatacctaaaaaaccctaaaaacttatgtaaatactcctataattggtaaatgaattcggcaatggttcaggatacaaaattaatgcacataaataagtagctc

SEQ ID NO: 428419 - DNA, 567 bp, Homo sapiens
caacagcatattaaaaaattaatccaccacgatcaagtgggtttcataccagggatgcagagatggtttaacatacataagtcaataaatgtgatataccacataaacagaattaaagacaaaaatcacatgattatctcaatagacgcatgaaaagcatttgacaaaattcagcatccctttatgattaaaaccctcagcaaaataggcatagaagggacataacttaaggtaataaaggccatctatgacaaacccacagccaacactgttctgaatggagaaacgttgaaaactttccccctgagaactggaacaagacaaggattcccactttcaccacttctattcaacatagtactgggagtcctagccagagcagtcagataagagaaagaaatcaagggcattcaaattggtaaagaggaagtcaaactgctgctgtttgctgattatataatcatatacctaaaaaaccctraaaacttatgtaaatactcctataattggtaaatgaattcggcaatggttcaggatacaaaattaatgcacataaataagtagctc

SEQ ID NO: 428420 - DNA, 415 bp, Homo sapiens
tgggctaaggacatgaatagaaaattctcaaaagaagatgcacaaatagccaaaaagcatatgaagaaatgctcaacatcactaattatcagggaaatgcaattcaaaaccacaatgcaatagcacctcactccagcaaaaatggccataataaaataaaaaaatctatagatggtggcatggatgtggtgaaaagagaacacttttacgttgttggtggcaatgtaaactagtacaaccactatggaaaacagtgtagagatttcttaaygaactaaaaacagatctaccatttgctccatcaattccaatgctagatatctacccagaggaaaagagaccattatatgaaaaagatacttgcatatgcatgtttatagcagcacaatttgcaattggaaaaatatggaaccag

SEQ ID NO: 428421 - DNA, 620 bp, Homo sapiens
caaacttgatgtgattccatttgtccatttttattttggttgcctgtacctgtggggtattgctcaataatattttccctctcttagagagttttcccactgttttctcatagtagtttcatagtctgaggtcttaaatttaaatttttaatccattttgatttgatttttgtatatggcaagagataggggtctggtttcattcttctgcatatggatatccagttttcccagcaccatttattgaagagactatcttttccccattgtatattcttggcacctttgtcaaaaatgagttcagtgtaagtgtgtagttagttttttttctgggttctctattctgttccttkggtctatgtgtctatttttaggctagtaccatgctgttttggtaactatggttctgtagtataatttgaagtcaggtaatgtgattcctccagttttgttctttttgcttaggatagctttgtctcttctgggacttttgtgatttcatataagattgttttagtctatttctgtgaagaatgtcattggtattttgatggtgattgcattgaatctgtagattgctttgggtattatggtcattttaaccatattgattcttccaa

SEQ ID NO: 428422 - DNA, 620 bp, Homo sapiens
caaacttgatgtgattccatttgtccatttttattttggttgcctgtacctgtggggtattgctcaataatattttccctctcttagagagttttcccactgttttctcatagtagtttcatagtctgaggtcttaaatttaaatttttaatccattttgatttgatttttgtatatggcaagagataggggtctggtttcattcttctgcatatggatatccagttttcccagcaccatttattgaagagactatcttttccccattgtatattcttggcacctttgtcaaaaatgagttcagtgtaagtgtgtagttagttttttttctgggttctctattctgttcctttggtctatgtgtctatttttaggctagtaccatgctgttttggtaactatggttctgtagtataatttgaagtcaggtaatgtgattcctccagttttgttctttttgcttaggatagctttgtctcttctgggacttttgtgatttcatataagattgttttagtctatttctgtgaagaatgtcattggtattttgatggtgattgcrttgaatctgtagattgctttgggtattatggtcattttaaccatattgattcttccaa

SEQ ID NO: 428423 - DNA, 481 bp, Homo sapiens
cctttatttatttttcttgtctgaggctttcaatttttcccaatttagtatgaaagctgctgaagatctgtgatatgtaacttttattatgttgagrtatgtttcttctatacccagtctttggtgtttttgtttttttttttaaattttatcattaaggaatgttgaatttcatcaaatgctttttcagcatcagttgaaattaccatttcatttttatccttcattctgttgatatgctgtatcatattgatttatttgcatatgttgaaaaatctttgcatcctagggataaattccactttgtcatgatgaacgatatttttaatatattgttgaaatcagtttggcagtattgtgttgaggatttttgcatcaacattcatcagatatattggcctgtagttttattttttgttgtgtctttgtcttgttttgacattagggaaggtaatactggcctcatagaatgagtttggaa

SEQ ID NO: 428424 - DNA, 481 bp, Homo sapiens
cctttatttatttttcttgtctgaggctttcaatttttcccaatttagtatgaaagctgctgaagatctgtgatatgtaacttttattatgttgaggtatgtttcttctatacccagtctttggtgtttttgtttttttttttaaattttatcattaaggaatgttgaatttcatcaaatgctttttcagcatcarttgaaattaccatttcatttttatccttcattctgttgatatgctgtatcatattgatttatttgcatatgttgaaaaatctttgcatcctagggataaattccactttgtcatgatgaacgatatttttaatatattgttgaaatcagtttggcagtattgtgttgaggatttttgcatcaacattcatcagatatattggcctgtagttttattttttgttgtgtctttgtcttgttttgacattagggaaggtaatactggcctcatagaatgagtttggaa

SEQ ID NO: 428425 - DNA, 582 bp, Homo sapiens
gtccaatatttctttgttggctttctgtctggaacatctgtccagtgctgatagtggggtgtagaattctccagctattattgtattgaagcctatctctcattagctctaataatatttactttatatatttggttgctcctgtgttggatgcatacatatttaaaattgttatatcctctcactgaattgacccttttttcattatayactggttttccttgtctcttcttacagtttttatcttgaaatctattgtatctgaaagaagtatagtgactcctgctcttttttgcttttcattgggcatggactatttttttccatttctttattttcaatctatgtgtgtctttataggtgaggtgtgtttcttataggcaacaaatcaataggtcttgttttttaattcattaaggcaatgtgtgtcttttgattggagagtttaatccatttaccttgaatattattgataagtaaggacttacacctgccattttgttatttgttttctggttgttttgtggtcttctctcccttctttctttccttcctgtcttcctctagtgaaggtgatctctg

SEQ ID NO: 428426 - DNA, 582 bp, Homo sapiens
gtccaatatttctttgttggctttctgtctggaacatctgtccagtgctgatagtggggtgtagaattctccagctattattgtattgaagcctatctctcattagctctaataatatttactttatatatttggttgctcctgtgttggatgcatacatatttaaaattgttatatcctctcactgaattgacccttttttcattatacactggttttccttgtctcttcttacagtttttatcttgaaatctattgtatctgaaagaagtatagtgactcctgctcttttttgcttttcattgggcatggactatttttttccatttctttattttcaatctatgtgtgtctttataggtgaggtgtgtttcttataggcaacaaatcaataggtcttgttttttaattcattaaggyaatgtgtgtcttttgattggagagtttaatccatttaccttgaatattattgataagtaaggacttacacctgccattttgttatttgttttctggttgttttgtggtcttctctcccttctttctttccttcctgtcttcctctagtgaaggtgatctctg

SEQ ID NO: 428427 - DNA, 539 bp, Homo sapiens
catgaacggtttagagagttatgcaaaataaatgcatttgatagtcctgattcatcacttgtgagaggcaaggagtttagtgaccctgtacttaatacctttgaccatatgtggagaaccaaggaacatatagaagctggttggttactcctcagtggacaaagggatgaatgaaaatgatgaacttagggattctatctctcagcttcagaagcagattctgagcctcaaatctgccaagactgccctgagtgagagtcttatctcccatagagaaagagctaaaattgtgtaaaagcagacacaagctcttatcatgcaagtggctgacctgcaatgaaaggtgcatgcacagccttgtcaggtgtctactgttaaagtgagggcatcgtttgraaaataatgggaccttgcagcttggaacggggacatgcaggaggaccctgatgaagcttaggacactgagcttaaactctgattaagctttctttgccagaagaaacagctttcccatctacggtagtggcaacataccctcc

SEQ ID NO: 428428 - DNA, 589 bp, Homo sapiens
aaccgtaatgacattgtcagtgtggaatggaacagactttagttttaagagctacacttagatctaaacttaaaattagcatgtctttgtttctgagaggccagccaataacttacttatgaatgatcaaggaagcctgatcccagatgcctgaggtcttttacctttccatggcaatctgactgatgcataatgttagtaacagccatacatttggaagagagtgttgcaatcatcctcccttttgcataagaagtttgggggaacctgagattttgaagtttttctttatttcgttttaaaaaaytcaatgaggtttaatcttaggccacttctcttgtctacctgtaagcttgcctcctcttacctaatttgttatttaaatgattatttttacattgttaagggttataccatttacattgtcttctgtgtttttaattttaacaagtcttagtagcaatacctaggcaaaatagatttcaagacaaaaactataagaagagacaaacaaggtcactatataatgataaaggagtcaattctgcaagaggatgcaacaatttaaatatatatgcgcccaacatgg

SEQ ID NO: 428429 - DNA, 559 bp, Homo sapiens
ccgttgaactaatgattaagtttaaaagttcctctttatttaagacatctattttccgtcattgtctcatatcacaagttcttgtaagtattctgacgtgtcaggttaatgtttaggttttagtacaaatattttgaaagatgcagtaaactaaaagtatccttaaaaacctcagactatttctcttgagaggttacatatttaccaagtaaaactgtagtgttaaaacatagtcagtttcatcaattaaaatgttttatttgtgtcaatgtacagcattctgcccaaagcagawtttttttcaggaaaaaattttctctgacaccagattaacaaggtgaccacctttaaatggactctcatttgtttggatgactaggagataagagtggaaatgatcattatgtacttcttgtgaacttaaataataattccatttctgaatgagttatattttgtcatcatttacttggttaaattcccattaaataaaattattcaggatgcctttggtgggaaaaattttaattaataaatactatgaaaaactctttactgt

SEQ ID NO: 428430 - DNA, 568 bp, Homo sapiens
ctaaggtatatcatatcagtgaccaagttttccaaattaatgcatgatagtaacataagaggcatttggataaatacactagaaaattgaaaacattttaagattgagaaaacatacacttgtgtagtacatctaaatctcaaagaaagggattatattcatactaaacaatccaggaaaccttaatcataaaaaatgagagattatcttctaaaataagtagaaaatagatagaataaataattagaataaattagaacattgatacataaataatttttatttgtagtgaygagaaaaatataaaatataaaatattattgtagtgatgagaaaaatataaaatattaaatgatataagggaataaaattcactgttttatctggacttcattctatatatatgcatacacacacacacacacacatatatatatacgcacatgtacatatacacacacacacaaacatacatatatatttaataaggaaagtgtaggacctaggtgaaattctaataaaaatcatttagggaatattgacacaattaaacttaggcaatacaaat

SEQ ID NO: 428431 - DNA, 361 bp, Homo sapiens
catgtcagctatttatatcatgcagatctatagctataacgtttcttttcatcagctttacagtgggcctaaaataagtggtttatacgtctaagtttctcatgtgtttcctaaggagaattttatggttttattaagttgtattgtcttagggctcatgttgttattgctgagtaacaaaccacctcaagctgagtgatgcagacaataggaattttgttmtgttaatggaatctgtgagtcaggaagtaggaaagggcagagggtgtatagcttctctctgctatacaatattcagggcctcaataaagaagactcaaaggctgtgtgtgagttgatagtcaaagactgggattatttc

SEQ ID NO: 428432 - DNA, 421 bp, Homo sapiens
cagactcttgccccatcagttgaagcagctgtggtctacagcgtgccaagaaaaggtcaagaaaggcgagcaagccgtgcagagagaaaaaaataaaaayggaacaaaacttatgtttctctaaggaagctggtccccagtgaatgtgagagaatgactaaaataaccccaaatatgcctctggagatcaggtttagaaagaaatgcaacactctgaagaaatgaagtgtatttttgagcagaggaggccctgcctgtgtatacccagtgcatatgaagctgtgacagcattatgctattaatatttatgctgcaccgttttcaaggttttatagaattcttgctgttctgcattaacacctggataaaaagctgttgagtttgctttgttgaattatgtggttgatagtattgtactcac

SEQ ID NO: 428433 - DNA, 516 bp, Homo sapiens
ctccagctgtcacttgaagctgccttgaagttccaacaacactccagttctaacttaggttaatcttgtgaaagtccttggrtttatcatggttcttgggaagaaaaccagattgttttaggcttaccaataaaactattggaataaattttaacaggtttattagtcaaatatttcagttcttggttacacatatacagctccacacaaaatcccctgtatatgcacacaaaaaattccctcatgcaccctctgtttatattattattctagaatgacacattcagtagacaggaaaaggaggctttgtgagttggtggtttatttcccaggagttccatttcctgggatatattttatacaatacagggtgagttcacaagcacccttcatacgtcaaggtgttcttagttaaaactgtacttttttcttagttgaggttgaatgtctgatttctacattgatgttttgacatctcgccctcaatggttggttttgaaatctcatcaactgcgt

SEQ ID NO: 428434 - DNA, 541 bp, Homo sapiens
tatacaatgaaatcttgtacattccattctttttaactatatgctcaatttcaaagtatgcatttcaagttcacctagagatttgtaaatcaaggtgtttttttttwaaaaaaatttagaaaataagcaaacttagcattagagactcaagtccaattaattagtaatttgggaggaaagctttaaactgtcaaataaatcccaaagtgcttcagtgaatgtattaggcagattgtgatgctggtaaatctaaacttgattgagactgtggtgaagagtttggaaattatacaccatttaatctcttatttgagggggagggttcattgcttttaatatgtacccattttattgcttcatcagcacttttgcttcttagatttcccactaacatttcagttaaaaccttttccagaggctaaaatatgtctgcatacattcagtatatttaacttacacctcagaatcaaatagggatattacagaagcgggactgtgaaaagaatttaggaaggtaagtttttttttctggttggactgt

SEQ ID NO: 428435 - DNA, 434 bp, Homo sapiens
agcagcttcatggaaactactgatgagaccgagagcgtcagtagtattaatatagtgcagaaatccaggaaaggccattcactcctgtgatatcacagtggtttggactggactaggacatataacaggacttggttttgtggtttttaaggccctttttcctttttgaaaattgaactggctctacacttgagtttgtcttatattcagcctagtatggtaaactaggcgataaatattgctttacaccttayccaggcatttactgctatcctcacaccttcaggggcagcttagagttttttttggctccctcatttgggtagttggcctcacttttagtgcagcttcattcaataagcgtctctcctaatgctgccatgtgtcagagactgttggggatggaggctgcagatatgaaaggatggacaagt

SEQ ID NO: 428436 - DNA, 524 bp, Homo sapiens
gagcaggaagcagaacaaggagggcaacttccacagttctgcatccaggtcaggagcacggtcagcccagagcggcctgcctttatgctgccaagcctcycccgacccccaccctcttaaagaatccaagcaaaagtacctttgaacaatgtgtccccaccccatcagtttgaggatgcccctcatccctcacacgctggaaccttggtggcagcgtgcagtcttagagccaaagtcccacgtggcctctgtgtgcctgactcctctgaaccacccctcagtgtctccgggaggcttggacacacaagagcctcctcaccactgtggtgacagtgcccgatttttgcggcatgcattcagagcttccgccttacgtgccagtggactgcaagaccgtgtgctggagggctgcgggcagacaggcagcagggacttgccaggcaaggcccactggcgcatggcacgggatgcttcctcaggcctatcgccctgcccgcaccctagcatccaccctgggaagggct

SEQ ID NO: 428437 - DNA, 612 bp, Homo sapiens
gaataaatgtgcattcccattgtcttttataattacataattacctttaccagtgttctttatttgtgcatgtgtgaatgggttcaaattactaggttggtacaaaagtaactgtggtttttcgcaattaaaaggaacagaaaaaaatgcaattactcttgtaccaacctaaaactatctagagtcacttaccygaagaattccctttagtatttcttataaggtggatttgctatgctagcaacaaattcttcatttttgtttatctgagagtgtctgtatatcgtcttcatttttggaagattgtctcctggatataaggttcttggttgacaggtgttgtttgttttcatttttagaactccaaatatgtaattccattgtcttctggcctccattgtttctgctaaaaagtttctggtaagatgctaatcttattggattatgtgatgtgtcatttagttgtttttttttttatttgtatgtgatgtgtcatttagttttctcttgctgattttaagattttctgtttatctttggctttcagcaattttactatgatgtgtctgtgtgtgggtcttttcgtatttatcccattagagtttgttgagc

SEQ ID NO: 428438 - DNA, 404 bp, Homo sapiens
gtgaaggagacaccgggggcaaaggaacagccttgggaagtatagaatgttgtcagggaataacggaggatcygatcaaagggaaagcaggggtaaatgagatgggagggcggtgttagcttgtggggaatgcccctctccacggctgtggagggcgtgctgctctgtggagtgagaagttccatcttctgcatcacacacccctacgtggttttatgggggctttttctttccattgctggaccattgcccatgctagtcctctaatgaaaaggaccttctcaccatccttcactctgtcactcaaactcaatcttcacttcaaagacaagttcaagccctatttcatcctgtgtttctctctaaagaccaaattcactttgaactgtcccaccccgatctac

SEQ ID NO: 428439 - DNA, 404 bp, Homo sapiens
gtgaaggagacaccgggggcaaaggaacagccttgggaagtatagaatgttgtcagggaataacggaggatctgatcaaagggaaagcaggggtaaatgagatgggagggcggtgttagcttgtggggaatgcccctctccacggctgtggagggcgygctgctctgtggagtgagaagttccatcttctgcatcacacacccctacgtggttttatgggggctttttctttccattgctggaccattgcccatgctagtcctctaatgaaaaggaccttctcaccatccttcactctgtcactcaaactcaatcttcacttcaaagacaagttcaagccctatttcatcctgtgtttctctctaaagaccaaattcactttgaactgtcccaccccgatctac

SEQ ID NO: 428440 - DNA, 476 bp, Homo sapiens
ttattgactccctaaatttccccatcttggtaggagtttccttcaggctgtgatttgtgsaaattaatctttatagtaactcagaaggcaagaagctaactgcagacatgaaaatccaacactgtcagaaccattaaatctttacccaacacttggaaccacaaaatgtctctagtgctgctcctttaatgacgaacatatggttccctaaacagaaagaaagagctcttcttctgtactggtggccaccaaaaacactgaacaaaacagcccatggcaaaggccaagacagaccatgcagacaatggtcccaccctctccttggaaggctatgctctcaccaggagcagaacagtccttgatcacaggagtcaattcaccactgtgtgaatcacctctattatcacatcagcacaggccatggaaaccacggaaagactgatctgcagagagattttgcagaggttattatgggc

SEQ ID NO: 428441 - DNA, 476 bp, Homo sapiens
ttattgactccctaaatttccccatcttggtaggagtttccttcaggctgtgatttgtgcaaattaatctttatagtaactcagaaggcaagaagctaactgcagacatgaaaatccaacactgtcagaaccattaaatctttacccaacrcttggaaccacaaaatgtctctagtgctgctcctttaatgacgaacatatggttccctaaacagaaagaaagagctcttcttctgtactggtggccaccaaaaacactgaacaaaacagcccatggcaaaggccaagacagaccatgcagacaatggtcccaccctctccttggaaggctatgctctcaccaggagcagaacagtccttgatcacaggagtcaattcaccactgtgtgaatcacctctattatcacatcagcacaggccatggaaaccacggaaagactgatctgcagagagattttgcagaggttattatgggc

SEQ ID NO: 428442 - DNA, 598 bp, Homo sapiens
gcagcctgtctgtagcagggattgctaactaacacggccagcctgcatgttgagacagcatcatccactagaggccagaatgagactgtcatgtacaggcaaatcaaatatagactcaggaagcaccagagcatcagggagtgacaccaatattgcaggtgacacgccaacaaaatgcacttctaaatcctcttacgcagtttctttccacatccaaatcagtgggtaaatgaggcactaaaggacaacatstgtcagcaagaggctgacactgtattgaagactcagaaactagaacaaaaatggaccattctttcctgaactgaagttgagaaggaaggaaaagaggaggcagggcatgggtgctggtgagacagaggccaaggacacaaatgcgtatctgatataggaggcaggagaggagagcagagaaatgggcagggaaaatgcctctggagttcctggacctggaactggactaggagctagttgcagccttgtgcatcagtcaggaactggttaaaaacacacagcacaggcacaccatggagcatgatgccgccacctagcaactgaggtaggcctgtctgttggtatg

SEQ ID NO: 428443 - DNA, 598 bp, Homo sapiens
gcagcctgtctgtagcagggattgctaactaacacggccagcctgcatgttgagacagcatcatccactagaggccagaatgagactgtcatgtacaggcaaatcaaatatagactcaggaagcaccagagcatcagggagtgacaccaatattgcaggtgacacgccaacaaaatgcacttctaaatcctcttacgcagtttctttccacatccaaatcagtgggtaaatgaggcactaaaggacaacatctgtcagcaagaggctgacactgtattgaagactcagaaactagaacaaaaatggaccattctttcctgaactgaagttgagaaggaaggaaaagaggaggcagggcatgggtgctggtgagacagaggccaaggacacaaatgcgtatctgatataggaggcaggagaggagagcagagaaatgggcagggaaaatgcctctggagttcctggacctggaactggactaggagctagttgcagccttgtgcwtcagtcaggaactggttaaaaacacacagcacaggcacaccatggagcatgatgccgccacctagcaactgaggtaggcctgtctgttggtatg

SEQ ID NO: 428444 - DNA, 475 bp, Homo sapiens
agtatgtgaggcactacatatgttaaatagcttgatttggccattctactggtatacatacatcaaaacgtcatgttgtacaccataatatatataatttttacttgtcaattaacaataagtaaatggacagcagtacttaaaagaaaaagatgtacatatttagattattctcttatatggacccaactgttaattgttaaagctagcaaaatggaagttattgtatatatggaatctatatrtatagatattatatgccccatatatataatcaatagacgatcgacagcaatccattaaaaattagtgtgggttcctacaaaatttacatttatttttacatttatttattaaataaatattgagtacttctagctcttagtgagttagacagacttggtcttgcccttgtagaccctccttatgttctatttcagtcctttttttttttctttttttgagatggactctc

SEQ ID NO: 428445 - DNA, 377 bp, Homo sapiens
tatctaatgttttacaaaaacatttattttgaaacaactcaaatttacaaaatgttataggtatagtataaatagggtaaccaaccatccctgtttgcctggaactgaggggtttccccgacacatggccatcaatgctaaaactgagactatcccagacaaacgaagctggtcagtcaccccargtaaaaagtcattttatccccttgagagtaagttgccaacctaatagtccatcatccctgaataatttagtgtagattttctacaaacaaggacattatctttcatactttacaacatagccagcaaaaacaggaaagtaacattgatacattatgaccatcttatcctcatactccattcaatattcacca

SEQ ID NO: 428446 - DNA, 621 bp, Homo sapiens
cccttggccactacttcatcattttggaagctccagcaggtggtacagcacattaaaaatacatggattctgccaggcacagtggaacatgcctgtaatcccagctatttgagaggctgaggtgggaggatcacttgagcccaggagttcaagactgtagtgagccatgactgcacctgtgaaaagcctctgcactatagtctgagcaacacagtgagacctcatccttaaatattaattaattaagtcgggcacagtggctcacacctgtaacccagcactctgggaggctgaggtgggctgatcacctgagttcraggccagcctggccaacggggaaaccccatctctactaaaaatacaaaaattagccaggcatgttggtgtgcatctgtaatctcagctactcaagagactgaggcatgagaattgcttaaaaccctagaggcagaggttggaatgagtcaagatcatgccactgcattccagcctgggcaacagagcaagactctgtctcaaaaaataaataaataaatattaattaatttttaaaaatatttaaagaatatgtgtggattctagagtcaggcaaacaattttgggtttaaatcccaggtctac

SEQ ID NO: 428447 - DNA, 633 bp, Homo sapiens
tggctagattaataggagtgggtgaaaggtagcatgaataaacactccattagggaaaaagaaaattaagctaaattcaaagtaccragtgtgcacgtggaagccagatcctgggagtttctgaaattctctgcgcctccctttcctcttctacaaaatggagatagtaatagatggtaactcttttgggttactgtgaaaagtaaaacaacactcccctccctcatcctcactaacccagcatatcaaccagttttctgagatgtctagatttccatttggcctccagccagcttgaacagccaaactgcccccaagaaagcaccctgaatgtgaggtcatccagggtcctaggactccatcatacccactccaaaactaaaagcccacagaccgtgggggtaggacctgactagctgaaacatgctgaccaagctacctgaagcacctctgaggtatgcccaggcctcagggttgtcaagcagaaaaaccagcacctccagccaggtgtgtctctctcataaagaaagctgaaacagttttccctgcttctgagtggcaagctcgcccccagatgtttctgagagcaccgcccttgcattcccaccaggccacctgagaacctggcctccc

SEQ ID NO: 428448 - DNA, 589 bp, Homo sapiens
atgtctagatttccatttggcctccagccagcttgaacagccaaactgcccccaagaaagcaccctgaatgtgaggtcatccagggtcctaggactccatcatacccactccaaaactaaaagcccacagaccgtgggggtaggacctgactagctgaaacatgctgaccaagctacctgaagcacctctgaggtatgcccaggcctcagggttgtcaagcagaaaaaccagcacctccagccaggtgtgtctctctcataaagaaagctgaaacagttttccctgcttctgagtggcaagctcgcccccagatgtttctgagagcaccgcccttgcattcccaccaggccacctgagaacctggcctcccacatctggattcggctgaagcagcagtgtttgagagaaaggtgagactggacagtcaagaaagggacagaaagtcgacrgtctgggaactatcccagcgtggacatttacagaagccacatacctgtgtgtcctcactcctcacaggaggaccgtgcaaaggcaaattgctaggcaggtagacctcacagattctctcagccgggcagtcggtgagtc

SEQ ID NO: 428449 - DNA, 621 bp, Homo sapiens
aacaccaacaagctggctaaattacaaaatcatattttttgaacccatctgagagctgaagatgcaaatcgatctgaatgtattaaaatccagaatgtctttcttaggagagtggaaacgcatagctgctttcacttctggtggagtgacaggaagagaaggattacaccctaggtcagggctaagggcaactaggcaaacttttaaccagcatgagagctgagtgaaatcccctagaggcactccagaccttcagcctgggtggggaagcccttgctgacggcaggaggcaggatgacagggaggagaaaagtcttctaaagtccagagagccagggatgacactgaagagcaaaggaatctctctccagcccacattccacakgaatgctataaagcatagacagctccctgcagtcgctgagtgctaaagtcccaagccctgctgaagggcaagtcttgagagcactcccaaacatttgaagccagtggtgtggaaaatcttttattccaacaaagctaaatctaagtaaagttgcaaccaagttgcagcaaaatgtaatctaagccaaattgagaattctgtttttcagaagtagaagaccattatgttggtcttct

SEQ ID NO: 428450 - DNA, 472 bp, Homo sapiens
ggcatgctcctgtagtcctagctataggaggctgaggtgggaggatcacttgattctgggaggtcgaggctgcagtgaactgagatcgcatcactgcactccagcctgggygatagagtgagaccctgcctcaaataaacgaattaaataaataaataaatttaaaaatagatttatcaagtataagtgtcattttgttacatagatatattgcatagtggtgaagtgtgggcttttagcgtaaccatcactggaatagtgtacattgtacccatgaagtaatttctcatccctcacccgctcccactctgtcaccctctgagtctccagtgtctattattccacactctatgtccatgtgacacattatttagcttccacttatcaatgagaagatgtagtatttgactttgtttctgtgttattaatggcctccagttccatctgccttgcttttttaaaacataaaagg

SEQ ID NO: 428451 - DNA, 579 bp, Homo sapiens
tttcaacatgagttttggaggggacaaatatttgaactgtagcatttggcttcttttgttcaatgttatttttgtgatattcattcatctcatagcgtgtagctttaagtcagcaattttcatgcctgtatagtattccattgcctattcattctactcttgatagacatttgagttrttttctagtttttgctattacaaataacactactatgaaaattctatctatttcttggtgcaacatgcactaatttctgttgtgtatataactatgagtggaattgctgtattatagggtaaacatgttcaactttagtagataatgccaaagagttttccagattagttccaccaaatttccaccagaagtacatgagggtttcttgtgctgtacattctcaccagtgcttgcttttgttagtctttttaactgtagctaccagatggagatgttagtggtttctcatagttttaatttgcatttactgatagcatagaacatagctgactagatataggagtatgtgcctccttcacagagaggaaccagagtaataagtagatatatttcaaacagct

SEQ ID NO: 428452 - DNA, 456 bp, Homo sapiens
ttacaaataacactactatgaaaattctatctatttcttggtgcaacatgcactaatttctgttgygtatataactatgagtggaattgctgtattatagggtaaacatgttcaactttagtagataatgccaaagagttttccagattagttccaccaaatttccaccagaagtacatgagggtttcttgtgctgtacattctcaccagtgcttgcttttgttagtctttttaactgtagctaccagatggagatgttagtggtttctcatagttttaatttgcatttactgatagcatagaacatagctgactagatataggagtatgtgcctccttcacagagaggaaccagagtaataagtagatatatttcaaacagctagtctaggagagacttctgggattcaccagagaggagatgggaagcacttgaagtaaggagagggttcgagg

SEQ ID NO: 428453 - DNA, 360 bp, Homo sapiens
ctggctaatttaaaaaaaaatttttttagaagtgaccttgctacattgccaggcttgttttgaacttctgggctcaagtgatcctcccaccttagcctcccaaagtgtggggataacaggcatgagccactscaccaagcctgacttcaataattttctgtatggtttatttgttggtggagagtaagatattacttcaagaacttatgagagagatggagagagaaataccatatggattaagaaaaccttccagagatctcttttcccatccctgtcaatatagttgttaattttcctgagtccattgttactttatcaaaaggaaaaaattataatgactgtgtcttgaaaagaaaa

SEQ ID NO: 428454 - DNA, 488 bp, Homo sapiens
tgtccaaggtgctgccccggggacctcaatctccccagagacagcattgtggtcaaagccatagtgatgtgtgaaaccttcattcaggcaactcctccttccatcccagtagctggttgtgtggtagaaaattgttcctcttggacacttgtttggttttcaaagtatttcagcttctttgaagctgctgtcaaaagtgagaatgtagtaataagctctcctcttgtggtgggcgttcagaggtgatagtctacaatggtggtgataatactttaattagtgaattttcttcacattctgakattctactcttcaaataatgccaagttcacagactcctacatctgctgaggtgtgtgtgtttatgtagagaaacagaagcagactgagaacactttcttggaatttttcttcttcaaaaagaggagcagaagctaactctgatgttttcatgctgatcatcattgatgacaagatacccaagccaa

SEQ ID NO: 428455 - DNA, 488 bp, Homo sapiens
tgtccaaggtgctgccccggggacctcaatctccccagagacagcattgtggtcaaagccatagtgatgtgtgaaaccttcattcaggcaactcctccttccatcccagtagctggttgtgtggtagaaaattgttcctcttggacacttgtttggttttcaaagtatttcagcttctttgaagctgctgtcaaaagtgagaatgtagtaataagctctcctcttgtggtgggcgttcagaggtgatagtctacaatggtggtgataatactttaattagtgaattttcttcacattctgatattctactcttcaaataatgccaagttcacagactcctacatctgctgaggtgtgtgtgtttatgtagagaaacagaagcagactgagaacactttcttggaatttttcttcttcaaaaagaggagcagaagctaactctgatgttttcwtgctgatcatcattgatgacaagatacccaagccaa

SEQ ID NO: 428456 - DNA, 503 bp, Homo sapiens
ataaggatactaattctattcatgtgatcatgacctaatcacctcctgaaggccccacctcttaataccattacattggagtttaggtttcaacaaatgaattttaaggaaacacagacattgaggccatcacaatagcgaaaggtgggagacttggcctgttgttttttaatgttgctgactctttcccccaggctgtcaaagtgcctcacattgggctgggagccctggattctttgtgcttcagggaaatccctagttgtatccacctttgggtttatctgagtcttatacttatcagggaagaaatgttcttctctgagtcatattattggagagtctcagggttgtaatccactgcaggagtcacctggtctaatacaaggcacgtcctatatgcccctgtccctggccatgggcctctgctacaccagagaaacaggagcctrtgaatgtaggggccgagctggcatcctcctggccatctaatgccaaggcaggct

SEQ ID NO: 428457 - DNA, 536 bp, Homo sapiens
aaagagagggagaggaagggagagagagagagagagagactgtgtgcattgggaggagcaatctgggaaggcttccaggggaaggaaacatttgactcctttttaaagtatgcactggttttggttttgacaggaagcatggggagtgaggaagggtgtgcaaacatccacctgcaggcagactagggcaagcagctagtatctctgcagcaggtagggcaagcgggctccccagctcccaaccaataggcttaaygagatacctgcacagtttccttgccatctgttgctagtctcagccagacacacctgcatgctcctttccagaggagaaaacagagccatggccagttagtgagtagggtgtaactttgagaatattaaacactgatattaaacattggacatccagcaacacaaagatagcttatagctgtagaacatctgcatcatctatctggcaggggtttttgtttttgtttgttggtggttgttaaatttctctgagccatgcccttcattcacttttctacata

SEQ ID NO: 428458 - DNA, 536 bp, Homo sapiens
aaagagagggagaggaagggagagagagagagagagagactgtgtgcattgggaggagcaatctgggaaggcttccaggggaaggaaacatttgactcctttttaaagtatgcactggttttggttttgacaggaagcatggggagtgaggaagggtgtgcaaacatccacctgcaggcagactagggcaagcagctagtatctctgcagcaggtagggcaagcgggctccccagctcccaaccaataggcttaatgagatacctgcacagtttccttgccatctgttsctagtctcagccagacacacctgcatgctcctttccagaggagaaaacagagccatggccagttagtgagtagggtgtaactttgagaatattaaacactgatattaaacattggacatccagcaacacaaagatagcttatagctgtagaacatctgcatcatctatctggcaggggtttttgtttttgtttgttggtggttgttaaatttctctgagccatgcccttcattcacttttctacata

SEQ ID NO: 428459 - DNA, 536 bp, Homo sapiens
aaagagagggagaggaagggagagagagagagagagagactgtgtgcattgggaggagcaatctgggaaggcttccaggggaaggaaacatttgactcctttttaaagtatgcactggttttggttttgacaggaagcatggggagtgaggaagggtgtgcaaacatccacctgcaggcagactagggcaagcagctagtatctctgcagcaggtagggcaagcgggctccccagctcccaaccaataggcttaatgagatacctgcacagtttccttgccatctgttgctwgtctcagccagacacacctgcatgctcctttccagaggagaaaacagagccatggccagttagtgagtagggtgtaactttgagaatattaaacactgatattaaacattggacatccagcaacacaaagatagcttatagctgtagaacatctgcatcatctatctggcaggggtttttgtttttgtttgttggtggttgttaaatttctctgagccatgcccttcattcacttttctacata

SEQ ID NO: 428460 - DNA, 358 bp, Homo sapiens
gaaggctgtattatactgggagctctattagtttctcttggagagacttcactggtataaagtatttctaaaattatatatgaaaagactaatggtgttagacctacaccagtccagtacactaaccattagccatgtgtggctgtattaaactaagtttaaattcattgtaattaaaaatccatttcctcagtcacaatagccagattctcagtgctcaatagccacatgtggctggtggctgccatattggacactgagactgagataatttcctctatcactgaaacttctattggatgktgatgtctgccactgtaatcacaattaaattggtggcaataaagagttctccaca

SEQ ID NO: 428461 - DNA, 531 bp, Homo sapiens
gacaatagacaaaccattgtaattaactgcaaaataatttaaagaatttcatgacaggataggaatgcataagctaccttttcaattttcccagttgttttaaagaaccatcttcaattattttaccagctgtaaagccaaactgatagatctctctcttcggaagtccacaatagctctatcgatatctaataaaattattttctccaggagatttgtcccctgctagaacatctttgtgggttttaaagttcagacaagtcatgacaactttcakgatatagactcaattaaaaagcaagagaagtagaaacaacaatattgttaatttttcaataaatacagtgattctctcaatttagagtaagagcaaaattatcttaggtaccgtatgatatccactggagacatagctctgtgttctggataccattgtacctctgttactagtcaaattctgctccatggcccttgtctttgaatgtcaagcaatgggattcaggcatttcattagatagatacctattatat

SEQ ID NO: 428462 - DNA, 605 bp, Homo sapiens
tggcaaactatttgctttctgaaaatataaggtttctgttattatgttagttttcccccaggccaagataataaaagtgtttctgtttttattcttcataattaatgcattcacttgaactctatgaaattgctgataataactgcttatgaccttcaaaattggcaatttcacgtggtatctaattttttttttagtttaaccctttatcttcttaggaatttttacacgtgcatgacatggtatagggatataccttcccccctccccccacaattggttagcaactttttgcaaaactttttcataaacaaattttccattatattaaagggtatatttctgaattatatcttttrttattcctgctccattactatacagtatagttttaatatcaggtaggtcaggtttcccctgcattgctttttttcaaaggaagttatacttttagaatgatttttaggttcacagtaaaattaaaaggaaggcatagaaattttccacatatggggaatttccctcacacatgctcagcctcccccatcatcaacatcccacacaagagaagtacatttgttacacttgatgagcctgcattgaga

SEQ ID NO: 428463 - DNA, 562 bp, Homo sapiens
tgctcactgatttattttccagaagtttttgattattaatgtgtacatttaccatttgtcttttttgaaagtgtgttggattttctattgaaattgcatcaaattttagattaatgagaggagagctgaattttcaatgtatcaaggccactattcaggaacaatattatgtttttctatttattgagattttcttttatgctactttgttatattttaacattgtcctcatgcaagttttccaggcttcttgttatggatattcctggatatatatggatgttttaatttgtgcatttggctattttgaatgatactttccattatcattttttatattgtctcttctgtatgcagtaaaccacctgctttaatatgttgatcttgcattccaacacctttttaaactcttaytaattgtcctgtttcattttcatctcttttctatgtagataattctattatctggaactagagttttgtgccttactttccaatatttacacttcttattttttgtcttcatcatattgcattagctagggccaatactgatgtgtgg

SEQ ID NO: 428464 - DNA, 553 bp, Homo sapiens
ttttaatttgtgcatttggctattttgaatgatactttccattatcattttttatattgtctcttctgtatgcagtaaaccacctgctttaatatgttgatcttgcattccaacacctttttaaactcttattaattgtcctgtttcattttcatctcttttctatgtagataattctattatctggaactagagttttgtgccttactttccaatatttacacttcttattttttgtcttcatcatattgcattagctagggccaatactgatgtgtggtgataattctttgtaatgttcctgactttggtgggaattcttccaacgttttgctattatataatgtttgccatgacatgtaatgatttctacaattctctagtagatatttcaagtcccttcctttcaggagataaaattttagtggaaaaacccataataaatctgcagcacagtgtaatgactgactgtgaagataaagagatccagaagatggtatgacagctgcatcacttargatgccatcatcagcaagtaatgaggaattctaat

SEQ ID NO: 428465 - DNA, 556 bp, Homo sapiens
accataggacggctgccagtttctgctgtttctttcagttacaacaatgtcaacagataaggagtctgtaccattccaggatgatcttcttagaagtaaaaacctttctcaaaaatccatcccctcaggccccctcccctcttcccctttgatttttattttcagggttggcccatatgcccgttttaaaaccaaatgtgaccaagagactggaattaccacgactggcttagactaatcatttggagagaaatgggccataaggagtcaaccatgaaaagtaccagataagtagcatatatctcagtccgggagtgggggataggagagccttcccagaggacataacacatagggtcttagaggatgagtaagagctatctgggtgcagaggacattccaggaagaagtagcagtctgtgcaaagacacagaggcatgacatagcatgacacayatgggaacccctcaataggtgggcagggaggaagcgtatgtggtagagtaatgctttttgtaccaggctaaagagtttaatttaatatttaacctgaaag

SEQ ID NO: 428466 - DNA, 526 bp, Homo sapiens
gtaacagagaagcttcttcccccttagttaagaagtgagagtctctctgggcttctcagatctccttctcttcagccaacatggtaagtttggagaaagcatgggctttggaatcagacaggcatggatacaaacctccgctctgttgcttcctaattttgtgaccttaacttgcctatgcctcatttttctcatgacttatgaatatcacrtgctcatatatttaaagtatccagccgagtagacatttattaaaaatcttagtgcccctgtctccttttctctttctacatataactttaagtaggacagtttatggacagacatagtctaagatggagccacagaatgctggactggggagggtctggtccattttgcaggtaaaaagtccaagactatagaactgaagtggcatgcctaatgttgttcagatagccgtggcttagctgggaacctgagtccaggtgtcttaggccactgctcttttcactccatcatattttccagaagtggagtggtgatc

SEQ ID NO: 428467 - DNA, 583 bp, Homo sapiens
ctttattctttttcattgttttttctcctctgactgtgtattttcaaatagtctatctttcagctcactaattcctttcttctgcttgatcagttttgctgctgagacattctgctgcatttttctgtttttcaatttgatttttcagctccaggatatctgtttgatttccttattattgtttcaatctctttgttaaatttctttgatagcattctgaattccttctctgtgttatcttgaagttcactgagcttcctcaaggtagcaattttgaattccctgagaggtcacatgtctctgtcactgcaggatttgttactggtgccttatttagtctgtttggtgatgtcatattttcctgaaagttcttgatgcttgtggacttttgtccatttctggcatagaaaagttaggtatttattttagtcttcacagcctagccttgtttgtaccaattctttagagggctgatttttcgttcttgatacrgtgtttatttatgtagatagttgttcaatttgatgttcctgcaggaagtttgcttgcaggaaggttctatttggccatcctgttctgcctc

SEQ ID NO: 428468 - DNA, 643 bp, Homo sapiens
aattaaagctttgtttaaaagcagaaccagataaagtacaagtaccagttgtcccttagctgttgagtcttttgaaagaccactactaaataatgctctgcaatgacttgaaaaggaaaaaatattacattcaaaaaccaagttatcacattagtgtaaaacccttagtttgtaaagtgaatgtttcattataagtgactacatcattggatcagaaaattcaaatgttatatggataacaattagaaatataggtaatacatttaaaaacaaagttgctgtaaaagctactaaaatattcagtgtcaaaatatgtattgatygaagacaaaatttaaccaaaacaaggaggatggggatgactaattcaagagatgacacagtttcataaggactatgtaaaacacaaagagccataaagccccaagctggacattgtattagacaactgataaacctaaatgggcaccactctgtggattcattaattagggttgggttacacctattcactgttggtaaaatactgattttaaccattgataaaagcagattatccttcagttttaccctcaagagtacattttacatattttgcatttcttagtcacatctaggactcatttaatctttataaatagtg

SEQ ID NO: 428469 - DNA, 507 bp, Homo sapiens
tctcctcgagtcctacgactctctctggaaaaggatgtggggttttgccragctggagtgtgaactggaaccaggaaactggaaaatcgtggctggctccagcgggaatcatccaaacatgaatgaaccagtgaggccagggtccccctgggtggtccccctccatcctcccaaggcgattaaggaaagctctcacactctcatgcttggtgccagggcctcccctgcctggggctgaggacctcccagcaagcaagcccacaatgcagtgaaataagggttctggggagtggggaggagcccaggcaggaacctgcagagccacccaagctaacgtggcattgaaattaccaatattagaaaataaaggctttagggcactcatcaggctcaacctccctgttcaggtctctgtacaaacatcacctccgacggaactccctgcttaggactgcacccctgccctgacagagctctactctcctgctctattttactccatagcat

SEQ ID NO: 428470 - DNA, 437 bp, Homo sapiens
gagtcaaaccacttttcttcataaatgccccagtctcaggtagttctttacagcagtgctgagaacagactaatacagcattttactgggcacttatgccatgaatcagatattgctcacagccttgaccctcactagaactcagtgggaaggaaactgtgtcccccacttaattgactgaaaaccagagtggtccagagagggaacaggacttgcccagagtcctagcgtagawctgtggcacaagaagccaggcctcctgatccccaccagcgccaggacccatagtgacacagagtgagccccttgaccacccatctccctgtgctccaggccaaatcagtttccctcatgcctccttcatggagatgcttgccattcaactcccccaccgcctacccaatggcatatagcagttgcttaatcaaaacttgtat

SEQ ID NO: 428471 - DNA, 451 bp, Homo sapiens
ggggtctctttgtcttgcttgtcccagagcttgggatcttcgaatctctggctgggatgcaccccagaaaaaacacttccagtctgctgggtctccagcttctctccctgtgttgcctgggccatagcccagtcctctgtcacgggagtcctgagtggctgcctgaggtggggcgtggagactgtgcctgaaggggaggggctgtcaggacaagaagccagaggcaggggcagctggacagactcttccaaggcctgggaacaccctcacccctagctgctgaagggaaagggtctcattcacaggtgtaawgtccaaggtcccctggctggtgagcgctaaccaggctctcagcgtctgagggcctctgaggggctgtgagggtcattgctggtctggctgagtgtgaagagcactcctggctagaggggtgtctcccatctcctctctg

SEQ ID NO: 428472 - DNA, 504 bp, Homo sapiens
caggcagctactccaagaactcgcccaagatcatgtgcaaatcactgtgtatggggtgatgattgtgggtgctcatctgtatgctgcttcctgcatccccagtgccagcgggtggtcagccctttakatgttctggttgctggagtggaaagggctgaaagccggagctgtgtgatgttaagtcttttgtgtgctcagtgagaagatgggggtcccagaggggaagaagagaggccgagcacctctgaagcaaggagaagaggaaagggggcaggtccttagatttgtggggaacaggtaaaacctcaggggaggaggggatgctccatggtgttcctaggcaggctagacccaacatatttatgttccagcttcagtagagcttccaatgtccgaggcatgtcaccaggtcactggacataaagggacatctggcccaatgagcacctcaggggccacagatgggggcagaaggacagagagacttctaagaacgtggtatac

SEQ ID NO: 428473 - DNA, 429 bp, Homo sapiens
caagtcactctctccaaggtcaccccaccagccttggaggcaggatggcataggatttgaaaatgtggatttggacttggagtatctgggttggagtcctggctgagtctttcccagctggtccctggacccagcatgcctctaagtcctcccctgcacatggggactggtgacatccccacctcttatggtagttgagaacattaaatgaaatgatgcatgctgtaccctgagccagggctggcacacgggaggtgcccagtggatgctggccacttctagattgctaggattaccttcatttgaagccctttatgctgagttgaygatactagctggcactacatagatggaaagaccctgttccaagcacaactagctcatttaatcctcacaatggctctgtgaggtgggcagtgggatctcccc

SEQ ID NO: 428474 - DNA, 554 bp, Homo sapiens
tttaagaagaaagaagttaggcagtgccaaaagagaggtaaagataaagtcgggtgggacttgagaggaagaagtgacccctgctgctagtgggtggggggtgcttgggggcagggaaggtcctggagatgaggggaccccgggtgtggccactgcagagggcagggcttgcaaaggggctgacgaagaggttggtgttggaggtcagcacacttcttgagcaccgggkctggggtggagcgatgtgccaggtactgttctaagcacttgccatctaaatttaatcctcacagcaatcctacaaggtggtcctattatgacctccgttttatagataggaaaactgaggcacagagaggttaagagacttgcccgaggttacccagctcgaaatgtctgagctgggatttgaataggggtcttctaactccagagtcagaattgattctagttgatggtcccagaatggggaggagttttttggggggtgggagcacgctgatgcttcttggtggaggccagttgcacattcttacaccttcgtttccttcctg

SEQ ID NO: 428475 - DNA, 458 bp, Homo sapiens
gggtcttcccgtgggtgagaactccagtcctgaggtcgagcactgggctgagattctcatccctgcttgcccctcactgctctgtgaccttgtgcctgttgctttccttctctgggctcttttcccatctgtgaaagctgtttaaggtcttttcagcccaggatctggattatagacatctctgacatgaggtacctgctatggccccactagaagaatccattccacttcccagcctgggctatataggtcattcagtacccgccatagagccagatcttgtgtggagagagaggatgcaggattccactgggtaggcaccgactgtccagttgacccacttgtggtgctgatgcccaggcagcagggctgtggtcgggcttgaacaccatggcctgygcccctctggagatccagctttccataagcaggtacagggcagccatgtttgttctcca

SEQ ID NO: 428476 - DNA, 550 bp, Homo sapiens
atttaagtttactatcttgcattttttctatttgtcccatttgttcttgttcatctttttcttattttcgtgccttctttagtattaatcaagtattttttaaaaatgcctcttagctttctagccataactctttttctttagtggtttctctatgatttataatatacatgtttmatatgttacagtccaccacgaatttatatcataacacattacatataatataaaagctttacaatggcatacttcccatttactgccctcctgttctttgtgctatttttatcatacatttatgcctatgtgtgttataaacccaacaattactcttttagctttaaacagtaatttgttaaagtaactgagaaattagaaaatgccttttatatttacttattttccattttgtttgcttttctttccttcgtatacatctgaattccatcaattatcattttctttaattcttgaagaacttcctttaacatttcttatattgtaggtctattggtgaaagattctctaagctgaagatgtttttatttca

SEQ ID NO: 428477 - DNA, 568 bp, Homo sapiens
agagaaaatctaaaatgctaagcacagacaagacaaagtaaatcataatgttaattttatggactcagtatgcaaacctggcaatagctagcagaaggctgcaattaaatagctaactggttgtcagttayggagctattcccagctccatgtccagaggaagttaatgacatacacctggagcagagaaggagcagagtaactcaaagaaaaagcaacagtttgatgctcttcattaccaacaactgggaggaactaaggcgggcaggatattaatctacttttgtcttgagaaagagtaattcctagtgttatacaaattatgtagctaggcatggaaagtaactttctatttttaatattagctatttatcagttatctaaacgttaaataggtaatatgcttcctccctccccaagcaagatattttatttctccatttaacattgtattgttcttacccaaatcacccctagattgtagatctttacacctgtgcataaagcactgcagcaagggatatttcacaaactcagtaccctacagcattcccaatcaaaattactt

SEQ ID NO: 428478 - DNA, 586 bp, Homo sapiens
gcgtgagccaccacgccagcccagttatttttaaaatgaataacacataattgtacatatttaatggggcacaatgtgatgtttccatctgtgtatacactgtgtaataatcaaatcaaggtatttagcagattcatcaccttaaacatttatcatttctttgtgatgagaacattcaaaaacctctcttctagctagttaaaaatatacattatcattaactctattcatsacaccatgcaacagaacatcaccacttactcctcctatctaattgtagtcttgtaaccattgacagatctcataaaatcctctattactctaacctgctatttacattaaatgttaagctttaatttactattttgtgcaatctttttaaggtactatgcagctttgagatgatacaattaattatacctatatggcacaagttaagcaacccatggtcatatagggaacaagacagagcttatctttaaaactaacttgtatttgccataattagaatttaatcataggtcctggaatcaaggaaaaaagcattgggaatttcttctgcatttgacagagtgagggttgggaa

SEQ ID NO: 428479 - DNA, 604 bp, Homo sapiens
ttttttttaaatccctttcaacttcatcttttcagcaaagccagtacccccagaaaaccagcaaaaacaaaaacagaatatctgaccttttgctaattttgacagtgtttctgggtgtaattgtaccttttgctatawctatggataatactcaaaaacttccaggagacaccagtagcactaactttagtttattcccacaactggaccaacaaattgaggaatttgggatacttttatactaagctttaaaattaatggaagaaacatgatacattattttgtcaaatggccataaaatgaagcaaaatcaacaaatcctataacaacaacatattttcaagctttccccatagccgatggtggctttgcagacatctaagtgattcaacattggagttgtcctgatcaacctactgtcatcattcagtgttggctttaagtccaagtcaaggtagcctttcttcttttacaagagcaaagggtatataatgttttactttttaacttacagcagctaaaatgaaacattacaggaaggaaatttaaaaaaggaaaagccaaaggatctatgactttcatttatacaaagctttgaagtatt

SEQ ID NO: 428480 - DNA, 604 bp, Homo sapiens
ttttttttaaatccctttcaacttcatcttttcagcaaagccagtacccccagaaaaccagcaaaaacaaaaacagaatatctgaccttttgctaattttgacagtgtttctgggtgtaattgtaccttttgctataactatggataatactcaaaaacttccaggagacaccagtagcactaactttagtttattcccacaactggaccaacaaattgaggaatttgggatacttttatactaagctttaaaattaatggaagaaacatgatacattattttgtcaaatggccataaaatgaagcaaaatcaacaaatcctataacaacaacatattttcaagctttccccatagccgatggtggctttgcagacatctaagtgattcaacattggagttgtcctgatcaacctactgtcatcattcagtgttggctttaagtccaagtcaaggtagsctttcttcttttacaagagcaaagggtatataatgttttactttttaacttacagcagctaaaatgaaacattacaggaaggaaatttaaaaaaggaaaagccaaaggatctatgactttcatttatacaaagctttgaagtatt

SEQ ID NO: 428481 - DNA, 634 bp, Homo sapiens
caaacacctggcaaatgtgccaacattctcacattctactctcagaagagacacaactaattcattatggcaccttttccaccaagccaataattgcacgcagatgactcagaacatgaagcagcagttagccattggtccgtgtctcagtttcttaattattagtataggtaaacaaacttctggcttacagggttgtatataaaattaagaatgatataatgaaaaatgtattctaaaaatctagttagtataatcttattttacagatagagaaaataaagccaaaacaggtaagtgatttacccaaatcaacagttacttttagacccaaatcaacagttatttgtagttcagaaaaggtccctggggaaaaaattaatccaacccatccatttcacagatatggaaactggaactcagagcagaaaactttgcccaagaacaggcatcacctctcatactgatacggtttggctctgtgcccccacccaaatctcatctcgaataggaatccccacctgtctagggagggacctattgggaggtgattggatgatgagggcagttttcctcatgctgttctcgtgacagtgagttctcaaaaargggctgatgattttaaagtgcagca

SEQ ID NO: 428482 - DNA, 455 bp, Homo sapiens
tatgtattggatttttaagaaaagtatctacaattttctaagatgcttctatttaagtctttctgtatacattctatttcaggttttcttgtgccttttctgttatgttttagtagaaaaaacacaacaaaatatttggggcattgaaattcaccttatttcataaaatartttgtaaactttttcaaccattatttcttcaataatataggagacttaagaacaaatgacaataggaaaaaaagcactttgtagctcttttttgagattttttaaattttactcattcaacaaaaatatttgagtgcctgaagtatttgagtctagaaaatgctgaattaggaaatatgaagataaatttgacaaatctcttcacttgaaaagctgacaacagtccacagaaaagatgagagagaagtccactgcaaattctaaagcagattaaaggttcacgg

SEQ ID NO: 428483 - DNA, 455 bp, Homo sapiens
tatgtattggatttttaagaaaagtatctacaattttctaagatgcttctatttaagtctttctgtatacattctatttcaggttttcttgtgccttttctgttatgttttagtagaaaaaacacaacaaaatatttggggcattgaaattcaccttatttcataaaatagtttgtaaactttttcaaccattatttcttcaataatataggagacttaagaacaaatgacaataggaaaaaaagcactttgtagctcttttttgagattttttaaattttactcattcaacaaaaatatttgagtgcctgaagtatttgagtctagaaaatgctgaattaggaaatatgaagataaatttgacaaatctcttcacttgaaaagctgacaacagtccacagaaaagatgagagagaagkccactgcaaattctaaagcagattaaaggttcacgg

SEQ ID NO: 428484 - DNA, 419 bp, Homo sapiens
tacgtaactattattgaaatgctcaaaaataaaataatgtgaatggcaatcacagattttaaaaactgtctttgctttagttatcaagcaatccaaaaaaaaagagctggaaatagagattaaacatctaatctatagcaccattacagagaaattatagactccctcagcttatatacaaaccatgatgcctctaccccacattctctttgatgagaaaacatgatccaaaacttctcctccctttgtttaacccagttctgcaccaagacttctacttacytcaccataaccaatctcagtaagagttctttaaagcaaagggtgagcccaacagattcacattaaattgtaatgtgaaactctaacttcctacagaggtttgcactaggggtgtgggtatgtgtgtgtgtgcatag

SEQ ID NO: 428485 - DNA, 609 bp, Homo sapiens
tttattctagcaattatatactttacgtaactattattgaaatgctcaaaaataaaataatgtgaatggcaatcacagattttaaaaactgtctttgctttagttatcaagcaatccaaaaaaaaagagctggaaatagagattaaacatctaatctatagcaccattacagagaaattatagactccctcagcttatatacaaaccatgatgcctctaccccacattctctttgatgagaaaacatgatccaaaacttctcctccctttgtttaacccagttctgcaccaagacttctacttacttcaccataaccaatctcagtaagagttctttaaagcaaagggtgagcccaacagattcacattaaattgtaatgtgaaactctaacttcctacagaggtttgcactaggggtgtgggtatgtgtgtgtgtgcatagtttcttctgcagcttaccctttaacaaaacrtaagaaatcttaaataagtgaaacattttcaatcactaacaagatatcttgaggaaggacaactatgaactccagggactcagggcttaatgggaacttttctatttaatctctaaattttatttcccctccccta

SEQ ID NO: 428486 - DNA, 446 bp, Homo sapiens
ttcagtaaagaaacctcaaaagtttcatttggggaaggagatgcagtggggacggagggcaagtatttttacactaaaattatcagctgtatacaattttagaaaaatcgttttacattgtttagaagatccattaaatatggcctggcacgacctttctaggacaagtcattaaagccctaaatggtatttggaaatgctgctacctcagattgaggtcatttgcattatataataaaacacacagcatactttgcttggcaagttcactggaatggctgaactttggccccttgcatgattttgcaaatacagagtrtacttgttctctacttaacaactaaccccacttaaattaaaacaagctgcccccttttcacctctggtgtgctctgcttttaagtatgcattgtgagaagaaatgttagacttttaatacaacaaac

SEQ ID NO: 428487 - DNA, 579 bp, Homo sapiens
tcatcccgaaggaagctattaatattccttctctagtgtctaaaatcatttgagaagatcaatgcttcacttttgaagagtaagtaatggatcttgtcatattattagagaccttactgaattctctagcctggcttcaaagatgtaaaacggatgatctatctcttagaaacctttgtccatggatcttagttctattaacgacctaagaaaataatctgatacattcttttattgtcatattttaagttatttctttgcggtgcgttataaaccacaaaagatttgcaaaaatagaaatgtatacagctcaataaattatcacaaagtcaatgctcatgtaattattacacagataaacaccttgaagttaaccagtacatagaagcctgtggcttgttctgtcacactgggtaagtgtatatgtatatacaaagatacatgtgcagagatytgtaatcatgctgcattaatgtctcatgttcatcacaatttttcaagtcatttgactgtgtgttaccagggagggacaacaccttgaacatatcataggatgtcattgaatatattgtacactgt

SEQ ID NO: 428488 - DNA, 579 bp, Homo sapiens
tcatcccgaaggaagctattaatattccttctctagtgtctaaaatcatttgagaagatcaatgcttcacttttgaagagtaagtaatggatcttgtcatattattagagaccttactgaattctctagcctggcttcaaagatgtaaaacggatgatctatctcttagaaacctttgtccatggatcttagttctattaacgacctaagaaaataatctgatacattcttttattgtcatattttaagttatttctttgcggtgcgttataaaccacaaaagatttgcaaaaatagaaatgtatacagctcaataaattatcacaaagtcaatgctcatgtaattattacacagataaacaccttgaagttaaccagtacatagaagcctgtggcttgttctgtcacactgggtaagtgtatatgtatatacaaagatacatgtgcagagatctgtaatcatgctgcattaatgtctcatgttcatcacaatwtttcaagtcatttgactgtgtgttaccagggagggacaacaccttgaacatatcataggatgtcattgaatatattgtacactgt

SEQ ID NO: 428489 - DNA, 576 bp, Homo sapiens
cattcattccctgtctggcagtgcacgtcagctggcttattttctttggatattctaaagtcacattagtctctttacagatatggaaaatgaccaaaaaattatatgaaaaagagtggcaaaaaaaatatctgggagagttttcaattttattatctcagaaaattattaacatacgcatttataggaggctttcttyttccatatgagtaacactgcagaaaacatagagtatgttttgggccaaataaaaaatatgagtatgtacatataaccgtatttccccaagcattacgtttgcatgagatagaacaggcatcaattactaatgatagtatatatgcctacatttttctgataacctcaaaccaatgatgcccaacttttatttcaatgtaaaattactctaatacagggaaaaataaagaacagtgactcatcaagtcatgtgtggggctggaagaaccttgaataggatagctgatgtagagaagttttagagaaacccttgtcagacattgtgaatctattcaatatttaaatatatctacaaaaatgataactaaccttctccca

SEQ ID NO: 428490 - DNA, 562 bp, Homo sapiens
acgattagttgagctttttgacaactgtccaagcactaatctccttgttctatactaagagtttagaatgtatttaaataagaaagatattataaatagctactcaactgttatttattatttatttatttgcatttgagaaggaaaaaagaatcagacacttatttaaaagtcatcttatatcaaaagtaaatattaggcacttccatcatgtaacaactttgaytttagaggtctttttagtgacaaatataaaagcaatttttaaatcattagtacccggtatacattcatagaaaggaaaatgctttcatgcatataagtcctctcttgacaaagtaaagctactagctttaagctgacccacttttctctatgctgtatcaggtataagcaagctaaagaggattaaaaaaaaaaaagtaactttcagtataaaacaggaatggaaatgctctgcacctaaactccaatgggattttccttttgtcaaaggctgcccttctataacctgttctgagtttataaagcatacaaatctcactgaggctcttattacacc

SEQ ID NO: 428491 - DNA, 644 bp, Homo sapiens
ctaacactgacattcagaatgtgtctgaccaagacaggtgacattccatgatcagggacaggaaatcagaagggaaaatggtgactttgatactggatataaatttgaggttggagcaaaacattcaggaggttggaaattatcaaatacatatcaagtggcagttaacaatagaagcatttatgtaaattcaataacagagttgaagtacacttggcccacatgggtttgaactgtgtgagttcacatatatgtggattttttccaataaaagttataccaagtgtgcctgcctctcctgcctacccttccacctccccttcctcctgcacctcctyttcaagctactcagtgtaaagatgaagatgaagaaccctatcatgatctacttccaggttaaaaaaaaaaaaaaaaaaaaaaaagcaaatatattttttcttccacacgatagttttaagaagcattttattttgtttaggttactttattgtaagaatatatactacatagactatacaaaatatgtgttaatcaactgcttgtgttattgataaggctttcagtcaatgtagacaaaatagccttctattgaaaaaggatgccatctagcactctgatggcaaaaaaggagacgtcaatacctg

SEQ ID NO: 428492 - DNA, 565 bp, Homo sapiens
gaccagcctggccaacatgatgaaaccctgtttctcctaaaagtacaaaaattagccaggcatggtggcacacacctgtaaatccagctactcagaaggctgaggaaggagaattgcttgaaactggaaggtggaggttgcagtgagccrggatcacaccactatactccagcctaggtgacagagggagactctgtctcaaacaaacaaacaaacaaattgtattgagagagccaattggtaaaactgatgtcggaaacagcccccttagcagcctgtgagtctcatcatgcttggggttacccttggctttcccatggggaccaacccatgatctgtcccctccccactggtgcaccaccaggcggaaagccccacaaagcagccaacatcccttcaaagatgagaggtcctccacctgactttcctgatactcccctcaggatcacaggggataatgctcttcccccaccggccaactcaccatgacatagaatgaaatggcccagctacagcctggtaaccaaggtaatgccttcatgttaattcccatgagatggccttg

SEQ ID NO: 428493 - DNA, 540 bp, Homo sapiens
  misc_feature (1)...(540): n = A,T,C or G
tggtcttgaactcctgggctcaagcgatcctccagcctcagcctcccaaagtgctgggattataggcgtgagccattgtgcccagtcatgtgtagctttttaatgcttttatatcattctataatgaacaagaaagggagagaagaaagaaaaggaagtaaattctgtggactttgcccttgaaggtgtgaaggaggttcacaagcactttcagaccagtgccatacctttaaaggggctatctggccatgctttcttctctccaaaggcacrctggtggctttgtctccttcattcattcatccatttgtttactaggtgtatgtggagagcttcttatgtgctagacaccattctatgcatgagctatacaatggcaaacaggacagtgaatcctgattgctaatgaagaagttaggcaataactcccccaaatgtaaacaagaaatgatcagatagtaataacagctatgcagagaatgaaaatatgagctatgataattgctggtgtnnnnnnnnnnnnnnnnnnnnnnnnnnnnn

SEQ ID NO: 428494 - DNA, 540 bp, Homo sapiens
  misc_feature (1)...(540): n = A,T,C or G
tggtcttgaactcctgggctcaagcgatcctccagcctcagcctcccaaagtgctgggattataggcgtgagccattgtgcccagtcatgtgtagctttttaatgcttttatatcattctataatgaacaagaaagggagagaagaaagaaaaggaagtaaattctgtggactttgcccttgaaggtgtgaaggaggttcacaagcactttcagaccagtgccatacctttaaaggggctatctggccatgctttcttctctccaaaggcacactggtggctttgtctccttcattcattcatccatttgtttactaggtgtatgtggagagcttcktatgtgctagacaccattctatgcatgagctatacaatggcaaacaggacagtgaatcctgattgctaatgaagaagttaggcaataactcccccaaatgtaaacaagaaatgatcagatagtaataacagctatgcagagaatgaaaatatgagctatgataattgctggtgtnnnnnnnnnnnnnnnnnnnnnnnnnnnnn

SEQ ID NO: 428495 - DNA, 642 bp, Homo sapiens
gggcacatggccataggttggccatattgctccaagagactttctaaatttttattatggacatgaattttcaaacataccccaaattagagagaatagcacaatgaaccaacatgtacccaacactcagctttgataattatcaattcatgacttttcatgatctcaccacctttccattcactcaatcatgttttagattccagagaggctttcaaaggaagtygtggaatcttctgtggcaataacaaccattcacattcactcccggagatgtagactttcttgtggccttacagattgatcacagccatcaaaggaggaatgaacacgtttcctgaggcactctatttacatactcagggtttttcatcaatcatgtaaaagagagttacattttcaggtcaaagtgactcatcaagccagaggggtgagtcatggaagacatatgacgctttccagtttaacctgctgtgcgactatgaacacctgtaacagtcatcttgccataaatctctccctgacctttctgtgacaagagaaactgctaccaaatcctgaatcctacctgtatagtaagaaatgatttcagtgtttattgcagaaatcttctatttggagaatttaaatttaaatcaaatt

SEQ ID NO: 428496 - DNA, 595 bp, Homo sapiens
ctgactttaactcggggctagatggggaaacactggacagttctaccccgaggtgtgacagaacttgaccttcattttaaatcggtccatctgtttaggctagtgagaaaaaacaatatttgaactcgggcagtccagctcaggagtctgtgctgtcgggattaaagaatcagtcgacacccccagggctgagccccgcagcaagcgccccgcgggtgctggcccccagactgtggttaccgccatcctttcacttaaactccgccccgattactcccccgctccagggctccgcatccactctgccgggtctccacgwagcgcttcccgggctacacattgcgtaacttcggcagccgggcggagcctgcacagaggcggagccgcggcagccggagagaacgccccagcaatagtcgctaggaggaagccccaggagcccttgccgcccacggaacgcgcctgcgtaatccgggtccaggccgccgacattccaggaccgccttccgccccgcccccaattctggggcggagtcctcggccgcgccggcgcaaagcgtcgccgcaccccacgcctgcgcgcttcgcccgcccg

SEQ ID NO: 428497 - DNA, 619 bp, Homo sapiens
tcccagagcagtcgaataattcgttaagttctctcttcactaatgtttgagaaaggcccaaaagaaactttcccaagtggatgtaaaaggtatccttgctgatattaaacatcagtgttgcagttttgccgaagggcatattctgttttatttgttttaaggaaaagatgctttccagtttgtatttagtgttactttctgatgccattcagartggtttgctcactttgtctcttactctctccataaatgttacaaagtgtatgtaatttcaaagccagcaggattttagtaattatacagccaaggaaatgaaaccgtgagaggtttaaaaccttgtatctagaggagaaagcaaagcttgaattgaagtctctttactggggtgctgaccataccccacacattgctataggtctgactacagagcaaagcctggaacctgcggtcagcttaggaattacgcagtgttctccttcgttcgttcttctgtatattaataaagtaatttaaactgttgatcttgaaaaggccattcttccatgcatttcctagctctgataatgatagtcacctctggttgacaaaggtcactcagtgctttgtgtacagtctccca

SEQ ID NO: 428498 - DNA, 619 bp, Homo sapiens
tcccagagcagtcgaataattcgttaagttctctcttcactaatgtttgagaaaggcccaaaagaaactttcccaagtggatgtaaaaggtatccttgctgatattaaacatcagtgttgcagttttgccgaagggcatattctgttttatttgttttaaggaaaagatgctttccagtttgtatttagtgttactttctgatgccattcagaatggtttgctcactttgtctcttactctctccataaatgttacaaagtgtatgtaatttcaaagccagcaggattttagtaattatacagccaaggaaatgaaaccgtgagaggtttaaaaccttgtayctagaggagaaagcaaagcttgaattgaagtctctttactggggtgctgaccataccccacacattgctataggtctgactacagagcaaagcctggaacctgcggtcagcttaggaattacgcagtgttctccttcgttcgttcttctgtatattaataaagtaatttaaactgttgatcttgaaaaggccattcttccatgcatttcctagctctgataatgatagtcacctctggttgacaaaggtcactcagtgctttgtgtacagtctccca

SEQ ID NO: 428499 - DNA, 573 bp, Homo sapiens
ttatttgggcacaatatttgctgagaggagaatgacaccttctctaaagagtatttccttggctacttaaccttgtccccacctgtccaatctagcaaccaccaacagactctggctaagaaatgccatgctgctctggggtcaggagactttgtctataggagaaagagcagtggaaagggagttgggagatcatgcccaactctgtcattcaccagtttcttgagctaatcatatctccttcctgagttgccagtaaaattatgaggtcagacttgatcatctttgagatccttcaaaaccagtgacctagctgggtctggtggctcacgcctgtaatcgcagcactttgggaggcggaggtgggcagatmacttgaggccaggagttcgagatcagcctggccagcatggtgaaactctgtctctactaagaatacaaaaaatcagccgggcatgatggtgcatccctgtagttccagctacaggaggttgaggcagaagaatcgcttgaacccggaaggtggatgttgcagtgagccaaggtcacaccagcctgggcactctagcctgg

SEQ ID NO: 428500 - DNA, 484 bp, Homo sapiens
gtcatctttcctgaggagtctgaaattctaagataaagatgaaaagatgatattttatcataatgacacggatctgcattcccatttatcttgtgctcccacagcaaaatatactgggaactgycatgctgctttgaaaagtgggaaaatatttagccatttaaataatccaaaagtaaaaagaggcaccaaaggggaatagcacagaataatagctttatagtctccctaggagaaaaaaactcaaattgctgacccagatttcagaatttataactcacctcctaaactctgtctgcaactcgtgctatttagaaaagagtatttctttggtagttccttaataataataatcctttacatccctatagcactttaggcttctttcaaagtatttccacatccattatctcatttggtcttcagagcagccgtgcaaagtacacagggccaagacaattacctccattaacagaaaccagtg

SEQ ID NO: 428501 - DNA, 484 bp, Homo sapiens
gtcatctttcctgaggagtctgaaattctaagataaagatgaaaagatgatattttatcataatgacacggatctgcattcccatttatcttgtgctcccacagcaaaatatactgggaactgccatgctgctttgaaaagtgggaaaatatttagccatttaaataatccaaaagtaaaaagaggcaccaaaggggaatagcacagaataatagctttatagtctccctaggagaaaaaaactcaaattgctgacccagatttcagaatttataactcacctcctaaactctgtctgcaactmgtgctatttagaaaagagtatttctttggtagttccttaataataataatcctttacatccctatagcactttaggcttctttcaaagtatttccacatccattatctcatttggtcttcagagcagccgtgcaaagtacacagggccaagacaattacctccattaacagaaaccagtg

SEQ ID NO: 428502 - DNA, 634 bp, Homo sapiens
ttgtgactggggaggttggacaccgaggaagaggaaggggaattgatggcacacyggaccccataaatgtaaggtttttcatgcaaaaagtaagcaggggtcttctggagaagacgaagcaggttatgcatctgtggagtacaggagaaaaaattctgcatttctagaaagaaatagataatcaagcaggatgtggctaagactaccagcttcctcaggtgtgagtacataattcatttttgtatctccagcacctagcagactgtctggtgcaaagtattaacctcatcccaattgttgggtagatgacttgccagggattgatgtataaaaggaaagtggccctgacatgaagggagggtaactgccatttttggggcccccattctctgggaaccgcatgaggcatatgtcatctaatagaataacactgagacagggactgctaagcccactttatggatgaggaagcagagactcaaagacgtcaaacttgcctaaggccttaccagctagcaaatagcaaagctgggatttgaccctagacctgtctgattaggaagcccatgttctttctaccacatcatgctgtccagccagttggtgaatgtcttttgagaaggatagtaagtgt

SEQ ID NO: 428503 - DNA, 526 bp, Homo sapiens
atctgagctgaggctgattcttctcttgccaaggtgcattatgaaaaatttaaaagtgaattatgagacagtatctgattattaactaacaattgtattaaaaatttaagaagttcgcttaagaaaaatgaagtataaaaacaataacacaattttagtggtaggtagtcagaaatgttttgtggttttggagcctcagagaacgtagctttgattttggcagtttcgtatttgtttyctgatcttcagctcacagggcttcagttttctcatctgcataaggtgagaagaatgccgcctatcttacaagactgctattattctgtaaaagataatgcacaagatgcttgctagacagtaaacattcaatcaatggtttctttggagtaataatatttccagttgataggattcatttattcatccaagaaacatttattgagagcttcttgccaggtgacaagcactgtgccagatgccagggacacaatatggtagacagtctctgggtctgggtaactcacag

SEQ ID NO: 428504 - DNA, 592 bp, Homo sapiens
ggaaactgactcattgaaaaattgaacactttttccaatgtcatataacaaaggagacttctgtcattaattctaactattcccaagcagaaattgttgttagaaaccacagaatgcctctgggagctttcaagtcaggaaacaggggaccagagagtccaggtgactcggccaaggtcacccagcaagttgttgggaaagcctggatatgagcccaagactccagagttctcttctagtcctccatcattactgtctcgtcagattctcacttccccagctacagcctgtgcaaacaagggagacggtgcagtgatagattgtgcctaagagctattttaatagccctgctgttttgctggagaaacacagatgttgtgatttgctcctcctgaagcctgcagcagggttactacttaagcagccaccagatgctgctgtttccsaaagacacctgaatgcagccaagctcctgggaacacaccaggagaactgcttaggtcaccaatgccccatgacgttcattaacagctgccttgatcctttgctaacacaggtactctacccatttgggtcaaagccccgaggcaaa

SEQ ID NO: 428505 - DNA, 600 bp, Homo sapiens
tgagctaaagctaaaaggatatagaaaaagtataagcaacaagagctatggggagtcatggagatgggacagagtgtattccagactgtgagatcagcatatccaaaggcatagaagtgtgaaaaaagagggtactgatgctcctgaacttaggatatatgttgaaaatataataagtcaaaaatgcatttaatatatctaaccagggtattagtcaattttcacactgccataaagaactacttgagactgggtaatttatgaaaaaaaaagaagtttaattgactcacagttccacatggctgggaaggcctcagaaaacttataatcatggtggaaggcagaggggaagcaagaaccttcttaacatggcagcaggagagagagtgagcaaggggggcaagtgccacactttaaaaccatcagatmtcatgagaactcactatcatgtgaatagcatggggaaaatccacccccatgatccaatcacctcccaccaggtccctccctccacacatgaaattacagttcaagatgatttttgggtggggacacagaaccaaaccatatcattccaccctggcccctcctaaatctcat

SEQ ID NO: 428506 - DNA, 574 bp, Homo sapiens
tttctatactagtccatttttacactgctacaaagaaactacctgagactgggtaatttatgaatgaaaaaaaaagtctaattggctcacagttctgaatggctggggaggcctcaggaaacttacaatcatggcagaaggcaaaggtaaggcaagaaccttcttcacatggtggcaggaaagagggcaagcaaggggrggatgtgccatactttaaaaccatcagatcttgttagaactcactcactgtcataagaacagcatgggagaaatccactggcatgatccaatcacctcccaccaggtcctttcctccacatgtgaggattacaattctagatgagatttgggtggggacacagagccaaaccatatcacttagtgtaccttaagtgtgctcagaacatttatattagtgtacagttgggcaaaatcctctaactcaaagtctatttataatcaagtgttgaatatcttatgtgatatgttgaatacagtatattatagagcacagtatgggttgtctgtcctagtgactgcctggttgactgggagctgcagctcactgccactg

SEQ ID NO: 428507 - DNA, 501 bp, Homo sapiens
acacaccatgtaaaccaatcataaaaatgagatactacaattctaaatcaaatatatgaaaacctattttatcctttatttaaagaattatcatgatcaactgggatttatcctggactacacaggtaaatatagtaatgtaatataatacttatcagtaactcaaaggagaaaaccacttggacatcttgatggatcacttctactgagtcacagccttgtgaagttggggacagggatggttgtgttaagaagrggtctaggccagacagaagtagctgttatatcacatgagttaccaagagcaatgactcaaacacaagcaatgatgcagaagtgatcaggaatgtccaagccaaaccaggagcaaaataacctaaggttgaagaaacctaagttgattctgaactgccccaaatccaggttagtctagagctggagctgaagctgcatgtggtggtcatgggcaggagggtggtaggtgagtgtttagtaatgggg

SEQ ID NO: 428508 - DNA, 588 bp, Homo sapiens
cattaatgggtgagagcagatttatgtgttgggagatgtggggaagatttggctaaggcggttatgatgccagagacagggaatttaaaacaaggacaccctgaaaagggccttttatgtgacttcttcatgtgggttaattctgcttgaaccttagatacaaatctccaaagacaagagtaaatgaaagaaaaattaataacttatcaactcattgtaaaatgaaatggtcactaggttttccgtagtttttcttttcttttctttttaactcacaggaataaatatcctggccttgctaacacagaaggacagtgtatttcagaatgaatgagcttgagaaaagggacagcaggagactggattttgattgatttctcatctgaaagaaagaaggctgtgaggacatctatgagtgcacagcaacttctgcagggctggaggaagctgagggggaggggtgcagtgaggtagtggtagcaagaagtaaccaattytcaactcaacacatgatgcttggtgttttccaaatatgatcttatttaatcctcattcatttactcattcaaaaaatacttgttgagtgcc

SEQ ID NO: 428509 - DNA, 399 bp, Homo sapiens
atatgctctagctccatgatgaagctggaaaagggcagtcataagaataaaaaaacacctctaaggagacagaagacatacctgggttattccagtagcttcagtcacaaatacttggcgtatacactaccacttgcctctcttgtgcccttaaaaggcttgaataataaacacaatgctgtcatcatgacttaagcttagcaccctctcaaacttctcaacacggtattcccagcagtgaatacccattgattagataaggaatgtgagagtgaagcctatttttmatctctggatagcctgagaagtggtcccaatgagtttatccaatctcatgtccaatgtgatataatacataatatctttgcataattttgcaatgtcatttcacacctgcct

SEQ ID NO: 428510 - DNA, 597 bp, Homo sapiens
cctctgtgtgctgcaaagagattgtatcagaagagatatgcatgtgcctgtttttttctgcattaaaaccaaagtctgttctgcttagtttggttagttcacaaacttagcttagcaaatacaatattggacatgaagtatagttaaaagaacaccccctggcygggtgcggtggctcacgcctgtaatcccagcactttgggaggccacggcaggcagatcatgaggtcaggagatcgagaccatcctggctaacacggtgaaaccccggctctactaaaaatacaaaaaaattagcccagcgtggtggcgggcacctgtagttccagctgctcaggaggctgaggcaggagaatggcgtgaacccgggaggcagaatttgcagtgagccgagatcacgtcaccgtactccagcctgggccacagagcaagactccgtctcaaaaaaaaacaacaacaaaaaaaaaccaccccctgagatgtgatatcagtggttggggtgtgaggaggtggtgggagctttactggtaatacacaaaatgatactttagaatctatatatcttcctgttgtgggaaaactattttcaaaagaaac

SEQ ID NO: 428511 - DNA, 597 bp, Homo sapiens
cctctgtgtgctgcaaagagattgtatcagaagagatatgcatgtgcctgtttttttctgcattaaaaccaaagtctgttctgcttagtttggttagttcacaaacttagcttagcaaatacaatattggacatgaagtatagttaaaagaacaccccctggccgggtgcggtggctcacgcctgtaatcccagcactttgggaggccacggcaggcagatcatgaggtcaggagatcgagaccatcctggctaacacggtgaaaccccggctctactaaaaatacaaaaaaattagcccagcgtggtggcgggcacctgtagttccagctgctcaggaggctgaggcaggagaatggcrtgaacccgggaggcagaatttgcagtgagccgagatcacgtcaccgtactccagcctgggccacagagcaagactccgtctcaaaaaaaaacaacaacaaaaaaaaaccaccccctgagatgtgatatcagtggttggggtgtgaggaggtggtgggagctttactggtaatacacaaaatgatactttagaatctatatatcttcctgttgtgggaaaactattttcaaaagaaac

SEQ ID NO: 428512 - DNA, 597 bp, Homo sapiens
cctctgtgtgctgcaaagagattgtatcagaagagatatgcatgtgcctgtttttttctgcattaaaaccaaagtctgttctgcttagtttggttagttcacaaacttagcttagcaaatacaatattggacatgaagtatagttaaaagaacaccccctggccgggtgcggtggctcacgcctgtaatcccagcactttgggaggccacggcaggcagatcatgaggtcaggagatcgagaccatcctggctaacacggtgaaaccccggctctactaaaaatacaaaaaaattagcccagcgtggtggcgggcacctgtagttccagctgctcaggaggctgaggcaggagaatggcgtgaacccgggaggcagaatttgcagtgagccgagatcrcgtcaccgtactccagcctgggccacagagcaagactccgtctcaaaaaaaaacaacaacaaaaaaaaaccaccccctgagatgtgatatcagtggttggggtgtgaggaggtggtgggagctttactggtaatacacaaaatgatactttagaatctatatatcttcctgttgtgggaaaactattttcaaaagaaac

SEQ ID NO: 428513 - DNA, 577 bp, Homo sapiens
tgagcatgttctcagtttcaccatgagagagcttaagtattagtcggttttcccaaagttgacttaaaacctatgtccccaagttgttgcgactggaaatttttctctccacctcatggctttattgtcactattttaatttgctgttttttttggrggggggaggttaattctttgctttaggactcttgtagtttccctttatttcttgtgcactcagtctttcatgcaagatttactttatctaggtttttagtgtgtgtgtgtggaataaagagtttaatagacaagaggccagccacgacacatggaagacaaagttgttactcaactcaatctccacaaaaattcaaaggctagggtttctcaaggatggtaggccagggagtccctttatgtgtggggccacaggacaggtccaagattggggcaggcaggagggtcagggaggcagctgctccagttggagacactggttgtcagaaatgcaaaaacctgaaaagacatctcaaaaggccaatcttagattctacaatagtgatgttatctgcaggagtaattgtagaagttacatgtc

SEQ ID NO: 428514 - DNA, 574 bp, Homo sapiens
ctagccagtgaggctagaagcaagatagggtcagccatgtaggatttatctcactgycattattttgcaaaggtggtttcaatccctccctttggatttcataacaccttattcttaaggtgtgggctatgcagatgggaaaaggcctagactactctggcttcttcctgctgacagggggagtggtggggatagcagttggctccaggggaataggagtgaaactgctgctttgcagctgtctgcctgtactcacgggtgcctgtcaaggcttgcatgacaagcatgttagcactctcatccacagtttggcatagcacttaagtgaacagcggactataagttaatgagtaggttgttagaaagacagattgggataagcaggaaagagtagattaaaatatactgccccatatctttttagtcagtttcctagtcctgaaactagatgagttcagttaaacagctgtttcccatatcaggagatggcactgcagatgggctaggcctctacatgtgatgaaggcaaactgatttttaataagaggcatgtctatggaaacagaagaaaaac

SEQ ID NO: 428515 - DNA, 573 bp, Homo sapiens
ggcttctaaatctcagaggaagaagcttcgcaatgaagtcttggacctaatcattttatcccttgcctcggcctggtcacactgccaattcccccagcagtagcaattgctcacaaagagagaatctcagagttcaggcgyggattcaaacccacaatcaaatagaagcttgagttctccgctcatataatttctggtaaacactgtcagtttcagacttccaaatggagagtatatttttattcattttaagttatccttgctttcattttcttggcaaatgggacaactgggcaacccaaggggtttgattttctctatttatttacatttttcaacccatatatacacctgtcaagatataagccgggttttgatgttgagacaaaggaagcaccattctttcaggtcccaaatgggatattctagaggcatggggtgtggggacatcgttgcttttatgctttataacagattaaaggcaagcttggctcagcttttagctgggatggagtattagcaaatgaatgaattattctctgttcataaaacaaaataagctttctattagct

SEQ ID NO: 428516 - DNA, 574 bp, Homo sapiens
ctagccagtgaggctagaagcaagatagggtcagccatgtaggatttatctcactgccattattttgcaaaggtggtttcaatccctccctttggatttcataacaccttattcttaaggtgtgggctatgcagatgggaaaaggcctagactactctggcttcttcctgctgacagggggagtggtggggatagcagttggctccaggggaataggagtgaaactgctgctttgcagctgtctgcctgtactcacgggtgcctgtcaaggcttgcatgacaagcatgttagcactctcatccacagtttrgcatagcacttaagtgaacagcggactataagttaatgagtaggttgttagaaagacagattgggataagcaggaaagagtagattaaaatatactgccccatatctttttagtcagtttcctagtcctgaaactagatgagttcagttaaacagctgtttcccatatcaggagatggcactgcagatgggctaggcctctacatgtgatgaaggcaaactgatttttaataagaggcatgtctatggaaacagaagaaaaac

SEQ ID NO: 428517 - DNA, 468 bp, Homo sapiens
tcagttaaacagctgtttcccatatcaggagatggcactgcagatgggctaggcctctacatgtgatgaaggcaaactgatttttaataagaggcatgtctatggaaacagaagaaaaacaaaggttaatgttatccaggtatagagtaaagctttttcaggttatctagactaacatgttattggaaatcaaaaattgtataggtaatytttatatttaagttttatactgaacttcaatggtcctttggaagcttttatattatttttttctatattactcagaattttaatagccaccatactacaaacatttggagttttcccctgcagataaattttttacgagatatctcaaaacatgactcactactgttttagtcaagtactatatgtgttgaatttttaaaaagtattccatcttattttaagtgacatgttattacttcattttagaaacacggttct

SEQ ID NO: 428518 - DNA, 537 bp, Homo sapiens
atgattcctgggtttctgaatgactgcatacaagagcaacgcattggaacgtatacagggacctttgtatgctctgaaacaacagcaaagagaacaacaaaaaaagarcatgaatagaaatgtctgtagggaatagaagaggaacggaaggaagcgattctccacaaatgaagtttgtggagaactgaagctctccatggagtgttgaatgattgcactgtccactgagagaatagcacagtctaagcttggcagaaggggtgccatgatatttgaggaaggctgcacttgtcacttatgcacaggaacaacatggctttgaattgctaataagccacattatgcaggtatggccttgccacccagatacatggtaatatctcacagccccaaaacaacttcctttgtattcccaagtatatttagctcagtcctaggcatataacagagtccttaataaatacttcttgaatttaaaagctgtcaaataaaatataaagcattttttttactactatcatttttgagagcctgtgg

SEQ ID NO: 428519 - DNA, 537 bp, Homo sapiens
atgattcctgggtttctgaatgactgcatacaagagcaacgcattggaacgtatacagggacctttgtatgctctgaaacaacagcaaagagaacaacaaaaaaagaacatgaatagaaatgtctgtagggaatagaagaggaacggaaggaagcgattctccacaaatgaagtttgtggagaactgaagctctccatggrgtgttgaatgattgcactgtccactgagagaatagcacagtctaagcttggcagaaggggtgccatgatatttgaggaaggctgcacttgtcacttatgcacaggaacaacatggctttgaattgctaataagccacattatgcaggtatggccttgccacccagatacatggtaatatctcacagccccaaaacaacttcctttgtattcccaagtatatttagctcagtcctaggcatataacagagtccttaataaatacttcttgaatttaaaagctgtcaaataaaatataaagcattttttttactactatcatttttgagagcctgtgg

SEQ ID NO: 428520 - DNA, 537 bp, Homo sapiens
atgattcctgggtttctgaatgactgcatacaagagcaacgcattggaacgtatacagggacctttgtatgctctgaaacaacagcaaagagaacaacaaaaaaagaacatgaatagaaatgtctgtagggaatagaagaggaacggaaggaagcgattctccacaaatgaagtttgtggagaactgaagctctccatggagtgttgaatgattgcactgtccactgagagaatagcacagtctaagcttggcagaaggggtgccatgatatttgaggaaggctgcacttgtcacttatgcacaggaacaayatggctttgaattgctaataagccacattatgcaggtatggccttgccacccagatacatggtaatatctcacagccccaaaacaacttcctttgtattcccaagtatatttagctcagtcctaggcatataacagagtccttaataaatacttcttgaatttaaaagctgtcaaataaaatataaagcattttttttactactatcatttttgagagcctgtgg

SEQ ID NO: 428521 - DNA, 546 bp, Homo sapiens
aagactctgctcacaccacatcagctagcatcctcttggccaaaggaagtcacaaagcaagtctcaaarccaaggtgcagccacctacaatctgcctgtagcaggagaaggtgcaaaattggcaaatgacatgagtataaggagggatatagaaccatgattattttggacaaatctttcccattctctaagcttcttcaactcctaaataaggaacttgggtcagatctatgtgttcacatttagtgaattcttggacatggcattaactaatattaagcacataaagtgatgataattcacttttgattttgctttcactatttccagcacattgaggaaaaagtctgagttggtgcctttaacaagtgtctatcccttactgatttcctattttaacaaggaactagaagacatcaggtttggagccttctgtaggccacagtatctagctagtatttcaaaagattgctttgtttttattttattttaatctattttgtatttatagcaaatatttaaggaaattataaaatcaactattgg

SEQ ID NO: 428522 - DNA, 546 bp, Homo sapiens
aagactctgctcacaccacatcagctagcatcctcttggccaaaggaagtcacaaagcaagtctcaaagccaaggtgcagccacctacaatctgcctgtagcaggagaaggtgcaaaattggcaaatgacatgagtataaggasggatatagaaccatgattattttggacaaatctttcccattctctaagcttcttcaactcctaaataaggaacttgggtcagatctatgtgttcacatttagtgaattcttggacatggcattaactaatattaagcacataaagtgatgataattcacttttgattttgctttcactatttccagcacattgaggaaaaagtctgagttggtgcctttaacaagtgtctatcccttactgatttcctattttaacaaggaactagaagacatcaggtttggagccttctgtaggccacagtatctagctagtatttcaaaagattgctttgtttttattttattttaatctattttgtatttatagcaaatatttaaggaaattataaaatcaactattgg

SEQ ID NO: 428523 - DNA, 546 bp, Homo sapiens
aagactctgctcacaccacatcagctagcatcctcttggccaaaggaagtcacaaagcaagtctcaaagccaaggtgcagccacctacaatctgcctgtagcaggagaaggtgcaaaattggcaaatgacatgagtataaggagggatatagaaccatgattattttggacaaatctttcccattctctaagcttcttcaactcctaaataaggaacttgggtcagatctatgtgttcacatttagtgaattcttggacatgrcattaactaatattaagcacataaagtgatgataattcacttttgattttgctttcactatttccagcacattgaggaaaaagtctgagttggtgcctttaacaagtgtctatcccttactgatttcctattttaacaaggaactagaagacatcaggtttggagccttctgtaggccacagtatctagctagtatttcaaaagattgctttgtttttattttattttaatctattttgtatttatagcaaatatttaaggaaattataaaatcaactattgg

SEQ ID NO: 428524 - DNA, 565 bp, Homo sapiens
tttagtttgactctgacactcactacctggagttagcattagacctacaggtttaagaactcagtctcacaagactgcccctcacttcaggtgccagtcacaaatactgggtccctaggcaacacrctcttctgtctaacttggatacaaatcaagagttcccacgacccccttttcaggttcaataatttgctagaaggactcacagaactcagaaaagcactttacttacagttaccaggttattataaatgatacaacttaggaactgccaaatggaagagatgcatagaacaaggtatggtgggagggtgtggagcttccatgacctctctgaggcaccaccttttcagcccatcaatgtgttcactaacctgggaactctttgaacgtcatcatttgggtgtttttatggagaattcattagttaggcatgattgattaaatcacaaatcttcctacctccacagaggtgggagggtgtgctgaaaattccaaacctttagtcacctggttggatcctctggtaaccattccccatcttgaagatatctaggggcccaca

SEQ ID NO: 428525 - DNA, 565 bp, Homo sapiens
tttagtttgactctgacactcactacctggagttagcattagacctacaggtttaagaactcagtctcacaagactgcccctcacttcaggtgccagtcacaaatactgggtccctaggcaacacgctcttctgtctaacttggatacaratcaagagttcccacgacccccttttcaggttcaataatttgctagaaggactcacagaactcagaaaagcactttacttacagttaccaggttattataaatgatacaacttaggaactgccaaatggaagagatgcatagaacaaggtatggtgggagggtgtggagcttccatgacctctctgaggcaccaccttttcagcccatcaatgtgttcactaacctgggaactctttgaacgtcatcatttgggtgtttttatggagaattcattagttaggcatgattgattaaatcacaaatcttcctacctccacagaggtgggagggtgtgctgaaaattccaaacctttagtcacctggttggatcctctggtaaccattccccatcttgaagatatctaggggcccaca

SEQ ID NO: 428526 - DNA, 565 bp, Homo sapiens
tttagtttgactctgacactcactacctggagttagcattagacctacaggtttaagaactcagtctcacaagactgcccctcacttcaggtgccagtcacaaatactgggtccctaggcaacacgctcttctgtctaacttggatacaaatcaagagttcccacgacccccttttcaggttcaataatttgctagaaggactcacagaactcagaaaagcactttacttacagttaccaggttattataaatgatacaacttaggaactgccaaatggaagagatgcatagaacaaggtatggtgggagggtgtggagcttccatgacctctctgaggcaccaccttttcagcccatcartgtgttcactaacctgggaactctttgaacgtcatcatttgggtgtttttatggagaattcattagttaggcatgattgattaaatcacaaatcttcctacctccacagaggtgggagggtgtgctgaaaattccaaacctttagtcacctggttggatcctctggtaaccattccccatcttgaagatatctaggggcccaca

SEQ ID NO: 428527 - DNA, 538 bp, Homo sapiens
gatgagggtctagtacttttctttttcatataaatatccagcaattccaccactatttggtaaaaagagtcttttctcccattgaaatgttttagcaactctgttgaaaatcagttgagcatatatgtgtgggtctatttcaggaatctctgttctgtttcatttaatgatatgcttacatcaattctattatgcgttgttactgtagttttatgaaaagtcttgaaataaggtatcgtaagtcctccaattttgttaatcttttccaaaattattttggctgttttaggwcttttgcatttttcatctaaattttagaataggattgtaaattttggcggggggagcccctgttgtaattttgattgagatctccttgaatcatgagttaatctggggaaaatggacatcataaaaatattgagttttctaattcagcattatggtaaagcttcccatttattcaaatcttaaaatttcagcaatattttgtgattttcattatataggtctagtgcttttgtattaaatttatttc

SEQ ID NO: 428528 - DNA, 538 bp, Homo sapiens
gatgagggtctagtacttttctttttcatataaatatccagcaattccaccactatttggtaaaaagagtcttttctcccattgaaatgttttagcaactctgttgaaaatcagttgagcatatatgtgtgggtctatttcaggaatctctgttctgtttcatttaatgatatgcttacatcaattctattatgcgttgttactgtagttttatgaaaagtcttgaaataaggtatcgtaagtcctccaattttgttaatcttttccaaaattattttggctgttttaggtcttttgcatttttcatctaaattttagaataggattgtaaattttggcggggggagcccctgttgtaattttgattgagatctccttgaatcatgagttaatctggggaaaatggacatcataaaaatattgagttttctaattcagcattatggtaaagcttcccatttattcaaatcttamaatttcagcaatattttgtgattttcattatataggtctagtgcttttgtattaaatttatttc

SEQ ID NO: 428529 - DNA, 684 bp, Homo sapiens
attgtgtcaatcatgggccagttatatttctcatacatttttaacatgttgatcttgtgtgccattcttaactatacatarcataggcatttaaattaaatataaagttatcctcaggagatggccaaagtgaaaaaacaagaaaagtaattgaagtagattaggagagaatttgataaatattcctcaaactaaaactgattactaagtagcatggccctgtcagagagggctgttgtcttgggaattcttcatgaggcttgaaacttcttcaacaattgatatatacagatttctttactctgcactcaaataaatgtagttttctatctgggtaatatgttacatatgttcattgtgttaaaacatagacaattttgaaaagtggaagacaaaaaagaaaaaaaatccatattttgaaatgtataaaaatttgtcaatattttgaaaagtaggaaaaggaaaaaattaccatattcctactaccacccactttaaatcttttgtttccttccttccttctttctttttttcttttcttttctattcttttctttcttttttttcttttttcttttttttttgagacagagtctcactctgttgcccaggctggagtgcagtggcacaatctcggctcactacaacctctgcctcctgggttcaagcaattctcctccatgc

SEQ ID NO: 428530 - DNA, 684 bp, Homo sapiens
attgtgtcaatcatgggccagttatatttctcatacatttttaacatgttgatcttgtgtgccattcttaactatacatagcataggcatttaaattaaatataaagttatcctcaggagatggccaaagtgaaaaaacaagaaaagtaattgaagtagattaggagagaatttgataaatattcctcaaactaaaactgattactaagtagcatggccctgtcagagagggctgttgtcttgggaattcttcatgaggcttgaaacttcttcaacaattgatatatacagatttctttactctgcactcaaataaatgtagttttctatctgggtaatatgttacatatgttcattgtgttaaaacatagacaattttgaaaagtggaagacaaaaaagaaaaaaaatccatattttgaaatgtataaaaatttgtcratattttgaaaagtaggaaaaggaaaaaattaccatattcctactaccacccactttaaatcttttgtttccttccttccttctttctttttttcttttcttttctattcttttctttcttttttttcttttttcttttttttttgagacagagtctcactctgttgcccaggctggagtgcagtggcacaatctcggctcactacaacctctgcctcctgggttcaagcaattctcctccatgc

SEQ ID NO: 428531 - DNA, 684 bp, Homo sapiens
attgtgtcaatcatgggccagttatatttctcatacatttttaacatgttgatcttgtgtgccattcttaactatacatagcataggcatttaaattaaatataaagttatcctcaggagatggccaaagtgaaaaaacaagaaaagtaattgaagtagattaggagagaatttgataaatattcctcaaactaaaactgattactaagtagcatggccctgtcagagagggctgttgtcttgggaattcttcatgaggcttgaaacttcttcaacaattgatatatacagatttctttactctgcactcaaataaatgtagttttctatctgggtaatatgttacatatgttcattgtgttaaaacatagacaattttgaaaagtggaagacaaaaaagaaaaaaaatccatattttgaaatgtataaaaatttgtcaatattttgaaaagtaggaaaaggaaaaaattaccatattcctactaccacccactttaaatcttttgtttccttccttccttctttctttttttcttttcttttctattcttttctttcttttttttcttttttcytttttttttgagacagagtctcactctgttgcccaggctggagtgcagtggcacaatctcggctcactacaacctctgcctcctgggttcaagcaattctcctccatgc

SEQ ID NO: 428532 - DNA, 624 bp, Homo sapiens
aatatattttcaatattctaggagtttgaaaaacattaattcactaattctacacacggcaaagcaatgataattaagcctattttayagatgagaagacagtctgcaatgttaatttagttcatatctcctataacgcaggatttttaccaccttgaggttattaatccaactcctactcaaacagcacttaggataattatttcgaggtacgctccttttcttccaacaagaatgaaacaagcttgaagccagagaatggatcttaaaactagagaataaaatccaaatcattaagttccaatcaacctcattacactggtcccgtattttacagatgaagaatatgaaaaaagagggcaggtgacacagtcaaagacacacagttttttaagtctcacaactagacattcatatctgtggcttaaatcttcactgccatttcctgttatataccactgatttgtgatttcctatgctacccacgatgtctcgatctgtgcaaacactcaatatatgtttgtgaaattaaattggctaatttccctagatattatgttatcatctatgccaatatcatgccataacccaaaatgctcaatcagcatttatatcttctagaac

SEQ ID NO: 428533 - DNA, 624 bp, Homo sapiens
aatatattttcaatattctaggagtttgaaaaacattaattcactaattctacacacggcaaagcaatgataattaagcctattttacagatgagaagacagtctgcaatgttaatttagttcatatctcctataacgcaggatttttaccaccttgaggttattaatccaactcctactcaaacagcacttaggataattatttcgaggtasgctccttttcttccaacaagaatgaaacaagcttgaagccagagaatggatcttaaaactagagaataaaatccaaatcattaagttccaatcaacctcattacactggtcccgtattttacagatgaagaatatgaaaaaagagggcaggtgacacagtcaaagacacacagttttttaagtctcacaactagacattcatatctgtggcttaaatcttcactgccatttcctgttatataccactgatttgtgatttcctatgctacccacgatgtctcgatctgtgcaaacactcaatatatgtttgtgaaattaaattggctaatttccctagatattatgttatcatctatgccaatatcatgccataacccaaaatgctcaatcagcatttatatcttctagaac

SEQ ID NO: 428534 - DNA, 624 bp, Homo sapiens
aatatattttcaatattctaggagtttgaaaaacattaattcactaattctacacacggcaaagcaatgataattaagcctattttacagatgagaagacagtctgcaatgttaatttagttcatatctcctataacgcaggatttttaccaccttgaggttattaatccaactcctactcaaacagcacttaggataattatttcgaggtacgctccttttcttccaacaagaatgaaacaagcttgaagccagagaatggatcttaaaactagagaataaaatccaaatcattaagttccaatcaacctcattacactggtcccrtattttacagatgaagaatatgaaaaaagagggcaggtgacacagtcaaagacacacagttttttaagtctcacaactagacattcatatctgtggcttaaatcttcactgccatttcctgttatataccactgatttgtgatttcctatgctacccacgatgtctcgatctgtgcaaacactcaatatatgtttgtgaaattaaattggctaatttccctagatattatgttatcatctatgccaatatcatgccataacccaaaatgctcaatcagcatttatatcttctagaac

SEQ ID NO: 428535 - DNA, 629 bp, Homo sapiens
tttaatttaatcatcaacacaatcctattaatgctattattatctctaacttataaaagtggagatggaagtttatcaaaattagcttgcccaagatcatatagctagtaataaataataaaagctaatatgttttgagttatttctatgtgcttgacattgcttgacactgttcattagatcctgttaacaaccctatgaggtaagtacattattatgcacatttaacagatgaagacactgaaccgtggaaaaccagggtttaaaagcccgtcagtggtagagtgaggcttcaaacccaggcagcctaactytagaatataggctcttgaaaactatgctgtgttactttctcaaaatggtggtgctggagtttagagatagctctatctgagcaaagtttccaccctaacaaccgtggaacatgactggattctgggtaaaattctgtgaataaaatatcattatggttttcttcaataagctaatccctcacaatagcattaaaaaaatgaaatgggcataaatctaacaaaaacgatgcaaatttttatgctgttaccattaaaaaaaccagtgagagaattcagaaaagacctaaataaatggaaagataaactgtattagtg

SEQ ID NO: 428536 - DNA, 548 bp, Homo sapiens
aaattctgtgaataaaatatcattatggttttcttcaataagctaatccctcacaatagcattaaaaaaatgaaatgggcataaatctaacaaaaacgatgcaaatttttatgctgttaccattaaaaaaaccagtgagagaattcagaaaagacctaaataaatggaaagataaactgtattagtggactggaaaactcaatatattaacatatcaattatcctcaaattgatctatagtttcaacacaatcccagtcaaaattctagtagatatttaaaaaaataaattgtccggctaattataaaatgtatataaaaatgtaaatatctaatatggccaaatcaatgttgaaacagaagaacaaaattgtaggagttagagtatttgatttcatgacttaccataaaactacagtggtcaaagcagtgcaaagagtgtggcattgccatataaatagacaaatacataaatggaacagaacagtgtccaaaatagacctgcacrtatagaatcaattgattttttttaccaagtacaatggcaat

SEQ ID NO: 428537 - DNA, 458 bp, Homo sapiens
aagggaaatatgacatttttatactatttagtcctaatctgcattcatttgcacttgcccacattcaataaatccacattggcttcattatgtgtaggattctgtgaaaaatacagattaattaggcaaatttctaccctctagtagcttatagtctaatagaggaattcaaacagatagaaaacttacaaagaaatatgacacaaagtgtctagtaccaaggaaggatccaccagttttgaattcccactakgccctaggcccccctgtgttggaacttgacatatattactttgtttctcacaactgctctttgagatacatactatgatccttttacacacagatcctccctttccttctctttccattcctacttctacttttactagctactattatttgagctcctaccagttactaggcttgacatgttcattatgaaaatataaaaggat

SEQ ID NO: 428538 - DNA, 458 bp, Homo sapiens
aagggaaatatgacatttttatactatttagtcctaatctgcattcatttgcacttgcccacattcaataaatccacattggcttcattatgtgtaggattctgtgaaaaatacagattaattaggcaaatttctaccctctagtagcttatagtctaatagaggaattcaaacagatagaaaacttacaaagaaatatgacacaaagtgtctagtaccaaggaaggatccaccagttttgaattcccactatgccctaggcccccctgtgttggaacttgacatatattactttgtttctcacaactgctctttgagatacatactatgatccttttacacacagatcctccctttccttctctttccattcctacttctacttttactagctactattatttgagctcctaccagttactaggcttgrcatgttcattatgaaaatataaaaggat

SEQ ID NO: 428539 - DNA, 523 bp, Homo sapiens
ctatgatccttttacacacagatcctccctttccttctctttccattcctacttctacttttactagctactattatttgagctcctaccagttactaggcttgacatgttcattatgaaaatataaaaggatatgactatttcacatatggagtgaagtgaaaagtgcatatttataatcaaacagactggagttcaaatcctaggtctgctacttaccgtgtgaacttgggcaggttatttaacatctctaaccctcattctttgaygataataaccaccttgcagagtaacatgagaaatcagtgagacaagccatgtaaagcacctatcacagtgcccagcaggtaatttcttttcaacaaagaccagttccccacctcctgcatatccaacagcaagacagctcattgtgtgcctgagacccgggctccccacactcaccttgtcctccccactgacagtccagagatgctgagatgttatgcaatttggaatgtgccttttcagacacaccagttaa

SEQ ID NO: 428540 - DNA, 549 bp, Homo sapiens
ttctacttttactagctactattatttgagctcctaccagttactaggcttgacatgttcattatgaaaatataaaaggatatgactatttcacatatggagtgaagtgaaaagtgcatatttataatcaaacagactggagttcaaatcctaggtctgctacttaccgtgtgaacttgggcaggttatttaacatctctaaccctcattctttgatgataataaccaccttgcagagtaacatgagaaatcagtgagacaagccatgtaaagcacctatcacagtgcccagcaggtaatttcttttcaacaaagaccagttccccacctcctgcatatccaacagcaagacagctcattgtgtgcctgagacccgggctccccacactcaccttgtcctcccyactgacagtccagagatgctgagatgttatgcaatttggaatgtgccttttcagacacaccagttaatcaccccaggcttgaccaccctctcaatctccgagcacacttacttcttaatcaacttcttcttgtctggattcacct

SEQ ID NO: 428541 - DNA, 547 bp, Homo sapiens
tcacacatttaatcaaaacacaacatcaagacatagcatttctcttcaccctctactcattcttatttgtgtctgaatatgctgtcattttctgayagattaatttataagaaagagccatatggactgtaagtaaaggagtgagcaagaagactggcatctattcctggctctaatatggatttattgagagaccttggacaagttacttgtcttatctggacctttggtttctcaattgtaagatgacagactaggttatccacgggtatgtaaagaaaatgaatgtgaagatgccaggttcaattggcgagaggcagggagagagttgggaaacacagagcctcttctttttctcatgctttccccttcacaaaggaatcttatggaataccattcagtggcatgaaaaaatatagaagacttatctttggaatgtacttttggagaagaaaataaaataaaattatacttggttatatcttccctttacctattacagccatgtgctaagcaagacaaaggaactgtatcacctagatgtgaa

SEQ ID NO: 428542 - DNA, 552 bp, Homo sapiens
tattggcataaaaactgagatatagaccagtggaacagtrtacagaacccagaaataaatccatgtatttatagccagctgatttttaacaaaggtgcgaaaatacacattggggaaaggccagtcttggaataagtggggctgagaaaactagacatccacatgcagaagaaagaaaaccttatctctcaccatacacaaaaatcaactctaagtggattaaagacttaaatgtaaaaatcccagactatgaaactactagaagaaaacacaggggaaatatttcataaaatcaaacagggcaaggattgttaaaatacgacttcaaaagcaaaggcaacaaaagcaataatagacaaattcgattatatcaaactaatgagcttctgcacagcaaagaaaacaatcagtaaagtgaagagaccaacctacagaatgggagaaagtatctgcaagctatatgtctgacaggggttaatacgtagaatttataaggaacttcaactcaatagccaaaaagcaactaatcaggtttaaaatggggaaaagact

SEQ ID NO: 428543 - DNA, 547 bp, Homo sapiens
tcacacatttaatcaaaacacaacatcaagacatagcatttctcttcaccctctactcattcttatttgtgtctgaatatgctgtcattttctgacagattaatttataagaaagagccatatggactgtaagtaaaggagtgagcaagaagactggcatctattcctggctctaatatggatttattgagagaccttggacaagttacttgtcttatctggacctttggtttctcaattgtaagatgacagactaggttatccacgggtatgtaaagaaaatgaatgtgaagatgccaggttcaattggcgagaggcagggagagagttgggaaacacagagcctcttctttttctcatgctttccccttcacaaaggaatcttatggaataccattcagtggcatgaaaaaatatagaagacttatctttggaatgtacttttggagaagaaaataaaataaaattatacttggttatatcttccytttacctattacagccatgtgctaagcaagacaaaggaactgtatcacctagatgtgaa

SEQ ID NO: 428544 - DNA, 552 bp, Homo sapiens
tattggcataaaaactgagatatagaccagtggaacagtgtacagaacccagaaataaatccatgtatttatagccagctgatttttaacaaaggtgygaaaatacacattggggaaaggccagtcttggaataagtggggctgagaaaactagacatccacatgcagaagaaagaaaaccttatctctcaccatacacaaaaatcaactctaagtggattaaagacttaaatgtaaaaatcccagactatgaaactactagaagaaaacacaggggaaatatttcataaaatcaaacagggcaaggattgttaaaatacgacttcaaaagcaaaggcaacaaaagcaataatagacaaattcgattatatcaaactaatgagcttctgcacagcaaagaaaacaatcagtaaagtgaagagaccaacctacagaatgggagaaagtatctgcaagctatatgtctgacaggggttaatacgtagaatttataaggaacttcaactcaatagccaaaaagcaactaatcaggtttaaaatggggaaaagact

SEQ ID NO: 428545 - DNA, 552 bp, Homo sapiens
tattggcataaaaactgagatatagaccagtggaacagtgtacagaacccagaaataaatccatgtatttatagccagctgatttttaacaaaggtgcgaaaatacayattggggaaaggccagtcttggaataagtggggctgagaaaactagacatccacatgcagaagaaagaaaaccttatctctcaccatacacaaaaatcaactctaagtggattaaagacttaaatgtaaaaatcccagactatgaaactactagaagaaaacacaggggaaatatttcataaaatcaaacagggcaaggattgttaaaatacgacttcaaaagcaaaggcaacaaaagcaataatagacaaattcgattatatcaaactaatgagcttctgcacagcaaagaaaacaatcagtaaagtgaagagaccaacctacagaatgggagaaagtatctgcaagctatatgtctgacaggggttaatacgtagaatttataaggaacttcaactcaatagccaaaaagcaactaatcaggtttaaaatggggaaaagact

SEQ ID NO: 428546 - DNA, 509 bp, Homo sapiens
actaagcccctgattcatcactggagatgcccaaacttagcattttcagtggctggcacactctgatgaggagcagaggtgagatgctcagcatagggctgggcgcatagtgggtgtccagtgaccactaatgaatgaacygattttcttgcctcctccttgtgtctgggtcaccaagtcccattcattccacctcctgcctcctaatggaatctgtctcttttgctccaacccaggtgttcattgggaccaggccaccatcctctccattaatgactgaggcagtttctcacttggcctgcctgcctgtaaaggcaaatccactcatggcttctggttcaaggaacatgacataacagaagacaacagaacaaaatgcaaaaaaaaaaaaaaaaaaaaaaaaaaaacacaaaaaaaccccaacacccaaacagccttcaatggctcccagctgtcttcagcataatacccagctcttaggcacagcatttgataaccccctgagttca

SEQ ID NO: 428547 - DNA, 509 bp, Homo sapiens
actaagcccctgattcatcactggagatgcccaaacttagcattttcagtggctggcacactctgatgaggagcagaggtgagatgctcagcatagggctgggcgcatagtgggtgtccagtgaccactaatgaatgaaccgattttcttgcctcctccttgtgtctgggtcaccaagtcccattcattccacctcctgcctcctaatggaatctgtctcttttgctccaacccaggtgttcattgggaccaggccaccatcctctccattaatgactgaggcagtttctcacttggcctgcctgcctgtaaaggcaaatccactcatggcttctggttcaaggaacatgacataacagaagacaacagaacaaaatgcaaaaaaaaaaaaaaaaaaaaaaaaaamacacaaaaaaaccccaacacccaaacagccttcaatggctcccagctgtcttcagcataatacccagctcttaggcacagcatttgataaccccctgagttca

SEQ ID NO: 428548 - DNA, 582 bp, Homo sapiens
cttgttgctgctttattgaaacttcctccctgtcgcacacaaagcaattacacaagggggtattgccagggagctcttgcagagccttctccctctgtaccccccgacagtccccagagaccctgcctccgtggcctccacctctgggtcagctccctggaggaccccgacacacagggaagcaggcacaggagggctgttggggccaaacctccccagctgccacaaccgccatgaccccagtggcagggtcagtgcccacaagggggttgcctgctttgactgaactaacctgtgggtttagtccaacgaacagatgtgcctgatttcagggctgaatttttgcttgaccacaagcctcgggcagaacagattcgcctatgactgaatcgactgaatggatggccagcgacagcctggcctgggaatggactggcagctcatcactaaaatgactcctttcatggaatccactgytatgcagccacactgaccacagagcaactgaataggtgagcattggattgttgatgacaactcttcagcagaacaattgtgtgtttgaagggactgttttatgat

SEQ ID NO: 428549 - DNA, 562 bp, Homo sapiens
tctaactgatggtggacatatttacgtgagtccaccagtctgatccctaaaatcttcctaagactttcaacctccataaatcatttttggtagcagccatcttgtaattaccacagagtccaaagtggagaaggcccctctgcagactccatgccccagggaaggtcagttgaacaagtccctctcgggagcagggctgaggtttcacctagtgtctgtcagccagatggttatgacctctggttccaggagacaatctctggcatttgcttagtgggaaggatgggattccgggtaaacaacagtcaaatgatttatgagggggattgcagggggcaggggttgtccctggaggttactgaaaaccacttctgcagatgggggcagtgggaggaagggatgtatgtgtgtccccttccccatgayactttagggcttcttaggatcaggtgggtgactttggggtggtgatttaacctctcagtgcctcagttttgccacctggaagtcagagtggatggaccttccctgatagggcagttatgagggccacagcaagcgc

SEQ ID NO: 428550 - DNA, 562 bp, Homo sapiens
tctaactgatggtggacatatttacgtgagtccaccagtctgatccctaaaatcttcctaagactttcaacctccataaatcatttttggtagcagccatcttgtaattaccacagagtccaaagtggagaaggcccctctgcagactccatgccccagggaaggtcagttgaacaagtccctctcgggagcagggctgaggtttcacctagtgtctgtcagccagatggttatgacctctggttccaggagacaatctctggcatttgcttagtgggaaggatgggattccgggtaaacaacagtcaaatgatttatgagggggattgcagggggcaggggttgtccctggaggttactgaaaaccacttctgcagatgggggcagtgggaggaagggatgtatgtgtgtccccttccccatgacactttagggcttcttaggatcaggtgggtgactttggggtggtgatttaacctctcagtgcctcagttttgccacctggaagtcagagtggatgraccttccctgatagggcagttatgagggccacagcaagcgc

SEQ ID NO: 428551 - DNA, 362 bp, Homo sapiens
tgggagaccaggttctgggcccgactgcccctagatcagtgtggaccttggacttcacatctgcagaatgagtgactttaaytggatggtcttcaagttccctctcagctcagcactcaggtctctgtgtctctgcatgctgtgtcccctctgcctcctaaatgaccagtggctttccagctataccagcctcctgccaaaggaagcgtgtgatcctgtgttgggagacgctggggaaaatcccttgtgggtctgggactctgcaggagctgtttgtgcccctccccatgcaaatttgcatctgtctcaagcttgcacccctttcctggttctgcaacactgcccttcctgagtcattgacg

SEQ ID NO: 428552 - DNA, 362 bp, Homo sapiens
tgggagaccaggttctgggcccgactgcccctagatcagtgtggaccttggacttcacatctgcagaatgagtgactttaactggatggtcttcaagttccctctcagctcagcactcaggtctctgtgtctctgcatgctgtgtcccctctgcctcctaaatgaccagtggctttccagctataccagcctcctgccaaaggaagcrtgtgatcctgtgttgggagacgctggggaaaatcccttgtgggtctgggactctgcaggagctgtttgtgcccctccccatgcaaatttgcatctgtctcaagcttgcacccctttcctggttctgcaacactgcccttcctgagtcattgacg

SEQ ID NO: 428553 - DNA, 362 bp, Homo sapiens
tgggagaccaggttctgggcccgactgcccctagatcagtgtggaccttggacttcacatctgcagaatgagtgactttaactggatggtcttcaagttccctctcagctcagcactcaggtctctgtgtctctgcatgctgtgtcccctctgcctcctaaatgaccagtggctttccagctataccagcctcctgccaaaggaagcgtgtgatcctgtgttgggagacgctggggaaaatccctygtgggtctgggactctgcaggagctgtttgtgcccctccccatgcaaatttgcatctgtctcaagcttgcacccctttcctggttctgcaacactgcccttcctgagtcattgacg

SEQ ID NO: 428554 - DNA, 619 bp, Homo sapiens
ggagggttggtgttaattcttctttaaatatttggtagaattctcctgtgaagcctggtctggtcctggtcctggacttctttttgttgagkggttgttgattactgattcagtctctttagtataggttataggtctgttaggttttttatttcttcatgacttagttttcatatgttgcatgtttctagggattatccatttcttttaggttatccaatttattgacatataattgtcatagtattctcttataatcctttgaattcctgttgcattagttgcaatggcctctcatttctaacgttagttatttgattttttatattttttcttagttaatccagctaagaacttgcaaatttgtttatcttttcaaaaaacgaactcttagttgcattgattttttctattgtttttctattctctatttcatttatttctgctctaatctttattctttccttccttccctaactttgggttttgtttgttcttatttttttccttgaggtgtaaagttgggttgttgatttgagatctttcttcttttaatgtaagcatttacagctataaacttctccattagttctgtttttgttgcttcccataagttttg

SEQ ID NO: 428555 - DNA, 313 bp, Homo sapiens
agtctctttagtataggttataggtctgttaggttttttatttcttcatgacttagttttcatatgttgcatgtttctagggattatccatttcttttaggttatccaatttattgacatataattgtcatagtattctcttataatcctttgaattcctgttgcattagttgcaatggcctctcatttctaacgttagttatttgattttttatattttttcttagttaatccagctaagaacttgcaaatttgtttatcttttcaaaaaaygaactcttagttgcattgattttttctattgtttttctat

SEQ ID NO: 428556 - DNA, 576 bp, Homo sapiens
aatgaatcttttctgatagggtccccatctgatgacagaccatcaccctaagaggactgagtctgtgtcatccccacccctcttcccctgtccccagtactgggttctcagcctctgcccagaacctgggagtgggggtttcattcctcccrtccccagggggaagggagctgctccccactgctccctaatgcagctcatctgtcctcgtctccacccatgaggcctggcagtctgctcccaccccccgcccccgccagcctctccttccctgagcccgcgctctgctccacgcaggcttggttcagatcctccaagtcactgcacctctcctgcttcagagccctcacacatgctgtttcctctgcctgaatccactgcccccccaaccttcacaaactaggaatccaagagcgccaggaaggctgacaaggacagcaattcggcagttctgcatggggccaatagcagtgacagcggaggcttccccagcagagctgggctgcaggcttcgggtcccacttggtgcccaagctcacattatggtgctggggagagacctcaagcagctgttaa

SEQ ID NO: 428557 - DNA, 549 bp, Homo sapiens
gtctttgtgggatggtttctattcctaatccagctttttaaatggttatatgattgcacaacttttaaaatgtctttttgagtcagtttgcataagtcgtatttttataggaatgagtcagtgtcatgtgctttcaaatgtactgttataaagttgttctggatatgtttctatttatttatttaatctctgtagcttctatgayatgatctgtttcctattattaatgctgtctctttgtgccttctcttgctgtttatgtttttcttttctcatttcagtcatgtgtgggccttctctttatttagtcttttccaagaaccagcttttggcattgttgatcttgtctattgtatgtttgctttaccttctctatgccttagtttccccatctataaaaatagggacagtaacaatatgcattccttatacttgtgaagatgaactgagctaatacatatcagaatggtgcttggcacataattgttttatgtgtttactttcacttctatttttgttaataattgatttctctcaaatttctcttcc

SEQ ID NO: 428558 - DNA, 549 bp, Homo sapiens
gtctttgtgggatggtttctattcctaatccagctttttaaatggttatatgattgcacaacttttaaaatgtctttttgagtcagtttgcataagtcgtatttttataggaatgagtcagtgtcatgtgctttcaaatgtactgttataaagttgttctggatatgtttctatttatttatttaatctctgtagcttctatgacatgatctgtttcctattattaatgctgtctctttgtgccttctcttgctgtttatgtttttcttttctcatttcagtcatgtgtggrccttctctttatttagtcttttccaagaaccagcttttggcattgttgatcttgtctattgtatgtttgctttaccttctctatgccttagtttccccatctataaaaatagggacagtaacaatatgcattccttatacttgtgaagatgaactgagctaatacatatcagaatggtgcttggcacataattgttttatgtgtttactttcacttctatttttgttaataattgatttctctcaaatttctcttcc

SEQ ID NO: 428559 - DNA, 544 bp, Homo sapiens
aaaggagtggggagaaagcgaagcctggaaagggaatagcagggtgaaaatgaggcatgggggcaggaaactacacagcatcttctggaaagggcaaatgggtcgagacttgtcttatagcaggtgctcagaaagggtttgtggttatctgactgtgagtgcatttggctaaggacacgtgctcaggggattgcttagaagcgaggctggagaagtacatcagggccgaatcatgatgggccttaatgcctgacaaatggactaaatgcagagggataaaatattgagaaacytaaatcctaaggaataggcagagaaagaaagtcctgctgagaagactgaggaagagtggactgagacacaggaggagactgcgagagaccttggtgagggcaggcttagcggggccaggtggggtaatcgccaagagcatctcctaccaaacagccttgtactcaattggggaactggtgagggacatgctgagtaacttaactgacaggatactgagcatatttctatattaagacaaatatgaatatct

SEQ ID NO: 428560 - DNA, 434 bp, Homo sapiens
gggaggggtgaagcacccggcactgggcctgggactagggagcgccatccctgtccattttcattggtgtcacaaggacacagcacycacatgtcctcggccagccaggagtcctcaccgggcagatgggaaactcttacccctcaggggactgggggtttcctttggagatgccctcccagacacaccccaaagacttcctcacttcagaggttcccagctgcctcaggttagggcaggcccagtccacagagcaggggaaagaggaggggaggaacatctacgggaccactgatggggaggatggtggtgcctatggggaccccgcccatcacaccctctgagagaagcctctgggcggtgggcccaggggccgagtcctcctcaccacaggacacaccctggcccttgttactagtggagtcatcaaataa

SEQ ID NO: 428561 - DNA, 602 bp, Homo sapiens
cataccgggtggcacaagtgaatactgatttgctgacaatggcctagagaaaaacagtccattcaagagaaacaattgtttccaactkcccaaccttcccaggccttggttttccctgtgagtcactgagttttgggcatcacatcaggtaaacaagaactcagttgtacattcacagagaataagggtgggttgtgtagacagtgcctcagttttctcatctataaaatggtcctaagggtgtgagatgatgggggctctcattttattgcttgaaacctttttaaacgaacatactttgttgttctgagaaaataaggcaccatgcaagtctaaataaattaattaaatgaggataagagtaatgattgggtttcagtgagggttaaaggagatgaaacaatacccacagcacagggccaggcacgtgctgagcacacaatgcccatagtttccactctgctccaattattgtggctgatgatggtttggttgtcactgctggaaatcagggttcttggcaaggtattgattgtgtgactttggacataggggccaacctctctggttcatttataaaatcagaacaatagtctcccagc

SEQ ID NO: 428562 - DNA, 602 bp, Homo sapiens
cataccgggtggcacaagtgaatactgatttgctgacaatggcctagagaaaaacagtccattcaagagaaacaattgtttccaacttcccaaccttcccaggccttggttttccctgtgagtcactgagttttgggcatcacatcaggtaaayaagaactcagttgtacattcacagagaataagggtgggttgtgtagacagtgcctcagttttctcatctataaaatggtcctaagggtgtgagatgatgggggctctcattttattgcttgaaacctttttaaacgaacatactttgttgttctgagaaaataaggcaccatgcaagtctaaataaattaattaaatgaggataagagtaatgattgggtttcagtgagggttaaaggagatgaaacaatacccacagcacagggccaggcacgtgctgagcacacaatgcccatagtttccactctgctccaattattgtggctgatgatggtttggttgtcactgctggaaatcagggttcttggcaaggtattgattgtgtgactttggacataggggccaacctctctggttcatttataaaatcagaacaatagtctcccagc

SEQ ID NO: 428563 - DNA, 602 bp, Homo sapiens
cataccgggtggcacaagtgaatactgatttgctgacaatggcctagagaaaaacagtccattcaagagaaacaattgtttccaacttcccaaccttcccaggccttggttttccctgtgagtcactgagttttgggcatcacatcaggtaaacaagaactcagttgtacattcacagagaataagggtgggttgtgtagacagtgcctcagttttctcatctataaaatggtcctaagggtgtgagatgatgggggctctcattttattgcttgaaacctttttaaacgaacatactttgttgttctgagaaaataaggcaccatgcaagtctaaataaattaattaaatgaggataagagtaatgattgggtttcagtgagggttaaaggagatgaaacaatacccacagcacagggccaggcacgtgctgagcacrcaatgcccatagtttccactctgctccaattattgtggctgatgatggtttggttgtcactgctggaaatcagggttcttggcaaggtattgattgtgtgactttggacataggggccaacctctctggttcatttataaaatcagaacaatagtctcccagc

SEQ ID NO: 428564 - DNA, 602 bp, Homo sapiens
cataccgggtggcacaagtgaatactgatttgctgacaatggcctagagaaaaacagtccattcaagagaaacaattgtttccaacttcccaaccttcccaggccttggttttccctgtgagtcactgagttttgggcatcacatcaggtaaacaagaactcagttgtacattcacagagaataagggtgggttgtgtagacagtgcctcagttttctcatctataaaatggtcctaagggtgtgagatgatgggggctctcattttattgcttgaaacctttttaaacgaacatactttgttgttctgagaaaataaggcaccatgcaagtctaaataaattaattaaatgaggataagagtaatgattgggtttcagtgagggttaaaggagatgaaacaatacccacagcacagggccaggcacgtgctgagcacacaawgcccatagtttccactctgctccaattattgtggctgatgatggtttggttgtcactgctggaaatcagggttcttggcaaggtattgattgtgtgactttggacataggggccaacctctctggttcatttataaaatcagaacaatagtctcccagc

SEQ ID NO: 428565 - DNA, 517 bp, Homo sapiens
gtttatgttaaccttagaaaatagggcttgggtttagccacaggggatggaagatggccttagccacatggctgtggaagggaaggaggtagggatggccctagtcacactgggcctgtgtaaaagggccaaggagcacttgcccctccaagggcacttgtctctggggctgtacttgccacaaacctaatcctctccattacatagctctgcaggctaagttttcaggagacagcacagacggaaaagctccataaagctgttctgatcctcttagcactttgtgcaaggagcacagataagacttttgattctgggaattactggaagaaaaaatatacctttgtctgaatcactcatgctgccagattggagaaacctgaatcagtttgatgttgttcrtaacaacaacggtagtaatagtaataatgaaatctgtccccaccatttgtttacctactctgtaggaggtacagtgcttgaaggttggcatccgtgatctcattccattttcaca

SEQ ID NO: 428566 - DNA, 575 bp, Homo sapiens
agtctcctggaattgcatttaggatcctgactcaatatgtattttcattctggtgtttcttttggtcctattccatgmgttggatagctgaacatggacagatatacaatatgaagtctctttggtttccatagtaacacattatttatctggcattgtcagctcattaactgttccacccaagtgaattttccaactaatcgaagcatttctcattaaatgccaaacagtttgttgtttaatggaaatctttcctaatggattacccacgcacctctgtcttccgaaggagggctgtcttttcacaatactgcttggacttcattgtgagtttttggatggtgctgtcatatatattactacatacccagggtgtgttgaactctggactaattgctctaagctgttaaattttttgagtccctgggtctccgcactttctcctgagtagttcccagtttatctgcctccatctcctttcctgatctcaatttgttgtgtctagtcaactccagactaggaaatctgataacgaagcttgtgaaaagtacgtataaacagcttctgagtgaaaa

SEQ ID NO: 428567 - DNA, 605 bp, Homo sapiens
tttatactatgtgtataatgtgtgtataaaaaataaattttgtgtttagatttaggtcccatccctaagatatctcattgtttgtatgcaaatattctaaaatctgaaaaaatccaaaatctaaaacacttctaattgcaagatttttggataagggatactcaacctggactatccaagtgctggctttaagtgggatgttacaaggccttcagaaaggtctgttcaatcatttcttgttcactgccaggcactgagcaaagcactggccacctagatagacatagtccttgcttttgggatactgaaagtctagatggaaaaaaacttagaaatatgcagataaacttgaaaaatggtatagaggggtgcatgactaggttctgcatagcacagagaagggaatgatgtctgcttagaagaatcaaagaccataagcaagaggagataatttgccctccctctacctcccttttaaaaattcatttatgtctttctgtatttctcttgttcctatagtcaataaacacttattcaatacaaactatattcctttcactgarattgcagtagcatataaagcagatataattcctgttctcatt

SEQ ID NO: 428568 - DNA, 570 bp, Homo sapiens
atatggacatgcagcgatacctaagtgactgtttacagttccccaaattagtatggctccctggggcagaaaaatcttttgtctacatttctaatgtctactcatccttaaaactcaactcaaaagtcagtatcccttgscaacctgagatgttcatttctgttgccctcctactcgctcttatgaggtgctctttctatggagtcccgtaaaactccgggcatacctcagaagaaacacttgtcatttgacagaggaatctttgagaattgaactctttttaataaaaattctcccattttgcacatggtatagaattttaagagtgcaaaaagatgtacagtaaaacatcctgcttgcccctgacttgaaaccaccagttccccttctctggtgtagacactgttcccaattttggggcatctcttttatagatattttataaagatgtatatttatacatgtaagagtatgcatacataatgcatattatacattccatatgtatctgtgtataagaacacacaagcacatttttgtttttgcataaattatattgttgtatacaca

SEQ ID NO: 428569 - DNA, 572 bp, Homo sapiens
agagtaggatggctgcacgtttttagggcttgcccaatttgcccatttataatggagggctccacagacatcacagccattgaaatcctatgtaaaatagagaaaggctaagacaatactacacactgctttttgcargaaaataattttctatgtaaaagtatagttgtctaattcagtggtcaaccaattaagagaaccttcaagttagacctaaatatttggctttgaaagacgttcaagaggtaccagttttgttgttggttaatattcattgagctgtctcaatgttgaggttgctgcccacactgaaattttatgacaaaagcaaaagtaacattttaattggctaactccctttcccctagactcttaaattacattaaagttctcagttcatttaaagctttttgtgtttttcagttatttttacagacatattatctgggtttccttaccctggtggtttgtagaggatcggtgctaggctgcaggttatgttaagactcacctagggagattcaatagtttagagacaggggtcgaaaaatcattattttttttaacatgct

SEQ ID NO: 428570 - DNA, 192 bp, Homo sapiens
ttctcagttcatttaaagctttttgtgtttttcagttatttttacagacatattatctgggtttccttaccctggtggtttgtagaggatcggtgctaggctgcaggttatgttaagactcacctagggagattcaatagtttagagacaggggtcraaaaatcattattttttttaacatgctccccagct

SEQ ID NO: 428571 - DNA, 456 bp, Homo sapiens
atagcccctattgatcaaatcgggaggagaatagcttttgaggtttgccctcctaaaagaggtcgagaaagataagggttggagttttctaaaacatgcttggtttgctcaaattggataaaaccatataaaaacacttatgttcttagagaactggtgaccaattcaggaaaacctcacaaaatgaaaagactggcttggattagtgaggcatgtgaaatgcagtgtctttctaagagcatggtaaatgtgttatttcaaatacagacagtgacttagtagctaaccaagtacatccatgcagaggatggccactgtctgccttactagacaaaggagaggtatgaaagcccttgagtctctatgctggacactgtacaggagtcttttggtccattagttaatcattayctcagtcctttgctgctcccattttatggatgagaaaatagaagt

SEQ ID NO: 428572 - DNA, 516 bp, Homo sapiens
aatctttggtgtcatgcttagaaaagccttccattctccaagatgatcaaaacagtcacttatattttctttaaggtgttataagtaatcacttccttttcagtctgaatcaaattgagcaatatttccacccctaggaagggcagcagattagtctggtgccagagacaacttttctccacaacctagactcagggaatctccaagttgaatgacctctagaagtcgtataatgtgagctcctggctgataacgtgattcccgtcttccagaagcctgataagtggtggttcctcgcttctgtactactggtgggagtataaactagtacaaccactatggaaaaaacagcatggagattccttaaaaaactaaaaatagaactaccatttgatccagcaatcccattacccagaggaaaagaagtcattatacaaaaaggatacttacacacacatatttatagcagcacaatttgctrttgcaaaaaatgtggtatcagtccaaatgcccatc

SEQ ID NO: 428573 - DNA, 522 bp, Homo sapiens
tgttttatcatgcaattcttgtgtgctgggaactggctaggctctatggttaataagaccgtgatgaaaagatgccttggggttcctcaatgtagtcatatatgagtggttctgtttttagttgtcaccatgatgagggtgtgcagttgacatttattgaataggggtttaggatgttaaacacgctaccatgtgctagcaatcctgctggagraggaactttcctaccaaaaatgctaataatttctgacctaatgtcagaaacacagtgaagtggggaagctgtgagaagtgcactgtggagtcctcagcagatatgcatggtacatgtcaccaagggtggcatctggtttgtgtgccacactctccccaaaacaactgcacagcttctgcccttcctctcccctctgcagccttgctctccatcaaggcccaatgcaagcaccccctactctctcacaccttccctgatttctagagctggacaggttcaccccctcctgagcataaaacagccctttc

SEQ ID NO: 428574 - DNA, 522 bp, Homo sapiens
tgttttatcatgcaattcttgtgtgctgggaactggctaggctctatggttaataagaccgtgatgaaaagatgccttggggttcctcaatgtagtcatatatgagtggttctgtttttagttgtcaccatgatgagggtgtgcagttgacatttattgaataggggtttaggatgttaaacacgctaccatgtgctagcaatcctgctggaggaggaactttcctaccaaaaatgctaataatttctgacctaatgtcagaaacacagtgaagtggggaagctgtgagaagtgcactgtggagtcctcagcagataygcatggtacatgtcaccaagggtggcatctggtttgtgtgccacactctccccaaaacaactgcacagcttctgcccttcctctcccctctgcagccttgctctccatcaaggcccaatgcaagcaccccctactctctcacaccttccctgatttctagagctggacaggttcaccccctcctgagcataaaacagccctttc

SEQ ID NO: 428575 - DNA, 522 bp, Homo sapiens
tgttttatcatgcaattcttgtgtgctgggaactggctaggctctatggttaataagaccgtgatgaaaagatgccttggggttcctcaatgtagtcatatatgagtggttctgtttttagttgtcaccatgatgagggtgtgcagttgacatttattgaataggggtttaggatgttaaacacgctaccatgtgctagcaatcctgctggaggaggaactttcctaccaaaaatgctaataatttctgacctaatgtcagaaacacagtgaagtggggaagctgtgagaagtgcactgtggagtcctcagcagatatgcatggtacatgtcaccaagggtggcatctggtttgwgtgccacactctccccaaaacaactgcacagcttctgcccttcctctcccctctgcagccttgctctccatcaaggcccaatgcaagcaccccctactctctcacaccttccctgatttctagagctggacaggttcaccccctcctgagcataaaacagccctttc

SEQ ID NO: 428576 - DNA, 556 bp, Homo sapiens
acagtgccaggcacatggcaaatgctatggcatacttaagcatcttcctctgtggtgcctcgtcatcaccatgtgattgtgccttgcttgttcctgtttcacttttcagagggagaaaagtggccaactttaagaatcaaaattctgatgttacttcaggaaatgcatagagccagagagacacaatttgacttagtatgatccacatcatcccctcaggytgaatagtggtggcatgcacatctataccaaaatgttttaccttttttgtagaaggaaaatatttgtatcttctattccatatcttagatctttataagagcacttaagttcaacctcctaagaaactgccaattttgttgatcacgatagtctgcacagattttcgtactatttagtgttgggagtgccttagggaccatcaacaacaggcccctccttttatccatgagactactgaggccttggaggttatttgtccatccatggcgggtgcacactagaggttatctggttagtagcccaactaagattagaacccaggaattttgattta

SEQ ID NO: 428577 - DNA, 556 bp, Homo sapiens
acagtgccaggcacatggcaaatgctatggcatacttaagcatcttcctctgtggtgcctcgtcatcaccatgtgattgtgccttgcttgttcctgtttcacttttcagagggagaaaagtggccaactttaagaatcaaaattctgatgttacttcaggaaatgcatagagccagagagacacaatttgacttagtatgatccacatcatcccctcaggctgaatagtggtggcatgcacatctataccaaaatgttttaccttttttgtagaaggaaaatatttgtatcttctattccatatcttagatctttataagagcacttaagttcaacctcctaagaaactgccaattttgttgatcaygatagtctgcacagattttcgtactatttagtgttgggagtgccttagggaccatcaacaacaggcccctccttttatccatgagactactgaggccttggaggttatttgtccatccatggcgggtgcacactagaggttatctggttagtagcccaactaagattagaacccaggaattttgattta

SEQ ID NO: 428578 - DNA, 566 bp, Homo sapiens
acattacctacatcagctcagtaattttaaaattcaaagcctatgacaggtgtgttttcctaggttcaatataaatatgtgggaagtagagctgagagggtgatttgcctgaagtcacaggtttaaaatttgacaagacatcyaggactagcatcaaagacccttaagttcaagtcattcatcaagggggactgcctttggtttctgctcttggctcaaactaactgagatattagtacttctacagcctccccatctacctgcctccagatatagccgaacccaaggtgcagaatctattcacctaaccattgcaccatactgccctgctagggaggagtatgttgggccatggactctgactcagaattatggaaatattccataaagatagttttttaataatctcagcattcctgattagaaaaccagttggccaacagggcacccttctagggagccgtggctgtccttggtacactgggaaagggtcctggagacaaagcccagttctcctctatgccctccagcttctgagaaagggtttcttctccttctgcagtgtt

SEQ ID NO: 428579 - DNA, 542 bp, Homo sapiens
atgaagttgctgcctatcgacagagagtgggccagtttggaaagtcactaagtgataggatctgacgccaagtacatgttcctgcctttgaatctgtatctgcacttctgggaaataatcttaaccacagaaaagactttgtgtacaaagatatttatctcactttgtttatagaagtaaaaattaaaaaacaaatgcccccaaacaggagaagtgattaaggaaaccatgcccgatatcatggtttgatggatattaaaatgaatgcctatggggaggctgaggcaggagaatggcgtgaacccgggaggcggagcttgcagtgagccaagatcgcgccactgcactccagcctgggcgacagagcgagactccttctcaaaaaaaaaaaaaaaaaaaaaaaagaatgcctatgaatatgtttctgcatggaaaagtagagtttctgactttatgctagaatgtagaatggtttgtgggttataatcatggttaaatgcacaartactgggagctgactacaaggattgaaattctagctc

SEQ ID NO: 428580 - DNA, 534 bp, Homo sapiens
atatgttaagtataatgacaatcaagtctccagcattgggatggggagtggggacagaagaagacaaatgcacaaagactctttgcacatataaaatttcatattaaaatataaaatatgaagttaataaagattatagcaactacttttacagcacctatttgcctaagttgatccagccactaagtagccargctgcatttacaacctagaacagtctgattctagaccatatgctccttgctctgaaccacattatttatccaaaaaagtgaatttacatcttctcttctctttccttaccggtcaatacaattgaggggcttttagctattcatgtattcatttactcactgaatgcctacttgcagtgtaacagctctgccctggcacgctgcaacttcatacatagccacatatgccacacagccagacagttaaacttcagcttatctgagtcttgggaaaacgtctgtgatcctcttggaaccccagagtatgtgaggcttatgaagagctgctctgaggtcatct

SEQ ID NO: 428581 - DNA, 640 bp, Homo sapiens
ttctattcaacatattactggaagtcttagccagagctatcaggcaagagaaagaaataaaagtcattcaaattggaaaagagtaagtaaaattattcctgttcattaatgacatgctctttattctagaaaaccctaaagatgctgccaaaagaatcctagacttgataaatgacctcggtaaggttgcaggatatgaaatgaatgtgcaaaaatcagtatcacttctatgaatcaataatgttcaagttgagaataaaatccataactcaatcccatttcaatagccataaaaaatacctaggaatatgtttaaccaaagaggtaaaagatatctacaaggagaactatataacactgatgaaagaaatcacacatgatagacacaagtggaaaaacatctcataagcatggactggaagaattaatgttaaaatgaccatacttcccaaggaaatctacagattcaatgcaatacctatcaaattaccaatgcaattttcacataattaggaaacaatactaaaattcatatagaaccaaaaaagagctcagatagccaaagcaatcctaagcagaaaraacaaaactggaagcatcatattacctgactttaaattatagtacaaggctagagtaa

SEQ ID NO: 428582 - DNA, 495 bp, Homo sapiens
tttttcttcgctgaactccctgcttatagacaagaaagcatttattttatgaacctgcaaccattcatgtttaggtcctgggtccaaacaagtataggcacatgaatttgcctcatggtttgtaaaacctcaccatttagggtactccagttgtaactcagcctttggctacatttcttaaagttctgaagccacctccctacagttctaattttaagaaaatctgcactcatcractctgaacttcacatcatctaggaaagaaaacaaacaaacaaaaaactccaccagcatatgctgccagcatgagttacagatgcctgctgtttcagcttctggataaagaggtaactgcagttcagtgacatagagctacaaaaaaaaaaaaaaaaaaaaaaaaagaaggacccccggaagctgctgggaaaatagaattactgacctcttgcctgcctctcactgggaaaaaatgtgacaagatgcttaagaccagca

SEQ ID NO: 428583 - DNA, 523 bp, Homo sapiens
caaatggtagtttaatacaaataaagtgaattgaaccaacaagtaggaatttaaaggttaaaaaagaaaatctgactcctcctcctcctttctgacaaatcagaacatgcacttatttttggtacttattgtaccaaaaagggatccgtcaactcctagtccaatggactccttactgacctccatagcagcctggctcaagggagatggcctgacatcttggttacaagaaactctatgcctttccattatcytgtcaaaatgatacaaaggtatctgcaattaaactctaaagccagaatctcacactgaacagtatctttaaagggagttaatctcttcatacagtccttgtattcttctaatcaatgtgactctggcatgtggctataaagatgagtgtgttcaccctaattcggctctcctaagacagaaatgccactgctatcctgtggagtctgcacactacctctgccaaggtattttctttatcatggtcttgtttgaactctttttctgggaa

SEQ ID NO: 428584 - DNA, 569 bp, Homo sapiens
tgcagaatgtcctgggggaaagtaaacaggttgcagcatgtggtactcttggcatgcaggaggtccctgtcttagtccatttgggctactataacaaagtaccctagactaggttgcttaagaacaacagaaatttagttctcaaagttctggaggctggaaagtcctagattaaggcgctggcagattccatgtctggcaaaagcctgcctcctggtccattgatagttgccagaagaggtaagggagctctccagggcctccttttttgtttgtttgtttttttgaggtggagtcttgattttttcacccaggctggagtgcagtggcgcgaccttggctcactgcagcctccgcctcccaggttcaagcgattctcctgcctcagcctccagagtagctgggattacaggcatgtgccaccacgcctggctaattttcgtatttttagtagagacggggtttcaccatgttggtcaggctggtctcgaagtcctgacctctgatctgcccgtctcagcctcccaaagygctgggattacagaggtgagccatcttgcccagcctcc

SEQ ID NO: 428585 - DNA, 593 bp, Homo sapiens
caatctcatgggaccaagcccttaacttgtaggatttagatgttatctccaggtagatagtgtcataattgagttaaattataggacacccagctggtgtccatcaagaagtggagaattattaatacttggtgtgggacaaccctctctctcccatatttggtcaaagaagtgttctgtgttcagtgtgggcatggagaaaaacagttgctttttcctatacaagtcaggagagtggcaggtgtggggaggtagacggaggaaatctggcacaatgtataatttgactttctcatgattactcttttaggtggatattactgtgcttacttttaatagcaaacagaggcccagagttgttcagtcacttgtccaagmtcacacggctcattagtggcaaagcctggactagagctcagattgtctgactcccatggcttgttccatgccacctgccataccagcctcctagggtgacagcctgctcatttctttggcttctggattcttcttgggaacgataagaccagggtgggaaagacctgcctttctgtagcagaatgaattctgcaaagtgcaggattggaagttga

SEQ ID NO: 428586 - DNA, 595 bp, Homo sapiens
gtcttttgcttctgaattatttcttctagaaaccaccaaccacaagctgtcacgctggtattatatctacataacgtttattcttcttacagcaaagagctggagaaatacaagtgagaacctgttattacaggttaaattgtgtaacactcaacttgcgctgaggtccagtttctttttattatgctccaattttgttgaatgactattgcctaaaataaatgggcaatcgacaggggcttagaamtaacagggatgcttaagtgacttttatggtagcagtatttgttgtaacagaatttgatctgtattctagttattagttttattcatcacattggaaagttggcacctccactgttcatgccattatatgcaaagcactgtagcatgaaagtcacttacaaagctgtgaaaaaaactctctgaacaccagaggctcatgaaacaataaaagtcagctagggggatatacactgtttgatttagctaaatattctggatggtcaaaggtttattccttttaattcctaaaagtttttttttttaaccattgggatgtaaatatttctaaaatgtttgatatacacatttt

SEQ ID NO: 428587 - DNA, 542 bp, Homo sapiens
tccactaggcaggtcaagaatatctattctttctctctaatctctacctgtcacctctctccttctcatttatctcttatattttcttccatttttttcccaccataatgttatccttaaccagtgattcaactatcttttggccaggtgtggtggctcacgcctgtaatcccagcactttgggaggctgyggtgggcagatcacctgaggtcaggagttcgagaccagcttggtcaacatggtgatacccccgtctctactaaaaatacaaaaattagccaggtgtggtggtgcgcacctgtaatcccagctactcgggaggctaaggcaggagaatcgcttgaacccaggaggcggaggttgcagtgagctgagattgcgccactgcaccccatcttgggcaacagagccagactgtctcaaaaaaaatttaaattaaattaaattaaaaaataaaattaggttctgaggcacagtctaatgcctccctccccacccccacacacaccctgtgcacaagagttcctaggggaagcagaaa

SEQ ID NO: 428588 - DNA, 542 bp, Homo sapiens
tccactaggcaggtcaagaatatctattctttctctctaatctctacctgtcacctctctccttctcatttatctcttatattttcttccatttttttcccaccataatgttatccttaaccagtgattcaactatcttttggccaggtgtggtggctcacgcctgtaatcccagcactttgggaggctgcggtgggcagatcacctgaggtcaggagttcgagaccagcttggtcaacatggtgatacccccgtctctactaaaaatacaaaaattagccaggtgtggtggtgcgcacctgtaatcccagctactcgggaggctaaggcaggagaatcgcttgaacccaggaggcggaggttgcagtgagctgagattgcgccactgcaccccatcytgggcaacagagccagactgtctcaaaaaaaatttaaattaaattaaattaaaaaataaaattaggttctgaggcacagtctaatgcctccctccccacccccacacacaccctgtgcacaagagttcctaggggaagcagaaa

SEQ ID NO: 428589 - DNA, 609 bp, Homo sapiens
acacacagacataaagatggcaataatagacactagggactactagacggggaagggagtggggcaagggttgaaaaactattaggtactacactcactacctgggtgataggatcaattgtaccccatacctcagcatcatgcaatatattaatgtaacaaatgaagcaagtgtacctcttgaacctaaaataaaagttgaaattataaaaaaaataaataaattcatagtccttaggcctgctggagacacttttggtgacatcatccattgcagttatttgtctgaatacatctaattccttacactcaatttgttcaatttatttgttaattcaacaagcatcaattgagagccaactgtatgtccagccstagtaataagagttaccaggtatttggcagttattaaatgttatggattggaactaagccccttataatcactgggtcattcaaacctcactgtatcccataagtactattaattatcccccttttaaagacaagaaaacagaagctgaagagtttacataaactacatcagtactctaacctaggtctttctgataccaaatcccatgctgttaatctccacattctaataag

SEQ ID NO: 428590 - DNA, 384 bp, Homo sapiens
aattaggtctgccgagcccaatggaggtcatactgtgattaaaatgggctgtgatgcctagtcacacaggtggagccagctgtgtgggcaactgtcaggggcaggatttccagcaccacacaatccaaaagaaaataaaaaatagacaatagcttattttctcagaaaatcttgattccatgggccatgaataattcccatcaaagcataccccaaaactagccctaaatctctgcaaaccacccacatgagattaattggatccatctcacgacagaagttattttgggsgaaatattacttacctctgaaaacataaataaaattattgtatttgcattacatatacctttgagaagtgtaaaaaagcaataacccagagtg

SEQ ID NO: 428591 - DNA, 615 bp, Homo sapiens
taggttccctgatataactttaaaatgtggagttaccctttaacattttttccctctttccattacctataccctctctgtgttcataaaccgtccacaaatcctatctttgtaaaaagsgttcatatacacttcctcctttacattttcaacgtctctcactctcattccaggctcttagcattttcatacctgttctttcttactccagtgcctcttatcactattctaataatatttctaaaatatcgtttggcttattttgctgatccaaagttcctgtggccttttccaatttagaacaatgtaaacaatcattcatactaaaacatatttattaatcacatatgaaatgtcaggcattctagctaggagctagaaataaaatgctgagcaaagcaggcgtcattcttctcacctacatttttaacattacctcatattactcataaaatcttctgcccaatgcagttaaatttctttttttggtcccaggaaataagatcttcaagtctttaattgtttcagctacttgacaatcactccctgtcttccctctgtttatctgaagctcattgtttatttctaagatggacctattctacgaagattcta

SEQ ID NO: 428592 - DNA, 569 bp, Homo sapiens
ttgtcaaatatgagatgtgtttaacttagagttacatttaatataaatatgttattaatatgttaaactgtatgaaattcctataattctgatgtcttaatgttatcggtaattatgattattatgctgtattgttgcatgccacagaaataatcaaatttccttgtcaattgtgtctttaaacatggcagtcctaaaattattgtcatccatagattattattttatcttgattcttctcaaaaagtggtttataatcagctacagtccaaatcttgtttctctaagggagttcacagaaaggtctctgctggtgctcttcaatgcaggtttctgacagcttcaaggattgtaccactggactaagaaaaaacttgcagtactctcagtggagagctgatgtattcatacagattgagaaccccaatgtcaaacaaaatgactcagttgtatgaaactgaactaacagaggactgaaataaatttttctgactttgcttttgtttgaaatgttgctgattcttttkgtttttcagagtcaaaaaaatttctcttttgagatatttgta

SEQ ID NO: 428593 - DNA, 579 bp, Homo sapiens
aactggattcatttacattgaaatggcaggcaactgcagcttcagacctcattatatggtacatatcaagtaatttaactttttcttgtaatgccgtggcttcttgggagcaatttcaacatcattagttgtactttgtatgggtcccatggtgttattcaaagtttatggtattacaataagcacaatgaaaaatacatgagaactgccagaaatctttttrctgtgatactcaacttactggagagaagaactgctcatgtggagatgattagcatcacacagcattttaagcagatactggcaacagttgagctcactccaaaagcaacaggaggtggctatgaaatttttttttattatactttaagttttagggtacatgtgcacaacgtgcaggtttgttacatatgtatacatgtaccatgttggtgtgctacacccattaacttgtcatttagcattaggtatatctcctaatgctatccctccccgcaacaggccctggtgtgtgatgttccccttcctgtgtccatgtgtcctcattgttcaattcccacctatgagtgagaacatgcg

SEQ ID NO: 428594 - DNA, 565 bp, Homo sapiens
ctcaagtatgaacaacacacattccccatttctttccaaaaggtacttgcagctatttattagagaaaatatatcctgtgctgaagcactatataaaccatctcagggctgaagaagacagataattgtggaatctgagctgctactgacacctgggaccagaaatataattgtaaactgtggttagataagtgcttatggaaggcaatagataaatcaaatcctaacccatcctcaccccacagtgaatccaaaaggtctatggacccatctgtgggttacctatccagtttctgagtgcatcattgggttggatatatttagcagctagtagaattctcacactggttccctaaacgataaataagaaacactatggtagcaaacaccatgaggaagcctcttaaattgcacctcatccccctgacaagataatcaataagaagcaatttcacatcctaggcagaatcacctattgtttgaacttataccaaagactkgccaaagaatatgacattttacaggcccacttataatggcagatctgtaggcaaggaaggagaaa

SEQ ID NO: 428595 - DNA, 606 bp, Homo sapiens
taacccttacctgcttattaattgaacaaggcaggtgccaggctgctctgaattatgctggcaggctgcagaatgagccatttcccctgttaataagtcctttagtgcaggagacatctctagcaagctttatatcaagaaataacaaaaaattcaattaatatgaaccctggggttaacttaaaaatttccttagcctattctaaaagtggagggttgaaagcaaagataagaaaaggaaaaaaaagtagaaaattgagcctactgatattaggaattaattcaagagaacgtttactgggttttgtctgaattccttagcctggtattcaaggtcactttcatgtccgcatgccttaccttggacattgtctctgtagccttggtaccagttgcatctgagcccctggagcaaggctggtggggcagcagggaagggagttggaggcttacttcccatttctgattcttttcatatttatcctcacagatattttcatttctgtttatcatctaagacccaaagaaggtttgggraacttgcccaagaaataagttagtgagtgactgaagtaggacttaatcccactcacatcctatttgctt

SEQ ID NO: 428596 - DNA, 624 bp, Homo sapiens
cattgtatatctgtttgtgcacttatttatatctgtgcactttatatagaaagagcaagattttaactcccccgaagcatcaatttagtccccaaagagaatgcatatggcataacatgatttacaacagttacgtgatcttctgttaaatagataagctgtaatttagataatcaagactaatattgaatatttgggttatttaaatgtttcactatttttttagctacattgtaattaacattgtacataatatatttgcagatacaaacatatgtttttatatgtctatactttttcttaggataaattcctcaaaataaaaaatcttgaccaaaggttatggatttttaaagttatttctgaaatattttgttaaactattctktagaagtgttgatacaaaactacactttaattagcaatatctgaatgtgcctttttcacttaattttatctaaatggactattaaaatgtataattttttataatttctacaaatgtcagcgaagtttagttttgaatctaattgcatccctactgcacctgatatttgtctaaccccatggcatggctcacatgacctgtcagggttcaaccccagacttttactccctgcatga

SEQ ID NO: 428597 - DNA, 615 bp, Homo sapiens
ttggctcagggttggggcccaatatctttcagtgttttgggcaacaatctcgatacctttattagtgcctgggaatgttcaaggccctggtttgagttcaagcctgctgggaaacacctgcagttggctgggcactttgtgatttttcagtcatgatgtagaaagaaagcaggggaaactaggggaccctacagatatgaccaggatgactgctttagtggaattttgtgttctcaggataatataaaaaactcaactcacaaccaaggaaacttgaaatgasctggggaaacatgtgtctttaaaaaactgtatcaaaggaagaaaactccaaattctaattcagaggctttctatgttgaagtatagacttttatgttcacatgtctcctaagatgattatatgatggtttaactatttgagaatgaagatattttattttttcttaagagaagaactatgacactgtataccaccttgtgaagcttaaaagcaaaaaagaaaacatattctcttaaccatttgtagttagaggttggttttctaaaataataatttatttaaaaattatgactttgtaatagaatttctattttcatatgaggaataaatgt

SEQ ID NO: 428598 - DNA, 587 bp, Homo sapiens
tatgtcctcacgtcccatcttcccctactttagtttgtggcctaaggacacaaacacttgggtctgtgtagatagacaataaaaacataggttgctgttatgttattcataactgccagtgtttattgccattcattaggtaaaaggcactgagatattctatctacatccattatctcatgtaatccttacaaacatgggatgggggaggttgtgttattatttgtactttatagatgaggtgactgaagtgcattcaagtggtgctgtctgcacaaagaataagaatattattatttttttttctgacttccccagtgctgagtcaagatagagaggagtagaagggcacttaattcagaaacactttatgagtggaaattttaaaaattgccttgaaatagatgaatgatggaagcagctgtaaagtcacagcattattttttgtggaatgaagagagtgacagtgagaattaagacctagcattggtgaaggggaagatagaagcaagagccatgtgggccatgagtggagagaggaaaaataattgagtyaccataaaaataaactgagctgaaataataac

SEQ ID NO: 428599 - DNA, 542 bp, Homo sapiens
agagactatttacaaaggtaagggcagggtttccaaaaccaataacggatagtgcagcgccatggacttggwtttttaggcctgaaaaagggaggaaagagaacagttacatgaatttgtaaggagataatcatgtagaaaggtcctccttaagagataatgtaatctatagatgaaagacacagctagccctaggcaaccttacaaggaggcagctagaggaaaacacacactatccttgttctcttctttctctgatctcctgccagggcttccattggctgaaacaaccagaaatcagacaagagggcctattaatgtattccatacagatcagcctcctgcagtactaaataaaatagaaattagaagaaagtggatatggaagggcaaacctgaagttatctgctatagtgtgagctagtgccagagcaagaattgtccagatatctagtggccaaagctatgctctttatcacagtggcattcagtattccaagaatttttaaaaccatgtaactctttgatgacaaatgtactat

SEQ ID NO: 428600 - DNA, 572 bp, Homo sapiens
acgttttaattatcacactttatttggatattatctattattgtatataccattatttatgggatccttaaatgttgagcgcttacattgtttctaatatataacatacattataacaaacagatgtatatatatacatttctacaagtatatttgcaattttcttgactgtttccttaacatagcacattgtcactgggttgtctatttcttgaggagcataacttgtttctaactatcactatctgcatytctgtggctgaatgttttttccagaactgtggaagccaatcagcccaaactcacagcacactgaaagattagggaattaacacccccacaagtaactctcaactaatgactcttgagagttggtgtagaaataccccaaattctttttcccctcaggtgggataattctgaggtgcatatttgttgtttccaagaattccccaagggatccagctccagcagcccactgtggctaatacatcatttattgaccatcttctcctccctatgtcacttccccatttctctcctgatggtacctcccaaacaaatgacttgtt

SEQ ID NO: 428601 - DNA, 576 bp, Homo sapiens
taaataagtatttgttgaatgagtgaatagtctacgtctttcctctctccatcacaactaccacccctcttgtgaggaggaagaatactttttttcttcttcatttccctctggtacaactcttgtttttcttggactgaaatgttcagtctcaaaatagaaattttagcattttataacactttcaggcaacttatatttatctaaaaagttatttactgcctatgttgtttagggagaataaaatgccatagggaatttgtaaacaattttggtgccttttttttttccccagctgtagcagctatgatggagtgatcttttttcccagttttcagaaattttttgattcatggtagtggaacatttatagtaatttttctgtttttttaattgttgctgttgttattttggtttttttagtggatatttgaaaccaggtagtggtaacagatacctgacatggcccatttgttgatytgctggcattatttaaataatgtttcttctctttgaaatatgcctttttaactaaaattagatattctttatagatggggatgaagttttaagaat

SEQ ID NO: 428602 - DNA, 580 bp, Homo sapiens
acagtgaggggccttgggcacaggactggatagttgaatgggttcattctctggagagttctaaatatggcaaagtaaagggtaagagattcttgaagttttaaaagacattagaagctgtgcgtccaacctcctttcttttatagttccagcttcttgagtttgtgttttactaaatacagaagatcaatcaccctttttctataaagaaaaaagaagtttgccctcagccacctggcctgctatcagwggagctgaattcaattacacacacatttcactcttgctctttcttctgcttattgtaaaagtcccagttaaccaggaaaaacagagtttggctaaaattgagaagtatctcaaattgatttttaaagcctattgagaaacacaagaagaggtatatgtgtgaggttcttctttgaaagagtattatgttttgaattacttttgaaattaaaagaccaataactcatgaaataagcagtgagtatgtagttagaaatataaaagagacttataaaagatggatcgtctatatgacaagtttttgtcatacctccttagaatcagtgtatgg

SEQ ID NO: 428603 - DNA, 552 bp, Homo sapiens
tcgttataattacatctgatttggtgatccatgatcagtgatctttgttgttactattgtaattgttttggggacccacaaaccctgcccacaaatgacagtgaatttaatcaataaatgttgtgtgtgttctaactgttcccctgactggctattcccctgtctatctctctctcctctttggattttcctattacctgagacacaacaatactgaaattaggccaattaataaccctacaatggcccataagcattcaagtaaaaggaaatatcacatgtctctcattttaaatcaaaagctaaaaatgactaagctctgtgcggaggcatgttgaaaaccaagataggacaaaagctagacctcttgcattagttagccaagttgtgaagcaaaagaaaagttctcaaaggaaattaaaaatgctactccagtgaacatgtgaatgatacgaaggcaaaatagctgtaytgctaatatgaagaaagttcaagtggtctggatagaagatcagaccagccaaaacattcccttaagccaaagcctaagct

SEQ ID NO: 428604 - DNA, 568 bp, Homo sapiens
tctggaagtagattgggagcaaacaggatgtctgcttcattttcaggcaccaaggaatatgtatatggaagtaaaatagttccatttcggggggttgtgggaagtactgttctcaagaggtggtcaggtttcagacaatgtgggaaaatgaggcagactcttttttttttttttttttttactttttatgttgaaataatttccaacttagagagaagatacaaaaatagtagaaaaatagtttccaataaaatcttcatctagctaacattaatatcttatacaaccatagtacaatgatcaaaatcagaaaattaacattggtacaatactattaatataaactacagaccttattcatattccatcagtttccctccagtgctccttttctatttcaggatccaattcaggatcacataaaacatccagtcattatgattccttaatttcctccaatatgtgacagtacctcattttttcccttctctttcrtgaccttaacacattcagtgggtaatggatagttactttgtagacttcccccagtttgggtttgtttgatgtt

SEQ ID NO: 428605 - DNA, 560 bp, Homo sapiens
acagaggcttggaggaaatatcggaaccagtaaaaagccagagacagagtaaacaaggaggaaggcagaaattatgataaaaccaagccatggaaagaagcagtggtttcttgaaatgtcatatagacacttaagcagtaggcccccaataagtgtgtatgttaggtggattgatttttattttttaatcattgttaatttaaatcagtcttctcatatttcttaacatatacatttattcttcaataattgcttttatatgtaaaaaatatatttttttatttttctagggttctctattagttttttcgaggcacctaaggtgggtcacttaaaaacatccctttaaataatatttcctctgatacartaggtgaggctctttgggatgctgtggaaactctaaatcctatgtcttcaggggcagttaagcatttcctatgaccaatgaggcaacctgagattttaatttctcaaagtgttagaagaaacagcaatggtgtgtattccatacgtagcgtggcccagcactgcagaaggcttgatggaggtttcttgac

SEQ ID NO: 428606 - DNA, 569 bp, Homo sapiens
caagaatgcgaaatgttggttgttgggcttgtctagattagcaactttgagagtcaggctgttggaagagatagcacataggttaaaacagcaaaggcctttgctgtgggtasaaactaattggctgaaaacattaataaattatacttgctcttcatgtcaagagaaagctaagaaagaagggatgaatatttgtatctactaaggcattacactctgacacatgatattaaaaaataaaaagcatatcctttgacttaagctcttcttcttatattaagaaatagaaatagaagctaagttccttaccatttacttggcaatgctttcttgggactattataacatgtttcagatttggcattttcagtcaataaaatattgctgagaaggttgctgagcaattcacataaaatttacataaaacgtttattactgggaccactgcctgggtttatgctaaaatgctttcagtaaaaaccctctaaattcagagctaattctttccctttattttatgtttctctattaggtacctgtaagctacacacattggccatagattgact

SEQ ID NO: 428607 - DNA, 604 bp, Homo sapiens
tccgcctgcccatgctgaatctggaatggagcccagttctgcaccgatatcattgccccctcttgtagtagttcctgaataaaatctgtctttactgctttaacgccagtgcagctctggttttctttacactataataaaagctctattagtttttattagttgttgatgatgatggctgggyagttccctttcttttaattgtttttactcctcctaactcaatttttattggttctttttaaaagaaatctatcctcctctccccagtaaaaatcccactcagacaatttgtgatctagttgaagttgcttgcctaaagcaagctttcagaacaactgggatccccagataatgagagaaggttgtatttatagttcaagttattatatagcagttgacagtttcattttgatttaaagtcctgtctctgataataggaaaaaggatcacagcttatctcttgctgtaggctttaaatggcctgtaattcaaggcttatctctgggaatgcacggcttttaataatgtaaatctttcctgggctctggtagtttccgtcttgtatcagatggggctaagctaagaatgagaatgtcagttt

SEQ ID NO: 428608 - DNA, 547 bp, Homo sapiens
aaaacttccctgtgccctctgaaggtttgctgaaaaatcaatgtacaaaggacagattaactggagaaaaagcatgcaaacttattaatgtgtacacaggggagaatcacagagtaatcactccaatgccccaaggcagtgcagaagcttatataccatcttgaggttacagaaagaatggagtttcaaagccttaaaagacaaacgtcagctgaattaaaatgtaaaggagttcagctgagcaatgagygattcgcaaatcgggcagcccccagaatcacagcagattctgagagtcttcaggtatgtgttgtgatcagaacaaatttatagacaaaaaaagggaagagatgtacagacattggaagtgaggtacagaaacagctcgattggttacagctcagcgtttgccttatctgaacgcagtttgaacgcttagcagtctatgagtggttgaagtatggccactgggattgaccaagactcagctattgttacaggtgcatactcttaacttaggttttaaatcttgtctgcctattaagct

SEQ ID NO: 428609 - DNA, 568 bp, Homo sapiens
tggatctgggatgaatatcttaagtgacaccttcttcccccagcccaggtcatatttaattctgatcttcacctttggatctagctctaaagcatgtattggtgatttcttaactacgtatagggctttttttctcttttttatcttttcaaagtattattgatgatcatatcctcttacggagtatgagctaggtggggaaactgatctgcagagagattgcatgacttgcttgaggtcacgtgaccatggcctcagtctcccaacatggctctgtgttatcccaaaacaggatatacaggacattgctgtcatcccattcaggaatgcaggacactactgtcatcacattgccagcccatatcttgctcatggggccctcctgaccccaaggaaaggcattctctgccttcactgcatgctcactttgtcccaagggaatctggaatgagtttccttcacagcctcttaatgacacartggggttgagaaaggacattgctgagtcatttccagccaaaggaaagtattatttatagcaatctgcacagaccaaccttggtagtaa

SEQ ID NO: 428610 - DNA, 454 bp, Homo sapiens
aggaggagttcttggtcagaaggtccctggcactaggttctatggtttttctttttcttttcttttctttttttttttttttttttttttgagacagggtctcattctgtctctcaggctgaagtgcactggtgcaatctcagctcactgcagcctcgacctcctgggctcagttgatctttcctaccacccaccagaggcgcataccaccacacccagctaatttttgtattttttgtagaggcaaggtttcaccatgttgcccaggctggtctcaaactcctgggcttgaaccatctgccctcctcagcctcccaaagtgctaggattacaagtgtgagccaccatgcttggcctaggttctrcagttttaactggggatttgggttgtaagaaacagattcccttgagttacctcatgaaaagggatgtttattataaggacatatttgaa

SEQ ID NO: 428611 - DNA, 580 bp, Homo sapiens
gcctcttctctggaagctcttctgtgtgtgttgggctaaagccctctaccagaacattctcatgcacaaactgaaacttgatatttttttaccacatgtcatcctcaccctgaaaagtctttcaagctccagtacttctgtctggagtcactagcaagtcaagggcaccatgtatgtgcttccacatccttggctctgctacatcccttcctgagatgccatctctaggtcctcgttggacttgaagtctccggagcagtagttctcgtggcagtggcttaattctaacattcatctacaatsaaacaatcttgtgcttgcagtttcctctgatgcttagagcctcttcccatctcagcagcctcagaacctggctctcttccttggtaatgagctcaggaagacccgtttctgtactgaacctcagcctactgtccctggcttgtcatattccaactacagaagggtagtcaccctgaggaaatggagtgttggactgtgtgcagtcaacaccaatgacctcaaagaaggcataccttctgtattagtccattttcatactgctatgaagaaataccca

SEQ ID NO: 428612 - DNA, 577 bp, Homo sapiens
atcttataccccagaacacaagttgtcgtgtctgatggctgcaggttgcgaattgcagctgtgctctgtcttcagggcccaagccttcagagtatcccttatttcctggagccatgtcagtactatatataccctgcccttaagggttagaagcacaattctatccccctgggcctgagatgctggggtgtgcctcagagcaacagatcctggcttagtgaaagaactgcattcacttgtgccttggagagtgaatctgtgccccacatcccaggtgctatrataggttttcaagaccctcagcccaagaacccagctccacagcccctctgagcacctgcgtcttggatcccagggccactgtggctgcctgtgagctgtgtcagacccaatactaagagagataccctcagctaagcctccccactttgagtaagacagtaacagaggatattgatattgtctttgagaaaggcaataacagaggattccctaaagcccttgccctgataacctatgcagccaccattattgccacaaactcctgcagcctaggccaccaaggcacctgctgtca

SEQ ID NO: 428613 - DNA, 577 bp, Homo sapiens
atcttataccccagaacacaagttgtcgtgtctgatggctgcaggttgcgaattgcagctgtgctctgtcttcagggcccaagccttcagagtatcccttatttcctggagccatgtcagtactatatataccctgcccttaagggttagaagcacaattctatccccctgggcctgagatgctggggtgtgcctcagagcaacagatcctggcttagtgaaagaactgcattcacttgtgccttggagagtgaatctgtgccccacatcccaggtgctataataggttttcaagaccctcagcccaagaacccagctccacagcccctctgagcacctgygtcttggatcccagggccactgtggctgcctgtgagctgtgtcagacccaatactaagagagataccctcagctaagcctccccactttgagtaagacagtaacagaggatattgatattgtctttgagaaaggcaataacagaggattccctaaagcccttgccctgataacctatgcagccaccattattgccacaaactcctgcagcctaggccaccaaggcacctgctgtca

SEQ ID NO: 428614 - DNA, 546 bp, Homo sapiens
taccttaattacctcttaagtgtttatgtacaacttgactgaatgtggtctatatcagattacaaattactgcagtcaaattctttataaacataattgtattctttaaatcgcttataaaaatttccaagtccataaaacatttcgatgagttacaataagggaatttgaacatctttaggagtatattttcctgggttttgagtaccatatatgttgtgattaacaaagagagcaattgaaagccattcacacataaaatgtttatacccaagtaaccttcaaatatttcaaaaagcccctttctacccaatactcagaaagcgcccaaggaaataaatgcagcttaccttgggctcccaaggtaaggcatggattctggtcactggagaagattcccatctgtcaccatccagacacatctgtggcagggagaatccctgagttcaggaaaagrcagcaaagacatgccagaaataatatcgaccaggattgactctcttttcaaatcagaaaagagccataggacttagaaccacaagggat

SEQ ID NO: 428615 - DNA, 423 bp, Homo sapiens
ccagtgtataacgtgttgaaagatgatattgacatatgaagttgggcctgttttcaccgctgtgcaacggcagctccagaatgtctacagaaggaacaaagtggctgaaagaaaggactagacgtgagtcctgacatcacacttacagagcaggcacactggttttaattggattgcgggtttatttcragacctatctggagctgccaatggagacaaaaggctttatcttgaagctgccatgtgcagagaggcctgctcgtttattttggtaaggttcaggaagaaggtgatgatttatgtggcagatgaaagctcccctgctcaaggcacccccttgacaatgctgtaaaagaactaatatgagggttcttggggaagggagataatatattttacatgtagaagaatgtgaaccgtggt

SEQ ID NO: 428616 - DNA, 509 bp, Homo sapiens
gtcacacccattatttatgtaggtatcatttgtggctgcttttgcactaccttggcagagctgaataattacaactgagaccatatggccacaagtctaaaatacttactatttggaccatttaaaagggcttgctgacacctgctttaaaataaagacattcaaaaactaacagatgctggcgaggttgcggagaaaagggaatgcttatacaccaatggtgggaatgtaaattagttcagccactgtagaaagcagtttggagatttctcaaataacttaaaacagagctaccattagactcagcaatcccactattgggtatatgcccaaaggaaaaataagtctttttaccaaaaagwcacatgcgcacgtatgttcactgcggcactattcacaatagcaaaaacatggaattaacctggatgctcatcaacggtggactggataaaggaaatgtggtacatatacaccatggaataccgtgcagccataaaaataatgaaatc

SEQ ID NO: 428617 - DNA, 593 bp, Homo sapiens
tacctatggcaacggctgcctgagcacgattgtggtcacattctctatgcgacagttctccccagtcctcagcaagccctttttattctccaactcggtttttctttataaaaatggtcaaaatgtgagcctcctcacaagaatttgatgaaattttatgtggcttctggagacacactttgaagctgaaggcagcgaattttatatgaacaaagaagagttgtggtttttcaagcagtgtttctcaaactttaatgagacatccatcacctcgggatcctgtgaaaattcttattcaggagacctgggtaaagtctaaaattctgtgcttctaatcagctcccaaatgatggtgatctgctggtctacagaccacaytttggatagcaaagctaagtaacacattaattcaccatgatcaaagactcctccttagacttggaattgatagagggtattattctttaaatgcagagttctaaaatattagagtgacataggacctaagagattatcaagaataaactcttccattgttatgagcactgaagggacacactcacagttacaccacagtgtggcagcagcttctg

SEQ ID NO: 428618 - DNA, 569 bp, Homo sapiens
attaaccactagatttttctaggaacagtttcaatggaggcaaaaacctgtttggagtattttctagagagaaggagaggagaggaattggtagcaattatagatgatactttgaaagagttttgttgcaaagaagagatgcccttggtagcctcagtcaagtcaggtgaaatattttttttaagataggaaaaataataacatgcccgtatgttatggcacagattcatttgagaggaaataactgatttctgcagaagagagaggaaagcattgatggagagcaggtagaatacatggggacatccctttttccccttggaatatatctgccaaagtgaccagaccacttatcctgtagggtttcytgaagtctggttgttgctcactgcattttcatggtatagtttggaatgttctcaatggtttctaaacacaattttgtaataacaaagctttttctttaaatcaaattttagctggaagcacagtagaaaaggcctcagaaggtgcagcttgcgtgttggagtggggccaattggacagtcccaaaagtgagccaggggctc

SEQ ID NO: 428619 - DNA, 578 bp, Homo sapiens
tgtgatgctgctctggacatttgcacactgcttttgtgtggacgtacattctccattctcttgggtacatacctacatacstaggagtggcattcctgggccatatggtaactctatgcttacctatctgaagaactgctaattttccaagcagccatatcaattcttcaatttccccacatcctttctaacactttggtattgtccatcttttttattatagccttcctagtgactgtgaagtggtttctcaatgtgttttgttttgagatggggtcttgctctgtcacccatgttggagtacagcggtgtgatctcggctcactgcaacgtgtgcttctgggggctcaagtggtcctcccacctcagcctccaaagtagctgggaccacaggtgcacgccaccatgtctggctaaatttttgtatttttggtagagatgaggtttcaccatgatgcccaggctggtctcaaactcctgggctcaggcaatctgtctacctcaacctctcaaagtgctgggattacaggcgtgagccactgtgcctggcctctcagggtggttttgattttcatttt

SEQ ID NO: 428620 - DNA, 502 bp, Homo sapiens
cctatctgaagaactgctaattttccaagcagccatatcaattcttcaatttccccacatcctttctaacactttggtattgtccatcttttttattatagccttcctagtgactgtgaagtggtttctcaatgtgttttgttttgagatggggtcttgctctgtcacccatgttggagtacagcggtgtgatctcggctcactgcaacstgtgcttctgggggctcaagtggtcctcccacctcagcctccaaagtagctgggaccacaggtgcacgccaccatgtctggctaaatttttgtatttttggtagagatgaggtttcaccatgatgcccaggctggtctcaaactcctgggctcaggcaatctgtctacctcaacctctcaaagtgctgggattacaggcgtgagccactgtgcctggcctctcagggtggttttgattttcatttttatgatggcgaatgatgttgagcatctcttcatgtacttactggcc

SEQ ID NO: 428621 - DNA, 502 bp, Homo sapiens
cctatctgaagaactgctaattttccaagcagccatatcaattcttcaatttccccacatcctttctaacactttggtattgtccatcttttttattatagccttcctagtgactgtgaagtggtttctcaatgtgttttgttttgagatggggtcttgctctgtcacccatgttggagtacagcggtgtgatctcggctcactgcaacgtgtgcttctgggggctcaagtggtcctcccacctcagcctccaaagtagctgggaccacaggtgcacgccaccatgtctggctaaatttttgtatttttggtagagatgaggtttcaccwtgatgcccaggctggtctcaaactcctgggctcaggcaatctgtctacctcaacctctcaaagtgctgggattacaggcgtgagccactgtgcctggcctctcagggtggttttgattttcatttttatgatggcgaatgatgttgagcatctcttcatgtacttactggcc

SEQ ID NO: 428622 - DNA, 440 bp, Homo sapiens
agaagactttcacctcctctctcccaagcataggaagtaacaaagacctcttccaacccaatcccaagcctctgcaktctacagagctggtttcaggagactattacatcaattccaaagcaagcaatcactttcagaattatttttcatccgcagaaatgtccatgaagtaaaagtctccgtcaactcccacaatctttcccaactccacctgccaccctccaaacacttcagatctattaatgaaaataatttttctaattttgatgtgatataaattctaagtctgggaacaaaaatacaaatattatcatgttgtaaatattaatacttcaaaagaccatctggaggatgctcccttgaatgctctgaaaatcacaattactgataactgcattgtgcataattaccacattttatgaataatcttttatttatcc

SEQ ID NO: 428623 - DNA, 440 bp, Homo sapiens
agaagactttcacctcctctctcccaagcataggaagtaacaaagacctcttccaacccaatcccaagcctctgcattctacagagctggtttcaggagactattacatcaattccaaagcaagcaatcactttcagaattatttttcatccgcagaaatgtccatgaagtaaaagtctccgtcaactcccacaatctttcccaactccacctgccaccctccaaacacttcagatctattaatgaaaataatttttctaattttgatgtgatataaattctaagtctgggaacaaaaatacaaatattatcatgytgtaaatattaatacttcaaaagaccatctggaggatgctcccttgaatgctctgaaaatcacaattactgataactgcattgtgcataattaccacattttatgaataatcttttatttatcc

SEQ ID NO: 428624 - DNA, 485 bp, Homo sapiens
tcaaaacttatgattacaacccaatttttaaaatgggcaaagctggcgtggtggctcatgcctgtaatcccagcactttaagaggctgaggcaggcagaattgcttgagctgaggagtttgagaacagcctgggcaacgtggcaaaatcccatctctacaaaaaatacaaaaattagctgggtgtgttgctgtgtgcctgtagtcccagctactcagggggctgaggtgggaggatcacttgagttgtgaggtcaaagctgcagtgagctgaaatcatgccactatactctgagcttgagcaacagagtgagactttgtctcaaaaaagagggggtgagaggcaaaaagaayttgaactgacctttgttataggctgaatgtttcccccaaaatttgtatgttgaagtcctagccccctgtactcagaatgtgactgtatttggatacacggtctctgaagaggtaattaaggttaaatgagacc

SEQ ID NO: 428625 - DNA, 485 bp, Homo sapiens
tcaaaacttatgattacaacccaatttttaaaatgggcaaagctggcgtggtggctcatgcctgtaatcccagcactttaagaggctgaggcaggcagaattgcttgagctgaggagtttgagaacagcctgggcaacgtggcaaaatcccatctctacaaaaaatacaaaaattagctgggtgtgttgctgtgtgcctgtagtcccagctactcagggggctgaggtgggaggatcacttgagttgtgaggtcaaagctgcagtgagctgaaatcatgccactatactctgagcttgagcaacagagtgagactttgtctcaaaaaagagggggtgagaggcaaaaagaatttgaactgacctttgttatrggctgaatgtttcccccaaaatttgtatgttgaagtcctagccccctgtactcagaatgtgactgtatttggatacacggtctctgaagaggtaattaaggttaaatgagacc

SEQ ID NO: 428626 - DNA, 563 bp, Homo sapiens
agctttcagtgatcgattgccaaaaggtattcattacaagataaggacttagatctcttccatgaatgctcagggtaaattgtcatttcttcaataaggtaatttgagagatcagattacaaaaagatctgtttccatcttgagtgccctctcttgctctcatttgcttattctgagggaagccagctgccatatggagaagtctatgtggcaggaaactgagggagctcttcagtcaagaacaagcaagaaacaggcctccattcaccagctaaaagaaattgagtcgaccaacaatcccatgaatgagcttggaagcaagttyaaccttcagtcaggcccacagatgagaacacactcccagctgccacccagactgcagctcttggggagaagcagagacacccagctaagctgcatccaaattcctgacccacagatattgtgagacaataaatgttttgttgtttaaagcactaaatcttagggtaactcttctatgcacaatagattactgatacacacatccttgtcttgtcccataccagacacaggcatctcac

SEQ ID NO: 428627 - DNA, 505 bp, Homo sapiens
tgtgctggtgcctctgtcacttctgctcacctaatctccatgccaaagtacaattctagtctcactgttcccactgtggaagaaggatcctcatggtaggtgtstgagtagcttcaaaggcaaaagctttggcaagggagctgtgttacagcaataggccatgcggtgttcaaggctgggggcattttatcgacgggaagggaaacgtcaaacgttcactttttgttagcaatgtataccctaaatagctaaaaaaaaaaaaaaaagataaattgtgattcaaataatgccttgcatatttgtgcagtttccaaatgtgttataattgaattgcaggaattactgagaacagatgctaacagagacactgaacataccctacagtgagaaaaatgacacacttcactctacttgcccaaaatccatttaaattttaacttgttttaattgctgcatatttctagtgcaatataatggaggtttacagaaagatctgatggaaaac

SEQ ID NO: 428628 - DNA, 562 bp, Homo sapiens
ctcactgtgtgaacttcacctttccaagatcagtgtcttcatctgtgaagctcttatgaggactaaatgaaacaatgcacatgaaatgctggccacttcctggcacatgcaaagtgcttagaaagtgacaaagcactgatgacttcagaagtccttgactttgatagaacatggatataaacagcaatgacactaagataataatctctcgggatgctggaaatatcaatctttgtagtttacaagcagctcgatatcaagagaatcaccagtcatcatggattgaaggaaacttgartaaattatgaatggttctgttaacagactcatatgttaaatatgatacttttgagaatgaattgatgctacagagtaaatgaatctttacaatttttccaaagagtgtggaaaattgagagataacctttaattgcaaaactatttaggtcctacacctctagcatctaaaccagccactgtgccttattggatcatggctcatggtttattggatgaagccagatttccagatttctttttagcttcctcaatcaaaactgga

SEQ ID NO: 428629 - DNA, 583 bp, Homo sapiens
aggacccatcactccaaattattttttaacttattaaaattagaacctaagtctagatgataatctaattccttcctcctaattaatatcattaattgaactgattaatcctaaatgattaatcctgacatgataatggaaacaaagtcaaacctcctatttcctaaatacaaatgactaaatgtagcacaatgctgtgtgagccaaaattcggattatttcagtctcttctggaggatgtctcaatacaaactccttaaacttagagttggaccagctcatgttgtcacaaataaaaagcmctgcctggctttctcatttgaagtttgaagtacaacttaatttccaagaaacttagatagcatcacgtgcctctgacaagcagttactagccggtatttactcctcaatacggaataaatttaacagcaaacgaattacatctaaaaccaaatcttgtaactgaattaaggtaaatatgctctttctatacaactaacataaagtttaaataggcagagaaaagaggcatctttacttcttaaaaggcaattttcaaaaatgaattgaagagtaatacatc

SEQ ID NO: 428630 - DNA, 551 bp, Homo sapiens
gcttcaatattgtttcaagatcacagaggacaaatgcagattttctttgtacgttatcaattttcttttcactcttttttgtcaatatccattctctttccatcaccacttgtgattcatttgacgattatttactgtatgtctttttttttggtgycagacactgtgccagggcctagtatttgcacaaaaatatatatttttggcccccgccacagaaaatatttttgtatgggaaagggtcatcatgcaaagggttaatgcaatactgtgtgatggagacctgaattagatgttatgtacaggttgagggaattcttggattggaaatagaatgataaggagagaaagaaagagtgtatgcaaacacgtagaaatatgaatgcagatgcagagtctgaggaattctaagttgttcagttttccagggctggattggaaagcagcagagacaaaggtggggagaccactggggctgacatcctagaaagccttgtgcatcatcccagggagtttggactttggtcctcaaggcagcaggatgtcattga

SEQ ID NO: 428631 - DNA, 485 bp, Homo sapiens
cctttggctttttgggggtattagggttgtawgtgaccagcattcctcgaggtcaatgctattctctgcaaaacacaataaaagcttgcaggaggccgagggctgtatgagaaaattaagtattgattgaggagtagatatgatgttgtgaaatgtagttattagactcaattcagtgctgttaatttgaggtcttgcactttctcagaagattacaccagttaacaatacattattgaagtctgaggagtactcttaccccgcctcatgctctctgcatcctttctctcagctttggaagactgctttgcccaatcgatatgcttttattgaacacaggtttatacaaccagtcagctcaaatatgatcactttcaggagtttgcgacgcgtggcaaagtcaaatttccttccaaataatcttctatcaagaaatcagaaatcctgaatttaatcatcccccttttcacgtcccatgaattata

SEQ ID NO: 428632 - DNA, 485 bp, Homo sapiens
cctttggctttttgggggtattagggttgtaagtgaccrgcattcctcgaggtcaatgctattctctgcaaaacacaataaaagcttgcaggaggccgagggctgtatgagaaaattaagtattgattgaggagtagatatgatgttgtgaaatgtagttattagactcaattcagtgctgttaatttgaggtcttgcactttctcagaagattacaccagttaacaatacattattgaagtctgaggagtactcttaccccgcctcatgctctctgcatcctttctctcagctttggaagactgctttgcccaatcgatatgcttttattgaacacaggtttatacaaccagtcagctcaaatatgatcactttcaggagtttgcgacgcgtggcaaagtcaaatttccttccaaataatcttctatcaagaaatcagaaatcctgaatttaatcatcccccttttcacgtcccatgaattata

SEQ ID NO: 428633 - DNA, 485 bp, Homo sapiens
cctttggctttttgggggtattagggttgtaagtgaccagcrttcctcgaggtcaatgctattctctgcaaaacacaataaaagcttgcaggaggccgagggctgtatgagaaaattaagtattgattgaggagtagatatgatgttgtgaaatgtagttattagactcaattcagtgctgttaatttgaggtcttgcactttctcagaagattacaccagttaacaatacattattgaagtctgaggagtactcttaccccgcctcatgctctctgcatcctttctctcagctttggaagactgctttgcccaatcgatatgcttttattgaacacaggtttatacaaccagtcagctcaaatatgatcactttcaggagtttgcgacgcgtggcaaagtcaaatttccttccaaataatcttctatcaagaaatcagaaatcctgaatttaatcatcccccttttcacgtcccatgaattata

SEQ ID NO: 428634 - DNA, 485 bp, Homo sapiens
cctttggctttttgggggtattagggttgtaagtgaccagcattcctcgaggtcaatgctattctctgcaaaacacaataaaagcttgcaggaggccgagggctgtatgagaaaattaagtattgattgaggagtagatatgatgttgtgaaatgtagttattagactcaattcagtgctgttaatttgaggtcttgcactttctcagaagattacaccagttaacaatacattattgaagtctgaggagtactcttaccccgcctcatgctctctgcatcctttctctcagctttggaagactrctttgcccaatcgatatgcttttattgaacacaggtttatacaaccagtcagctcaaatatgatcactttcaggagtttgcgacgcgtggcaaagtcaaatttccttccaaataatcttctatcaagaaatcagaaatcctgaatttaatcatcccccttttcacgtcccatgaattata

SEQ ID NO: 428635 - DNA, 584 bp, Homo sapiens
tttgaacaggaaccacaccctgaggaatgaaggggcctcctcactgaggataattttaagttrctaattgctacctataccccctggcattaaacaaacagagctgccttcactcctcctaggctgccctttgaggaagaacataagcatctaaaaatagaacctcaggggttttcccgcacattaaaacttctgcccatcctcccctccagccaaatcacgttaatcatgatgaagaccaaaataatcgtgctgaatgaatgtccaggagcttaaatatttgctttggacaaatactctgcttggtgctttataccctaaatcctcgaattatggagaggaagcttgcagcccttagggagaagagagaggcgaggtgaagaaagtacagagatttcaatggcctcttggacttttctgtctccttatgttttcctggtgttttagtggttagttttgcagcatacagtgctaggctcttccctcacactttatgtttccccatgtggacagtatctagagattaataaggaaggcccactctgagagtgaccactagcaagccagcagtggggctgactctc

SEQ ID NO: 428636 - DNA, 570 bp, Homo sapiens
tttgtgtgttttaaacattcctttctactttctagttaatttctaaagtggcctatgtccaatatggtaaatattgattggtacaaccctcatgaacaaaagcactttgagattctcaacaattactgagtgtatagaggttttagtaccaacaagtctgagaaccactgctttatagatatttaccaacttgatttrgaaaaatagccatttaaggaaggcaggcagaaattctccagttatttgggtaagaaaatgcaggcagaaaatcagaacatgtttgattgattgcttgagcaaacccaaggatagatggacagatggatggattgggaactcatctgaagaaagccagtgtttgagtgctggctctgggagggaggaatggaaacctatctggcagaacaggggaaacgagcggagacaggaaggcgagatatcacacttactgactcccagcctgttctctgcctggccacagactctgattgccccttctgcatttgcacactcacagattccatctctgtgagattgaccacaggccttctccacctccctctgccctgt

SEQ ID NO: 428637 - DNA, 567 bp, Homo sapiens
ttggcatttttcctcaaaaaggatccaagagaattccagaaatagagctgttaaccttcagcgcaccctggtgaagttcataggtgaggtcagaacaaaacatgtccaaagagaccaaagagttattattcgtgaatgaaaattatgattgaggagaaacagatgctgaagagatacaccaagatatgaaaatgtactgtcaamgagaaaacaatggaactaggacaaggtgtaggcccaagaaagaaagaaagagcaaaaaagaccaaattcttttttttaaacgtaccattgtaatgtttgaatatgccaagttataaaagtaaatgcacgtgcccttctaactttggcctaaacatttgattttggtggataaaacaaagacgcaataccgccctgaagtctctgaattgccaaaaacaattgtttacataggatggtgtgctttcagaacatcatatgcactaccttcccagaccttgtgaagctggtgaagtttaatgaagctagagaagaaaaatagacaagagtgggtaaagggaaagaaaataagttaaaaatgttaac

SEQ ID NO: 428638 - DNA, 598 bp, Homo sapiens
ctgggctacatggcaaaaccctgtctctaaaaaaaaaaaaaaatgcaaaaattatctgggcaagagggcatgcacctgtggtcccagctactcaggaggctgaggtgggaggatcacattgagcccaggaggtcaaggctgcagtgagcaatgatcatgccattgctctccagcctgggcaacagagcgagaccctgtctcaaagaaaaagaaaaaacagattattgaccttatgtatatagaaagtaaacttgagaaataaagatacaaacataaggcaaggtaaacagaaagcactaaaaaagatagtagtaagcctacacatatcagaaagcacaccaagtgcaaagcaataaactcaccttttggaakataatgattactatattggttttatatgctgtttacaagaaacacatttaaatctaaaaccacataaagattgaaagtgaatggatatttaaatatatgccaagcaaagagaagccaaaataaaaccaaaaaaaatcattatttgggatgaaataaaactatgactaataaaatgaatgattccccaagcagatgtcacaattttgtacctgtatgtccctaatat

SEQ ID NO: 428639 - DNA, 601 bp, Homo sapiens
  misc_feature (1)...(601): n = A,T,C or G
ttgcatgaagtatcagagaagtggtaggtgggaaggactacattagatactacaagatagataggtggtatggaggaamgcattatttggcttataggcccctgtaaccaaaataaataacagaagccaaagtgtggagtcagaaggggctgggtcagggagaaggagaacattagtctgaaaagaatagaattttgtgttgaatatgaggacatgattgtgtggaaggccttgaatgtcagagtaaagtccctgaacacttccaatcattggataacatgcaaaccagcttttgaagaacactggtctggcccacacgcctgagcacctactcagcaccagactgcaagcttgactcattctatactttgtctcactcagtgctcaccacaatccatgatagatgaaaagaaatgtggcttggggagagtacgtgatgtagctaagtaacacagcaagttagtgacagagttanaattaacttctgccaggttgaagcagaattgatcgtggtgggtaaactttttgatgtgctactggattcagttgcccagtattttactgaggattttcgcattgatgttcatcagggatattggcc

SEQ ID NO: 428640 - DNA, 589 bp, Homo sapiens
gtcacttgcaatgtggaaggccctcatcattctaattgcaggggctgggttataatccattaccatgaataatttcttctagaaagtgcctatatagtaaaccagactatcaggactctagccagctttatgttacgtttttggtgatttaaggaattctgttacaacaggtgacatttttgagagtggaaatatacttatatggaacaaaagtcttaactccatgagtaatttttagttggcagaggtgcaaattcttcttcagtatttcagcatggagatttttagtaaggttttcaattaattaaaaaatttaaaaactcttcctcataaaaactccgtacctcaaaggtaactttaataggtgcctaaactagctaaaagattgagctctgtgttgacatttttggagaatartgcggcagctgttatgtttgaatgtgtatttgggtcccaccttgaacagacgggaaacaactgttttaaaatctcttttctctgtgtaggtttaggtgcagtcatcttggatttgagtcgtgcttgtgaattttcatgtgttacaacaaccaggtgaatatgctgctgtgat

SEQ ID NO: 428641 - DNA, 589 bp, Homo sapiens
gtcacttgcaatgtggaaggccctcatcattctaattgcaggggctgggttataatccattaccatgaataatttcttctagaaagtgcctatatagtaaaccagactatcaggactctagccagctttatgttacgtttttggtgatttaaggaattctgttacaacaggtgacatttttgagagtggaaatatacttatatggaacaaaagtcttaactccatgagtaatttttagttggcagaggtgcaaattcttcttcagtatttcagcatggagatttttagtaaggttttcaattaattaaaaaatttaaaaactcttcctcataaaaactccgtacctcaaaggtaactttaataggtgcctaaactagctaaaagattgagctctgtgttgacatttttggagaataatgcggcagctgttatgtttgaatgtgtatttgggtcccaccttgaacagacgggaaacaactgttttaaaatctcttttctctgtgtaggtttaggtgcagtcatcttggatktgagtcgtgcttgtgaattttcatgtgttacaacaaccaggtgaatatgctgctgtgat

SEQ ID NO: 428642 - DNA, 378 bp, Homo sapiens
tgtgagagcaccactaaactgcaacatgcaacctgtgtgaaagacacacagacaccatcccagactattagacagttttgtggttgttattgttttattctcatgttattgttttattacttagcagattaacaaattctcaaactaaattctatcctaatattcctcctaaacttatcctgtagacatgtgggaccactttctcacttatttcttaacagagaggaataagaaatggtcacaatcctctttatacttaatttgacatgataaaytttttaagatgaagaaaagtaactccctaaaattatagaaaaggtgagcaaataattgtataaatcagggcagggaagccctttctaagtaacttaatatcaa

SEQ ID NO: 428643 - DNA, 601 bp, Homo sapiens
cagaagaaggtgggagaagccgacttgctgagtcttacggctttcatcttttctcccctcctggatgcttcctgccctcgaacatcagactccaagttcttcagcttttggactctcgcacttagaccagtggtttgccaggggctctcgggccttcggccacagactgaaggatacactgtcagcttccctacttttggrgttttgggactgggactggtttccttcctcctcagcttgcagacagcctatcatgggatttcaccttgtgatcgtgtgagtcaattctccttaataaactccccttcacatatacatctatcttattctgtccctctagagaaccctgactaatacatctagcattaaaaaaaaatgcaagtgataaactgggaaataatattcataatatatatgacagattaaatgtttgttattttttgttatattatttatgttactaccaaaatggcaaaaaaatgaataaaaataatacaaaattataaacagaagaagagacaatggacaaaggaaataaaatttttgaaagatggagaacaggtaaaaagatcaacagaactgaaaactcaagcatcaagta

SEQ ID NO: 428644 - DNA, 601 bp, Homo sapiens
cagaagaaggtgggagaagccgacttgctgagtcttacggctttcatcttttctcccctcctggatgcttcctgccctcgaacatcagactccaagttcttcagcttttggactctcgcacttagaccagtggtttgccaggggctctcgggccttcggccacagactgaaggatacactgtcagcttccctacttttggggttttgggactgggactggtttccttcctcctcagcttgcagacagcctatcrtgggatttcaccttgtgatcgtgtgagtcaattctccttaataaactccccttcacatatacatctatcttattctgtccctctagagaaccctgactaatacatctagcattaaaaaaaaatgcaagtgataaactgggaaataatattcataatatatatgacagattaaatgtttgttattttttgttatattatttatgttactaccaaaatggcaaaaaaatgaataaaaataatacaaaattataaacagaagaagagacaatggacaaaggaaataaaatttttgaaagatggagaacaggtaaaaagatcaacagaactgaaaactcaagcatcaagta

SEQ ID NO: 428645 - DNA, 623 bp, Homo sapiens
tcttgctgtggaggggtggccaaagagtgtacgtggagatccagggtaactcagagaagtcacagaagccccctgagttcttagcacactgagaatctaaaataggtccaatatttccctcacgggtcacttcttccactgggtcacttcctctgctgactcccttcctggtgtttttccactgggaaagaatggatctaagagagtgacactgggggccacctgactagctgaataagaagactactatcactactgtgcccttctgccctgatctattcatgataagggctaaataagaataagcccttacatgtgcataggactttagagtgtacaaagtgcttcataaaactcccaaaacttattcatttaactttcactrtagacctctgaagtctttatttctgccacacatttagttccatccctagtttacacacatggaatcaaaatctcataaacttctaaatctgtgggaggcctaagagatcattgggatcaagccattcttccagtagatgaaggaaccaagacccataatagttaagtgattttactgaagccatacagctagtatgttatgtcagtcagatatttttgtgtttgtttctttgttcctt

SEQ ID NO: 428646 - DNA, 601 bp, Homo sapiens
tgccgcttgtgaataatgctgctgtgaacataggtgtacaagcatctgtagagttgctgctttcaattctgttgggtatacacctaggagtgaaattactgggtcatatggcaattctatttttgccttttttgaggaaccaccacattgttttccataatggctgcaccattttacatttccatcatcagtggacaagggtyccaacttctccacatactctccaacactttttggtctctatttatggataataggcatcctaataggtgtgaagtggtccaacgttgttttgatctgcatttccgtaatgattagtgatgctgagtatctttttatgtgctttttggaccttggcatatcttctttggagaaatgtctattcaagtactttgttcattttttaattggattgtttgttgttgctgttgctgaatcgtaggagttctttatatattttgcatattaattcattattagatatataatttgtaaatattttctccatttccatgaattgcctcttcactctgcctttctataaactggctttttattttcacagtgttggacctttaaaagatttcctctcttgtctaaa

SEQ ID NO: 428647 - DNA, 595 bp, Homo sapiens
ccttccaaccttacactatatattagatttcctcgaactctctattcagtagaatatgtttccccatgcccacccaattgtaactctttgtcctgtttgctgatgtatccaagtcttaagaaagggggctggtccatactaagcactcaatgacaatttgttgtctggctaaatgratctccctgtctctcccttctacgtctcaggtctgattatatctgacaagtgtaccaattaaggttatgtgccaaaaaattaagttctcccctcctgatcatgattgtactggttatcaagatgtttgattagaccttaaagccatctgcttgaatataaggggagaagtttttaagttctataaaattatttttgtgacctataatgccaaatagtatgtctatcttgcagatagacatactattggaaagtgactactttcccaacttctatcactcactcaaggcattttatattcttcaaccttgatgttacagcattaactttgccttcacccatgtttcatttctggtttctaaaaagcaatgcagtgtttctgtgccaagttccagctgtgcaattattgataagaatgcat

SEQ ID NO: 428648 - DNA, 565 bp, Homo sapiens
gttaccataaccccatgacctcgccaagggcccatatacatagtgcctcctttgctggaacttccctcaatgcctggggccagcctggccagggctgtgactcttaagggtctcacttcaggttctgcccctctggggacatactgacccttgttactacatgtctgatgaactggtctttctctgtattgtaygttaattttatcttcattatttgaaaaagaaaacctgttatcaataaatcttgcagtcattgtcctaagagcaataattgtgctgttcttatgtttcgagaacaagctagagcaagcagtgtttcatagcatttattatggttttccaaaattgctgagctttttctgtctctcctcagatgacaagcactggaaaggcagagacccttacctcctttgacttcacaccgtcagggcctttcatggtttctagtatacagtgggtgcttaataactaggtgttgcacaaataaatcccatttccacatccaaatttggtttgctgaaagcagcagccaagacagccacataggtagtaacgcgcacaaggg

SEQ ID NO: 428649 - DNA, 544 bp, Homo sapiens
acttaggaaaggggacattataatactaaacaattagagagcagaaacaaatctataggtgtatttagatggtgcacacatcttttgttacatattttctatatttcagttcaaaggatmtcagaatgtattacaatcattttgtaagaaacatttaatttctcattcaaatgtatagattgagaagcacaataacctaagatattatttaagcagaacatagtgctcacgaatttcattaaaaatcttttaataaagtaaaaggagaaaagcagtgagatagcacatgtgcacatgcaaaattttttattataagaattgtctaagtatatttccccctagtgcaaataccgaaattatcatagctgtggagaaacacatactgacacacggtattgtgacttttttccaaagatgatggcaatgatgaatgacacagcactgtaagtgcagataaggacatgacattagccctatcttaaggctgccagtattggatgggaaggcagctctgcatcctaaaggccaccagtccatacagaag

SEQ ID NO: 428650 - DNA, 621 bp, Homo sapiens
tataggtgtatttagatggtgcacacatcttttgttacatattttctatatttcagttcaaaggatatcagaatgtattacaatcattttgtaagaaacatttaatttctcattcaaatgtatagattgagaagcacaataacctaagatattatttaagcagaacatagtgctcacgaatttcattaaaaatcttttaataaagtaaaaggagaaaagcagtgagatagcacatgtgcacatgcaaaattttttattataagaattgtctaagtatatttycccctagtgcaaataccgaaattatcatagctgtggagaaacacatactgacacacggtattgtgacttttttccaaagatgatggcaatgatgaatgacacagcactgtaagtgcagataaggacatgacattagccctatcttaaggctgccagtattggatgggaaggcagctctgcatcctaaaggccaccagtccatacagaaggtgctgtaaaccatttccatccttccctagagatttgtgatgttcccctgggacaggctttgaaaaatcaccatggctgtgggtccttattaaccagccactcctcaaagagctgtctgcagcttcagaa

SEQ ID NO: 428651 - DNA, 409 bp, Homo sapiens
cattgaactggaaaaatacttttacctgctataattaagtccttctaatcaagtaaaagacatttctagttatrtgtaatttgactatgatttccccaatggttgcccaaaatggaatgggcttcattgggaggccttacattttccactcaggaaatgttcaagaaaaatctgatcggccatttgttgaggatatttcaaaaggcacccctactctgagtgggaagctggcctcagtgacaccctgaatgtgagaggtttccatgttgtttccaggattggttgctcaagactgtgtcaggcactgtctataagaagctggttactgttctctgacaatcctgttgttaattctcatggaacccaaagtggaaaggaccacagaaaattgtaaataattagtgccttt

SEQ ID NO: 428652 - DNA, 587 bp, Homo sapiens
ggtatgtattttctcacagtgctggaggccagaagtctgaagtcaaagtgtcagcagggctctctgagggctcgagggacrcgtacctccctgcctcttgccagctctgcaggttactggccctcgctggcgcttgcctggcctaagctgcatcgctccagtccctgcctccctcagcagagggctgccttctctgtgtgtctgtgcccaatctccttctcctttctcttaaaaagatacccgtcactggatggagctggaggctataattgtaagcgaattaacacaggaacagaaaaccaaataccacatgttctcacttataagtgggagctaaacatttaggacacatggacataaacatgggaacaacagacactgtggaccaccagacacgggagggagggaggtgtgggttgaaaaactacccatcgggtactatcatcactacctgagtgcaaaatacacatgtaataaacctgcacatggaccccctgtatctaacatataagttgaaattaaaaaaaaagattcaaaaaaagattagaaagaaaaaaaatgccaatcgctggattaaggtccatttt

SEQ ID NO: 428653 - DNA, 498 bp, Homo sapiens
aattgtcaaagaatattaaggaaaaaatacattccagaagagtgtatatggcatgccttatttgtatcctaaggagaaaccttttatatttatacatatcagtaatawctccagaaacatatataagaaacaattacaacagcattggctacctttggaaaagaaaattgcatagctgggggacaaggcgtgggagggagaattttcactaatacactttattgaatgtgttatttatttacaaaaataataaagtttaacttttcactattattacatattcctgtctgaaaggcatggaagtaccatgcctgatgcaaagatcttgtgagcaactgcagaaaatgacataattagggagcactttcccccacataccccaggtgtgtgcatggatacatctccgaaaatgtgaagacaaactcatcaggcctttggggagcttggcaaggtctgctgctttccagctttccactgtaactcttgtctttcctcagc

SEQ ID NO: 428654 - DNA, 405 bp, Homo sapiens
ctgaaaaactccactaaaaccttaatcaaccatggtataaggcctgaaatccatcaagtcattcattcagatttacaggagaatgtgaagcagctggtgtaatccagtttcagagcattctgtttctaagattccatgatttctatgcttagcraaaaataaggcagtatcctttggtacagttaacactgccaccacctgtcaatggctttacctctttcctcttgttacaaaggcatttttaaaatctaaagtaattagcaatatgcagtaatttacagttaaagggaaactaaagggcccctatttgtgtatatctttagtgaggttgcacatagcagagtatatacctggttatctaaagatatttcagtaaattattaataaggctttaaaatacatcag

SEQ ID NO: 428655 - DNA, 595 bp, Homo sapiens
taattgggaggggaacagggagcaggtagaggtatagaagagccaggaatagcagaatactggtaattattgaagattaataatgtttacatggtgacttgttgtagaattctgttcattttacttaagtttgaaattttctgtaataaaaatttgtaagaggttccaggggaataagcacagggagaaatgtktggatattgaacttggcattatatcatttgattgtcaactttaaaaataaaaggtaaaataaatataaagctttttaacttttttcccaaaaataattaagtaggggaaaggggggcattgaaaactggctgagagatttagagaactagaaataaaccacttgcctaaaacaaacgtaatagaaatagctaaattcaaaataattaatacggaattaattgcagcagttttcaaactgttaaatagcccagaaaaaaatggatagaggtttgtctcctaattgatttgaatccatagtttgggattttgtctacatctgattcttttaaaatgctttcttttttaaatttgctttccatatgaggattgatacaattgattctgaaaggcaggtaggttt
